United States Patent Application Publication US 2011/0183924 A1 - sequence listing, part 230

SEQ ID NO: 610747 - DNA, 441 bp, Homo sapiens
  misc_feature (318)..(318): n is a, c, g, or t
  misc_feature (352)..(352): n is a, c, g, or t
  misc_feature (359)..(359): n is a, c, g, or t
gtatcaatctattatgagagtttgacccatccaaggtaaaatgaatcaagttcattttacacacttaaacatgtaggtcttcctttgccatgattttattttgatgtgttttactgaattgcaattctaacaaattgactatagaagtggtggttgttatccaccaatagaatatacaggctacagaagaaggtccacgaattcatgaatgaaaatagacttgtatatgttttaaaaatctataataataaatgttctcatgaatgtattggtgattaaccttttatagatcagatgttcccatcagaatccaaacangagggagatgaagaataatctttggaatccgggnaactggngattattgatgttataattctctaaaaatataaatgtgagtgatgtgaaaatataaaatcagaggctttgacttggttttct

SEQ ID NO: 610748 - DNA, 386 bp, Homo sapiens
  misc_feature (140)..(140): n is a, c, g, or t
  misc_feature (157)..(157): n is a, c, g, or t
  misc_feature (304)..(304): n is a, c, g, or t
taattaaaaatttttttttgtgacagggtctcactgtgttgtctaggctggtctcgaacttctaagctaaagcagttgctcacctttgcctcccaaagtgctaggattataggcttgagccaccgcgcctggccaaaagncttgtgtaatttaaaantaattttagtagaatatcttttattaagcagcttttggtcaaaatgaaaatgaactaagcaggtctttggagatgcaggagctctgtgtggaagtcaagctagagtttcctggggcctgttggtttgtgggctgagtggagaatagngaggagcttccttgggtatctggtcatggaggcttctctgaggttagtcaaggcaccaggaagtggtggggagagtttccac

SEQ ID NO: 610749 - DNA, 199 bp, Homo sapiens
gaccaacggtctccagagggctgcaatgctgtgatgtctgacacatgtcctactgagacagcacagaccaccctagcaagcaacatttgtattagtctgaacaatatatacttatagaattcagtcaaagatacacaatctgaaacagctacatggggtggacacataacaagtagtagcaatagtatcagaatgcagc

SEQ ID NO: 610750 - DNA, 533 bp, Homo sapiens
aaccacattcccgaaacaaaattgttttgtgttctacacttcaatcataagtgagcttgtggggaaatttttggtataataggtggcgcttgaatagcattagcatggataggggatttgaaaacttttattttgtgtatgagctacataaaatgtccctgttatggctgcagtcctgtcgatgcataatgggattttaaaaaacttgtttggtttggtgccactttgaaaaaatttgtagcccccaagggatgttagggtttaagaaatgagttgatggatccaacaagccaaaatagcacaaattaaaagggaattttttgtttttcaaaattttaatacgtaatacgcaggcatctgatttgcatattcattaatggaccactgtttcttgcttgtacctctggttgactaaatttggggacagatttagtttggcttacacaaagggatcattaaggtaaatttatttctatgtctaatactggtactggataaacagtttgtaaagtattttttggaaacaaaacctt

SEQ ID NO: 610751 - DNA, 128 bp, Homo sapiens
ctctgacgatccctcagaccagcggacccccttcttcatgactgcctttgaacccgggtagctcaggcccatggactggagcctccagacttcttcttcttcttgttcttgggcacgcaccatctccc

SEQ ID NO: 610752 - DNA, 172 bp, Homo sapiens
agggagaaaaagcgtacagatcaatgagttacaaactcagtccccgagctgtctcctctgggactatgcagctctgggactacaatatccccaaatgctctcctctccacaccgctctaagtgagtgttccaaaatgcaactccaactcctctcctctctccgtgtttaata

SEQ ID NO: 610753 - DNA, 727 bp, Homo sapiens
caaggttcatcctagaagtggaaaaatgttgggtcccagatatctgttatgcagttttcccaaagggactttccttaaaaaaaaaaaaaaaaagagtaatgataggtcctttggtttaggaagcactggaatttgaacatgggacaacagatattttaggaatgaagtccctggtggattagtacttcttttctaatacatttgtatacattacattcagatcatcatgacttggatgacaagagacattatggcctcgagggtggctgcctcagctctggtttgccatgtaggaactgacagacagtactttatactcatttcctggttttcatcaacagaatgggagctcagaaagtccatttccctggaaaccactgggtcagcaaaggcggctgaaggtgcagcccatcaaagaagaaggggcatgggatggtggcatgtcaagcatggggagtaccttgtggcatcaacacccatcctccagtacactctaggctgagctcaggaggacccagaagccacagacacacccagccaagtggccttgataatatggcagccaaaaagggaactagatgtaatattgactttatttataaattggggcctctcctgatgtcgggtattccctttagaatgcccatgatgatataccttacctccaagcagtatggactggacctcgttataagatacctaccaatacccacagcccctgagatga

SEQ ID NO: 610754 - DNA, 1723 bp, Homo sapiens
  misc_feature (1031)..(1031): n is a, c, g, or t
  misc_feature (1530)..(1530): n is a, c, g, or t
tttaagggggaatgatggtatgtcttgggatatcctacagcgatggctatgtgaggagtactcctgaggcttggtgggtcagggtgttgaggctttggggtgaaggtgtttaagagtggggttatagcgaagtgggaggtaggaatgtgggtgctgggggtgtgaaaagaagtttatgagtgggggtgggtgggtgtggtgtgtaaactttatacataggtgttagagaacgcatagaatataatttatatatagaaggagaaatggtcgctccacaggggtatagaatctccggagatgagatctccctattgtgggcgcgaggggcgctcttcgggtattagatctatattttggcgcgcttatagatatataagcgatagatatagtgatatacgcgtgtgtgtgttagaacccattatgtgtgatgtgtgtgtgtgggtgtgtgtatatatatatgtgtgggatacatgatgtggacaaaacttgttgtgccgccgcgtgggggaaaataatgaggtgtataatgtgtgtggatatataacgggagagtaatacagagaggtgtataaagaagaatagtagaaccgttgttgtgagaaaacagaacaaaaaaacaacagacaaagaaggaggacactgtaatataaagggtagtatcaaaactctattattattgctaccctataatatatggaggggagtaattatgaagagcggtgtcgtacaactagtaaccgttggtggtcaacggtggtagttatgcagtcacaaaacacaaatgattggttggcaggagtcttggcgccgcttggtgtctgccaaccaccaccagtgatggtggtatatatacaaaagaagggtaatctaacaaccaactcaccgggccacccctcaatgttactaccactacagagaatctctactcgacgggtgaggtgactaatacgaggcgggtgctctcccaataaccaggagaagaacgatccgataaccgcattcatctaacgggcgggtcgtgtggccaccgnaaggaaaggaatattaaaataaggtggggggagcacccattcccggatactaaacaacggacagcaaaagcaacggtggctgtgccccccacatctacggaaccaaccactgcagcgcaggggcgagaggacacacacaacacatgtatggtgcggaaggctgacccgagacgaatgaaagtgaccaatagatgactctgacaaaagaatggcagccccataacggcagggagagaaaaaaataaaaaaaaaacccttcccccgaggacaagagagcaacaaccgtaggcatctagcggacggccaagcagcaaaaaaaaccactattacacacacacaaccggttgtgcgtgggcggcccaaaaatctaaaggaaggaggaggggagagcaggaaaaaaaatactaacacaaaccaaactattctatgatatagaaaacgggacgaatatatcagagagaattacgatgaacgaaacccccccccggtgggaaataanaaaacggacgacaagcgactatgagacaaaaagaggagtggtctatacccaacacgaccgcccggaggcgcaacaagccatcatacacagtcacaacccacaatcacgattgatgcatgggggcacgagcaagatccaagcgcctccccacgacgggcacgcgcgccgacgtagaacgagaccagcacaccaa

SEQ ID NO: 610755 - DNA, 385 bp, Homo sapiens
ttttatcctttcctttttccccttaaggttcccctgaaattttaaaaaaccggggtttttttaacggtggggtctttctgttttttggggtcccttttttaaaagtttaaaaaaatgttgcccagggggttccgtttttaacccatgacttggggatgaaagccaaccatttccggcggtggggtttaaaggggtttagtcccccctgtatggggaagtagtttcggggatgctgttgggaaatttaaaccggaaaagtaaatggtttaaaggcctgggttgttgctctgtatgggaaaaactaattttggttcgtcaggggcaaaaatactaatccctttttttccccctttcagcccaaaaaaaggttgggtttttaacccca

SEQ ID NO: 610756 - DNA, 216 bp, Homo sapiens
  misc_feature (131)..(131): n is a, c, g, or t
  misc_feature (147)..(147): n is a, c, g, or t
  misc_feature (155)..(155): n is a, c, g, or t
  misc_feature (191)..(191): n is a, c, g, or t
cgcatggtggacacgttcgaaggaccccgcctcttcagcggcaccatccgatttaacctggacctgagaggaagtgctcagatagcacactgtgggaggcctggaaatcgccagctgaagctggtggtaangcactgcaggaggctngatgcatnattacagaaggctgggagaatttagcagggcagagnagtgtctgctggccggccttcgtag

SEQ ID NO: 610757 - DNA, 1420 bp, Homo sapiens
gtgaaatcgaggctcggtgagacgcataagagaggcgtagtcgatgtaaatattgaatcggaaaggagagaagcaaggtagtactggacgacgctatggattagctggtaggtgtgcagatgtcgtaagtcgctaggtaggatgtgtgcgcttctggaatctagcaaaagtccgggtgctactcagttagcctgggtaagaatataactaatctcgtgacagtcacgacttgctatctggagttgtcgtgaaagaaaaggtcgacttgaacgcgaagacaattatacccctccatggaggcttagtttgatctcgcagggacctagggtcgacattccactggttgccttcctttgcaatccagacttgtctaccaactcgcgactggtggaatgggaatcacatgggtaggcctaggggacacctgggtgacaggagtgacaggaggagagagaaatgcgtcaagacgccaaaatggcacatggctggtggcggaaggatcacccaggacaaaagacgcggagaaatgatccgtgtgggcgccttccaaagaatcggggcttcttggggtccattgggacgagactgtggacagatgggactttcatagagttgaatttggccacatgggagagagaaaacttagtccatacgggaaggcttgatgttcggtttaaagaacaattaaacgaagacagtggaaacggttggttgtccaggaactcgtgtgatgcttgccaccaaccttagattggaaatgaaatggtgggtgtgtgcgtggcaggtcaacacaaggggacatgttgccccattccagtacggaggcaacaaggggcaagaaggaagtaatcggttataagtggcagccaaagaatacaaagagaagtacaaagcggtggtaaacacacaaggtacaaggctggggaccccagccgtaacccagggtaagtgccatgtaagaagcaaataccactgtacgcagggaatcaaataaccgcagcaacaaaggacagtctggcacacagggaggtaccgtgaaaacaacatgacgagggggaccaaaacaagggggcaaaaaagtaagaagaactaaagaacaatgggacgaaggccagataccgggggaaaatacacacgtggacccaacgaaacatggggggccaccaccgtgagaaaataagaagcacagaagaaggagaaacacaaaaaacaggagaagaagccgagagaccccgacaagaggagacgaaccaattatgatagggagcagatgagcccacaacagacgaagagcagactcaacagaagataaagcaaaaccaaagccagaagaagataatgtctgcacaaacaagcagccagcaacacgaagactgtgaaagaaactagagagacaacagacataaagagcagaaagatt

SEQ ID NO: 610758 - DNA, 949 bp, Homo sapiens
gaaaaagaatggaaaatcttgaagccttagaattaggtaattgtggccgggcatagtggctcacccttgtaatcccagcactttgggaggacaaggtgggtggatcacttgaggccaggagtttgagaccaacctggccaacacagtgaaactccatctctactaaaaatacaaaaaattagcccggcgtggtggtgcgcgcctgtagtcccagctactcaggaggctgaggcaggagaatctcttgaacccgggagacagaggttgcagtgagccgagatcgcgtcactgcactccagcctggcgacacagcgagactccgtctcaaaaacaaaacaaaacaaaaaaacacatgccgggctcggtggctcatgcctgtaatcccagcactttgggaggctaaggcaggtggatcacctgaggtcgggagttcgagaccagcctgaccaacatggagaaaccccgtctctactaaaaatacaaaattagctgggcgtggtggcgcatgcctgtaatcccagctacttgggaggctgaggcaggagaatcgcttgaacctgggaggcagaggttatggtgagctgagatggcaccattgcactctagcctgggcaacaagagcaaaactgcgtctcaaaaaaagagaagaaagaaaaagaaaatgggggccggacgcggtggctcacgcctgtaatcccagcaccttgggaggccgaggtgggcagatcacctgaggtcgggagttcgagaccagtctgaccaatatggagaaaccccatctctactaaaaatataaaattagccgggcgtggtggcacatgcctgtaatcccagctactcaggaggctgaggcagaagaatcgcttaaacctgggaggtggaggttgcagtgagccaagatcgtgccattgcactccaggctgggcaacaagagcgaaactcatctcat

SEQ ID NO: 610759 - DNA, 550 bp, Homo sapiens
  misc_feature (86)..(86): n is a, c, g, or t
  misc_feature (96)..(97): n is a, c, g, or t
  misc_feature (166)..(166): n is a, c, g, or t
ctagctaactacgtaggtgtcactcccggcgcttgctagcgcagatatctgtgcaccgcatgggagtaggagacatacgtagctcngcaggagttnnttttgtgttcttttgttgtttccatatatgtcacgaaagtgttttaatataacacactctcatatatantaaaacctctttttctgagaaatgtgtatatctgtgaaaacacatgtgaaatatctcactcttatacacaagtatatagcgcctcgtgcgctatttctataagagcactctatatctttacacattataaaaaactctgtgtttgatatatatagcgcacaaaatatcctccacagagaggtatatcacatcgtgtgttacacacagagcgctgagaagatttctgtgctttgtactcttttcctctttataatatataccgagagggttcacaaaagagctgggtctcaaaagagccttacacccttggttggggtggggagaaacgctgtacgtggtgtgttctcgaggtctatgtgcgccgtggcgatggtgggcgtgtgg

SEQ ID NO: 610760 - DNA, 125 bp, Homo sapiens
cggaaaccgtatatggagagagaggtgacagggatcaaagaagtatgtacagcaaagaggaactggaactcaagacaagaatgaggacaagaaaaaaagagaataagggctttgttattttctta

SEQ ID NO: 610761 - DNA, 420 bp, Homo sapiens
  misc_feature (57)..(57): n is a, c, g, or t
  misc_feature (243)..(243): n is a, c, g, or t
  misc_feature (377)..(377): n is a, c, g, or t
  misc_feature (397)..(397): n is a, c, g, or t
atcttttctttttgagacagtcttgctctgtcaccagccttggagtgcagtggccgntctcgcctcactgcaacttccgcctcccaggttcaagcaattctgcttcagcgtctccaacagctggaattacaggaacgcgccatcacgacccgctaatttttgtatttttagtagagacggggttttccgtatgttgcccaggttggtctcgaactcctgggcctgaagtgatctgcccacctncagcccccaaagtgctgggattacaggtgtgaatcactgcacccagccaaatgtttgtatttctttgacattattctttccccaactactggcttaaagtttgagtgctcaaataaattgacttttaaattttncacatatgggtatagggttnccgtgtgtttaaggagggacggt

SEQ ID NO: 610762 - DNA, 572 bp, Homo sapiens
atacatactgcgagaaccatcatgagcttctgggaggccgggctgcatacatgtgctgctgcgtgcagtccaaagaagttcttgttgcgcaggacggggaaagttacctgcagccaatacctaatattcatagtgggaaagggagagagagtggaaaagcgctttaatctttgagggccaggcattttctgtgacttggaaaagaggaatctctgcccagagccgaatccacatgtcagaacggtgtctgggatgtctgccctcaacaatgacatctccctcatataatgtttcaggaccgggcagaaaaccctccaaattgccagaaggacagactgtacctccaacagctgtggcaccaaaagtcttcttaggaggcacccaaagccctcccgagatgggggcgggccctcccgatgaggttgtaagggggccagcctccaggtgcagggacacctaactctggccaagcaactgtaataagcaatttacctatctcactccatccccacaacagccccttgtaggcagacactacagtcattccccttttataaaggaaggaacaggct

SEQ ID NO: 610763 - DNA, 243 bp, Homo sapiens
gtccgggagccttacccttgaggaccagtcaagctgacttcacactccccacacagaggatggaggtccttctgccaccgagagggctgctgaggatggagcctccagtcagctcccagcagcatgagggctctggtggagcatggacttcacctattgaaacctcggtgggagaatacgggctgtagtgggccgtggatgcctgacctgcctggaaccatgtcccctagtggaatcatgggt

SEQ ID NO: 610764 - DNA, 921 bp, Homo sapiens
ggaggaggagggggaggaagcggagctggacggagacctgctggagtgaggaggagctggaggaagcagaggaggaggaccggtcgtcgctgctgctgctgtcgccgcccgcggacacctgcctctcagacccatgcatgatcccagtgcgggtccctggggtctgtgctgctgccagcctgcatggttctgatgccctgggaggctggcggctgggctggcggctggggggggtgctgtacgtgaggggacgatgcccagtggcatgatggcggcgatgctgtcccacgcgctacggacccggacggtagtggaggcggcggatgtgacgacctgaatctggaggagcagtgcaggacctgaatcccggagaaagagcgtcaaacacacacacgagtgacgtcccggtgcacacaagcttccgagacaacgtcagcacgagatcgtacggccgccaagggttgtaacaattaaaagcactgagagccaagacaaaaacacggtatatcaacgactccttgtacgatgggtgaagagcccatataggaggtcacgtgcgaaggaaacagaagatgttgacatggccaaaagagagatcctactcagacgtgaagaagcagcttctccaatgattcgtgcaatctcggaaaacaaagattgggaccttgccctgggaggcattatcatgtaggtcctaaatcatgacccggtaaaaacacaacggcccaagataaggggtccttaatcgagtggaaaggaataagtgagatggagccaagaggacgcaatattgacaagaattaaaaaatgaagaacaagaagtaacatagaaagataggagaaataaataaggaagatgagtagaaagcgacaaggattggatggagatgagaacggaaaggaaaaaagagatgatatgca

SEQ ID NO: 610765 - DNA, 416 bp, Homo sapiens
ctagggtatatacccaaaggacatgcggtatctactatttgcacttgcttattcatttcagcattattcactacagctaagatatgaagacaacctaagtactcgctgacagatacatggagaaagaaaacgtggtgcatatccacaatggaatatcatttagccataaataaggcgatcctatcatttgcgacaacatggatcaccctggagcacattatgctaagtaaatgagacagagacaaaaagggaaatactgcatgatctcacttagatgtgaaatccacaaaagtcaaaatcatagaatcagagccgtacagtggttgccagggggtgtgggaaaggagatgttggtcacagggaacaaactttcagttatgtcagatgagtcagttctgtggacccagtgtatagca

SEQ ID NO: 610766 - DNA, 130 bp, Homo sapiens
ggatcccctcagggcgagctgcactcaggggcgagctccagcgtcagctcgtctggctgctgagccacgtatgggtgcacgcactggacctggggcagccagcagccggatgtgacaacaaactggcctc

SEQ ID NO: 610767 - DNA, 275 bp, Homo sapiens
  misc_feature (78)..(78): n is a, c, g, or t
accaggaaggagtaaaccaattgtcaggatctgaaagagtgaaaaggaaagtcactttggactgaaaaaagtaaaaangaatccagttaatcaggcttggagagacagatatagataaaaatcagccccaaagttaacaggggaccttgtattacctgaggtcatgcagtggctgtaaaatgagtgactactacttttctttccacaacacccccaggctccctttgttaaatccttctattactgagattactcaattgctaaactgccctggc

SEQ ID NO: 610768 - DNA, 666 bp, Homo sapiens
  misc_feature (8)..(8): n is a, c, g, or t
  misc_feature (67)..(67): n is a, c, g, or t
  misc_feature (183)..(183): n is a, c, g, or t
  misc_feature (205)..(205): n is a, c, g, or t
  misc_feature (216)..(216): n is a, c, g, or t
  misc_feature (245)..(245): n is a, c, g, or t
  misc_feature (255)..(255): n is a, c, g, or t
  misc_feature (267)..(267): n is a, c, g, or t
  misc_feature (278)..(278): n is a, c, g, or t
  misc_feature (285)..(285): n is a, c, g, or t
  misc_feature (309)..(309): n is a, c, g, or t
  misc_feature (324)..(324): n is a, c, g, or t
  misc_feature (326)..(326): n is a, c, g, or t
  misc_feature (331)..(331): n is a, c, g, or t
  misc_feature (336)..(336): n is a, c, g, or t
  misc_feature (491)..(492): n is a, c, g, or t
  misc_feature (497)..(497): n is a, c, g, or t
  misc_feature (499)..(499): n is a, c, g, or t
  misc_feature (503)..(503): n is a, c, g, or t
  misc_feature (505)..(506): n is a, c, g, or t
  misc_feature (508)..(509): n is a, c, g, or t
  misc_feature (514)..(514): n is a, c, g, or t
  misc_feature (537)..(537): n is a, c, g, or t
  misc_feature (567)..(567): n is a, c, g, or t
  misc_feature (663)..(663): n is a, c, g, or t
cgcctggngcccggcgccgcgccgccctgccgcccccgccagctgcgccgtgacgcgggcatgagcntgctccgcggcgccgctgagcaggcgctcctggcccgggcctcggcgcccagcaggcgcggggcgaaggagctgctagaacaatgctgaggcgggtgaggtgaggagcagcccctngcggcagccccgacagagtgtntggaacaggtnattggaggagccggagacccaggcacctnggcatccttnccctcgcctctnccaggccccgngcccctnaaaggtgggaaaaccatggggacnaatttcagtgacatngncaagnaaggntacgtgaagatgaagagcaggaagctcgggatctacaggagtgctggctggtgttccggaaatcctccagcaaggggccccagcgcctggagaagtatccagatgagaagtcggtgtgccttcggggctgccccaaggtgactgagatcagcaanntcaantntgtnanncnnctccncaaggagacaaagcggcaggcgntggccatcatattcactgatgactcggcangtaccttcacctgcgactcagagctagaggcagaggagtggtacaagacactatctgtggagtgtctggggtccgcctcaacgacatcagtgtggnaga

SEQ ID NO: 610769 - DNA, 638 bp, Homo sapiens
  misc_feature (155)..(155): n is a, c, g, or t
  misc_feature (177)..(177): n is a, c, g, or t
  misc_feature (188)..(188): n is a, c, g, or t
  misc_feature (217)..(217): n is a, c, g, or t
  misc_feature (227)..(227): n is a, c, g, or t
  misc_feature (239)..(239): n is a, c, g, or t
  misc_feature (250)..(250): n is a, c, g, or t
  misc_feature (257)..(257): n is a, c, g, or t
  misc_feature (281)..(281): n is a, c, g, or t
  misc_feature (296)..(296): n is a, c, g, or t
  misc_feature (298)..(298): n is a, c, g, or t
  misc_feature (303)..(303): n is a, c, g, or t
  misc_feature (308)..(308): n is a, c, g, or t
  misc_feature (463)..(464): n is a, c, g, or t
  misc_feature (469)..(469): n is a, c, g, or t
  misc_feature (471)..(471): n is a, c, g, or t
  misc_feature (475)..(475): n is a, c, g, or t
  misc_feature (477)..(478): n is a, c, g, or t
  misc_feature (480)..(481): n is a, c, g, or t
  misc_feature (486)..(486): n is a, c, g, or t
  misc_feature (509)..(509): n is a, c, g, or t
  misc_feature (539)..(539): n is a, c, g, or t
  misc_feature (635)..(635): n is a, c, g, or t
ggggaagaggaaggcaaaaagagagcgagacagcgagacggaacgagacagatgtcactgtctctaatctccctgtcatttttatttccagcaggcgcggggcgaaggagctgctagaacaatgctgaggcgggtgaggtgaggagcagcccctngcggcagccccgacagagtgtntggaacaggtnattggaggagccggagacccaggcacctnggcatccttnccctcgcctctnccaggccccgngcccctnaaaggtgggaaaaccatggggacnaatttcagtgacatngncaagnaaggntacgtgaagatgaagagcaggaagctcgggatctacaggagtgctggctggtgttccggaaatcctccagcaaggggccccagcgcctggagaagtatccagatgagaagtcggtgtgccttcggggctgccccaaggtgactgagatcagcaanntcaantntgtnanncnnctccncaaggagacaaagcggcaggcgntggccatcatattcactgatgactcggcangtaccttcacctgcgactcagagctagaggcagaggagtggtacaagacactatctgtggagtgtctggggtccgcctcaacgacatcagtgtggnaga

SEQ ID NO: 610770 - DNA, 247 bp, Homo sapiens
tcgagtcggccttacttccacgatcacagtcgcagaacatgtccatataatgctaaactgacacacctatagatcatgtgcttgatgcaccacttcctaccaacccccacatcctcaccacctgcttctttgtttgatcaccaatgctagtatggaggctgcaaaagacccaagctctggaagcccacactatttattggtgatcaaacaaagaagcaggtggtgaggatgtgggggttggtaggaa

SEQ ID NO: 610771 - DNA, 738 bp, Homo sapiens
agagaacattctggaagagagtgagcacctgcacaccgctgaacagacactggtgtacgtggctgcatcctaactctaggtggaacgaatggatgaagaatttaccaaaataatgcaaaatactgaccctacactcccaagagtacgtggagcacttgaaggatgaggcccaggtagtagtagccatacatacgagcgtgtagcagcgctacctaggaggagaagggcactaccgaggaggtctgccgcatactacctactgcgcatacctgcacacctactacaagtattgattacaaggcccatacagcgacagctgaccccgcctgagggctcctacaaagtacgtagagcaagaccaggcagaaaatgagggcgaggactcggactgtgtagatggagagacctagtagcaagtacatctagcgccaaggaccgcacagaccggatccgcacatgtagccatcctctgccacatctaccaccatgctctgaactcgcggctggtaaccaggcccgagaactcatgctacatgagccacttgcaggacaacatatcagcatgcagacccgccagtgcaggatcctttacaacgcaccatggtgcagctgcgcatttgtgccttccgcaaggctgacaaggacgcaacacaaagcccggtggaatccagtacgagtggcgaccagaggttctggccaggccgttgtaacactgaagaagacaggaaaaaaaggagc

SEQ ID NO: 610772 - DNA, 434 bp, Homo sapiens
tcgaagatggcggttggagtaacaggatcttatagccccacatacaggagggtagggtttgtccgtgagtgatgaagagtcagtaaagggatgttaaggcaggtagagggatacgtgtcagaaagactgcgtggttgtggggagatggtacagggcaaaggcagaaaagtgggaggctggtgggaggacaacgatccagatgaaaaacatatagtgtcctaggccagaagagagaaggtagagactggcagactctagaatccttggatgagctgggaaagaccagacttagaagctggggcacgagatccggtctagtacctactatggggtagaccaagtgggtcaccaattgcatgatactgtcagtcagctagacgctcatgggccagcatatccaatgctccccagtggtcccaagcgaacatcttcga

SEQ ID NO: 610773 - DNA, 870 bp, Homo sapiens
  misc_feature (366)..(366): n is a, c, g, or t
tggttgtgttctgctcactctgtggccttcgggcccgtatgggtttctagacatcgggtcggcgacccctgggttccaaggcggtggatatctcccttacagtgacggttccaccccccgctgggaagattattgtttggttgcgccaatcggcgctcttttaggcccttgcccaatttggcgcccctaaaagatggggaggaccccccccttgggagcgtcccgttgtccccctggctagtatttctggatatgcaatttgtgggacctccccctcactctgtgatgaatctgcgccagtcattcttccctcctgaaggccgtgcgtttagcccctgtcttgtccgcccgtagttgcccctgtcnccggtgctggccaccccccggggggttcctctgccgctgattgtgtctgtcaacgcgcgcgccctaatactccccgagcacccattctggcccccccactcctttagctcagctccctctgaggagggcccccccccccccgtgggcccgaggtgtcccgcggttgccccccctgggcccattgcccgccccggatggctttctagagggttggcccactgcctgtcctctaaccgcatccccccaagcgtttttctccccacatggctttttttctcacatttttttttccctcccttatctccctgattctgatgagataaccgctcacctcccccccccaccgcggtgtaaaacgacgaactcatctaccctcttgtgatacgactcactactagcgcgcccctcacccttctccccaacacagacaccgatccgcacgcccaacgagtacatgaccgaggacccgacaccattcttcgtatgcatacactaccccaagtc

SEQ ID NO: 610774 - DNA, 356 bp, Homo sapiens
  misc_feature (356)..(356): n is a, c, g, or t
atttcctgcttgagagtcctggaatgatctcatatgaagcagttactttatagaaggatgctaattatcttcaaaacccaacccaccaactctcctggcctccaggattataaatacaactcaatttcacagtatcccacaggaaaaaaaagtacaaaaattggatctggaggacattaaacaacaaaaggatgctaaaattttgctaagacatcagaatgcacctgcaaaatatggttgagataaaatctaaaagtactaaaacaagggggaaaaacatagcactggagtggactggattaatccatataattagtttatggcatattctgaattcaataaactaatgaacagan

SEQ ID NO: 610775 - DNA, 281 bp, Homo sapiens
gggagtggagagagaacgagaaatagtagctgagagtaaacaaataaatgggcaatatgagacgactcaaaagagtctcagggcaagagatgacactgcctcttagctcaatgattccacatgcctgagagggtgaagctgtggtatttacccagaccactcctgcttgtggaacctgacaatattgagaggaaacctgcaaacctgagtgttctcatcattctgggagaaattcatacactatgatggactggactaattatgaagtgattgggtttatt

SEQ ID NO: 610776 - DNA, 920 bp, Homo sapiens
gtctgcctgtgtgtaccaggcggggcgtggtctacgccgaggtgacagagacgctcaggctgtgtgctcgggatgaccgttgttagacagagcaccatgcggtggcaagaatcttgacatcaggctcattggggaaagtggagcgtcggatgaggtgcgagatcgatagtgactatgtgcgctggagtgatgactcttgcgaggttgaatggggatagtagtgctcaagatacgtgtgcctcacagtgcaggggggtaatgcgcgggataaagctccgtataggtgagggtgccattgtggtgtgcttctagtaaatccgatgatgagttgcgaggcgtggaaacggtgggaagctcatgactgtgcgcatcgtcaacgtgtgccttcgacgatcaagatagctgtgctcacagggggaagatgcctctgaaggtcctagtgtggagcgccattcatcaatagcggtccgcggggaggacatccattcgtcattgtggcgcgccgggactgtgtagaacgacaggcttgtggtgatttggtctcccctggggcacgggtgaaaccaagggccaactggttgttgtgcacgggcgccccgtgagctgccttgcggaacattagagcgctgctgatgctggaatggcgtgcatcatgatgccaagggtcgtcgactctatgcatggagaacagtgacttgtgtttgtgacagtcaaacgttgtttccagtggtggccataaactgtggcttggggtgccaaacaacaacggcgaagacaagacgttggcgcgggacaaacaaaaacaactggggggccccaagacaacgaacgccaaacgagccagtgggccaaacaacggacgggaacggcgggtgtacaagcaatccagcgagaagcgcacacatccacgaatccgcccc

SEQ ID NO: 610777 - DNA, 609 bp, Homo sapiens
taacccctccttagttttatgcgctcaaaaaccaaattaaaccccccccccatgtaaagggggggagggaaaaaaccaaaaacgccgaaaccgctgggaaaccaccattcttgcccccgcgcattaatcgccctgatggggtattttggttgttttcatctggtccctgttggctgggtgttgatgttagagggtggacgcctccgggggggcactgggccattcgagccccctgggagaatctcagaggggatgtggagaaggccattgtccggcctggtttctgggggacagtgggttgggtccccagaatgtcttgagggcggaggggggggtggggcagggctctccctcagggtgtcaggaggggtgcctcgggaggccacaggagggggctccgtggattggcctgaggttggccggaggggaaggggctaccgggtgtgtaaccagagggtctccactcaggcgggggcaggtgggccgccttccgcacacttgaggaaccctcccctctccctcggggaacttcttgcccgcccttacagaccctgccttgtctccaggaggtccgagctctggtggacccctttgggggccagggtgcta

SEQ ID NO: 610778 - DNA, 644 bp, Homo sapiens
ggacggcgtctgctggcggcgcggagacgcagagtcttgagcagcgcggaaggcaccatgttcctgactgcgctcctctggcgcgtgacgttttcccggccgtcagtggactcgggaagcaccggcggccgggttcgtgtcgttgcggcgcaagcagaaacatgatccggcgcctgggagatcgaggcggagaaccattacttgctgagcattgcccttattgaccccggggagcagggatgcggcggccaaccggccggtggttgcgccaagagggcgaggcctttcggagaaaaggtttttcttaggacccaatttctgtttggggtgccgcggtgccccaggtacgggtaaagcttgacacagtgggtcccataaggctgggttcccctaagggaaggatcccgtgggctcccattagaccattaagggtggctggagagattcttcaaccagaatttaaaaaacaacgggcccggggtgtggcaaacaccggaagcgcggtttcctgtggaaccaaaattcccaagaatgggcgagggttcctggagaggaccattcaacttggcattcttattaaagcgagggatgttcccaaaggcagagtctcgattatcaaattaacgcccggttctggggaaaga

SEQ ID NO: 610779 - DNA, 203 bp, Homo sapiens
tgactcctgagggtaaaacaacctccggggaacccgcctgcagctgcatggccggttccaggggagcaacatcacacctgccctgcggcatggcacagagctgcgctacctgggcacccatcaagatgcgggggctctgcagtactgcgtggtcaacatcctctctgtcacttccgccatcgtggtcatcacttcaggcatcg

SEQ ID NO: 610780 - DNA, 119 bp, Homo sapiens
ttcgacggaagcagtttcagtatcactgagcggatgacaggagtcttatccacaacatcattgaatggagagagagattttgtgtgttcacacgatgtcgtctgcctgcagcctctctt

SEQ ID NO: 610781 - DNA, 557 bp, Homo sapiens
  misc_feature (1)..(1): n is a, c, g, or t
  misc_feature (22)..(22): n is a, c, g, or t
  misc_feature (37)..(37): n is a, c, g, or t
  misc_feature (60)..(60): n is a, c, g, or t
  misc_feature (92)..(92): n is a, c, g, or t
nagccgggccgggaagccatcnggcttacaacggttntttggcagaaccttccaagccanaaaaagtgggggccaatattcacactcttaangaaagattttcaacccagatttcctatccaacctagctaaattccataagtgaaggagaaataaaatcctttacagacaaccagatactaagggattttgttaccaccagggctgccttacaagagctcctgaaggaaacactaaatatggaaaggaaaaactggtaccagccactgcaaaaacatacaaaattgtaaagaccatcgacactatgaagaaactgcatcaactaacaggcaaaataaccagctactgtcataataacaggatcaaattcacatgaaacaataattaaacttaaatgtaaatggactaaatgccccaattaaaagacacacactggtaaattggatagagtcaagacccattggtgtgctgtattcaggagacccatctcgtgtgcaaagacacacataggctcaaaacaaatggatggaggaatatttacaaagaaaatggaaagc

SEQ ID NO: 610782 - DNA, 949 bp, Homo sapiens
gttgtcaagactccgacacctgaaccagttgaggtggacgattcgcaaggtggtgcttatgcagtgcgacattgagtcggatggaggagggagtcgaacaccacctgacacttctgctgcatttggaggacaaacgtgataccggctcctgacgcctgtgaccttgatgccaacatgacgaaatatctcctcgacgattggcgcgcttagctggatgcagctggacttcatatagctgaggctgacagatccggttgattctctcctagctacaagaagacctctgaacaacgtgcaattgtgtggccagggacagtaccctcgactcagccgttgtcaccgtactcctcttagagctcactcgggccaggccctgatctgcgctgttggctgtccctggacgtgctgcagccctcctgtcccttccgcccatgtcagtattagcctgtgaagccccttccctcctttattattcagagagggctggtggggtgctcccgtggttctgagcatcatcgctttcccctcccgctctcttcctcccactctgcacgtttgtctacttgttttgcacatgactgtgggcctgggccttctcagcagccgccttctcagttgggggctagtcgctgatctgccggctcccggccagcctgtgtggccacggaggtccacgggcactaggggagccgaattctacaatcccgctggggcggccgtggcgggagagaacggtggtgctgcagctgggtaggccctgggcgccattcgattcggcctcagctgcctgctgtactcacacgtctactacttgctacccacacccaccaccctccaccccccacccccacaccacacccacaccacacccccccctactcacaccccactccccctctcctccccccctccccacacccactcccccccacccaccaccaccccccac

SEQ ID NO: 610783 - DNA, 159 bp, Homo sapiens
taatgttaatatttacatataactgtaaacttattaggcatgaatcatcagaggagaaagaaaatgctggacatgcttgatgtattatgtaaaagcatattaaacaagggtctcaaccctgactacaggtaagatcacttgggtactacaggtgctaca

SEQ ID NO: 610784 - DNA, 1106 bp, Homo sapiens
gcttttacctcgttgcactgctgcgagcaagatgggtcaccagcatgctgtacttggagccacccgcgaaaattcggccatgggttctcagctctatgtcagttgtcttgttcaaacctggcactggtctgatcctggaaatatggcctcaactactgtgccgccacgtgatttccgtcagataccgcgacaggatatcggtttcacttaagacaagaccctgagctgtcttccattggcactgcctactggaggtgaccacccatcatccatccatcatggaacatcctgagaccggatcgcgacagccaaagcatcatcaaaaagagcaaccaaggttcacatgggaaaccagtcagcactgcctatgtcccaccatacaagggtcacactgggtggaaacaacaccagcagcgtcatcgcaccaacaggggacccatcaaccacaggaagcagggcccagcatcccatgccccaaacatggggactcatgggcacagcagcaagaccaagcaaaggacacaaaaagacgaacaattcacatggacaccaagcagaggcgatcacatgggacacagataccccagggcacccacacacacgcgttcacaagcgaacgccagggcaacacatcacatggcaaggagatgacagacccagcaacacatacacaccatggagtgattcggacagcaattaaccccacagtggccaacgggtagtcctagaccaaagaggacaaccgtgcaacaaagcaccattcccatgggggaaacaagaagacaaaggcacaaaggtgagaccaacacgacacgtaacacaaaagagcgcaaagatgacccagcagggacaaaaaggtgcaaccacacggcgccacgcagcaccactacaacatcgaggagaggaccacaacccggggaggcctgtaacacgccaccaaccccaatcaccaaactgagtacaaaacaacaacaacaaccaagacacacaaaacaaccaaaaaacaaacacaaccaaacacatagttggcaccaccccgcgtccacacccaccacaacaacgctagaccgacaacacaacaaaaccaaacagcagccaccaccaag

SEQ ID NO: 610785 - DNA, 164 bp, Homo sapiens
gactagtctcgagttttttttcctttttttggcctttctcagattagtaaaaattctatagatgactcactcgatactaagacacagaggtttagcctgctttctcaccaaattcatgttaccagactgtgttctcttgcgtcctggactgcctgtgatgatgg

SEQ ID NO: 610786 - DNA, 104 bp, Homo sapiens
aatgggaggtgattccttggggttgtttgatcccgtttcgtgcaagaagggaggtggagtgctgctaggctgccataatgaagggcaagatgaagtgaaaggta

SEQ ID NO: 610787 - DNA, 183 bp, Homo sapiens
ttgactgtcctcaggagaaatgtgaacatgtgtgtatattgtgtaaattctttctcatgttgggagtgagaatgccgggaccccgtcaggttctgtcggtgtgctgtcagccatcccacagagtaatacagaacgtgcactaccagatgtcgtgtactagctgatatgtgggcaccgttgtta

SEQ ID NO: 610788 - DNA, 390 bp, Homo sapiens
ttatctcggttgcactccatgcacacatccatgacgtaagtatgcacatacccattcaaccttagaaaaccaaggctcaggacagtgaagagacttacccaaggtcacacatcttgtaaatctcacaagctgggtgagtgcctagttcgtcttactccaaaggcttgcttttagcacttcaatcttattgaacccgttagtagtgccagcgggcaaaacagacatacatacgtaagtaccacataatgtgctaaaactgctgtccaagcgattcatgaacaggattccagaggagaacaagcggctaagagtgggtagccacaactttcttctggagggaaggcacagggaggttgcacagggacggtggaagctgagctggacttacaa

SEQ ID NO: 610789 - DNA, 150 bp, Homo sapiens
gacaagctttacgatacagagagtagagcactcgagtcaagcgatcttcaactgtacacacagacgacctgtatcgaagtgtgcgctcctctgcctctcccttgtaggatggtgtgggtttcagtaagtgcagacgacagggatgggtac

SEQ ID NO: 610790 - DNA, 1808 bp, Homo sapiens
  misc_feature (603)..(603): n is a, c, g, or t
gactacctctctctgtgattgccatgtgcagattcaggggcccggccaagcccagttgctgcatggtgatcggcgcgagtcggcagtgtcggctgaccagtgagcagtgcttatcgaggctacttgtgcgtgcctgtgggccgtgggcctcttgagtcgcgcttgctctgaggccttgtagtcagattgcctggagttcgctcgtccggacagcgattgccggattgttgcttgcagtagtagtagcgcacggtctgacaacgctttgcaggcccgactctgggaccgcgtggaatagtttaatagactgcaatgtaatctctggaatgattaggtctaatcttcgtatctttcccatgcgcgtagtatatgtcgatattcagtggactcagtccgactatccaatctctctatgtgttcgagcgcgctccgatcctcttagaggcggaatagctgcgatgctgagagagtactcgagttcgctcgaagggcgcaagaaaaacgcaaacactcggcgaggcacagtgctctcaagcgtgcattgcattggcgtcgtccagaggcgaacttgatgcgtttgcgatagatccagtttcgtaaccnttaaacgacaaggggcgtgcggagtaggatacgggcgtccaatcgtgagagtcgcttggacaaaggtatgacttgcactaggaagggtaggccagatggtggaatctacatcgggcctacggaaggtgccccgttctgaaggtgggggcccaattcccacctctcttagtcgttactgaatgtgctccctccccaggttctggaatgggccccagggtagggccagcccacaggacaattggaatcgtacattagttgagccccattggcgcaatagccaaaaggggattctcgggggccaaaagaggctcccttcaatagaacctgggtgctggccctttgaaccgaaagcggtagcattagaggggacctctggcctttccgaagccctatcctgagttgcacagtgggccccttacatggcccttacaaaatggcccgcttggaccactgccaggtgggggccaggcttgggaaaggatcccgatacataagccgttggaccctttgtttgcccactttaaaagttataacccatcgcgtgtccaaagtgccagtgaagtttcgttgggcacttcgcgaactcttaagggtgggccttaaaaaacctctagagggaaccccgggtgtggcttgtgcaattcgttgtgcggcccttttgcccgtgtggctacacgatattcagggccaaacatgaaacccgacgcgatttaggataagtcccccgccggcggtataaaaggagagagccctcacgaaaggaggtgtgagcctgtgtgattgacccccggcctaaccatccctgtggagaaaaagggaggaacagtgagtattctcatacggcaagaaaatatttccgcccgatgagtcgaaaggagtgagtgttcccacatcgtagaagacacctcctcgttttgtgtgagcacccaaaactatgggagtctccccccgggagaggagggccaaccacaggaatccactcttatgagagcaggctagagaacacataagggccttataattttcgtggaagccaaaaaagtggacgatacaccgtctgatgcaaaacaaaaagaacacaacacctgattgcgtatttatgatgcgtgctgcatcatacggtataaatcagagtgtgagacagacagtataatgcacctctcaaagacagagaagagggaggtaccacagaagtgacactatag

SEQ ID NO: 610791 - DNA, 261 bp, Homo sapiens
gcaacccaccattgcaatgcaacacaaccattcattccaagcaatctgcaagtcatgtatttttccccttccatctgttttcccttcaatgtattgcaatcatcagggcaggcaaaaacacaacatggtcaacacttacaacacacacaaaccagcacccaacaatccagcgtggactggtttgtggcaagtcatcaacagcgtggcagtgtacgtcaggcgcagcggacgccacgcaccttcatcacacagcgatggcag

SEQ ID NO: 610792 - DNA, 321 bp, Homo sapiens
ccgccaagcgcttattttctggccgctctcagatgctcgccgtggcccgttgcttgttcaacgccggcctcctgccgccatccggcatgcgcgcggcgatgatatggtcagaacacccgtcgcgcgcggggatgcggttgtggcgccaacgccgggcacggcgcggccgatgagcgatccgatgggcctgtcgatgtttgaaccagacctcaaggcggccctcgcgacggcaatctgcctcggaaccgcgtttgtgctcggttgcctgatcggccttgaacgccaaatccgtcagcgtaacgctggcctgcggaccatggt

SEQ ID NO: 610793 - DNA, 336 bp, Homo sapiens
ttttttaaaaaaaaaaagggccctccccccccccccgggggggaaaaaaaaaaattttttttttccccaaaaaaaaaaaaaaaaaaaaaaaggggggggggggggaaaggaaaaaaaaaaaaaaaaaaaaaaaaaaaaaaaaaaaaaaaaaaaaaaaaaaaaaaagggggagaaaatttttttttttttttttaaaaaaaaaaattttttcacgtttcccccttaaaaagtttttgaagggggtccccctgggagtgaaaaaaaaacccccatttaaaaaagggggccccctccctggggggggggaaaaccccccaaaaaattttttttttttta

SEQ ID NO: 610794 - DNA, 689 bp, Homo sapiens
  misc_feature (35)..(35): n is a, c, g, or t
  misc_feature (101)..(101): n is a, c, g, or t
  misc_feature (109)..(109): n is a, c, g, or t
  misc_feature (160)..(160): n is a, c, g, or t
  misc_feature (165)..(165): n is a, c, g, or t
  misc_feature (185)..(185): n is a, c, g, or t
  misc_feature (238)..(238): n is a, c, g, or t
  misc_feature (278)..(278): n is a, c, g, or t
  misc_feature (284)..(284): n is a, c, g, or t
  misc_feature (291)..(291): n is a, c, g, or t
  misc_feature (297)..(298): n is a, c, g, or t
  misc_feature (317)..(317): n is a, c, g, or t
  misc_feature (327)..(327): n is a, c, g, or t
  misc_feature (332)..(332): n is a, c, g, or t
  misc_feature (358)..(358): n is a, c, g, or t
  misc_feature (363)..(363): n is a, c, g, or t
  misc_feature (536)..(536): n is a, c, g, or t
  misc_feature (578)..(578): n is a, c, g, or t
aaatccccacaactgtccaacagaatctatttcanactgattctacaggtaagaaaaataaaatttaggaggttaggtagttgataaatggaggagttggnaatttganctaaattggtctggattcaaagcccattcttcctttatatcaaagtttatnccatnaccatatagaaatggaaatnctcttctaattcttaaataggttatagttaccatgggagtattctcccccttnctctgactcaagccacatgctgaagatgatgtgttacggntaaggnttgaagncccagnngactgggctttctgggtcncaagcacagnttccnaactaagcaaagtttgcacactggcnactgnaggcctcaacaccttttgtcccctgtggatcattttcagagctatattctataagtttgaggacaattattatggctccttttatattagtatctactgtatgctcggcacttgataggttatctcttgtacttaaactaggatacagattgtctccaatttagaagtgaaanagctgaggcctggagatttcaagcaacatgcctaatacctcncagtggacaaaatggcaaagctgagatttcgcctcaagtgtgtctgactctaaagctcatgttcttgccatcttaccagctgcctcatcctcatctatagcctcatggtgg

SEQ ID NO: 610795 - DNA, 846 bp, Homo sapiens
caggtcctggtgcttgatggtcgatggccatctcctgtggccgcctggcggccatcgtggctagagagtgtactgctggtggcctggaaggtggtggtctgtacgctgtgaatgtgcatcaacatttctggcaatttctacagaaacaatgttgaatgtacctgtgctttcctccgtcgaatgctggatgaacgaccaacctcttcccggaggcccctaccacttccgtggcccccagcctgcatcttctgggctggacctgtgcgatggtatgctgccccacaaaaccaagcgatggccaggcctgctctgtgaccgtctcaatggttgttttgactgtgcatcccacctgccctacgacaatgaaaaatgctggattgtgtgtgttccttgctgccctcaagtgtctgttgctgtctgaagcctacaatgaaatgtttgcctatctgtgggctgccttggctcactgatggtttggcttggaatgtaccagtgcatgtgacatgccaccctgtgagtgagaagatgtgaactgagaaatgccaatgatccactacctggaagaagaaaacatgctcattgagtgctactgtgaaacatggcccgacgaaataaacggttggatgaacgaaaactttgacaagatacacaaggagtgtcctcaaggaccactggactccctgggtcttgaggccaataaaagacttgttaattccttaaaaaaagaaaactgagaaaaacacaagtcgcgggctcttttcgtgtggtcggacaggcggttccaacatgggcctggccactgtgtttctgcccgttttgcagggggaatggggccccaaaggggga

SEQ ID NO: 610796 - DNA, 204 bp, Homo sapiens
gtttcggttcttgtgttgaattccttcttgtgaaataactaagatattttcaggacggtatgccctggtagttgcaggagatattgctgtatatccacaggagatgctatacctacaggttgagttggagcaatagctctgctaattgggccaaatgctcctttaatatttgaacgaggtgagtgcttgagaatcatggcgaga

SEQ ID NO: 610797 - DNA, 435 bp, Homo sapiens
gaggagacctcgttgaagtgcggagcacgtgctcctgcgatgagaggaggagacttgtgtggaggctgcagggtgttccctccttggaacctgcccagttgttttctttccccttggagccaagatggttgaccagatatctatcctccttcagtgtacgaccagagtctttcatccgccagagcctgacgcccaaagcacctgctcactctgtgtccttgccagggtttctctcattggttcccactccttcctttcatttcaaaagttgatgccaatgacttagagttcctatgttgtagtgacatggcctttggggacagtacatgatttctcataatttgaattcatagtagatatagttaagggaacagcagtcaggttatgaatcttttcccatttttctttttaagtaaatttatttttttaattctg

SEQ ID NO: 610798 - DNA, 204 bp, Homo sapiens
aggatcccagaggaagaatgtgccatcggtagaggaagagtaaataacaagatcatgatgttaaggtagatctaaatgtgttaacaagaagagaaagtgggggaagtcctaagtggaaaagagaaagaggtaaattatgtagtatcatactactaacagtgtgtaaaaagatacatatgtttagcccaagcacattctgccaag

SEQ ID NO: 610799 - DNA, 152 bp, Homo sapiens
atggaaaaagttgtggattttctttctttccttttttttgggggggggtggggggttggttaaagttgtaatggacccaaatggaacttgtaacgtgggccccccatgataaaactaaattcagatatcattaaataaacttttgtccccta

SEQ ID NO: 610800 - DNA, 954 bp, Homo sapiens
gagcaactatggggcggaggcatgatcgttggtacaggcgctagggagccatgagtatgtagatgcaccgcagcattggtggagaagattgacatcgagttagattactgtttactgttggtcacagaagcagtcactgcaattctcgcggaacgggagtttgctacattgaggcatctcataatgcaaacgtttaccgatatcggggatcgatccacttaactgacgcattgcttgcctaccatcggatctcaacctcctgcaacaagtgcaaagagtagggatcctggtctatagaaccatgatctgccagaagtgtgtcagcataattccaaattcgtttcattgtggatctttgagaccgtacgatgtggagaacaagatatgcagatggaactcgaataataaccaagtcgcaccttgatcatatacaggaacatggatatgtgctatctcacatacgtatcctgtctgcaggtaaacaggaacgagggggtataacctttttgtgtgctccctggaggcagttctcttccattccgatctactgcgcctcgtatcatccgaacgactcgttcgattcatccatcctaaagcaagagccaaagccacgacggttcatggccgttgttacatcccagacagatgacctcaaggaggggatgcataggtagatcgtgctcaacactcgcatagtgcccctcctgaggctcagaggaagggcgagcccttgtatgacaatactgagattgagcagactatcatactatgagatcgctggagcgaatttgaatcccgttagcggcataagtagctcatttaggagttcgcccagtggtttctatggatacagcatttaggggggaagcccttcgaaatggttggaccgtaattaattggggctcccgcgggggggggatttcctctttggtccccatccccagggcccctttc

SEQ ID NO: 610801 - DNA, 163 bp, Homo sapiens
tcttgtttcctagcttcaccgaccaaatcgttagcagctccttccttcttcctagacttcctgtcaccaaaatcgcactggctcctggactcttttcctatcttcaacacgaactgcgtgcttgctcgcttgtctctctccatcctagctttcctcctgttgt

SEQ ID NO: 610802 - DNA, 164 bp, Homo sapiens
agccctttggtatgagcagtggaaggagagtgggcaccagcttttgaggctcgggcttcatgcccgccgtaggccagattctgtgctctcacctacccgtggcccgtgggagaaagcccagcgtcccagtgccctcatgggtaagtgggcacatcattatggag

SEQ ID NO: 610803 - DNA, 552 bp, Homo sapiens
ggttcgatctagaggatcccgatgctctctcgtgttagggaaatggtagaggcatccttcagtgtcaattgcagtgtggagggtggtgttggtagcgacgagagagagaattggataggggttatggactatgggatgaatagggaggacagcttgactgatggctcggaggttgtgaacgagtcggtctgagccatcagactttttaacagggaggataggggtgttatatggatagtgttttggtctaagaagattgcatgagcagagcttgtatacgatgggctgtcggcccttttggtgggttagagagatggggtatagaggaaggtagggaaatttggaagagtctttgaactgtattctgatgaagtcatggtgcgcagctacggaagggtaaatgcgcgaggcatggaattgtgtactggggaatggggtcaggtgccagaactagcggagaggcgctggagtgggctctggttgatgggggcacagatactggtgctcgaagctttgactttggctaacagtgtctcagcctagacttggggt

SEQ ID NO: 610804 - DNA, 118 bp, Homo sapiens
catttatgtggggagggtagtatattgagaataagccgcatgacgctagtgctgcggctggtacctgctctggcttctacgataagccccagggtatcccgaagccgcttcgctttgt

SEQ ID NO: 610805 - DNA, 509 bp, Homo sapiens
  misc_feature (3)..(3): n is a, c, g, or t
  misc_feature (69)..(69): n is a, c, g, or t
  misc_feature (103)..(103): n is a, c, g, or t
  misc_feature (170)..(170): n is a, c, g, or t
  misc_feature (184)..(186): n is a, c, g, or t
  misc_feature (189)..(190): n is a, c, g, or t
  misc_feature (197)..(197): n is a, c, g, or t
  misc_feature (203)..(204): n is a, c, g, or t
  misc_feature (209)..(209): n is a, c, g, or t
  misc_feature (215)..(215): n is a, c, g, or t
  misc_feature (253)..(253): n is a, c, g, or t
  misc_feature (274)..(274): n is a, c, g, or t
  misc_feature (280)..(280): n is a, c, g, or t
  misc_feature (298)..(298): n is a, c, g, or t
  misc_feature (306)..(306): n is a, c, g, or t
  misc_feature (386)..(386): n is a, c, g, or t
  misc_feature (392)..(392): n is a, c, g, or t
  misc_feature (401)..(401): n is a, c, g, or t
  misc_feature (411)..(411): n is a, c, g, or t
  misc_feature (413)..(414): n is a, c, g, or t
  misc_feature (455)..(455): n is a, c, g, or t
atnatatggtttcttgggggatagattcaagaggagttgagaatgttttattcatttacaatgtccctntcctgtgaagggctggacagccagatttagcgcncaagccaaaatcatcccctatttaaaaaaaaaaaaaaaaaaaagtcaccagcaagtagtcccggagngcggaggcgggacnnnaanncacaaanaaatcnncaatnattccnaattgtttttcaatacagaaccctgggaaggggttccncccactctcatgaggaaggcncaactnccaggtagtgttggggangggtatgngggcctatgccggccggcctcttatcccccagatgccaagatgatgtctaccggcagcccccccaaacttctggctgtcncccgcnttgtcactntttccaaaancnncccccgggagccccccaggctgtcatgacccccccggaacncaccagccaggggccacgtgtgggtgttcttgttatccggcactttgtctgacc

SEQ ID NO: 610806 - DNA, 883 bp, Homo sapiens
  misc_feature (883)..(883): n is a, c, g, or t
ggaagaagacggcaaaagatgaggaggaggatcagactcttgtgaacctgggacacgtatacctcggatctgcgattttcaagtgagcaaagacctgttatggagggcagtcacgttttctcagagaagttctcccagcctttgtgtctggggcaagggagtacttacggagtgacaaagggaaagagtctgctttgaggcaagatggtaacccagaatctcccaatgatatagaacggctgcacagaggtctctctccgttcgagttggggtggtctgttgcatgttttcccgtccagcagccttggtgaagatgaacttcgtcttacggtttacgagtggacgaggatcgtcaaggcgacgtacaagatggcatcaattacgacggaatctggggaccagactatttgggggagaaatgatggttaagtagggcttgcgtttggctaatcaatggaagactagaatgacagtaagaaagcatttcctttctcgcaagcaaactcgagacgtaaacgtaccttaggagtggatagcgtcactcctctgggcagtccacgcgacaaggaaggttccacatgggccacgaacctggggccccattgctttaacctcgcaatgatcccttgcgttgtcacatacacattggcgtcagtccacgttaggaacacttttgggataacttttcccgcgttccaacgcaaaaggagcaaggggaagacacgcataatgccttttgcccctaaccccaatccctaaggaaaaggaagatatggggatcggtttgcaagttatccattgacgtgtgttgacccgttggatacgaagggtaaggcgctgggtaaccaggcaaagctgggcaaagatttcgcgccattcggcn

SEQ ID NO: 610807 - DNA, 338 bp, Homo sapiens
tgagttgtgatcggtctctttacatatcccacagttttggaggtttgttcatttctaaaattctttgttctttcgtctgcctgagcttgactttgcaagaaccagtctttgggctctgatttctttcctcagcttggtttattctgctgttaatacttctgattgtgttatgaaatttttatagctgagttattcagctctatcagctcagtttggttctctcttaaggtggctatttcatctttcatctcttcaattgttttactggattcctttgattccctggaatgggtttctactttctcctgaatctcaataatcttgattgtcatccagat

SEQ ID NO: 610808 - DNA, 222 bp, Homo sapiens
tctcaaatgcgccagaacttgataggacatgtcaacagtattacaaagacagtagatgcctctctagtatatcgtgagctctggattaaagcttcccagacacccttagcttccttatctttttcctgtcttatgctatttagcacgcatttcggatttactgtctaggaatggcttcttgtcattgtattctattcaacattcttaattgtgtctttctct

SEQ ID NO: 610809 - DNA, 865 bp, Homo sapiens
tggcttctgacttaacccgttacaacttctttttactctatgtattactccaatattgtattcgtgtctgcttgaatagtgttaatcgtagctgatattatatagccatacctattaatcctaaagtttccctatctctaacaaacccagctctatctcctttgtttgctctctcatatatagtgcctcttctccgtcatttatgctgggggcatttatatctctacttttgatctagctcttctagtgataattatatgtgtatgttcttttctctatgttcagttttgtgtcttgtagtcctatttgtgtactcctagcgtgcgctagagctattagcacgcacatgatcctctctcgcatatttttagtgtaaggtgctatcattgggcactctctcttagctatggctagtcatcccccgtcttgtattcctcctatgtaagtctccaactccttatatagcacatatccgtatataactcgcattcatggatgtagtcaatgtcagcgctgatgctcagcacagtaagtgcgtaatgagaataagcaagctcgagaatccaatatgaattcaatgcacgtgcttcattagcaagtatttagctgggtctctatgtttacaccgtcactagcaagcctcagatgtagcttcgagtctcacccttcaccagtttgccgacggcatctacggctgcaacattgtttatgtagccacaggcttgcgcatcggacgttgcacgtcacttattggctcaactttcgcatcactatctgcttcatccgccatactaatagtctcaccgtttacagtccaaacatcactttggcttcgaagccgcataacctgatagctgacagttta

SEQ ID NO: 610810 - DNA, 582 bp, Homo sapiens
gcacgagctcctgacacggagtccgatacatcccattgacccagcgactcctttttgcccaagcctggactttctgcatcagtcacgttgaccagatgactttgcctgtgaccaaacctcatgcatccacgttcgcatcaggggaggaataaaaagacattggcgccgcttctgcgttcagttattcctacaggcgtcataggaatcatgacactggctgaacgttaccagcaccccgagaacacatttcgatagaatcagagtagaggacatggctgtcttctaaaaagccacgacatgaaaatgacaatccctaacgtctccttcctggcgctgcttccacctaacgcagactcctgcctccgcctttgtttcatagtgaggattttattatgcacggcgccctgcctctaaatacctaccctagatgatttcatcctgccccttactttttaacatatacctgtggtctttggaagggccaaatttctccctacactctgccgcacggtccgtcttcatgggaagtcatttaattccttacactttccttgtacccacagtccctaaaaccatggtaca

SEQ ID NO: 610811 - DNA, 393 bp, Homo sapiens
  misc_feature (27)..(27): n is a, c, g, or t
  misc_feature (34)..(34): n is a, c, g, or t
  misc_feature (72)..(72): n is a, c, g, or t
  misc_feature (105)..(105): n is a, c, g, or t
  misc_feature (125)..(125): n is a, c, g, or t
  misc_feature (199)..(199): n is a, c, g, or t
  misc_feature (223)..(223): n is a, c, g, or t
  misc_feature (284)..(284): n is a, c, g, or t
tgcaaagtgaacaggtatcaattcctnacctccntcctccagtcccggttaattccccacatgaaaataccnacatgttggtggaaaagtgtaatgttcaagaanttggggccggccgtggtgtntcatgcctgtaatcccagcactttgtggggctgaggcagatggatcgcctgaggtcaggagttcaagattagtntggccaacatggtgaaaccttgtntttactaagaatacaaaaaaattagccaggcttggtggcaggcccctgtaatcccagctantagggaggctgaggtgggagaattgcttgaacccaggaagcagaggctgcagtgagctgaaatcgcaccactgcactccagcctgggcgacaaagcaagaccctgtctc

SEQ ID NO: 610812 - DNA, 202 bp, Homo sapiens
aaatgtgtcctttttttagtgtaagacatcaaggtcaggcgcagtggctcacacctgtaatcccagcacttttgaaggctggggtggcaagactgcttgagaccaggagttggagaccagcctgggaaacatggagaaaccccaactctacagaaaatacaaaaattagctgggtgtggcagaacatgacttgtagtcccag

SEQ ID NO: 610813 - DNA, 765 bp, Homo sapiens
agcgggtggttggtgtgcgggtttcggttggaggactcgttgtggtgaggatggcctgtcgcttgctatgagacgtgcatcgccgagacgatgactggagcggagataatcgcatgcaccagacctgactggacgtgcaagagacgtgcaggtctgagaacgaacaggctgtcaggatgaggcgagaagatgagtgcctgagtggcatgactaaacgtccctccgactgggaacatgagcctggtttccatgctggacatcaatgggtgtggtattctattggctgtttctgagttagtctactagtctagagtccactctgttctgtcctgaccgtctcctgtatttgctctaatgatattcttgtgcattgagtgttgacatagccttggttcccaattcttatgcgctctatgaacttttaggctccatagtagatatgagaggcactgaacaacagctaaagattcccattgtaagatattgcaagcaaatctagtaaaaactcgaacgcaggacgctgtcgaggatagtgtggaacaccggcctcttcacactatcagtgagagaaacaaccttaggattgtggcttccaggaccgatgactcagttgcccttgctgcggattgcgttgggtagggacatacaaatgtgcatcagagtctgcttctcatccgtacctgactagtgaccttccgttactattgcttccatggacttataacagagatggaagtcattttttgaagtaccagtttggcaatg

SEQ ID NO: 610814 - DNA, 135 bp, Homo sapiens
  misc_feature (71)..(71): n is a, c, g, or t
ctctatgcttgttttgtttagttctgtgtataattgaatgttgtggagattacccctccctgtgccggctngtcctctcccttttcccctgtcacggctactcatggaagcaggaccagtaagggaccttcgatt

SEQ ID NO: 610815 - DNA, 274 bp, Homo sapiens
agtggaaactgcctcctggcgtgcagacccacgaagactcgctcacggtacggttgcacagaacacagcataggaagaccagtaccaccctgggttggctggacatagtccttgtacagggtcaccgaaagtaaagagagccacgacagccacggtcaccagcagctgagtcagccgcgatggtgtagacctttctgacaaagactcgacgatttatctggtcatcccagctgaaagtggtgaagagctcatggactccgggtcctccggccta

SEQ ID NO: 610816 - DNA, 167 bp, Homo sapiens
gcctggttctggttctactacacaatgcacaaccacttacgggtatccctctctgtcaatttaacaaaggcctacgattctcctagtacttgtgtcatcaaccttaataaggttgatttggtgtgcagcacaaagggcctccaccaacttgacatacataggctcat

SEQ ID NO: 610817 - DNA, 144 bp, Homo sapiens
cacagaccgacgagtaaccctattgagctataactattattaatgcaaacagctacctaacaaacccacaggtccttaattaaggaacaagtgattatgctacctttgcacggccgcggtaccctaatcgtgcaacacgaataa

SEQ ID NO: 610818 - DNA, 2264 bp, Homo sapiens
gtctccatttcctgtctgcatctgcatggttttgtttccttaggctcttcatggtttgaggaatatggccattagcagctctgggaccacagccctttagctgcagaggtctttcccagttgtgcagtaaaaaatttcaaggaacaattctgagctgtttcagccaaatatctatacctgcattagtcactgttctgcagatagagtgtgatgattagccagaagtggagcaaggtgctgtgattgggaactgcaccagaatcacaagatctgaatagaggagagcaattccccaaatcatacttgagagatcactggaagattctaacaggcatttggcagataaaaataacatgcctactgtgcttttctatttagatttatattttctatagtttattcttaacctactagtactgctaactaaaaatcgagtgtttcttgtgttaaaaaaacatgcttttacaaaaaaaaattaaattttaatacctttgcaactgaaaggagatataaatgaggatattcagaatttcagcattaatgtttaagtttcagaatacacaaacttgtttttattggttaaagaatgtttttcacttcattgcaaacttaaccaaaaagaagagtagttgttttactttagatgttcatcatatattgttcaaacagcttctttttcaaaagaaagtctatgtcaggtaaaattctatttgttgctttgcaagctgtacctctagatgatagatttcatgtatcttagaattagatttctgtgttcttagattcctgtgttcctagcaacttgtagggaataccttaaaaagtatctacttgggggtggagccaagatggccgaataggaacatctccagtctacagctcccagcgtgagcgacacagaagacgggcgatttctgcatttccaactgaggtaccggattcatctcactggggagtgccggacagtgggtgcaggacagtgggtgcaacgcaccatgcgtgagccgaagcagggtgaggcatcgcctcacctgggaagcgcaaggggtcagggaattccctttcctagtcaaagaaaggggtgacagacggcacctggaaaatcgggtcactcccaccctaaaactgcacttttccaacgggcttaatggcacaccaggagattatatcctgcacctggcttggaggatcctacgcccatggagcctcactcattgctagcccagcagtctgagatcaaactgcaaggcagcagcgaggctgggggaggggcgcccaccattgcccaggcttgagtaggtaaacaaagcagcccggaaactcgaactgggtggagcccaccgcagctcaaggaggcctgcctgcctctgtaggctccacctctgggggcagggcacagacaaacaaaaggcagcagaaacccctgcagacttaaatgtccctgtctgacagctttgaagagagtagtggttctcccagcacgcagcttgagatccgagaacgggcagactgcctcctcaagtgggtccctgacccccgagtagcctaactgggaggcaccccccagtaggggcgcactgacacttcacacggctgggtactcctctgagacaaaacctccagaagaacgattagacagcagcatttgcggttcaccaatatccgctgttctgcagccactgctgcctgatacccagacaaacagggtctggagtggacctccagcaaactccaacaggcctgcagctgagggtcctgactgttagaaggaaaactaacaaacagaaaggacatccacaccaaaaacccatctgtacgtcaccatcatcaaagaccaaaggtagataaaaccaccaagatggggaaaaaccaaagcagaaaaaccagaaactctaaaaatcaaagcgcctctcctcctccaaaggaacgcagctcctcaccagcaacagaacaaagctggacggagaatggccttgatgagttgagagaagaaggcctcagaagatcaaactattccgagctaaaggaggaggtttgaaccgatggcaaagaagttaaaaaccttgaaaaaaaattagacaaatggctaactagaataaccaatgcagagaagtccttaaaagagctgatggagctgaaaaccacggcacgagaactatgtgacgaatgcacaagcctcagtagccaatgcgatcaactggaagaaagagtatcagcgatggaagccaaagtgaatgaaatgaagcgagaagagaagtttagag

SEQ ID NO: 610819 - DNA, 237 bp, Homo sapiens
cacgggtcagcatggcaccagctctcccacagtgccaccatgcagcatgggccatcatcaccagtcactcacctgccagtcacaaggcatctgcctgtctccctgcgtcggggggcccaaccccgggcttcccatgcaggcccatgtggggcactgtgctgggcgactctcggtctcccactccgtgcaaccatctgccaccacacttgtcgcagcattcgggggctatcctctcag

SEQ ID NO: 610820 - DNA, 301 bp, Homo sapiens
ctggagacccaggggggcccatggtggagatcctttgtaaggaatggatcatggtttgggtttcccaaactcccctagtccagtgaatgagagaaatctgcctggaaattgtttcagacccctggccctttatgctttgggattgtgaaaccttgccttttttgtaccccccaaatgaaacctgtttagtaaagggggtctattttgggggttttgaaacttaggggcaatgtcccctggaaaaagctaaaaaaatgtatatgttcaatgcccttttaaaataaaattttttatttttgta

SEQ ID NO: 610821 - DNA, 949 bp, Homo sapiens
  misc_feature (289)..(289): n is a, c, g, or t
tgtaggatagcacagggaggcattatttgactcgtcccgcatcatgtgttgttcacgaggctccggcccattactcggttggtttggcaccccttgaccccggccgtctcggaaacccgcgctgtgttcagtgtctcgccgcatagcgatatgtcaaacacctcgggacactattgaatctccctccaataaagagttaacaaccccttctctcgtgggtatactagtgggaccgatgaattggaaattgcgtgtgtgtggctattgtaagtacccgttggaggctacncaccccgaagtaaatgggaatgggtcgctcccacttgggaccggaaaattttgtagcgtgtaacaaacctttttaccgcgaattattgggttttttaaaaaccccctctttctgcctccccaacttcacacctcactgtttatgaaccccgccttagtgtaaatgcacgcgcttactttcccgggaaactcaccccgcggatatagtatgaaaaaaggttgtgttaaaagaaatacttgggtaccacaaccacgaggaatttaatttttttacttgaggaaaattatatcttctcgggactataggggaaaacccccgacagacccctgggggattcaccaccacatgaagatttcgcccaaagagggccctctctcccggatagttatggtagagttgaaccccaataagaaagaattggcccccccacttggccttccaccgggatcttcttgttttgccgataaaaaatacgctggatatattggagttaatgtagatcatgcgccaccacatcacggaattacctctcctaaggacctcctctgtgtggggtgtgagccgtgtggtggcgcttgggtttctccctgtttggaaattttcccctaatttttcccaacccattttttttttccccaaaaccccaaaaaccccaaaaaa

SEQ ID NO: 610822 - DNA, 375 bp, Homo sapiens
atcaccgatgatgcgcctgcacgggccggcgtcattacctggagaaagctgcagcccagagaaaggcgaggctgggtgagaactcggccttccttcagttcaactggaaggcggacgtggtggagtcctggatcggtgaaaaggagaacagcttgaagacagatgattatggccgagacctgtcttctgtgcggacgctcctcaccaaacaggaaacttttgacgctgggctgcaggccttccagcaggaaggcattgccaacatcactgccctcaaagatcagcttctcgccgccaaacacgttcagtccaaggcacatcgaggcccgcacgcctccctcatgaagaggtggagccagcttctggccaactcag

SEQ ID NO: 610823 - DNA, 874 bp, Homo sapiens
aacctatttcaagtctgagttagaaaatttacatttcccaagtatcgcatcatggatggtattaagaagatgattgttgagagaaagagatatttctcatttgatatagattggctctgtctcactgtgtgaataaaagaagatatttcccataaattggggaagttgcccatgtctcacgaaatgtgtatttcagtgacaatatcgtgggtctttttagagagtatatcccaatagattgtcctagtatttttaggttatgcaactaataaaagctaccttacattaattaattacatgttttctacacatggtaactacaggatatgctactgatttaggaggtctaaagttcatggtatgctcttgattccaacgaagttgtgatttgctctttgtatttagcttacttactatgggtttacatgtttgatttctcaaaattgagactgaataacttggctctgcgaagaccactttgataggcgttagggaagacagtatgatccgttcgtttcagactgaagttgactgagagatccatcaagttgaacaatctgttgtactctacaaattttggccacttgttgcccacgccttgtgacctcattcttgctgaattcaacgttgacatgtttctcctcgccgatggcctgagggggaccatccggtttgcggaggtaagcctgcgtttccgttgggacccagacctattacgtggctcgctcggaaggcttcggattgttagggtgcggccctagagggttggtcgcgagcgggtaaacacctttttggaccctccgggccggaaattgtcaccacaggttttcccccacacgcggacaatcttgctctatcagcccagcgaatctct

SEQ ID NO: 610824 - DNA, 327 bp, Homo sapiens
cacgagaggaacacaagagcgtaatgccagaagcagggggactgtgaaaagaaatcccaggatagatgcttagacttggtccatatgcctcgtatatagccaaaaacttcattacaatgacaaataacactgtatatatttatcatgtccagcatatagttctgaaatatgtatacattatggactagctaaattgagcgaattaacatatgcattacctcacatactttttaaaagtttctgatgagaacaaatctactctcatcaattttcaagaatacaatacattgttattaactgcagacaccatatctcacagtagacctc

SEQ ID NO: 610825 - DNA, 155 bp, Homo sapiens
acgagcaaggtgtggcccgtgggcgccgaggtcagctccactggctcgtccagtgcagcctgccgttgcaggcttacgatcttgacaggctggccacgggactccacgtacactgtgtatggtagggcttgccctcggagatccgccagcacggg

SEQ ID NO: 610826 - DNA, 137 bp, Homo sapiens
gactctcagcaggcatcccccaaaatcatcatcaaacatcgggttccaagggggtcaaaaattttcaattcaaccatcatctccaatcatcatttcaacacatcaaccaacaggcatcatatttcaagcccaacatt

SEQ ID NO: 610827 - DNA, 473 bp, Homo sapiens
tgtctcacggtcgcccaggctgagtgcaggggtatgatatcttaatccaccttcttaatccgactcactgcaacctccgcctcctggggttcaagcaatcctccggcctcagccttccgggtacctgagattacaggtgcacaccaccatgcccagctaattttggtatttttagtagagataggctttcatctggtgggccaggctggtcttgaactcccggcctcaagtgatcctccctcttcagcctcctaaagtgctgggattacagtcatgagccaccgcactcagcaaaagctccttccttttatggctaagtagtatttccctgtaggtctagatctcaattggatggacatatgggtggtttccagttttgggcaattatgaatcaagctacggttggtatttgcatacaggtcagtcagtggacgtatattttcatttctctagtttgagagcccgtctccaga

SEQ ID NO: 610828 - DNA, 381 bp, Homo sapiens
attcaacatccctttgtaacttaaaaccctcaaaaaaaaaaaactgggtatagaagggacatacctcaacataataaaagccctatatgacagacccacaactagtatcatactgaatgggaagtaactgaaatccttttctctaagatctggaacaagacaaggatgccaactttcatcactatgttattctatcagcactatgttattcaacacagtccttgaaagtcctagctaaagcaatcagacaagagaaagaaataaaggacatccaaatcacaaaggagaaagtcaaattatcctcgtttgtggatgatatgaacttatatttgggaaaagcctgaagactccaccaaaaaatgattaggaactgattaaaca

SEQ ID NO: 610829 - DNA, 286 bp, Homo sapiens
  misc_feature (197)..(197): n is a, c, g, or t
acattcctgaagcgcagctctggcgctcagttggactctgtgtcccccatcaacccagggcgaccccccgtccattcaggccccactctggcccccgtagagcatctggagtgcgcgcttgggttaggccagggtttcggtttcttttttgagaatcgggggggcggggcctccctttgcggcccaggatgaagggngtagattatttggggtcacggcaggttccccctccaagattcaccccgttttccgggctaagcttcaagaggggctggaactaccggcc

SEQ ID NO: 610830 - DNA, 210 bp, Homo sapiens
cctcatcctcccgagtaggtgggattacaggcatgcgcctccaggactgtctaacagtgcatatccagcataaatgcggtttcgccatgaagatcagactgcctggtgtctccagcatgtggtactccgcccaacagcggcatgttaaaggtatctgttagctagtgcgtcccaccgcaatgcactgagcgcagtcgcttcatgccttct

SEQ ID NO: 610831 - DNA, 1006 bp, Homo sapiens
gggtgtggtaggagcgaggacatctgcggcggcgggcgagggagctccgtgccgctggtcctatgtgtgtgctaggaggcctcgtgggtcctgagaacctgggtcggattctcgacatgtacagccgacattgcgttggccggccgatcgtttcggacgcatgtctgatgatggcggattcgtgatggtcattactgtatctatccagagcgagtggaaagcgatctcgagtatgaatataagcgctccgtggtttgcttgccgaagctgggggggcgaggcgacgacagggaggtttcgaggaagcgccaaatcccggggcgccggtttctttaggaaattcagacccagtgtgaggaaccggaactctcgcccttagaaaagcaaaatgcttgccgggtgggcccgagacaattttcgcgaaggtaaccggcagggcccgcttgggggtatggggagcggcacacacccatgttgggtgatctacaagacgcccaagcagacaccaagggggccctcttaattcccggcccaggcaccgatctgtggagtgggaatttggttccggggggctatttcgagcacaccaaacgccggtgttaacttgcatttgattgggagggcccaccggaccattggtgtttgccgccatggagacctaccgggattaagctccggggaagaagccaaagttctccccgccggagttcccgagctcagttgaacccatctttattcagaaacctagcggggcacttcagggaaaccgtggaaacacgggcgcatacaggtgggtgaccccgtagacaattggagtgtcggggcacgagccagaacccggaaatgattgacttgcaatccaggtacgtgaaactccttaaagattctacaggtggggaaaagccgtaacatacgccttgtcagaaaaagagctgttagcagtgcctgtgctggacacgtacggaggtcctgaacaaggcctcagctggagaaaacacgcagtaaa

SEQ ID NO: 610832 - DNA, 88 bp, Homo sapiens
tgggaggtgggagggggtggcttaggtctgcctatgcttaagcccacgtgggagtttgttttcctttttgtataataaatgaaaacca

SEQ ID NO: 610833 - DNA, 802 bp, Homo sapiens
tatgtgagtgcgactggaggcgcaccataatataaaactcaaaactagactgctctgattgttttaagaaaatggcacacaaaccagacatgggggatatccccagcttctataaggccaaactgaggacaaccgatacgcacgagaagaacaccctcccgtcctaagagaggggggagcaagataagccgaatgaaatttactaagatcctgcacgattccctacccccgtcctctcctagaccctactcgtgatgtgcaggaagacccacctacaagatggacacgagccacaagctgcactgggaacctgggcactccgcgctgatgccaccggcctgtgagtctctgaagggacccccccccaatcggactgccaaattctccggcttgccccgggatattatagataatttttcgtatgaataatgaaaataaagcacacctcgcggcgatgggccttcaaactaagatattaaccataatgcccaaaggcctccatgtgggtcggccgataccgggagagagaccttatcttttttaaaatttatggccttattaataaattgtgaaaactcttggcccaaatattttaattttaggaaaagtttttgttgttagccggtttttggggtctttgggcatttcccctttaattgaggccaattaaaaaccggcggggaaataaaacagggggaggggaataaccttgggatacccaattattaattttaaaaagacccctttcccccttggtttaataaaggcgcccacataacccctctttttaccccctatgggt

SEQ ID NO: 610834 - DNA, 425 bp, Homo sapiens
ctcattcaggctgctcaacttttgcaagtgaaaaagaaaacagatgatgatgccgaagccctttgttttatgggcaatgctttaactactgcccagattgtgaaagtgttgaatttgtatactccagttaatgagtttgaagaaaaagtctttgggtcggtcattcggactatccagatgggtttacgagacaggaaagactctccccagctggtcatggatggtaaacacatttttcctgtcacctttcctttcaacccattttccctcgccctagaaaccatccagattccagccagcctcgggctggggttcatttcacgggtttgaaagtgatgtccaggcaaaaattggcaatacattttttggccgaaataagaaccccttatttccagtgaggtactgaaaatacatttttaaagaga

SEQ ID NO: 610835 - DNA, 850 bp, Homo sapiens
gttatctacattgaacgggatgctgcgggaaaaggctaatggcacaagctgtccacgtaggcgttcaccccagcaaggtggttatcactaggctaataactggagcaaagaccggaaaaagatcctcgaacggaatagccaaatctcgccaagtaggacaggaaaagggcaaagtacaaggaagaaatccattgagaagatgcatggaatagagtaatcttatatacaagctttgtattaaaacttgaaacaaagattgaaaaaaagaaaaaaaaaaaaaaaaaaaaaaaaaaaaaacaaaaaaaaaaaaaaaaaaaaaaaaaaaaaacaaacaacaaaaaaaaaaaaaaaaaaaaaaaaaaaaaaaaaaaaaaaaaaaacaaacaaacacaaaaaagaaaaaacaaagaaaacaaaacaaaacaagagacaagcgagagaggggcgacgacgaggaggggaacgcggcacgacagacgagacgacgagcgaggcagccacagcagaacgctagagacggaagaaggcgagaggcagacgaggcgagacggggaaagctatagaaggaaatagacgcagaggaatagttccggcagggatatgaatagaagaaggggagaaatagagagatggacatagaacaagcgaggctgaggtaacgattaagaaggcgaaagatagataagagaggaggagggggcgcagaaggagagaagcggagagaagcaagagaagagggaggggaggggggaggaggaagcggagagaggccgaggagaagagaggagggaggatcggagagaaaacaacggacagggggggagacaaaagacgggagcggggagaggaa

SEQ ID NO: 610836 - DNA, 119 bp, Homo sapiens
ctcgtcgtccggtgttatcgatgccacccattcgtagccaacctgtggactatgtatacgtgagggatttcaaactcatgcgtgtgtgtgcatgcgtgtgcatgtggcatctgataaac

SEQ ID NO: 610837 - DNA, 138 bp, Homo sapiens
atataatgaccttgtatcctgtgacctagccaaatgcacaatgctttagtagctttttttgtgtgaattctttaggattttctacatacatgatcaggtcatctgtgaataaaaaccttatattctgaaaaaaaaaaa

SEQ ID NO: 610838 - DNA, 321 bp, Homo sapiens
acctagtgaaagatctccacgagaaacacgatggtcaccagaacatcactaaaagctcaagcatgaggtaagaccgagacaattgtggaaacaagccctatgtccacaatctgggcaatgtttacaagttgtacccagctttgtactcatcaaccttccctagtacaaatttaattacatcatcttactgaacactactgactttactgaatctattccttgatttgatgttacctttcatacaaatcacagtagaaaaacgtatgaagttttttcaatacagccaagatgctggcttctcacctgtgaatatagttccca

SEQ ID NO: 610839 - DNA, 596 bp, Homo sapiens
ccgcaacacccaaatggcccccccacccaaggtccccacaaagggtggatttattttggcctttgggtcccaccttaagcgccagcaaggccaagaaggaaaaggaggcaggtcctggggccccatttctggaaactgttccccacacggggaataaaaaggatgtcagggggttcccggccccagccaccccccccccctgttttcgggcccctatgggcccctttttaaaaaaaaaaaaaaagccatttggcccggccctgatttcttttatttgggggggtgggcccagcttggggggccccccccccccccccgggcctttccattgtttcccttttccagggcccattaaagtttttgttttgagtaaagggggttccccgcccgcgcccccccctcagcatttttccaaaggcccgggggtccggggaagggcaaaggtcccccggggggtttcccagggagttggggggggcccccccccaaggggccggcttttgtcccgggggtttgttttccctgtttgtttgcgggtggggttttttttttggccacccccaaagtttttcccaaaaaaaatttcaaaggcccca

SEQ ID NO: 610840 - DNA, 535 bp, Homo sapiens
caagaccagcctggccaacatgatgaaaccccatctctaccaaaaacacaaaaattagccaggcttggtggtgcacacctgtaaccccagctactcgggaggctgaagcagagaattgcttgagcccggggggcggaggttgcagtgagccaaagttgcaccactgcactccagcctgggcaacagagcgagactccatctcaaaaaaaaaaaaaaaaattatctgggagtaggggcatgctacttgggaggctgagaggggaggatggctcgagtctaggagtttgagactgcagtgagccatgatcgtgccactgtattctagcctgggtgacagagaccttgtctcttaaaaaaaaaaaaagaatatgcttttcatagatatctgcctggctggctcccactcttcactcaggggtccactccaatgtcaccccttcaaagaggccttcccgggcgggctgtggaacctcggacctggaaactccagcacttttggtaggccctagcacggcagatcattttgaggtcaaaa

SEQ ID NO: 610841 - DNA, 136 bp, Homo sapiens
tccattacatcgcaacagctcaaaattaggacctagggcaggagcagtgtagagctgctgagcctaaagactggagaatctgggggactgggagtgggggtcagagaggcagattccttcccctctgaactgtcca

SEQ ID NO: 610842 - DNA, 753 bp, Homo sapiens
ggaagcagtgattctaaagtgtatgcttaaccagtcagtcgagtgtctactcttgtgtgttcacaagtgtgcacaaagtttctggtaaattaagaatattatttcaaataaattaatttcatctcataggagccagtttatcagataattcgtttctcatttctgcaaatcaatacacaatgagctcatattcagataaatataatagtttcttctttatttcatcattgttcattgattgcaacccatttctaaaacaaattatttaatataaccaaactcctttaacttctcaacttttcccatgaaaactgtgaaacattatataaaatctttaatcacataggatatgatacatatttcatcatttcgtttcaggttccggctctgtgataaataacactgaaaaacatcctaagtatcatgtattaacctttatcacttagaacacagggcgcatcgttcaaaacagacaactcaatacacagaaaacctttctccgaccaatctaacaacacatttaagaaaacttcttgtaaattcaccaaataatctggaattcacgtaatctttcttcagcttaacgcagtcgcatcctcttaagctgaatatcagtaattaatccattaacattgatgctctaatttctgctttcaagttcgaactgaggctcgatcaacgttcagtcaattctcctttgagcagggcattgggtgtcaattccaagacaaatcacacaagtgattgtccagg

SEQ ID NO: 610843 - DNA, 164 bp, Homo sapiens
ctaatctaatatagaaatggataccagatatgtatacatagagaatggtacatggagtaacttgtaatacagcaacatctcatggtaatgctcatccaactacgttaaataaggatctttacatgtgtacctaggtccttcatccagattagtgcctggcctgt

SEQ ID NO: 610844 - DNA, 283 bp, Homo sapiens
tcctgtgtactatcattaattgacagctgacccagttgctacgcagaaatggcatctcaacgactcttatacttccaaggctagcttctttctagcaccatatacactgaaccaggataaaatgctaaccaagaatttgaaagctaacctgcccactctttccatacattttttctgggcactgtttatttgcgagaagacgttccccctgctgccatctgctcttgtcctgtattctttgctagtccaatgttcatacggtgcttttgcatatgtgacatct

SEQ ID NO: 610845 - DNA, 385 bp, Homo sapiens
ggggtttttttttattttttaattttgaaaagaatttttgcccccgcccccccgcctgggccccaatgtgagaccctgttttggaaaaaaaaaaaaaaaaacatgttttagtagaagttttttttgaaaaagaaaaaaaagcataaaaaaattccccgggctggaaagggggggcttagggattggggccagcccggcccccccaaggcctttgtttcccccccccccccccctcggtgccattttttgggggggaaagggaagccccagtccctttaaaagaaaaatttttttttgaatgttttgtatgtaaaaaagcaagggggtatttttaaagttaagtttggaaaaaaagttaaaaattttaaatttaccttaaattgta

SEQ ID NO: 610846 - DNA, 93 bp, Homo sapiens
tgaacccttctttattttttgcccccaaaaacaaattaaacccccccccctctttttacaggggggctagtgaaaaaggcaaaagcgcagaaa

SEQ ID NO: 610847 - DNA, 115 bp, Homo sapiens
atacatgttcggtatattacaatgatatttataaaaatgcagatcctaggacatatatgcaatggttctcttttggtggtgggcttatggatgatttaactattatctttattat

SEQ ID NO: 610848 - DNA, 380 bp, Homo sapiens
cacgaggggggccgtcggcgaacagctcggcctccgacggcgcgcgggcggcccgagagaggctggcgcccaggtaccagccctcggccggacgcaggaaggcgcccagcgtggccgacacattgtcgaagtcccggctgaccgctgcggtcttcagcgagcggcggtccaggcgcaggccgccctcgaccccccaaccgccgcgatccaggcgctgaagggtgaagaccccggcctctcggatctccacggccggcacataggcctcatcgcccagcgcctcgaagtcgcgggtcaggccctgaacgcccacggcgccctgccagccgtcgcgctcggcctgcaccagttccagccgggcctcccagccctcggacagg

SEQ ID NO: 610849 - DNA, 361 bp, Homo sapiens
tgattcgtttctgcggataagtagctgcaggtacttcctaagcttatgtcgtgtgagatataagtcaggctgggagacccagtgtggctgtgggtaaaaaacaaatcaaatatagcagcactcagacgctcttgctgcgggcgcgtgtaccgcttgagctcctgaggttgtgctatgtccagtgtctgcacgggccgtgattgcaggagaagcagctcctctagagctcgacgctgctcagatgcaagatcaggtgctgctccgttggtgcccaagggcccctgactctgaaggaggtggaggagctggagcagctgacccagcagataatgcaggacatggagctgcgtctgctgaggag

SEQ ID NO: 610850 - DNA, 115 bp, Homo sapiens
  misc_feature (110)..(110): n is a, c, g, or t
tttatttttaccttcttttcccaaacctggaagcatttaatgcctagggcttgtcaaagaattctggtcaggtcccttttcctttctcaataaaaagcaatcttcaagcnttgta

SEQ ID NO: 610851 - DNA, 462 bp, Homo sapiens
  misc_feature (33)..(33): n is a, c, g, or t
  misc_feature (38)..(38): n is a, c, g, or t
  misc_feature (46)..(46): n is a, c, g, or t
  misc_feature (65)..(65): n is a, c, g, or t
  misc_feature (69)..(69): n is a, c, g, or t
  misc_feature (83)..(83): n is a, c, g, or t
  misc_feature (92)..(93): n is a, c, g, or t
  misc_feature (103)..(103): n is a, c, g, or t
ctataaggtccttttattaagccccctaataanctganctgttacncatatatattaataatatncatngcattattatatcnctattgtannggtatacttncccagagtgctagggagaactttacaatttcatccagaaatttaattttgttaaaggcttgacttgagttcatatagtattgtgtgagttccctctggattcaatcatttgttcttagtggggaatggaaggcttataagtctcgggaaactgatgaaattctccatcacaaagtccaaagggtctttggacaagggtccaaacatgaagtgctttctggaggagcttttgtttagtccaacaggagtccaaggatgcagattagagttttgtgagtttgcctcccttgctgggctaggcatttcattgttgtaactgcctctgagtaactgatgatcctataagtaaccccaataaac

SEQ ID NO: 610852 - DNA, 421 bp, Homo sapiens
  misc_feature (1)..(1): n is a, c, g, or t
  misc_feature (29)..(29): n is a, c, g, or t
nggaggcttcagattatacccgaaaagangttctccaggaaattaatgggaaaaatgtgtctccaaaggctatgtctttcagatggaaatgattgttcggagcaagacagatgaattacactattggtgaggttccaatttcatttgtggatcgagtttatggtgaatccaagttgggaggaaatgaaatagtctcgttcctgaaagggttattgactctctttgctaccacataaaagaaatgattcacttatgcttcccgtgttcatttcaattaaaagtagagaagcccgggtcactgatttttatcaatgttgtcttaacacatgagccaaaggtaagatgcatttaatgtggatctttttctctggagaagctccattttatatttcaaattaaaatttaaagttcttggtttaaa

SEQ ID NO: 610853 - DNA, 430 bp, Homo sapiens
  misc_feature (38)..(38): n is a, c, g, or t
  misc_feature (250)..(250): n is a, c, g, or t
  misc_feature (307)..(307): n is a, c, g, or t
  misc_feature (339)..(339): n is a, c, g, or t
  misc_feature (356)..(356): n is a, c, g, or t
  misc_feature (394)..(394): n is a, c, g, or t
  misc_feature (406)..(406): n is a, c, g, or t
  misc_feature (424)..(424): n is a, c, g, or t
gctacctagttacatagatataaccagggcactgcccncaactatatctggtcaaccatcaaaagtgccttcccaagtctcacctgtttttcacctcttctaggacctttgacaactgtcttgttacaaatgtttggtccttgcttctttaacctcttagtaaagtttgtgtattctaggattaccacagttccagaggacaatgctgggcacaagggcttccagcccatcctgtccactggacacgggngaatggaaatcgttcctgcctctgggggttccttaggatcagggtattccaggaggnttttttactcctccagtggcagggggaggggncttacggtccataaaanttaggcaggggaggtaggttttacgggggaaaacaggntctttccggccnttttttggcagggccccntttaag

SEQ ID NO: 610854 - DNA, 291 bp, Homo sapiens
caagttgttagaaaaaaaagggaatgggggctgtggcatgtactgtaccggtagctctggctacctgggaggctgaggtgggaggatctcttgagcccaggagtttgagaccagcctgggcaacattgcaagaccctcatctacaaaaaaaaaaaaaaaaggaattaagtcctggttacaggcaaaaacattgctttaaccgttggaaagctatttttgtcaattagaagaaacccaggtctctctataatggttttgcacccactttcggcattgttccacttcatatat

SEQ ID NO: 610855 - DNA, 1012 bp, Homo sapiens
  misc_feature (1012)..(1012): n is a, c, g, or t
agcggagttcccggcgcgccgcgggctggtgggctcagcggcggcgccggcactgggaaatgaccctgcccgggggccctaacgggcattgctgcggcctggggtggctggctgtaggcctcgtgcagacctcggggctggagctgggcccctgctgcctggagtgtctggtggaagcatgcgccttgcgtcttcgagtgcgcgcgtgtgccggtgggtcgctgacgcgcctgtgcgccgacggcggagcctccagagagtccccgtctccggcgtgccgaagctgtgtctgctgggggcacgatggttccaccagacggggtctttcgccgtcgttggcttccaccgcggacctcgcgggtgtgtccgcatcgaagcatgcactctggtggatccacgtctccggaggaaggacccgtagctgtgcctcgccctttatccgaagccccttgggggccctggctccgtggacgtctgcggggaggcaaggggaagcgtggtacgtttcgcccagggtcaccgtcagcgcgtctccctttgctgcaatccctttggcggggtcatgtcacttgtctggcccggcgccctgtattctcggcccttccggtccgtgtcgtcacttgccggtgtgggccgttcccctccgttccggcctggccttgcggaaggggaacctttccctgcgcacggggaactggcaccccctttgaccttcgaagcaccggcatttgcaggtctgcaatggaaccgccgcaatgggaacgccccctgttgggcgatgagatccctggctaggcaacaggcattggcgcacaaggcaatgagccgtcggagaaggcagactcgatccgtgtggattcacggttatgctgaaatgagccccccctcgtgtccaaagtaaagaggaattcgccgaaggaacccccacttcgggtccaatagatatcttttgaccacgcggtccaatttgatcgcccgcccttctctccgaaatgacacagctgtgcctacn

SEQ ID NO: 610856 - DNA, 775 bp, Homo sapiens
gccgcacaatcccgggttgtccgagtcctgtcaagtgtcacgttctgccatgttactgcaatagccacatctgtgtgtcacggcccaccctgtcgccggcttcagtcatgccgctcatgcctcatggtgaaaaggtggagcggtgccatcaagatcagtgggattgtggccactgtgtttggagcaccaggattcctggggcgatatgattgtcaaaccaccgttgggacgcatggggtcacaggtaatcatacccgtatcggtgtgataaagtatgacatcatgcaccttcgtcccatgggtgacctgggaccagcttctgtactggaatgggacgacgagagaataaacgattctatccgacgagtagtacaagacagcaatggtggtcagtctagatcttattggacgagactgggaaaccaaataattttgattgggaggatgtcatgtgaagattccccaagacaatggctcaactgtctcaaggaaggtggagtttgaaaacatccattcatgttttccgatctgaagtgcgaactattacaagctcttctagatatagggaaataacgctgtggagagcagagtagtgacgagatgcatataccgggagggccattatcgtaaggccggcgacactcttgccagagtggctagtatccctcagtccgctgcaaggtttgcatcgggtgggccgataccgtgtcctgggctgggacaaggtaacccagaattgtggatttccaggttggatgcgaagagcttggccgga

SEQ ID NO: 610857 - DNA, 283 bp, Homo sapiens
tccagtatcataggttaaaggaagaatgcggtccaatactagttactgtgtactgagtgcttactcgtacccccaggccacatgaagcacttcaaatacatgatctccttggtcttccacaatataccacttttccattttacagatggggaggctgaggccccgcacgattattagtttctctcagatcttgtggctataaggaaactatggtagagctagggtttgaacctgtttatttctcaactccagagcttgattctttaccacttccctgtctgcc

SEQ ID NO: 610858 - DNA, 966 bp, Homo sapiens
ggagccgcaggacgtaggcagccatggctgccagccggaatggatggtcttgaagccccacttccacaaggactggcagcggcgcgtggccacgtggttcaaccagccggtcccgtaagatcctgagacgtaaggcccgggagtggccaaggcgcgccgatcgccacgcgcccgctgtccgtgtcccatcctggccatcgtgcgctgccccaggttcggtaccacacgaaggtgcgcgccggccgcggtttcagcctggaggagctcagggtgggccggcattcacaagaaggtgtgcccggaccatcggtagtttctgtggatccgaggaggcggaacaagtccacggaaggtccctgaatgccaagtgcaggggcgttgaaggagtaccgttccaaatcatcctcttccccaggaagccctcggccccaagaagggagacatgttctgtgaagaacttgaaaactggcacccaggtgaccggacccggtcatggcccgtccggaacgtctatagacaggagaaagctcgagtcatcactgaggaagagaagactttcaaagccttcgctagtctccgtatggccgtgcaacgcccggtcttcggcatacgggcaaaaagaggcaaggaagccgcagaacaggatggttgctcgaccacataagccctcctggggacttggaatcagtcggcagcatgcctgggtctccacgtgctgtgttccggggaacaactgggcctggattggggtttactgtgtggaattccttctgacgagggattggggcttcttgaaaacagcaagcgccggaacggctactcttgggtgaagccgtggtgtcgtctgcgccgcgcaacagtcctgtgcaggcaccggcaaaaaacaacacacacctccccacatagcccacattacataacaaatacaacaccaacaccaacagccaagaccaaatcactgaatgg

SEQ ID NO: 610859 - DNA, 131 bp, Homo sapiens
acactcagcagactgttgtacactgtgtctctctcattgtgagacagtacttgttagctctctcggttcttccgagcagctcgtatattgtgcctgatgtctgcatgatcttggcgaggtcctgagatttg

SEQ ID NO: 610860 - DNA, 423 bp, Homo sapiens
  misc_feature (4)..(4): n is a, c, g, or t
  misc_feature (13)..(13): n is a, c, g, or t
  misc_feature (97)..(97): n is a, c, g, or t
  misc_feature (183)..(183): n is a, c, g, or t
  misc_feature (225)..(225): n is a, c, g, or t
  misc_feature (228)..(228): n is a, c, g, or t
  misc_feature (417)..(417): n is a, c, g, or t
  misc_feature (420)..(420): n is a, c, g, or t
caantgtaaaaancggggaaagggccttgagtagaccatttcctcagaaaaagatatgcaaatgcccaacaagcatatggtaatatgagcaatattncccagtcattaggaaaatgcaaatcaaaacccataatgagctattaccctcacacctgttaggatggccactatcaaataaacagnaaataacaagtattgacaagaatgtggtgaaattgggacctnttngccttgcacatgggaatgtaaaatgatgaggccgctctggaaaacagtacggggggtcctcaaaaaattaaaaataaaatgtactatatgacccaacaatcccacttctgggtatagatccaaaagaattaaagacagggtctttgaatcttaaattcagctgattaaaaaaaaaacaatgaacaacanccncat

SEQ ID NO: 610861 - DNA, 123 bp, Homo sapiens
tccgtgatctaccgatccttagtggcatggtcttggctcactcaacctctctcccaggttcaaccaattctcctcactcagcctccagagtagttgggacaactggcgtgcaccactatgccc

SEQ ID NO: 610862 - DNA, 384 bp, Homo sapiens
  misc_feature (231)..(231): n is a, c, g, or t
  misc_feature (358)..(358): n is a, c, g, or t
gaatttgtcaagaactttctaataataaaatacagaaatagattaatagttgctacaaacataaagagagactccatggtagaacactttaggaagcacattttatcttttttgaaccaacatgtatttccaaacatgtaagtaataatatcaagcgtggtgggaagattggattggaggctgattctgatctgtgtgttgggatgaactgtggcattcacagcattgagnaaaatcatcttcaaggacagcgtttaattctgttgttgacaagtcttttaaggaaaaagtactagtttggggaatttttcacagatacaaataagcttgacccctaaaattttaaaatattattttnaaaaaattaaaatgtccaggttttat

SEQ ID NO: 610863 - DNA, 470 bp, Homo sapiens
tgcctgaccttgtcacaagacatttcccttttagcactcacttggatttttgtactgagtggaagttggaaatgattgcaaaggaaggcaatttcttttgacatctcatgtatgacccatttatctctttatggaatatagtgaagtattggaggggagcattagagaataagaaatagttctataagtgtatagggctatagtttcatcttagtgattatataaatatataaatatacacacacatactatatatatatatatacacaatgtatatgccaaataatatagtataggtataattatatgaatgtttattggggatatggagacctggtttgccttgtgagagagacagagtaactgacaaaacatttcctagatactggcctctttttaatctttcatttatttttattatggaacatttccaacacataggagagcagagggaagaagagtacaatgca

SEQ ID NO: 610864 - DNA, 240 bp, Homo sapiens
tgtggtcgtgctgtacgacgctcatgagtacagctgttgttgtgccagccttctggagagatcgatgtgatcagcaggggaatattacgagcgatcaggactgcttcgctgcgtgttctgacttctggaatctttgagacccagttccctgttgaccaagtcaacttccacatgtttgacgtgggttggcagcgcgatgaacgccgcaaggttgatccggtgcttcaacgatgggggatc

SEQ ID NO: 610865 - DNA, 236 bp, Homo sapiens
ttttgtttgttgggaagttggggttttggggggagggggaagatattagacgttgcataaaaagcctcctttaaaaaaaaggaaatgctttttcttttgtcttgtgatttttttttttaaaatgaaatttaactttttgtgcaagtaggactattaaacccctcttcagtgttttacttgtactgtatcccattccaaacccccctttaatttttaataaaactgttcccttgtta

SEQ ID NO: 610866 - DNA, 160 bp, Homo sapiens
cccccccccccttttagaggccggtttccccccttcccccggttaaaattttggcaaaggaagggccccccgccccttttccttttccgttccttttcaggaaggcccgccccccccaatttttgggaggggaaaaaatttttttttttttggggccaga

SEQ ID NO: 610867 - DNA, 248 bp, Homo sapiens
  misc_feature (38)..(38): n is a, c, g, or t
  misc_feature (83)..(83): n is a, c, g, or t
  misc_feature (107)..(107): n is a, c, g, or t
  misc_feature (149)..(149): n is a, c, g, or t
  misc_feature (154)..(154): n is a, c, g, or t
cccccttgtcccacggctgctggggccccccagtagcnataggctccggtgtccgctcacgcagcccggataggaggcctcgngtcggggggaagacgtcgcagttngtcgaagagtccgaagcccagcaaatctgcccgctccccgcnggctngccgctctcgctcgcactcttgctctcggtccggggacgaaattggactcacccatcagctgggtggcctcagccaaggctcccgaaaccagtc

SEQ ID NO: 610868 - DNA, 246 bp, Homo sapiens
cctgagattgttcgctactgcactccatccaagggtggcagagagagactttgtctcaaaaaaaaaaaaaaaaaaaaaggaaaaaaaaaaaaaaaagggaaaaaaattaccacccccaagggcggggtttcggggaacccagaaaaaaagtgacggggaataaaagaaagggttttcgggtctcctgtaaagcctaaagagaggcttgtgtggaaaatgtgagggttaaggaagaatgaggggtta

SEQ ID NO: 610869 - DNA, 184 bp, Homo sapiens
acgggcggcgatttggcttggctcaggtatgggctttcggcgtgtgcagtatggactctcggcgtgtgcacacgccgagcccccaaaccatagtcgccgatcttcacgaaagcgaaatcgccgatcttcacgatcggcgattttggtttggtgcctcggcgtgtgcatgtggatattcggcgtg

SEQ ID NO: 610870 - DNA, 154 bp, Homo sapiens
ggcatgagtgagtttacaaatatgtatcgtctgttaagcagcatgtgcaggattattcataatataggagttaaaataagtattagtgccattttcaggtatttatttttgcacaggaaacacattatctggggagtcggacaggggaattttt

SEQ ID NO: 610871 - DNA, 199 bp, Homo sapiens
tgttgggagtgggcagtggggtggctaattgttttcggccaaccaggggcctgttgcccaggcaactcaccagctccgccttttttgattggctgccccggtgggagtcaaccaaaatttaaagggaagccaacgattgcttttttcaaaacccaccagtccccctgtggggggaaaaataaatggtttttttccccca

SEQ ID NO: 610872 - DNA, 551 bp, Homo sapiens
atcaaaccggctttgttcgcttgggtattttgagttctgtgcatccccatctgttacatgcacggcaacaaaagaacactgtgcttggcgcaccacttttttcccccttttaataattgtatttagagcttatagtctaggggcagatttggaagctgtgtgtgggagacagtcacagatgggacagtcacagtttcctcacttaatgcttctgtgccagcataccattatcagagggacttcaagttgaggtttaactcaggatgaatttcctggctggatactatcctaagaattttccgtatacattcaaacattaaacagtttcatgccagtcgaagaaatttgcctctgcgttggcatttcttcattgtgggtggttggaagcctgttaagaggcgtggtactggaggtactgtttgtcttcaatagtagtacagcttgtgtagtggactggtgcccttattgctgacgagggggtggtacctggaacatggaggacaacctcacttcagctgcagtgcagtgacttggagtggtctcatcccttt

SEQ ID NO: 610873 - DNA, 137 bp, Homo sapiens
gtgaagaactgcacactgaatcttatgcagaggacagctgttggacaattgtcattgaaatcgggtactctaacatataccgtgtgctgtagaagttttacccgtgtattcatctatggccagaaccacaaatatcg

SEQ ID NO: 610874 - DNA, 1472 bp, Homo sapiens
  misc_feature (614)..(614): n is a, c, g, or t
tcatccccctctccccaaagttcgtgaacacacgtttccaaagcgagaggggaagtgttcaaaccggggggggaccacaagaagcgtgtctgcacgcaacaagccactgttaacaccaacgcccgggcgggcccccgccccacacggagcgggtcaccacggcagaaaatgaccccaacggccgaacaatggtttgttgggtggaaaaatacaccacgcggggagaatgattaaggtcgcccccaccacgttcgcccccgtctgggatacaacaacggggggtttgttctctgtccctccttaaaaaagggccgcccacggaacatctttttgtaagagggaacgccaccccacaaaaagggggggaaatgacccctgcgttcgttgtggggaccccggttggagcccactcaccctttatataacccacccgctttgtgggttgggggaaacaccacgtgttgtggaaaccacaacgaaatttgggtggataacaccccccgtggtgttaccacgctcgtttggggacactatacaaattatggagaagccccgcttttggaattggagacactctcttcttttaaaactcgcccccacaaagggaagttatnccccacagcgagatttatttttcttcggggttttaatattcctccgggagaaggcccccactctttgccgcgaaataaatagtctcttttcacggagctctgccttctggagagagaaaagacttcaaagggtgtgagaaaactctggagaggagaaaactcctttacagtgtactatacatatcggagtcttgagaaaagaaattgttggcgagagggctctaagagcccaccaatattgagagaggctctctcaccacacataccccacctcgagaaaaatggagagcttctcgtggatatatataaaggggctcttcgctttatagggctgttataattgtgagagagagagtgagattgtgtctctctccgttaaagagaggagaaagagagtgaatagagtccacacaaaaccctgtgtgagacgcaccgagaagctacccccttctcgagaaggcgtacacactcctttccacacagtgttcacaggaattgggggctctcctcgggagcccctgtaaactctttagagtcacatcgtaagctgagagaacactataaatctttgttgtggtaactaacgctttggtgaattttgtttcttatattggtgtttctttatgctaaagagaacttcttttcttaaaatgtgggtttgttaactcgtagcacctttttaacacctgagaaactaataacttgagaccacgttccacacctggaacacataacactaactgtactgaaggcttgtcctctgagactaggtttttaaattttctaatgtgggaatttcctatttcttgcagcatccctgtaaataaacattcaagtccaccctttttttgacttcca

SEQ ID NO: 610875 - DNA, 1451 bp, Homo sapiens
  misc_feature (1451)..(1451): n is a, c, g, or t
gtctcagtctagccttgaatgtcagtgctgaggcctcttgtgtagcataccagttagtccaggaaatgggttgggcgtgtcttgagtccagccttgaatgtcaggctgaggcctcctgctgtctgccatcacaacagttcagtcccaggtctggcatggcaatgacggcatcaacacgcagtgagctggatttgcatggcagtgagcacctgttgggagaatcaaggatggtctaaaagggctgtggtgagacctggaaagaggtctggagcagttgaggataaagactggatgataaatacttaagtagatatggattcaattgacatgacatgatagaatgctagaatgagacgaaggcaagcgcacgggacatccggggacaactacggccagaaagacgacattcgatgcgaggaccaacataaacacgaagaaaccacaataactgaacagaccccatacatggcaccaaaacacgggacacagccagaaggaaccaagcctgattgagcccatatgacaccccatgaacagaaagtagacaaagaagagagacatggcacttagcatgaaacgtcgactaccgaataggaacaaaccagtacacacatgagcaggaacacacagagagagacagtacagagaacaaacatagggactatgagcgatatgagacaccccagcaaaaaccaccacatccgagagcagagaaatccataacggagacaacccagaacaacaggcacagaaacagaaagaggcgatagtaggcgcgatgacaccaccgccaaccgccgcgaaaccgcacgacaaacaaaaaagccaggaacagcaaaaagcaacccaagaaaccacagagccccgaacgcaagaaacaacaaccgagacaaacaaaagcacagacaggacaaggcaaaaacccacacgacaaacacgccagaacgagcatgcaccaacaactcagacacacgcaaaacgccaaaaaggcgaggagacaagcaccaacaaagaaaaaagcagaacaacccaacaaaacgacaaacaacacacaaaagagccacgaaaaaagggaatagaaacgagcgagaacaaaacaagagacaagcagacacaaaactcaagaaaaacaacagcaaacaaaacaaccaaaacaaaaactacaaaaacaacaagcctcaaacaataaattcgaccaatcacaagtcatcctcaacaaacacagtaaaaccatcagtacacaaaacaacaatacactacaatcaataactaacaaaacataaaaaccaaaaacatatacaacaaaaacaaaccctaaaaacacataacgatcacaaaaaataatagcaatcactcaacatcgaataatatacaaatataatcataatataacataaaaacaagacaaaaaatacatacaacactaaacaatacaaccacttcaaaaacan

SEQ ID NO: 610876 - DNA, 130 bp, Homo sapiens
agagagaagggaagaaagaagctcagcccacaggaatggccccagaggccccatgaagaatacgctgtcacgcaggaggaagacagcggaaaacgaggaagagccggtcagcagtgggaacaggaagggt

SEQ ID NO: 610877 - DNA, 194 bp, Homo sapiens
ctgcttgatattcatatgcccataaccatggtcatgagcgggatctaacatgtactagtgctggacgtagttctggagtctaaccatatcaccccattaccagtctagtttgcaagagcctctagttagctttcttccacctcctttgtctattttcaagagagcaccaggttgatcttgataaaatggacaaa

SEQ ID NO: 610878 - DNA, 252 bp, Homo sapiens
tggcatcctatccacgtgatgcatcatgttcatgtatacacgtatctagatagacttaccctgtaagcagcagtgcaaagtgtagatggaggactctccctaaaaagctaagtttacgggattaaatatcatcgtcctcatcatcgcccgggtgaataaagctgctgccagtggataggggcccttcttcaacactcccaaaaccacccaaagtccccctctcatcagaatcgtcaaacaacttctcatagt

SEQ ID NO: 610879 - DNA, 970 bp, Homo sapiens
  misc_feature (6)..(6): n is a, c, g, or t
  misc_feature (159)..(159): n is a, c, g, or t
  misc_feature (344)..(344): n is a, c, g, or t
  misc_feature (346)..(346): n is a, c, g, or t
  misc_feature (425)..(425): n is a, c, g, or t
  misc_feature (464)..(464): n is a, c, g, or t
  misc_feature (537)..(537): n is a, c, g, or t
  misc_feature (544)..(544): n is a, c, g, or t
  misc_feature (555)..(555): n is a, c, g, or t
  misc_feature (584)..(584): n is a, c, g, or t
  misc_feature (639)..(639): n is a, c, g, or t
  misc_feature (678)..(678): n is a, c, g, or t
  misc_feature (683)..(683): n is a, c, g, or t
  misc_feature (726)..(726): n is a, c, g, or t
  misc_feature (746)..(746): n is a, c, g, or t
  misc_feature (749)..(749): n is a, c, g, or t
  misc_feature (769)..(769): n is a, c, g, or t
  misc_feature (776)..(776): n is a, c, g, or t
  misc_feature (810)..(810): n is a, c, g, or t
  misc_feature (814)..(814): n is a, c, g, or t
  misc_feature (816)..(816): n is a, c, g, or t
  misc_feature (844)..(844): n is a, c, g, or t
  misc_feature (870)..(870): n is a, c, g, or t
  misc_feature (874)..(874): n is a, c, g, or t
  misc_feature (880)..(880): n is a, c, g, or t
  misc_feature (884)..(884): n is a, c, g, or t
  misc_feature (910)..(910): n is a, c, g, or t
  misc_feature (932)..(932): n is a, c, g, or t
gatgtnggggggatggggggcgggggggaagggggctgattatattttcataggagatatgggacaagaaagaggctaagttaccgacaggttcacacaaccctgcttccagagttcaaggtttggggaacccatccaacccctcctcacccgttaaanaaaaaccaggagaaaattgagaggggatgggtgggggaggaccaattccacgacctgttaaattcgagagctttggagggagctctcggtgtgaccccttccgactgggtgttttagggccatttaccacttcaggctacagccagttagaccgtggtggagacgaaatgagggtgcagtccgtncnaaaaacgaagcgctggaagggaggaatcgtgacggcggctgtaaatggcgtgtgttcattaagttacgctccgcttacnccactgcgggcaaacaggaaacatcaggaatctgacgcncaaggagggttaggaccatgctgagcgcacccagaaccagcagaggccctgggcaggaggtccccaaccaatncccactngctcaagaatnaaaaggtgttcagccccctcctccctganaaccaggagttcacgaacccaggccctccttcctcagccacaaaagcttggggtncccagttccacttcttctaggcttagtcctggccctctnctctnttagaactaggatggtcccccagccccctcctccctcagagcntgatgcccagttcgagaacnttnttccctgaaatctcgaagtntggggtnccagcttcttcagggtttcaggtgaatgggcccncgtntncttcccaaccccacacggaagggcaggnaaggaaacgggtttattcacagtttnattnacaggnagcncccaccccgcggcaccaaatcccggngggagggccgaagttgctaaanggtggggacggcctttgaagggggggggccgggccgga

SEQ ID NO: 610880 - DNA, 2825 bp, Homo sapiens
gttgggggagagcggggtaagccgagggtagccgagcggggcgggcgctctggagcggcgggtgctcgggctgccgtccgctccgccagaagcaccgagcagccgagccggggcccgccgccctcctcctccatgaggcccgagtgaggcgcggcggctatagccgacccgcggcgccttccccccgcgtcctatcgcgagcgcagcggcagcggcccctggaggaggaggcggaggaggaggagcatgtcggacggtttcgatcgggccccaggtgctggtcggggccggagccggggcctgggcgcgtagagggggcgggcctgagggcggcggtttcccgaacggagcggggcctgctgagcgggcgctcgcaccagccgccgcaacccaaagccccgggcttcctgcagccaccgccgctgcgccagcccaggacgaccccgccgccaggggcccagtgcgaggtccccgccagcccccagcggccttcccggcccggggcgctcccagagcaaacgaggcccctgagagctccacctagttcacaggataaaatcccacagcagaactcggagtcagcaatggctaagccccaggtggttgtagctcctgtattaatgtctaagctgtctgtgaatgcccctgaattttacccttcaggttattcttccagttacacagaatcctatgaggatggttgtgaggattatcctactctatcagaatatgttcaggattttttgaatcatcttacagagcagcctggcagttttgaaactgaaattgaacagtttgcagagaccctgaatggttgtgttacaacagatgatgctttgcaagaacttgtggaactcatctatcaacaggccacatctatcccaaatttctcttatatgggagctcgcctgtgtaattacctgtcccatcatctgacaattagcccacagagtggcaacttccgccaattgctacttcaaagatgtcggactgaatatgaagttaaagatcaagctgcaaaaggggatgaagttactcgaaaacgatttcatgcatttgtactctttctgggagaactttatcttaacctggagatcaagggaacaaatggacaggttacaagagcagatattcttcaggttggtcttcgagaattgctgaatgccctgttttctaatcctatggatgacaatttaatttgtgcagtaaaattgttaaagttgacaggatcagttttggaagatgcttggaaggaaaaaggaaagatggatatggaagaaattattcagagaattgaaaacgttgtcctagatgcaaactgcagtagagatgtaaaacagatgctcttgaagcttgtagaactccggtcaagtaactggggcagagtccatgcaacttcaacatatagagaagcaacaccagaaaatgatcctaactactttatgaatgaaccaacattttatacatctgatggtgttcctttcactgcagctgatccagattaccaagagaaataccaagaattacttgaaagagaggacttttttccagattatgaagaaaatggaacagatttatccggggctggtgatccatacttggatgatattgatgatgagatggacccagagatagaagaagcttatgaaaagttttgtttggaatcagagcgtaagcgaaaacagtaaagttaaatttcagcatatcagttttataaagcagtttaggtatggtgatttagcagaacacaagagagcaagaaaatgtgtcacatctataccaaattaaggatgttgagttatgttactaatgtatgcaactttaattttgtttaacactatctgccaaaataaactttattccctataacttaaaatgtgtatatatatataatagtttattatgtacagttaattctactgttttggctgcaataaaatcgattttgaaataaatgaaatgttgaaaattttgctagttggttagatgcttatcctttaaattctacttttcttgaggggaaaaagtcttcgcctggaaatacatattactgcaaaaatgtagcatccttttttaggtaggagtattatagctttcattttagtttgacatttagtgtcccaatgaattgaatttcaaatatgaatcataatcttgaaaatctttagcactaaagtcttggaatatatcaacaactgatttacatatgcagatgctatttacatatgcagatgctatttgataccaagggctttttaaatgtcatgggggggaaaaacccaacttggttgaactcccagctaaacaaccaagacttcactgaagatttattccaattctagaattgttctttttttattttttattttttcaactgactaacttcattaccttaaagcctagaacattattctgctttatttatatggctttctcaattttattttgtagcatgggttgaatcgaactttttactagagaattttactagatatttgtcattcaagttttcatctgctttataattgatacaccttgagggtcacttttctaatacttttacctataatgtggtacccacctcagcccctaataaataatatttttaccctaatgtcaaatctttttcccaggctaactaaaaactgtgtacaaaaggattgcttgtaaatatgcatgtaaatagttctgttaataacccactgttttacatttggtacatctgtgtctgctaatacagttagctttctcacttttctgcttgtttgttcagtctgaattaaaattagactttgaaaataaagcttaaatagttgtttcctcta

SEQ ID NO: 610881 - DNA, 126 bp, Homo sapiens
taactcacgagggcccccaagcatatcgtggcggaagattatcgatcgacgtaccagccaaagtcctccagaacgtgatctgaggtacagacgcacagcagcagaaatgccggtgcataatgacaa

SEQ ID NO: 610882 - DNA, 284 bp, Homo sapiens
gctatagtaggtgccgcatgcccagctaattgtttggtgggtttgtcttgtttattgagacagagcctcactctgtggcccaggctggagtgcagggcgcgatctcggctcagtggaacctccacctcccaggttcaagcaattctcctgcctcagcctcctgagcagctgagattacaggtgtgcaccaccatgcccggctaatttttctgtatttttagtagagacggggttccaccatgttggccaggctggtcttgaactcctgacctcaggtgatccgc

SEQ ID NO: 610883 - DNA, 2947 bp, Homo sapiens
  misc_feature (592)..(592): n is a, c, g, or t
  misc_feature (648)..(648): n is a, c, g, or t
gttgggggagagcggggtaagccgagggtagccgagcggggcgggcgctctggagcggcgggtgctcgggctgccgtccgctccgccagaagcaccgagcagccgagccggggcccgccgccctcctcctccatgaggcccgagtgaggcgcggcggctatagccgacccgcggcgccttccccccgcgtcctatcgcgagcgcagcggcagcggcccctggaggaggaggcggaggaggaggagcatgtcggacggtttcgatcgggccccaggtgctggtcggggccggagccggggcctgggcgcgtagagggggcgggcctgagggcggcggtttcccgaacggagcggggcctgctgagcgggcgctcgcaccagccgccgcaacccaaagccccgggcttcctgcagccaccgccgctgcgccagcccaggacgaccccgccgccaggggcccagtgcgaggtccccgccagcccccagcggccttcccggcccggggcgctcccaggtacggagcagctctaagggccccagtcctccttggcgaacgcttccccacggccctccacgcgtgccgaggcccgacncgctgtctgcggtccccacccccggttccccgaaagcattccccgagagggccgcntgaccggagcaaacgaggcccctgagagctccacctagttcacaggataaaatcccacagcagaactcggagtcagcaatggctaagccccaggtggttgtagctcctgtattaatgtctaagctgtctgtgaatgcccctgaattttacccttcaggttattcttccagttacacagaatcctatgaggatggttgtgaggattatcctactctatcagaatatgttcaggattttttgaatcatcttacagagcagcctggcagttttgaaactgaaattgaacagtttgcagagaccctgaatggttgtgttacaacagatgatgctttgcaagaacttgtggaactcatctatcaacaggccacatctatcccaaatttctcttatatgggagctcgcctgtgtaattacctgtcccatcatctgacaattagcccacagagtggcaacttccgccaattgctacttcaaagatgtcggactgaatatgaagttaaagatcaagctgcaaaaggggatgaagttactcgaaaacgatttcatgcatttgtactctttctgggagaactttatcttaacctggagatcaagggaacaaatggacaggttacaagagcagatattcttcaggttggtcttcgagaattgctgaatgccctgttttctaatcctatggatgacaatttaatttgtgcagtaaaattgttaaagttgacaggatcagttttggaagatgcttggaaggaaaaaggaaagatggatatggaagaaattattcagagaattgaaaacgttgtcctagatgcaaactgcagtagagatgtaaaacagatgctcttgaagcttgtagaactccggtcaagtaactggggcagagtccatgcaacttcaacatatagagaagcaacaccagaaaatgatcctaactactttatgaatgaaccaacattttatacatctgatggtgttcctttcactgcagctgatccagattaccaagagaaataccaagaattacttgaaagagaggacttttttccagattatgaagaaaatggaacagatttatccggggctggtgatccatacttggatgatattgatgatgagatggacccagagatagaagaagcttatgaaaagttttgtttggaatcagagcgtaagcgaaaacagtaaagttaaatttcagcatatcagttttataaagcagtttaggtatggtgatttagcagaacacaagagagcaagaaaatgtgtcacatctataccaaattaaggatgttgagttatgttactaatgtatgcaactttaattttgtttaacactatctgccaaaataaactttattccctataacttaaaatgtgtatatatatataatagtttattatgtacagttaattctactgttttggctgcaataaaatcgattttgaaataaatgaaatgttgaaaattttgctagttggttagatgcttatcctttaaattctacttttcttgaggggaaaaagtcttcgcctggaaatacatattactgcaaaaatgtagcatccttttttaggtaggagtattatagctttcattttagtttgacatttagtgtcccaatgaattgaatttcaaatatgaatcataatcttgaaaatctttagcactaaagtcttggaatatatcaacaactgatttacatatgagatgctatttgataccaagggctttttaaatgtcatgggggggaaaaacccaacttggttgaactcccagctaaacaaccaagacttcactgaagatttattccaattctagaattgttctttttttattttttattttttcaactgactaacttcattaccttaaagcctagaacattattctgctttatttatatggctttctcaattttattttgtagcatgggttgaatcgaactttttactagagaattttactagatatttgtcattcaagttttcatctgctttataattgatacaccttgagggtcacttttctaatacttttacctataatgtggtacccacctcagcccctaataaataatatttttaccctaatgtcaaatctttttcccaggctaactaaaaactgtgtacaaaaggattgcttgtaaatatgcatgtaaatagttctgttaataacccactgttttacatttggtacatctgtgtctgctaatacagttagctttctcacttttctgcttgtttgttcagtctgaattaaaattagactttgaaaataaagcttaaatagttgtttcctcta

SEQ ID NO: 610884 - DNA, 1197 bp, Homo sapiens
gtggaaatggcggctgtagccgagggggcggccggaaagcagcggcggcgtctggggcgctttcgcaacattcagacctcggttgcagccctggatgccgtgagctgaagaggtttcacatcttactcctgtccccacaccctgggcgttgcggcagttggtgctcgttgctgctagctcgtgaccctgctcgatgggcactgactgcgtgctggcagagtctgagtctgggggacctgtggaagacatgcccccgaccgtcacgctctagatgagcgcctagtcccaggaccctgcctgaatgaccatccggcaaagaaggactgttgctagtggaattggagaagatgtgggacgaacgatgatggaagcaatactgatgactatagaaaggaagggcaggtgagatgtaatcgccttgactactagatgaaaccgcattcgacgtatctgcctcaggctaatggctagctaactggcacgcgatatcacgcacatgtccggatagacgctcttgttaccacagtggtgggactggggaacaggaggtttggtggaacgccaacgcagggtctactctctggggcacatgaacaggcatgggagaggactatggactggtggttaacgttttaattactatgacacgcacgaaagggggaaccttggacagcctatcggaggaatctcgatagtagaggtttcagcgttttgggcgttagagttgcaattccttgtcgaccagacaacaacacatggggcatgcaggaacgtttgtccgtcgctatacagatggccgcaaggtaccacggaacgtgtcatcggcgaacgtgtgtagtagccgttgggctaccactattttccttaacacgaactaggggggggcttacattccaaagagggtatcgcaatggcaacatacgttcgagacggcgaagcgttggtgacaagagccaatttggtgcctagaggatccccgcatggtaacacaacttcacgcccaaattgcgttatcccaacaagaaagccgacaagagccgtatagaagccaaagatcttgccaaggaacctgggtgaaaaccccgttccacgggtgtgacatcctcgagaacataggtcgcacaatgggtgtgtccaaacaagcatacggtggcaactaggtaagtggactagccatagtatggccaccaggccacg

SEQ ID NO: 610885 - DNA, 2565 bp, Homo sapiens
  misc_feature (73)..(74): n is a, c, g, or t
  misc_feature (89)..(90): n is a, c, g, or t
  misc_feature (105)..(106): n is a, c, g, or t
  misc_feature (114)..(114): n is a, c, g, or t
  misc_feature (131)..(132): n is a, c, g, or t
  misc_feature (137)..(137): n is a, c, g, or t
  misc_feature (143)..(144): n is a, c, g, or t
  misc_feature (147)..(147): n is a, c, g, or t
ggtggccccagtgtgctgtgtcggggcctggagcctggggcctggtgcctgcggagtgggtgcgggcctgagnngctggcgtgtttccnngaactggatgcgtgnngccatgantgatgctgggctgctgnnaccangccgcnnganaccaaatgccccgtggcttcctgcagccaccgccgctgcgccagcccaggacgaccccgccgccaggggcccagtgcgaggtccccgccagcccccagcggccttcccggcccggggcgctcccagagcaaacgaggcccctgagagctccacctagttcacaggataaaatcccacagcagaactcggagtcagcaatggctaagccccaggtggttgtagctcctgtattaatgtctaagctgtctgtgaatgcccctgaattttacccttcaggttattcttccagttacacagaatcctatgaggatggttgtgaggattatcctactctatcagaatatgttcaggattttttgaatcatcttacagagcagcctggcagttttgaaactgaaattgaacagtttgcagagaccctgaatggttgtgttacaacagatgatgctttgcaagaacttgtggaactcatctatcaacaggccacatctatcccaaatttctcttatatgggagctcgcctgtgtaattacctgtcccatcatctgacaattagcccacagagtggcaacttccgccaattgctacttcaaagatgtcggactgaatatgaagttaaagatcaagctgcaaaaggggatgaagttactcgaaaacgatttcatgcatttgtactctttctgggagaactttatcttaacctggagatcaagggaacaaatggacaggttacaagagcagatattcttcaggttggtcttcgagaattgctgaatgccctgttttctaatcctatggatgacaatttaatttgtgcagtaaaattgttaaagttgacaggatcagttttggaagatgcttggaaggaaaaaggaaagatggatatggaagaaattattcagagaattgaaaacgttgtcctagatgcaaactgcagtagagatgtaaaacagatgctcttgaagcttgtagaactccggtcaagtaactggggcagagtccatgcaacttcaacatatagagaagcaacaccagaaaatgatcctaactactttatgaatgaaccaacattttatacatctgatggtgttcctttcactgcagctgatccagattaccaagagaaataccaagaattacttgaaagagaggacttttttccagattatgaagaaaatggaacagatttatccggggctggtgatccatacttggatgatattgatgatgagatggacccagagatagaagaagcttatgaaaagttttgtttggaatcagagcgtaagcgaaaacagtaaagttaaatttcagcatatcagttttataaagcagtttaggtatggtgatttagcagaacacaagagagcaagaaaatgtgtcacatctataccaaattaaggatgttgagttatgttactaatgtatgcaactttaattttgtttaacactatctgccaaaataaactttattccctataacttaaaatgtgtatatatatataatagtttattatgtacagttaattctactgttttggctgcaataaaatcgattttgaaataaatgaaatgttgaaaattttgctagttggttagatgcttatcctttaaattctacttttcttgaggggaaaaagtcttcgcctggaaatacatattactgcaaaaatgtagcatccttttttaggtaggagtattatagctttcattttagtttgacatttagtgtcccaatgaattgaatttcaaatatgaatcataatcttgaaaatctttagcactaaagtcttggaatatatcaacaactgatttacatatgagatgctatttgataccaagggctttttaaatgtcatgggggggaaaaacccaacttggttgaactcccagctaaacaaccaagacttcactgaagatttattccaattctagaattgttctttttttattttttattttttcaactgactaacttcattaccttaaagcctagaacattattctgctttatttatatggctttctcaattttattttgtagcatgggttgaatcgaactttttactagagaattttactagatatttgtcattcaagttttcatctgctttataattgatacaccttgagggtcacttttctaatacttttacctataatgtggtacccacctcagcccctaataaataatatttttaccctaatgtcaaatctttttcccaggctaactaaaaactgtgtacaaaaggattgcttgtaaatatgcatgtaaatagttctgttaataacccactgttttacatttggtacatctgtgtctgctaatacagttagctttctcacttttctgcttgtttgttcagtctgaattaaaattagactttgaaaataaagcttaaatagttgtttcctcta

SEQ ID NO: 610886 - DNA, 910 bp, Homo sapiens
acacttggttacggtagtgtgtgtaggttttagctgctgaaaattactgttattttccctttccatacttctgttcttggaaaacagtcactaagtccagtcatgggaggtggtgggtgggaaagattacattcaacccctggaagtgggaatatccatatgtagtatttggaatttttctatatggaacaattgtttctccctccacacctaattggtttacatccagtatggactcatgtatatttagtattatgggtaacaagtatttatttcgtgcttaagttgtccagcattggctatcaggagttctgcaggttggtactatgtcccatttgatgtgcccatcacatttagatatttgagcacattcttactttctggcacatacaagatgctccaggttcatcttggatattccctggcaccaacccatagaatccctagaatcaatccacatgatccaaaagagcccatggttcctttgtcaggagaatcatacttagaaaccacgatctgggcaatgcagaatggtgctggtgcatactgggatgtcaacatgtcagtagcagagttgagaacatatgtatgtatattaatccatgcaatatgtaacaacatctatcaatcatcaatgtggtgtccaaagcctaacacattgagtttggtattggcagggcattcacacgatcgaaaacatggtccacaaaaacatcagggtggcacataaggcttagcactcgacaaagggcgaccagtgacccctacaatgacaagacagctacaatccgtcaaaaaggacgcaagcacacacaccagacagcacaaaacaagcgggcacaacaaaaacatcacgagacaaagccaccacacaacatgtgaaacgagacacacaaacaaaaacacagca

SEQ ID NO: 610887 - DNA, 2827 bp, Homo sapiens
  misc_feature (472)..(472): n is a, c, g, or t
  misc_feature (528)..(528): n is a, c, g, or t
gttgggggagagcggggtaagccgagggtagccgagcggggcgggcgctctggagcggcgggtgctcgggctgccgtccgctccgccagaagcaccgagcagccgaggaggcggaggaggaggagcatgtcggacggtttcgatcgggccccaggtgctggtcggggccggagccggggcctgggcgcgtagagggggcgggcctgagggcggcggtttcccgaacggagcggggcctgctgagcgggcgctcgcaccagccgccgcaacccaaagccccgggcttcctgcagccaccgccgctgcgccagcccaggacgaccccgccgccaggggcccagtgcgaggtccccgccagcccccagcggccttcccggcccggggcgctcccaggtacggagcagctctaagggccccagtcctccttggcgaacgcttccccacggccctccacgcgtgccgaggcccgacncgctgtctgcggtccccacccccggttccccgaaagcattccccgagagggccgcntgaccggagcaaacgaggcccctgagagctccacctagttcacaggataaaatcccacagcagaactcggagtcagcaatggctaagccccaggtggttgtagctcctgtattaatgtctaagctgtctgtgaatgcccctgaattttacccttcaggttattcttccagttacacagaatcctatgaggatggttgtgaggattatcctactctatcagaatatgttcaggattttttgaatcatcttacagagcagcctggcagttttgaaactgaaattgaacagtttgcagagaccctgaatggttgtgttacaacagatgatgctttgcaagaacttgtggaactcatctatcaacaggccacatctatcccaaatttctcttatatgggagctcgcctgtgtaattacctgtcccatcatctgacaattagcccacagagtggcaacttccgccaattgctacttcaaagatgtcggactgaatatgaagttaaagatcaagctgcaaaaggggatgaagttactcgaaaacgatttcatgcatttgtactctttctgggagaactttatcttaacctggagatcaagggaacaaatggacaggttacaagagcagatattcttcaggttggtcttcgagaattgctgaatgccctgttttctaatcctatggatgacaatttaatttgtgcagtaaaattgttaaagttgacaggatcagttttggaagatgcttggaaggaaaaaggaaagatggatatggaagaaattattcagagaattgaaaacgttgtcctagatgcaaactgcagtagagatgtaaaacagatgctcttgaagcttgtagaactccggtcaagtaactggggcagagtccatgcaacttcaacatatagagaagcaacaccagaaaatgatcctaactactttatgaatgaaccaacattttatacatctgatggtgttcctttcactgcagctgatccagattaccaagagaaataccaagaattacttgaaagagaggacttttttccagattatgaagaaaatggaacagatttatccggggctggtgatccatacttggatgatattgatgatgagatggacccagagatagaagaagcttatgaaaagttttgtttggaatcagagcgtaagcgaaaacagtaaagttaaatttcagcatatcagttttataaagcagtttaggtatggtgatttagcagaacacaagagagcaagaaaatgtgtcacatctataccaaattaaggatgttgagttatgttactaatgtatgcaactttaattttgtttaacactatctgccaaaataaactttattccctataacttaaaatgtgtatatatatataatagtttattatgtacagttaattctactgttttggctgcaataaaatcgattttgaaataaatgaaatgttgaaaattttgctagttggttagatgcttatcctttaaattctacttttcttgaggggaaaaagtcttcgcctggaaatacatattactgcaaaaatgtagcatccttttttaggtaggagtattatagctttcattttagtttgacatttagtgtcccaatgaattgaatttcaaatatgaatcataatcttgaaaatctttagcactaaagtcttggaatatatcaacaactgatttacatatgagatgctatttgataccaagggctttttaaatgtcatgggggggaaaaacccaacttggttgaactcccagctaaacaaccaagacttcactgaagatttattccaattctagaattgttctttttttattttttattttttcaactgactaacttcattaccttaaagcctagaacattattctgctttatttatatggctttctcaattttattttgtagcatgggttgaatcgaactttttactagagaattttactagatatttgtcattcaagttttcatctgctttataattgatacaccttgagggtcacttttctaatacttttacctataatgtggtacccacctcagcccctaataaataatatttttaccctaatgtcaaatctttttcccaggctaactaaaaactgtgtacaaaaggattgcttgtaaatatgcatgtaaatagttctgttaataacccactgttttacatttggtacatctgtgtctgctaatacagttagctttctcacttttctgcttgtttgttcagtctgaattaaaattagactttgaaaataaagcttaaatagttgtttcctcta

SEQ ID NO: 610888 - DNA, 375 bp, Homo sapiens
cctgcgtgagtgggtcagctagggaagcagaaggaggaagacgcgtggaatcgatcctggtctgaacttgggcgtgagccaccgtgcctggacaaaatatgtattctctttctttctctctctctctctctctttctttctctctctctatcttcccttccttcccttcccttctttgcctggtcttgctatgtctctctatcttgtcttccttgcccgtgcttcccttctcttccctagcctggcttcttgctctttctttctctccttctgctcttgctgcccttccttcctttccttcccttccttcctttctttcccttccttcctttccttcccttccttaccttccctcctaagttcagagccaggggg

SEQ ID NO: 610889 - DNA, 788 bp, Homo sapiens
  misc_feature (1)..(1): n is a, c, g, or t
  misc_feature (114)..(114): n is a, c, g, or t
  misc_feature (124)..(124): n is a, c, g, or t
  misc_feature (235)..(235): n is a, c, g, or t
  misc_feature (242)..(242): n is a, c, g, or t
  misc_feature (258)..(258): n is a, c, g, or t
  misc_feature (273)..(273): n is a, c, g, or t
  misc_feature (281)..(281): n is a, c, g, or t
  misc_feature (283)..(283): n is a, c, g, or t
  misc_feature (320)..(320): n is a, c, g, or t
  misc_feature (347)..(347): n is a, c, g, or t
  misc_feature (350)..(350): n is a, c, g, or t
  misc_feature (360)..(360): n is a, c, g, or t
  misc_feature (369)..(369): n is a, c, g, or t
  misc_feature (371)..(371): n is a, c, g, or t
  misc_feature (375)..(375): n is a, c, g, or t
  misc_feature (390)..(390): n is a, c, g, or t
  misc_feature (417)..(418): n is a, c, g, or t
  misc_feature (422)..(422): n is a, c, g, or t
  misc_feature (442)..(442): n is a, c, g, or t
  misc_feature (518)..(518): n is a, c, g, or t
  misc_feature (613)..(613): n is a, c, g, or t
  misc_feature (652)..(652): n is a, c, g, or t
  misc_feature (698)..(698): n is a, c, g, or t
  misc_feature (760)..(760): n is a, c, g, or t
  misc_feature (787)..(787): n is a, c, g, or t
nccagcccctcacttctggctgtggcaggttccccatcctagctccccggatctccatagggagtgtccagggaccctcaatctccagggccacttctgcaggagctcgggttngaggttccangtggccagaagagctcaggtctctgagggctggtgtgcccgggtacccatccgcatcactgctctcctcctgtccggctacgcccagggctgagtgacggtggtggcaagnacttgtnctcagggcagcaaggncttctgttcttacancagcaggnantccttcatggccaccagtaaccccagtgggcggaggngctcctgggctcggagccaggacaaancgncgagggtagnggttaccangnttanactgagcaccgcagnagctgcaataaccccataggcagttgnncttncagactggtctccggcagangaggatttgggattgccgagagaggggagagtgtgcagggtcacagggggccccatggttgtggcattcctgaganaggtgacactctccagggtcacagggggcccatggttgtggcatcccttccgggaggatctcattggttccacagccgagctcgtcgctggagtngggacagtctgggtggccgtcgcagcgccacgtgagtgnaatgcagttatcgctcagcgtgcaacggagctcgcctgctaggcangccaggcggctgcagttgcccagtttcttgtcagttcccccagagcagtgactgacgccggngcaggggcaggggaggcagggggcggng

SEQ ID NO: 610890 - DNA, 145 bp, Homo sapiens
tatacgggttcctagtttccacagtgcacactaccactcgttatctctgatctttttgataacaggcatcctaccaggtgtgaggtgatattatatttccatgtggtctgagatatgcatttccctggtgattaataatgttgag

SEQ ID NO: 610891 - DNA, 216 bp, Homo sapiens
  misc_feature (99)..(99): n is a, c, g, or t
  misc_feature (145)..(145): n is a, c, g, or t
  misc_feature (185)..(185): n is a, c, g, or t
  misc_feature (190)..(191): n is a, c, g, or t
acccaggatcgggagactctcccacccctcctgcagttggactgaattcttccctttcatccgaagaaacccacttgctgtttccatgccgctgaatcntgctgagtgtgcagcctgcatcaccgtgctgtatgcctgatcatcntcagaaatgggcttgtgtagatgtagtggcccgtgttctnccttnnaggatgttgcttgttcctgctgggt

SEQ ID NO: 610892 - DNA, 838 bp, Homo sapiens
  misc_feature (699)..(699): n is a, c, g, or t
aagaagaggaagaagatgatgatgaagatgaagatgaagaagatgatgtgtcagagggctctgaagtgcccgagagtgaccgtcctgcaggtgcccagcaccaccagcttaacggcgagcgtgggacctcagagtgccaatggatgatgtggtcaatggatgtgtgaccccctgctggacctgcaccatgggccagtgactgaagtggcgtgtggtgccaagcccctggtgcatgctgtgctaccctgccagatgtgttcctccaatgtgcatgccactgacacaagtgaacgtggtgtgacacagacttactagtatgcacacccgtgtgcacatgagctccgcctgtcccacctgtggcctttttgccccaccatgtgcaataatcattgcgccttacgctgtgtgtgcctgatctgtgtgaccccccctatttggcttgtcactaccctgtgtgctgcaattatggagacaggccgatcgtgactcccctgtccgtagttgggacctggtgactgagattgtacgtccgacatactttctactagagtgcttgtgatctccctggaggcaggtgcgaacagtcttctcccacatgacgcagtgaacatctgcatgagcacaacatccttttgtctaggctacattgcaaggcatgcacgcatgactagtgactacacacgggaccttgtcacaatncacggcgcttcgtgtgactcaggccgcttgaagtacatatccttaacgagatgcacacacaaccaatacacagtgcgtgtctctcacggtcaactgagcacaccttgtcgaagtgaatgaatagaaccctcggactggc

SEQ ID NO: 610893 - DNA, 972 bp, Homo sapiens
gggcctgctgaggtgatgagagtccgggagcccgaacttgagatggcctgatatgaaggagtcacgcctcccggctcccggatctgcccagaggactgcctcgtccttacaatgtgcagagagctggttcagatgtcatggaatgggaagccatgtgtgaccagttcccaagtcttggcaaaacgaacgcgcacatggggcttgctcgaagtgtagtaagaagaattgggaccaacctacccttgacgccgtttgcccgggcgtcctttgagatcctgacccaagcatctcgtggaccttgtgtttgagagatgtgcccccagtcacctaacctggcgtgacatctgctggattgctgcggatgaagaggagacatatgcccgggtcaggagtgatacagcgccccctgaggcacacctggaaaccagacctctgattgtcatgcaggcgcaatgcctctgttcccaagctgcgtgggtccgaggagaggttctggccctgaagaagccagctctgcagcgcctaagccgcactacatgagctgaggacgagctgaggcacttgcgcagccatgattgacacagatagtggcaggtggatgcaagttcggttcattaacgcagattcttatgtcaggaagttcaaatgtgtcttctcccttacttgttgggatcctcattccattctacacttcgtttgttattagtgcattacgagggagacagggtgggaggtcctgaggtcataggtcccctgttgtttggaagcctgaatggtgcaacaaagcaaagtggtgaggtggtgaaaggttgccagggctttgcaagcagagttgaggatggattgagagtacgataaaaggaatgaaggttgaggaacgggatttgagcaagaaaggtagaaaatgaagacagataagctgaaaagagaaattaaagaggggaaaggttcaaggttttagtgttctttttg

SEQ ID NO: 610894 - DNA, 344 bp, Homo sapiens
cagcgatacttttcctcactagaacaatccggctaagcgatactaatgctcacggttcatatctgcacgatactagtcattaattcatcctgaacgacgcgctaggactgagtacgggttgcttcccaggtttggaaacaattcgtacacttgccattctctgaatataccggtatcgctgaggtcagcctggtcagctcttctttgcgcttagctatagctacataccatggcttcgtggccaccatactagcgttgatttctgtcactgcttccgtgtcttcttctggggaggagaaatatacaaaaccgaaccctttgctacaatcatcctcctctttcga

SEQ ID NO: 610895 - DNA, 207 bp, Homo sapiens
catggagaccagtgaggtaaagcaggtttggggagttggttccagaaatcctaaatatgagatgtctattacaaatccaagtgaaaatgtagagttggtggttcagactagaggtctgaaattccatctagattatatcaaagggacattaaaattgccatatccaagatatgtatgatcagcgggggtagatatcatctcgtctga

SEQ ID NO: 610896 - DNA, 164 bp, Homo sapiens
  misc_feature (135)..(135): n is a, c, g, or t
  misc_feature (155)..(155): n is a, c, g, or t
atacctgggtgtgacagctctatatggagtgggggcatcactcaagtctgtatcagagtacatacagccaacaccacaggagggacgagcaccctgggcatccctaagtgctggttggctcattgggcctgaccntggctcaacctatggatccntaggatgac

SEQ ID NO: 610897 - DNA, 124 bp, Homo sapiens
gcttgataacggtagtgctatcacagctcactgcagccttgagctcctgggctaaggatcctcctacctgagcctcctgagtagctaggactggtctccatgggtaccgagcttcgcaattcgt

SEQ ID NO: 610898 - DNA, 570 bp, Homo sapiens
tgcccagcctgagcgtcgcggggcctgacccccgccctgccggccgcctcgccgagcctcctggggcgcccgggccctgcgacccctgcacccagctccgcaggaccggcgggcgcgcgcgtggctctggaggccacgggcatgatgcttcgggtcctggtgtggggctgtcctccctgccatgctactggctgccccagcacccatcaacaatgctggcactgttcccagataagagtgcctggtgcgaagccaagaacatcacccagatcgtgggccacaggcggctgtgaggccaagtccatccatgaacagggctgtgcctaggacatgttgcttcagcgtacatgctgtcccccaagcaccgttcccaacagtccacatgagtccctggtatcactgtgaactacctgcattgccaggcccatgtccagtgtggggagatttgtgactgctggaggtgcccgggccacgacggaggtgcccagcggtggacaacgctgggtggaggaacgatccttgcactgtaggctgccaggcctgctggcaaggcagcctaggtcacgacgg

SEQ ID NO: 610899 - DNA, 201 bp, Homo sapiens
gggcccctggtgaccccttcctccagagcagccagcccagcccgggaacaagagggatttcctttcccttgggattcccagcctttgcagagtcaaggtccccttgaaggtcactcagtaaaatcctttcaatgggttttatattgttttggcggcctttttttgtagaaataaaaattgcccttagaattttttgtcaga

SEQ ID NO: 610900 - DNA, 170 bp, Homo sapiens
ggtcaggcagaagcctgggcgacagagcggggcaccgtctccaaaaaaaaaaaaaaaaaatttttgagaacccttgaattaccaggattctagctagggacctcagcaagggggcacttagcacatattaaaggcctcattaaaccaccatgtgaccttagggaggtttc

SEQ ID NO: 610901 - DNA, 527 bp, Homo sapiens
  misc_feature (91)..(91): n is a, c, g, or t
atttaataaatatgttgggaaaactggctagccatatgcagaaaactgaaactggaccccttccttacaccttatacaaaaattaactcangatggattaaagacttaaacgtaagacttaaaaccgtgaaaaccctagaagaaaacctaggcaataccattcaggacataggcatgggcaaagacttcatgactaaaacaccaaaagcaatggcagcgaaagccaaaattgacaaatgggatctaattaaactaaagagcttctgcacagcaaaagaaactatcatcagagtgaacaggcaaactacagaatgggagaaaaattttgctatctattcatctgacaagggctaatatccagatctacagggactttaattatgagaaaaaacaccccatcaaaagtggtgagcatttgacagacactggcaaagaagacattattcgccacaacaatgaaaaaagtatatactgtcatagagaatcaattaaaccccagggatcctttatgcacattgatgggacat

SEQ ID NO: 610902 - DNA, 111 bp, Homo sapiens
tttgtctgtccccagtcctgctgttcagcagcagcgggtctcctgcctcaggccctgcgcctgaccacctggcatcgtgtcatttcccctcccccatgcgtggattgccag

SEQ ID NO: 610903 - DNA, 311 bp, Homo sapiens
  misc_feature (157)..(157): n is a, c, g, or t
  misc_feature (196)..(196): n is a, c, g, or t
tgtgactctagaggttcccccccgactagccctgacagccgctctgagtagttgtcacggtcacagccctggccacatggctggtctgcagctctatggtggcctgaatgttccagagtggttcatcacatggtctccagtgcgtgataccatgggnaacaaatgccaatgctcccatgcacctgtgtgcatattncgatcgcttttgttccatgccttgcgcagctgggtttacagtgtgggcttcaccgtgaatctccacctcagcatcatctgctgcccgcctgtcgggctagtcgggggggtaccga

SEQ ID NO: 610904 - DNA, 124 bp, Homo sapiens
tagaggatcccccagggaaacatgctatactaaagaaagcttcagtatctccttaaagaagttatggttaaactagtatctctggtattgaagaggtgaaatatgttcacaatacccaaggtaa

SEQ ID NO: 610905 - DNA, 881 bp, Homo sapiens
taaaaaaacccgtgtcctggggggggtgggggtttaatcctaattggaaataatatcatttagggggaaaggcccttgggaaaataggccttatttttttttgtcctttcgtacaaggagaggatatttggatgtaaataaaaaccggcacctggtattaatccccggtctggacactccagtatccacgtcaggattttatatctgttggaacaaacaaacctttaatagcgggcctgcaccatggggtatgtccttgatccaactatcgaggtctgtaaacccttatgggtggtggcggggtgttatgtcttctgcgactgtgttgtgtgggagatctggcgttagataagagaagatattgttctctcacaagagaaattgtgcgctcacaatattggggggccccctggccccccaaatctttacataagcgccacatgctgtgttttatgcgccactagatggtgtcgccctgtataaaaaaagatgtatcacaaccgcctgtgtgctgagatctaacacaaggcgacaacattattgtgtcggtggtccctttctttaaaacccccttctttcggaattctccactcttttgggtggtcgcccccagggggagcaattcattcgcgtgtctctcaggttagattaggagcgccaacaaacgactttttaaagaaaacctacaacgtggcccaacgtagacttgggtgcgctctcctggggggactccctacactttcttggtccactcataaccagtgggtgtcaaatacccctttaggaaaaaccggggggggacgttgggaccccattgaaaccattccttttgggttatccaaaacccccgagggcgcccacattttcgtccaggattatgg

SEQ ID NO: 610906 - DNA, 476 bp, Homo sapiens
cggcacgaggggccagttggaggtaaacgactgcatcacgtcgaagatggtggccttgtgcagcggccagctctggatgagattcaggaaggttttcttcgcctcggccggcgtcgtaccgcgcaggctctgatggtgcatggccacactgtcgcgcggtatgttcggcacgaagcgcggcggcaaacagtgcgccgctatgggccgatagtcctgcacgatgtcggaactgtcgccgagctcaagttgtccttgtagagcagttaacataatagcctccatttcggtgattggaaaacgttcggtacgcaaaccgtgtagcacctggtgatagagcaattccttttcgacgggatcgtccaggttcatgtactggtcgcagaacagatgcttcttgaacagaaacagatggtgctgccggcggcaggcgggcggtaagttggagctctgattttgctgcaccgcctgggcggccg

SEQ ID NO: 610907 - DNA, 216 bp, Homo sapiens
gttaccctgaaggttctccgagaactccagtttgccattaacttgacaatccacagctgcaaaaagcacaggttggcgattagcgttggcggagagccctggaaaacatatgggggtgttcttctcagtctcagggctatccaatgtggtgctttaattcaaacgacagacgcctggcttaaaccatcaaaggcctcataatttctgccggcctgg

SEQ ID NO: 610908 - DNA, 109 bp, Homo sapiens
aaacacaggctcttctgcacagtatcagaagcagtgtggaagatatgggagtccactttatggtggaacaggagccttcctctagttccaagtcctgttgcctgaacag

SEQ ID NO: 610909 - DNA, 337 bp, Homo sapiens
ttgtgtgcacatgtaggtggtgtcatcatggaccatcaatctaatctttctatgttcagatacccaatattactagttgactgtatcttttctgtgtttagatacacaaatacttaccactgtgttacaagggctgcagtattcagtaccgtcccctgctgtacaggtttgtagcctgggagcattaggctgtagcatacagcctcaggtgtacagtaggctataatatacaggttggtataagtgcattctatgatggttacaccaagaccaaatctcatcatgatggctttctcaaagcctattcccatcattaagccatgcatgactgttattc

SEQ ID NO: 610910 - DNA, 427 bp, Homo sapiens
ctacaggatttttaggcccattcccatccttactagaatagcttgggaaatttcaaagtaagcccaattatagttggcatggcttttccaaaggtttcaaataatcatattctttgggattttctcggttaacattataccgaatcttttatttctgcctcacaccgggcaggttttatattttaaaatgtatattctatatggtataaatatttatgagacagattaaattacctagtataaaaacaatatacttttacacagaactcggtatcccctcagtctaagcacaggctggcttttcacaagaaacgatgtcaaagatcctgaagtggttcatacttttcccacaaattaaagctctatgcatcatttatgaaagcagcgtgctgctatgatcttaaggcgctggagccgggcaacccat

SEQ ID NO: 610911 - DNA, 221 bp, Homo sapiens
acaggaccaggtgagtgtgggaggggcacagagacttccgtgccctctgtagggcacactaccctcccaagaactccttgttgtttagcaacacagaaagctgctccaatatcctggctgtgttgggatgtttaatggacggcatgtattgactcgacatcactggtccattgtgctaggtttacgctcaactactccagcttgcctttcggggcctcctg

SEQ ID NO: 610912 - DNA, 372 bp, Homo sapiens
  misc_feature (344)..(344): n is a, c, g, or t
cccaaaataatttcattgacatttaaagagcagcagtggtgccctatcaataggcaacataaaaaattacaggccgggcacagtggctcaccctgtaatccccagcactttgggaggttgaggcggacagattgtttgagcccacaaattcaagaccagccagggcaacatggtgaggtcttgtctctacggaaaatacaaaaattagccaggcatggtgacgcacacctgtagtcccagctacgtgggaggctgaggtgacagaagcacctgagcctgggaggttaagactgcagtgagccattattgcatcactgcatcccagcctgggtgacaaagtgggnccctgtctcaaaaataataaataaattt

SEQ ID NO: 610913 - DNA, 186 bp, Homo sapiens
tttgacctatgtttacatccccgaggggtttttgccccccccccccccagggcagggggtggtccaacagctttctgtggggggtttacatgtgtcccccctgccccccttgcccccgggggggtcatggtctcctcctggatgctgccccctgaatttttttttttgataacccttttcccatta

SEQ ID NO: 610914 - DNA, 319 bp, Homo sapiens
tcttcaggtgaagtcctaaagcttgcttccaccagcattctacgatagccggcttattactaaagcagatagatatctccttcagctctctgcttgtggtccacagtagtttcccgtaagtctaggtcctcattatatttcctaaagcttggggtccatgactagccagtatgatgaacatgtattctcggttgccatatagctgacatttgaaggcagtctgtcgtaatagccatgcatttaacatttgttaagtagagcaaggaaaaccatttactgcagtcctatcctagctagccgcctctgcagggtaccgagc

SEQ ID NO: 610915 - DNA, 462 bp, Homo sapiens
tcatcgagctcggcctgatttacctattacagtacctgatgcaacaatgttgctgcccacaatgtatattactatgctgagactttcatgaatgggcgggtcactgtcttccctggtaaatgtgccttcgaaactgtgaatgcccattagtaggtttctgagcataaacataagcacagatagaaaacaggtcccccaaagccggcagctgtgcatgcagctcactgccaccttcagcttccagtcagtttcaccatctagttgatcagttcgaataaaacacgaacctgcttttactgaagtcctaagaaacaccatgtccgatggaattcatatgattctttaccactatgatgaggtctccaaattgtctgtctgaactcttaacttgcactttacctcttactgtccgcttgctatatagttgtgaattcacttccttgtcacgctggtggtatcgct

SEQ ID NO: 610916 - DNA, 199 bp, Homo sapiens
  misc_feature (141)..(141): n is a, c, g, or t
cctcagccagtgggcggttctactcaaggggaggcccgggtcagagtctctgggtccagcctgtcccgtgggcaataggtgcagggtgtccccgtggctgtggagggatttcaagcctggagacggggctgtgggtcccancattctgaggtcccgttcccactgtagtgcatccagtgtgatgtgcttcctgcgccaa

SEQ ID NO: 610917 - DNA, 376 bp, Homo sapiens
ttaagtcaggcatcacgtcggtactcaggaccagccattagaataggagaccaacatgaggagatctgcgtgtgatgtgagattccatttctgaaatcactgatatcttttggtgggtttaactctgtgtctacctttatagagcacagaagttagtggtacgaatgataatctcaaatagcaatacactgtgtactgatattggaaatgcacgctgaaggatgccagggagctgaactgacagctccaaaggctggcaccaggcataccatgagcgcattggcccagccagccagccaaacgtggccacgcactgggtggccagagagtccttaccacttcagtaggccggtagtacttgagatccacagtcacg

SEQ ID NO: 610918 - DNA, 264 bp, Homo sapiens
tctacacgatccctgttgtgtctgtgctatagagtctgtgtattgctgtttcatattcggagttctggtttgtccttcccttcaaacctgttaacagtttcttttgcgggtggggggattcagaacccttgtttcccattccatatcaccttacactatttctagttttataatatcttacggtgtctatttaatgtgtttcattggtcttgtctcccccttgtcgcgatataagcagttttcatatattctggatactaggcc

SEQ ID NO: 610919 - DNA, 166 bp, Homo sapiens
taataaaattattattataaaagggaaaataggtagaattagcgtggtaagggcaataagtgtggggagaaatggggtggttttggtttgttcaaacggtcatttaatttttactttgtaaaatatgggaagtagtgtaatggaggtggattgaaacatcgggttc

SEQ ID NO: 610920 - DNA, 395 bp, Homo sapiens
aacttggagttcagggggcttccaccattcccagaactgaatcaaagtagcttactatatctaaactgtaaaacaatatagtttctactgaacacctgctttccttctaggagtctggaattttggtatgtgccaggcagagactacctttgtgaccagctcccagtaaaaaccccaggcactcagtctctaacaagcttttctggttgacagtgtttcacaagtgctgttacaactggttgctgggagaattaagctcatcctctgtgattccactggcagaggattcttggaagcttgcacttagtttcccctgacttcaccccatgtgtcttttttcctttgctgattttgttttgtatcctttcactgtaataaatcatggccgtgagcag

SEQ ID NO: 610921 - DNA, 215 bp, Homo sapiens
ggtatgtgtagcgtcgagaaggtcccttatcaaggcagaacaaagcagtttgcaagtggtggggaattgtggctcctttatagcaactgtatgcaaagtggcatgcaaatagagcctgttttcccatccaatacctagtggctcagaagcaacatgtgttccccatggaccccttgaggcagccccttgaccctggtcgctcattcaccaatgaa

SEQ ID NO: 610922 - DNA, 324 bp, Homo sapiens
agccctgactatagagggactgtcagcagtagttatcagcatgccaggtttctaaaaccttggattctcactgtgcatagaaatactataagtcatactgggtcattccagactgggttacaggccaataagacagttggggctggatagatgtgggactgcatcaatgggtcacagagaaggtatgccgaattaatgaaatcatctaaaataggctcagatgcactcatgatgttattccatgagtgctgcatctatatctaatgctgaaatcccaaccaagaaccccaaaataagtctgtgtatagactctattgtggtcct

SEQ ID NO: 610923 - DNA, 200 bp, Homo sapiens
tgttgctggaggatctgctgcatatgctggggagtgataacttgaggtgtcatcatagccggctgacacgggaacctgaagagctggttgtttgtcattcctcttgggagatttcaatccactaacttgctgctgctgatgctgctgaagaaggagctgtcttgccacctgaagtgcctgtagctgctgctgctgagcag

SEQ ID NO: 610924 - DNA, 346 bp, Homo sapiens
aaaaaaaaaaaaaaccccccccccccgttttatgggggggttggggaaaaacccgggggggtacgaaaaacccccaaaaaaaaaaaaaattcccccacccccccccgggggggaaggtttgttattttttccggccacccccaaaaagggggggggggggggggaaggggggcccccgaaccccccttttttcccgaaaacccaaatgtttcccccttttaaggggccccccccccatttaaaacccccccttttttttggggggttgggttttgggggggccccccccccttttttttggggggggttttggtttcccaaaaaaagggggggcccttggtttcca

SEQ ID NO: 610925 - DNA, 111 bp, Homo sapiens
aacagctgtatgctttaacagtgatggctgatcattcctccgtagaactaccggaatgaagagtaacctggtcatagagtcttctcaaatgtttgcaacttggatatgatg

SEQ ID NO: 610926 - DNA, 696 bp, Homo sapiens
ggagaagtgagaacatgcggacagtcaggagaaggcctgtgagaaggatatagtaccgttatcagggctggaatgtagggaggtgagccgaggaaagaggaaagagatgagattctctcactacattaggggtgggataattataagagtacaacgctatatgttcattgcatgaattaaagaaggctaaaaaacaaataatagaaagaatgtaaaagagatttacacacaaagtctttgttctatccaaaaacaattgtaataggacactaaggtcgaggggaagaaatgtggataggatggcacggttatatggattttacggagaaggcacatttaacgagtgttgaacagagggaaactatgaggggctttgtgcggaaaagagaattttcaaagatttggtaaacacctttcattttgggtgggccttaacgttagattgaaggggaagataacttcgcccaatgtggaagggttgtatcccgcgatattgtccatggtcttacgcgcagggtaagggcaaaatacgtgggggacgtgagaacaatctcccctctatctataagcggcaattgatatccaaggtggagacaatcggtcatattcgaacgtcctttgactagagctggcgcaaaaatttagtggagggaaataataggacggttcggggttccgggccgatcgttgttgccc

SEQ ID NO: 610927 - DNA, 721 bp, Homo sapiens
tacaccttctgagatcctagggttatggcccagggttttaccttctagattcatcccagttttcggtcttaaaatgaagtttcactctcaatgtccaggtggaatttccagtcgcacaggtcatacggttctaagtgtacgtcattgccatgcacgtaccgggtctgcttgtctcaagcacgtcttcccgtgagccatgtgctcctctcagacctggcattcagcatgatcgtcgctcaccaagttctgaatgctcttcccttttaggctctctgctaacctcctcgggcatggcacacctcacagaacccagtctctctgccactaatgaaagctttaggccatggcagcaaactagacaccgtcaagaccaagtcgaactggtatagaagtcaagcggatgtggggattggagcaaactagagtaagctcacaggtgtccacattccgtcgtgcaaaagttgcatccactcagcttcagccaattgttgctatgcgggaacatggacccaaatcttacaatttcccaagccatgctagaaatctaggttttagtgtgaaatctctttgttaaatttagtaggcttaattgtaaaacattttcaaaatactgtcagtgagctgccagttttcaatctctgcttctgaatagcctttggaagacctctgtcgccttttttttctgtattttagcttgagatgaaaattcgctgttgttgcc

SEQ ID NO: 610928 - DNA, 829 bp, Homo sapiens
acacacccggtctgccccttaggaggtcctcaccttcaggttaccacgagactaggtgagtgacgactgacggacagtcctgatgcgtattttcacgattcgctggcagctttggcgggtgcccccccaaagctgtcccgtcgtcttctcgcgagccctgcccttgccacttgcttaatgccacaattgtgagatgactcacccccgtgcccctctcatccgttatttccctgggtgacgcctcccttggcgattcccctcccggctctactcctctcttagttgagcactggagcgcagcccttactgctccagttcttgtgcaacgcctcattggcgattgagcaagagactcgccactatggtcctccttcgggatgcctctcgtgcacacgcctgggtgttcccttctactcacacacactgtctgcttccttgtcctttaccgccttagttctgcgaactgctcccggggaccttccaccaccgtcatcgccaggtgggtgccactgcgtggtcaagttctggttctcatcctccttgtagctcacattctctcctatgcgctgccacgcccgacgctacgagtagataggaagtgtaccactcttttctgcctcaaacacgttctgggtttcgcaggttacccagccaatttatcgatctctggccttcttcagctagggacagtgttcacccacatttaggaccatgaggagatgatggcttaggctgacctttttctgtaggtccggagtggaattacagtaactatataacagtgcttcgcatctccactagatgatgctgaccacagggaatgagaaca

SEQ ID NO: 610929 - DNA, 262 bp, Homo sapiens
  misc_feature (229)..(229): n is a, c, g, or t
  misc_feature (239)..(239): n is a, c, g, or t
  misc_feature (242)..(242): n is a, c, g, or t
tcttgaccttgagaatttgggttaccgaaaacaaccagggggttttgggtctggggtccccgctgctcgctgcacagaaagtcaatgactgagacaacaattattgccaaggaagaaggctttaatagggtgcttcagccaaggagatgggagatcactttcaaatctatctccctgactgtccaaaattagagatttatatagtacagaggaattgtaacaatgtttnattgaaacanggnacttaagggggggggtaagg

SEQ ID NO: 610930 - DNA, 381 bp, Homo sapiens
  misc_feature (195)..(195): n is a, c, g, or t
  misc_feature (202)..(202): n is a, c, g, or t
  misc_feature (254)..(254): n is a, c, g, or t
  misc_feature (280)..(280): n is a, c, g, or t
  misc_feature (302)..(302): n is a, c, g, or t
  misc_feature (336)..(336): n is a, c, g, or t
  misc_feature (342)..(343): n is a, c, g, or t
  misc_feature (346)..(346): n is a, c, g, or t
  misc_feature (366)..(366): n is a, c, g, or t
gaaaaagagaaatgataatccccagcagcacatccaataccagtgcggcgaagccgagggttactttatgaaataagaaatcttgccatctgttgacgacgcatgacagcaaccagccgctcatgactcaactgcgacgattcattatttttatgctcagaggctgcgtgacttacggatgatgcggtcatgtgncgagacnttgatgtgctgggtgtcatttccaccgaagaggctagtccggcaacacgtancggaccgccccctgtttgttgcagancctaccttaactaccgtactanaggctcaggtacatctttacttgagttaaaaccnaatttnncangattgccttactggtaagcnttcttgatttttgct

SEQ ID NO: 610931 - DNA, 224 bp, Homo sapiens
gacccgggttgtgggtgaccgtggcttcaactcttgggctcagcagtccccgctgcctcagcctcctgagtagctgggagtacaggtgtgcgccaccacacctagctatacacctagtatagatatgtcttgctgtgttacccaggctagtctcaaactcctgggctcaaacgatctgcctgcctcagcctcccaaaatgctgggataataggcattaggcacc

SEQ ID NO: 610932 - DNA, 107 bp, Homo sapiens
acatgaaaatgttaaaagttggggggggttgaattttaggcaattttaatttttttaacgtcttttggtttttttacaataaacatgaatcagttgtagaacctcta

SEQ ID NO: 610933 - DNA, 313 bp, Homo sapiens
taaggctttgtttgcattgtttgagttcaaggggccttattattgaatggaattgcacaagcctttctttgtgcaatcaaaccacagtttcctttacagaactaccaataacaatggtttgattgcacaaagaaactgtggaatcgaattggcagtggagtcataaatctatttactgagtgtggcttccaagaaatgttgcaattcaaaatgcactaagtctgtgatttattggagatttggagattctaaataatatttttaaaaaacttccatgcaacttctggtttaatgtttggcaactccacatgat

SEQ ID NO: 610934 - DNA, 138 bp, Homo sapiens
cacagatgtagtttctctgcgcgtgtgcgtttcctcctcccgcctcaggtcacggcacatggcgtataggggcagcagtgctgcggagcattggcttgcagcggggagagaccaggctctgagcggcaccccagcggt

SEQ ID NO: 610935 - DNA, 183 bp, Homo sapiens
ataagggtggggtggtcatattcctgcctattagggtctcttgcatcagggtagagagaagctcagtcccagagtggtggtatggtgaaggtcattaccaactccaagttccgacaagaggtgatagttctggcaacagcaaaagcataggcaggctttcacaaacaggttctgagtcttctg

SEQ ID NO: 610936 - DNA, 159 bp, Homo sapiens
  misc_feature (1)..(1): n is a, c, g, or t
  misc_feature (17)..(17): n is a, c, g, or t
  misc_feature (40)..(40): n is a, c, g, or t
ntttttactttttttcnacggagcgcgccatgtgttggtnacgggggattcggccattatgggcggggaagattttgatctgggtaggctggtggtagggttctttgtttttggggtttggcagagatgtgtttaggtgctgtgcccaggcgggggggg

SEQ ID NO: 610937 - DNA, 266 bp, Homo sapiens
cccgcaggcttggccccagatagattctgactcaaaagccctcgcgatgtcaaggggtgggtttcgtatgttcaccactgtcatttattttacgtcgtcagatatggggagtagtgtgattgcggtggagtacattaggcgtacgtagaagtcacaggttaaggagggtgatggttgtgctatgatggttgggattatcaggctatagtcttttgagaattctccgataatgacatcttaatcttggtggcccaagcctgctgggc

SEQ ID NO: 610938 - DNA, 275 bp, Homo sapiens
  misc_feature (113)..(113): n is a, c, g, or t
  misc_feature (155)..(155): n is a, c, g, or t
  misc_feature (167)..(167): n is a, c, g, or t
  misc_feature (170)..(170): n is a, c, g, or t
  misc_feature (199)..(199): n is a, c, g, or t
  misc_feature (236)..(236): n is a, c, g, or t
  misc_feature (242)..(242): n is a, c, g, or t
ttttcatctagtactttcttaatgcctttattggagtccgcatcctctatctttaaaaaaaaaaaaaaaaaaacagctttagcctaaagccactttcaactttttttaagttncacaaaaagggtttaatagccacaatgtgatttttgccacanctgtgtgatttnaanattctctaatatcaagggcggatttaganttgcaggaaatacctggggaaatcacagtggatgaantttttnctttaggcgaatgaagagttggctgtctctgta

SEQ ID NO: 610939 - DNA, 135 bp, Homo sapiens
gtggaggcctgctgggaacgggactcttaaaaggaactatgtctggagggctgtggtccaaggccatttttgttggcattaagcggggtttccggaaccaaagggaggcacacagattttcttaaaattgaaggg

SEQ ID NO: 610940 - DNA, 749 bp, Homo sapiens
tatttctgcatgtacacgtacttgctttctttccctgctgtaacacattaccgcaatcttaacggcttacaacacctatttattctctcacagttcctcaggtcagaaggccgggcagttttgcctgactggtcttctgcttagggtggtgggagcctgaaatcaaggtgacagcaggcccacgcccctttctggaggctctcggactgaatctcctcccagactcttccaggctgtggtctgaatgctgttcgtaaggtcagattcccatcttcatgccggctctcagtcaggggccagtcttggctccccgaggcggcccaggttcctgctcatgcccttcacgcacccctccaccagccgccggccaggtccctctcgtgctctgatgcgctctgactctcctttctgctgaatctctgactgcagctggcagaacagttctcgctttgcaaatgctcacacgattcgattaggcccgcaccggatgatccaggataatctgccgcaggtctactcctggacactcataaggccatctgcaaagtccctttagccatgcaacgtaacatagccaccagtcggctctggaagatacgcagcatggacatccgcgagaggcccatgaatcctgccaaaccaccccacatgcacacatctctcttgttccctcgcaacccgactgttcataaccaaccaacatccaataacagcgatctagagcatacaccaccccacacacacgccag

SEQ ID NO: 610941 - DNA, 512 bp, Homo sapiens
  misc_feature (39)..(39): n is a, c, g, or t
  misc_feature (95)..(97): n is a, c, g, or t
  misc_feature (99)..(99): n is a, c, g, or t
  misc_feature (101)..(101): n is a, c, g, or t
  misc_feature (111)..(111): n is a, c, g, or t
  misc_feature (146)..(146): n is a, c, g, or t
  misc_feature (213)..(213): n is a, c, g, or t
  misc_feature (228)..(228): n is a, c, g, or t
  misc_feature (230)..(230): n is a, c, g, or t
  misc_feature (304)..(304): n is a, c, g, or t
  misc_feature (311)..(312): n is a, c, g, or t
  misc_feature (318)..(318): n is a, c, g, or t
  misc_feature (325)..(325): n is a, c, g, or t
  misc_feature (327)..(327): n is a, c, g, or t
  misc_feature (330)..(330): n is a, c, g, or t
  misc_feature (332)..(332): n is a, c, g, or t
  misc_feature (337)..(337): n is a, c, g, or t
  misc_feature (398)..(398): n is a, c, g, or t
  misc_feature (414)..(417): n is a, c, g, or t
  misc_feature (444)..(444): n is a, c, g, or t
  misc_feature (448)..(448): n is a, c, g, or t
  misc_feature (467)..(467): n is a, c, g, or t
gctggcctcagatcatgtgcaggggtgaccatgccagangtccccaggcctccattggttcagctgggcctgctccagaggaagaagttgcaccnnntngnggggtcagtnggaggaccccggggcctggcacacatgtagaagcngcggcccaagttgggtcctggcttcttcacagtacgcatcacacatggctccctgtagcccccacanaggggtgtgcgcaangnccccgccagcacagacttccagaatgaggtccgtaactccttctcatctttggcttctgaagtcttggcctgcnccttttnnactttngccactncnttntnttctngagtcttcggggtcatgagggcgctcatcagtggtaggctaggcagctctatgttaggtgnggcttggggacagctnnnnttgggctgaaagtagctcttcaggttnttcnggcctctgctagagccaanctgactgggctgaggcctgggttgagcgcacttgggctttgtttt

SEQ ID NO: 610942 - DNA, 446 bp, Homo sapiens
ctgtcattttgctgccaatggcaggatttcattcttttttttttttatggctgtgtttgttaataatgagtgtcaacttgattggattgaaggatgcaacgtactcatgctaggtgtatctgtgatggtgttgccaaaggacataaacatttgagtcaataagctggggaaggcccacccatacttaatctggtgcgcacgatctaatcagttgccagcccatataaagcaggcagaaagacgtgaaaaggggagagtggcttagcttctccacctacatctctctcccatgcctgatgcttcctgccctcttaacattggattccaagttcttctgttttgacccctggactagctgcccttcctcctcatgcttgcaaacagtgtattttgggactttgtgattgtgtaagttaatacttaataaacttctatgtgtgtgaaaa

SEQ ID NO: 610943 - DNA, 932 bp, Homo sapiens
ttgcagtgagccgagatcgtgccactgaactccaacctgccaatagagcgagactccgtctcaaaaaaaaaaaaaaaaaagaaagaaataccttggaagaaaataccggacatcagaggaaagcttattttcggcatggtgtctttccaaagatggaatatttgaagcatgtttctctaccgatggtgtgactgagggtgagctggatgaggcatcgctcacgctggggggtggtgtgtacagaagcacgtggagccacaagaggcacctcctatagtcagataagggcttccctttctgcgcccagctttggggtgaagggtgattcctactagacacatctgtgcttcagcataccatgtaatagaggaagcagttttcctgctgcagattcctgaatagacgttgctgaacagagtctacttcgggactcaggggaagtttgacggccagtctgtgtagaacaggctgaggcaaccggggaaagacctgacaggtagttacatacgctctgacttagtactcccatgagggcttccagtgacacagtgtgctgatagaattctaaacctctggaattccctggtggcgacttcatatggccgtgacttgtccaggttaccctgatgcagatgctatgaggcgttagtgagaacttagagctttgcgcctggcggacacgtgtagggaccagattcaggggcctttgcagcgccatttttgaaaaacccctgttagcaaggtgggattgggcggtgcttgctttgccaaagaattcctgagaaacgatttcggggtacattagccggataatccaggtaaaggggaccaaaccgtgatctgcacgacagtcactaaggtcatggtaaggtggcccgcggctaagtgcacagaattgagaccgaccaataaactaggccacctctgacaca

SEQ ID NO: 610944 - DNA, 203 bp, Homo sapiens
atatcctcaacagatgcaaatcccttattttattctagctagagatgtgactggttaataaatagcacatctatttcataaacatccattactactatacttggatggcaaaccatctcaaatattgtttccatcccagcctgaaaccccattcctcgtacgtttccgtctatctgtttttttaacttacagttataaatggt

SEQ ID NO: 610945 - DNA, 766 bp, Homo sapiens
ccagcctgtgctgatggagcatgtctccgtctctaaataaataaataaaataaagtgtggccgggagagcacaagcatttccaagccgctgcctgaccttctccgtctctgttgaagacaggggccatcttgaaagaaaaactctctgaggagtgtgtggtcactggggagcggggtgttgtgacggaagctactaagactaccaatgggccttgaccaaacatgtatacacggggtcttcttcttagaaagtgtccccttcctcctgggtgcagttggttcacataggaagtcaactagtggaaaaaagccgtaagtgtataggaacctgaatctttcctgatggaacagggtaggatttgtaggaagggaccggcggtaggagcgcaggcagatacatgcatgaaaagataacaccccagtaaagagtgtggtccctctggtggatgcttgaggttaacgaagaacaacacagagtgggaggacttttgcctagaaaagggcagtttggggctatatcctagggagaatacggcatccccattgaggaatctttacttaaaaggagcgtattaattggtctaacagtctttgatttcaacggccaacccctggagtaaggacacacttgcaaacatcggctttataaaacatttattccgcacttccttgtgacccggtaatccgccctccttttgtattatacaaccagcgtttttagcattgtttcaacacttgccgtttatcaaccagacggccacaagtg

SEQ ID NO: 610946 - DNA, 484 bp, Homo sapiens
acctgcctgcccaccagctagttttttgtattggtataactagtggagacggggctttcgtcatatcaggctaagtgatggaagaagaccccatctcaaaaaaaaaaaaaaaaagtaaataatggccttttaatatgcggaaagtaatttccagtggtagtaccaaaattggtgtgcccttggtcctatgcttaatattggtaaacttggcagttgactgtattttggcccattacaccacttcattctaaaaaattatttattggctaatagagactattcccacatttaccctttgaaatgtgtgggatgtggatattccgaaagtttagccccgcgcaaacaaaaaattacaacaattaagaatttctctcgtcccaccttgaaaggcaggttatagatttttttcctggcctggaaaatggggaggtttacaaattctttttggaggctgaggggtggtggcccacgctgtgatatccta

SEQ ID NO: 610947 - DNA, 343 bp, Homo sapiens
aggctccagctacgatataaggaggtcagcacggtgctcacgtgtcgacgtgaactagtacagggaggcatgcaccgcagtggtagaatacacgtcgaccaggctccagctaaacgatatattggaggtcagcacggtactcacgtagtcgacggaactatgtccagggaggcatagcaccgcagtggtgaataccacgtacgagctgcaggcatgcatagcaatagctcgggtaactggaggatcctactaaagtcgaccaggatccagctaaaacgatatatggaggtcagccacggtgctcaacgtgtcgacggaactatgtacagggcaggcatagcac

SEQ ID NO: 610948 - DNA, 187 bp, Homo sapiens
tacctgggccatattcgggcatcttccttcaatccaggcctgctactgctcgccgttcgcggtgcgtttaccccgaccgctcctctgtctgtcccttgcccagttgtgcacgattctaccggcttagtgcctgcgggttcgttcaggactcttgtcggggttcagattgttccatgttatgattaag

SEQ ID NO: 610949 - DNA, 276 bp, Homo sapiens
tcggagacgagactgtgtgtagctcctttcagaaacttctggtgctcttccagtgcttggggccaggacggtaccttcactgctctggagacagcatagcttgatatctggttatccttgcatgcatgcaacaatgcatgcaaatgtcatctatcatatctgatctttggtttgaagacatggctgtcgattactaggagagctgacttcccccaggtagcatggtgatcctgaggccagagcgaccctgatcctgaccatccagtgggacatggg

SEQ ID NO: 610950 - DNA, 1780 bp, Homo sapiens
  misc_feature (499)..(499): n is a, c, g, or t
  misc_feature (638)..(638): n is a, c, g, or t
  misc_feature (1328)..(1328): n is a, c, g, or t
acgcagttggcactgtgtacgaatagtagtatatcagcttatcggtctactagccgcccatcactggtgtcgtcagaagagaatgaataatgatcggtccggtgccatccaatagctgtatctcatcgaataaacccttgcgaaggaaccgagatcctcatcatttagacgcgagagttaatggttggccatatacgacgactagagatgagtgtgcgtcaggtcactgttgaagagcgcgcagatgcctaccgagttgcgcgacacgtcagctcgcctgaatttagtgttcgtttcaattgcctcccctatacgatatagtgcatgatactctcagacaactacaacagttactaatacagcacatacagtagcactaattttccccaaagtcgccttgacacaaaagggtaagattgcatggtgcacatcaagacctctattgtgagtcaatataatcatttagcgctacccttgggtactccagtagtgagcttgntgtgacacgaaaccaaacataccatcgagtaaacaggtttgtgcgaaagacttccaccaacgatctacagcgtacaaaacacggccaattcgaacgttggcaattagaaccagtaatatctgaaagctcccatactctnatttgcggcgccaactgcctttaggactttagctcactttggcagtctcgccatgccgcaacaccacggctgcgcaaaaggtgacaaactgaccaactcacccattggaaattggtggtccatgaacactagggcgtgtaagcgcccgtcaccaacgggcttccgctttattggccgcccctttacccctgcgaatacggccaacgacttcctcttacgcactaacggaaacgaccaaccgcccccccccacctataccacctataaccgcttttaggaccatacccatgaacaaggataaacgcgggtctcgcgcaatcgtgtcaccgtttaccatcccgagtgcattgtttcagaactttataaatccaatttgagtgtggcgaaaaagaccgccccttataagctgggggcgcatcacggcacatttcggccatgcgcacccccagcggtaaggatacacattcacgccgggcccacggtaaaacccagctgaccagacgaaaaaggccgacaacgggagaaggccaggcgctcacaaaacgcaaataccgtaacccgactataatatccacacgctggcgaccaccactggcgcaacacggccgccggctaataccaacgcgcatcactctaccggtgcaaccggccgctaacacaggtaggccatctaaaagccgcaccccgtgncatgccaaatccacgcgcaccggtcgaacgccgggaggcaactcaaacccctgactgccatagcccatcactcaacaactgcgcaccgaaacgcatagtccttcccaatacacccattaatcacaggcacacgaccaccgcgataaccggaacacactgcgaaacaaccgcactcagccacaacccacccagcacagacgcacacggcgcaccaccccacgccgccaagctccccctcggaccccctggcgccaccgcgcgcccaccagcccaccaaacacactccacacacaacgaccccacgtaccccactgtgccacgcgccagcccccacgcgcggccacgccacacagccacctcacacgtcgcacaccgtcctcatgacggcacacccgcaccccacaaccaaccaccacacgcggaaccacagcacaccccctattccacacacc

SEQ ID NO: 610951 - DNA, 849 bp, Homo sapiens
  misc_feature (120)..(121): n is a, c, g, or t
  misc_feature (125)..(126): n is a, c, g, or t
  misc_feature (147)..(147): n is a, c, g, or t
  misc_feature (159)..(159): n is a, c, g, or t
  misc_feature (180)..(180): n is a, c, g, or t
  misc_feature (195)..(195): n is a, c, g, or t
  misc_feature (206)..(206): n is a, c, g, or t
  misc_feature (268)..(268): n is a, c, g, or t
  misc_feature (291)..(291): n is a, c, g, or t
  misc_feature (301)..(301): n is a, c, g, or t
  misc_feature (321)..(321): n is a, c, g, or t
  misc_feature (327)..(328): n is a, c, g, or t
  misc_feature (346)..(346): n is a, c, g, or t
  misc_feature (348)..(348): n is a, c, g, or t
  misc_feature (369)..(369): n is a, c, g, or t
  misc_feature (371)..(371): n is a, c, g, or t
  misc_feature (410)..(410): n is a, c, g, or t
  misc_feature (551)..(551): n is a, c, g, or t
ggagtgtggcggcggctggcatggtgccccgatgttgccccctgcctggcatgcctttctcaaggaccaccgcatctctacattcaagaactgtgccttcttggagtggctgcgcctgcnncccnngagcggatggctgaggctggnttcatccactgncccactgagaacgagccaganttggcccagtgtttnttctgcttcanggagctggaaggctgggagccagatgacgaccccatagaggaacataaaaagcattcgtccngtttgcgctttcctttctgtcangaagcagttntgaagaattaacccttggtngaattnnttgaaactggacagaganangagccaagaacaaaattgcananggaaaccaacaataagaagaaagaatttgaggaaactgngaagaaagtgcgccgtgccatcgagcagctggctgccatggattgaggcctctggccggagctgcctggtcccagagtggctgcaccacttccagggtttattccctggtgccaccagccttcctgtgggccccttagcantgtcttaggaaaggagatcaacattttcaaattagatgtttcaactgtgctcttgtttagtcttgaaagtggcaccagaggtgcttctgcctgtgcagcgggtgctgctggtaacagtggctgcttcatctctctctctctcttttttgggggctcatattttgctgtatagattcccgggcttaccaggtgagaatgtgagggaggaagaaggcagtgtccgttatgctagagctgacaagattagaaacgcgatgacaaaaacactacagacactaatgtgtactggaacaacaat

SEQ ID NO: 610952 - DNA, 346 bp, Homo sapiens
ttcaagcgattctcctgcctcagcttcccaggtagctgggattacagatgcccgccactacacccgggtggcggaggttgcagggagctgagatcgtgtcattacacaccagcctgcacaacaacagcgaaactccgtcaaaaaaaaaagaagggggggggcgaggagggcaggtgcagtggctcacacctgtaatcccagcactttggaaggccaaagcaagagaattgcttgagaccaggaattcgagaccagccttggcaacagtagagagaccctatctctacaaaatgtaaaacacagctggtttgtaaaaattgctgggcgtggtgtggtgcacctgtgg

SEQ ID NO: 610953 - DNA, 249 bp, Homo sapiens
agcaaacacccccttgttctaccctcagctaccaccaactttcctgcacctcctacccgggccagggttgtccagggcagacagtggcatactgggggagggctccaccagtctggggctggagggttttgagggaggtgtcaggatcagaatcgtttacggattataggagtgatggggagtacatgaggtgaagggagactaacatgggcacagcaccgcgtcaggatcctatcttctagattcctc

SEQ ID NO: 610954 - DNA, 105 bp, Homo sapiens
ttcccccccccagccccccccctgctccttccctaatgcttttaggtttttttggttggaaactgcagctggccccaaaaaaaaaataaaaaaccacccttttta

SEQ ID NO: 610955 - DNA, 212 bp, Homo sapiens
ccatcccctactgtgctcagctattgaaatgccagagtccctatcactcagttccataaactttacctcaccctctttatcccgctaagtaaaaagtaactatgtcaaatttagaacattctgatcaaaatgggtctgcacatgcctttcaaacacctgctggtcatagctatgacctgactgctcgctgcacatcgggcacaccttccagt

SEQ ID NO: 610956 - DNA, 565 bp, Homo sapiens
  misc_feature (169)..(169): n is a, c, g, or t
  misc_feature (171)..(174): n is a, c, g, or t
  misc_feature (180)..(180): n is a, c, g, or t
  misc_feature (182)..(182): n is a, c, g, or t
  misc_feature (184)..(184): n is a, c, g, or t
  misc_feature (186)..(187): n is a, c, g, or t
  misc_feature (208)..(208): n is a, c, g, or t
  misc_feature (222)..(222): n is a, c, g, or t
  misc_feature (256)..(256): n is a, c, g, or t
  misc_feature (286)..(286): n is a, c, g, or t
  misc_feature (306)..(306): n is a, c, g, or t
  misc_feature (308)..(308): n is a, c, g, or t
ggtgcagaggcaaattgcatttagtgttcttcagcatgtcctcggggctggggccacaggtcaaggaggggcagcaacaccaccagccatctggcaccaggcggtggccaaggcaactcagcagccatttgatgtttctgcatttaaggccagttactcagattctggncnnnnggggantnanannatctcccaggccacagctgcnggagatgttatcanggctgcctataatcaagtaaaaacaatagctcanggaaacctttccaacacagatgtccaagcngccaagaacaagctgaaacngnatacctaaggtcaggggagtcttctgagtgtttccgggaagaagtcgggtcccaggctctagtggcgggttcttacatgccaccatccacagtccttcagcagatggattcagtggctaatggtgatatcataaatgcggcaaagaagtttggttcgggccagaagtcaatggcagcaagtggcaattggggacatacaccttgggtggatgagtggtaatactgatgcacacattacaggagagagcggaacgttc

SEQ ID NO: 610957 - DNA, 476 bp, Homo sapiens
cgaccacagaccggcaagacagagaagaccgacggagagagaaaacacacacatacgcgatgagcgaggaatagaggcaagcaagaaatagacaaacgcagagacacttagaaaacacaaggggaccgagaaaacagagaagggacaatacaagagcgatgaagagacaagaagaagacgccacgaaaaacacaaagagacaaaaggaggacagaacacagagcacacgaaaaaactcaaagacgagacacagagagaggggcaagcaaagcagagcaagaggagagggacgaagcaagaacaggaagacacaggaaaacaagagcccaagcaggaaaagaaggggacagagagagaagacaggaagaaaggagcacaaagaagcacaagaaggagaggagaaagaaaaaggagagacaaggacgcgataagaagccaaagcggggacgaaccggcagaaaggggaaccaagaagc

SEQ ID NO: 610958 - DNA, 360 bp, Homo sapiens
cgcaaggactctgtgggctttgactaccttgaagccttgccttcattttcctcctctcctgcctgtgaaagcgatacgagcccttctttgggagagctgcggcatcacatcgcttgggcccattacccactggcagtgccagctactcttgacacagtattacttcagactgatcttctgtcccaggcacatcatctgaggctcgagatctacagctttgagtcatgagaatgattctctccaccttgtgctcatatagaggctcggagctatttctaagattgggccccttctgggtaacgatctcacttggtctgtgcacagtgactgctccttaaaggaacaggtctcggattcatt

SEQ ID NO: 610959 - DNA, 446 bp, Homo sapiens
aaccactgagtcacgacagggcggcaactgacctgcgctcgaagacagcgggcagggtttgatgtggagcaagagctggcgcgccccatggacatcgaccgtctgtctggtcggggcctgagcctggtgcgtcagctgagcagcgctgtaggctggtccgatggcgggcgcactgtctgcgtggagttttgtcgggcggctctggcataatccgccgattcttgatcaaggagcgagcaagtggctgagattcatatggaccccgaggtgttgtcgggtttgcaggaagtcatggaaagcgaataccccacgctgctggacacctttctgcatgactctgaagagcgcgtgcaagcgctgcgcaaggcgcgggacgacgccaagacgctggggcgcatcgcacacagcttcaagggcagcagtggcaacttgactcaggtggtgtg

SEQ ID NO: 610960 - DNA, 190 bp, Homo sapiens
tcactacctgttctaatggggtctttcacaggtatctttgtacatttacccctgcagttgtgctttgcacgacctgtgcggctgtactttgtgagcctgggaggcgctttaccatgtttgctggatggttatgtcttagactcttgctagatcttacagtcttagaggatggggaaaatatatcgattgt

SEQ ID NO: 610961 - DNA, 559 bp, Homo sapiens
  misc_feature (559)..(559): n is a, c, g, or t
ttaaaatgtctactattacattgagtaaagtgtctggccacttttgaccttttttttcaaatgacattattgatatgaaatcagaaactataactgataaactacaaactgctgtatagacacttttctacacaatggtcatgcttttattctttatctaagcctgaattgtaaggcttccttctcttttttttttatttttttttttgggagaagtggggattcccgccctgggtgtcccccccgggcgtggggtgtgggggggcacgaactgtgggcttccccccaggactaacaacctccgcgggttcaccatccaccatattcatcagtgctcctacagcccccgcagagatagcgtgtgggaactacggagggagccccaccaacaccagggcccgcggctcataatcttatcatatttctaacgtaaaaacaagcggtatttttcacccacagtgttatagccacaggaaggtggttctgtgaatcacccagtgagccgtggtggtaatcaccccgtgctattgagacacccaaaaagtggctggaaattaan

SEQ ID NO: 610962 - DNA, 692 bp, Homo sapiens
  misc_feature (508)..(508): n is a, c, g, or t
  misc_feature (523)..(523): n is a, c, g, or t
  misc_feature (538)..(538): n is a, c, g, or t
  misc_feature (596)..(596): n is a, c, g, or t
  misc_feature (604)..(604): n is a, c, g, or t
  misc_feature (633)..(633): n is a, c, g, or t
  misc_feature (692)..(692): n is a, c, g, or t
ctcagcctcccgagtagctgggattacaggtgcccgccgtcacacccggctaatttttttgtatttttagtagagatggggggtttcaccatgtaggtcagaatggtctcgaactcctgacctcaggtaatccgcccgccttgacctcccaaagtgctgggattacaggtgtgagctactgtgcccagccttccttgcctcttaagtctatacacagtaaacaatagtttttttcccaatctttctgacctttgccaatctgatgggtgaaagctgtatctcattagagtttatttgctcttcctgtactacgaaagaggtggagtctctcttttatattcagggggtctttgtatttcacattccgggaactgacccttcatatcattcacccatttttctattgtattattggcttttacttatcaatatttaggatttctttaaatattaagggaagacatttttgtgatatgaattgcaaattcttcccacccataatatttgncttttgattttggtnttctgccccatatanatatttgtaattttttctttttgtagctgaatttactttttgttttctggcttctgangtctatgntatacttagaaaggctgcttctttatctngagtgattaatattctaattaattcattccatcggtttactaagccctgactcttgccn

SEQ ID NO: 610963 - DNA, 138 bp, Homo sapiens
tgcccttctctcgcgtacgatgccctgaacttccacgccagtgttccagcccttccttgcgatgatacacgaggctcagtaggccagggacatccagttccatagaccggccttccagcaccggccccctaaactcgg

SEQ ID NO: 610964 - DNA, 217 bp, Homo sapiens
cattgtgatttttcaagctataaaataaagcatgatgttaaaagatgattaatgttttcatttggtggtagatgacaagtttcttgcagggcatctgatcaatcatgctctttttttttttttttttttttggaaacttttattttaagttcaggggtatagttgcaggatccatgttcttttcttaacctgttttgagtcctttatgtaaacggga

SEQ ID NO: 610965 - DNA, 705 bp, Homo sapiens
  misc_feature (464)..(464): n is a, c, g, or t
  misc_feature (466)..(466): n is a, c, g, or t
  misc_feature (468)..(468): n is a, c, g, or t
  misc_feature (481)..(481): n is a, c, g, or t
actactattaaattcgcggccgcgtcaacaaacgtttccttttcaccaaaggcatcaaagcgctccaaatgtccacttccagattcttccaaaagagtgtttgaaacgtgctcaaagtaagggaatgttcaactctgtgacttgaatgcagatatcaccaagtagtttctaatagtgcttctgtctagattttagatgatgatattcccgtttccaacgaaatcgttagagctatccaaatatccacttacagtttctacaaaaagagtgtttccaaactgctgcatcaaaagaaaagttcaactctgttagttgaggacacacatcacaaagaagtttgtgagaatgcttctgtctacattttgtatgaccatattcccttttccagcgatatcattaaagcaatctaaatatcaatttgcagaatccacaaaaatagagtttcaaagctgctctgtaaaaananangttccactctgtnagctgagtacacacatcacaaacttgtttctgagaatccttctgtctcgtttttatgggaagatatttcctttttcaccgtaggcatcaaagcgctccaaatgtccacatccagatactacagaaagagtgtttcaaacctgctctatgaaagggaatcttcaactctatgagttgaatgcagacatcagaaagaaatttctgagaatgctgctgtctaccgtc

SEQ ID NO: 610966 - DNA, 412 bp, Homo sapiens
atgtgaccctatttgaggccgccttggcttttgggtcaccctgtttcaacccatcaccccaaacataccctagtccttcagcctggggttttggtttttgagcccgagctcctgcccctgttgtgggaaaggtggggaaaaaggtgatttccctcccgggcccacccagttgcccagcctttgcccactcggggagcagatcatgcatgccaatccctgttgccgcatggagctcctcagcccactgacctttccgtgcttggtgcaggccaggcccccgttttccgcctgcctttgtttccccgtcatgcatggtggtggtgtttttacggtgtttggttttgtgcccgtttttgagacagtttttgtgtggaatttgccttaaactgaagtaaatttggtttttttagta

SEQ ID NO: 610967 - DNA, 559 bp, Homo sapiens
gtttgacaacatcgagcagcgcacgcaagtaccgaataaaatatttcatctccagtaataggaatgagacacttttcaatagtctctaatctgtataatagagcgttagaaattttcggagctacaccatgaatccaacagattgcgttatgcgcacaatatctcaaaaccacctccataccctttatatacgggcatccctcactgaggttgcgccaaagcttcaggcgtcaattgacgaacttcttccatggatcaggcaccatactttggggtgaagacaatccaatacccatatcttgaagacgggcaagtagggtgaacagtaaatcgctgcgggtagcggacaccgaacgcgggctattaacgtagccactgactccgataacaagaccctctttggccagatccttgaacgtgacggaaggcgctggggtgtcaagaatcacctcgtgctcggtaaaggtttgcatgaacagctcgcgaactttcaatacattggtgtctagcggtaatgtcagggtgataccgactacaccgtcgacgcggccgcgaattt

SEQ ID NO: 610968 - DNA, 599 bp, Homo sapiens
atcccagcacttgggaggccgaggtgggtggatcacaaggtcaggagttcaagaccagcctggcccaaatggtgaaaccctgtctctactaaatatacaaaaattagctgggtgtggtggcgggcacctgtgatcccagctactcaggaggctgaggcaggagaatcgcttgaacctgggaggtggaggttgtggtgagccaatatcgtgccactgcactccagcctgggtgacagagtgagactccgtctcaaaaaaaaaaaaaggcttaataattttttacttcccaaatatttaaaatttggagtggccttggcagtggggagggttcctaaaatggccggtatagaatctagggccacagaactggtggtgtaagggtcctgaatcgggctaaaatacagggggatggtctgtactggggacatccatgaggcataagtagccagtatcctatagtgagaatcttacaaggctccttttggccctgtagactagaatatactgtgatgcgcgcttggagtgtatccccaaggccatagaggggctgttcaagcccatcagacctggggtggaccctcatgcgtccatcctgcggg

SEQ ID NO: 610969 - DNA, 567 bp, Homo sapiens
atctcaacacttgggaggctgaggcaggaggattacttgagaccaggatggagaccagcctgggtaacataaagactcctgtatctactaaaaaaaaaaaaacttacgctgaagtcaaaccacggcatcagaatatgggcattttggagaactcagtatacacagggcaaaaccggatccgctgaaagagctgccaccaaattactttggtttgtagctagaatggaagttgggcaagtagaagataagaaagggcctaatctcagacaagggcttatttacaaatgttggtccaaaaaaaagggagtctggcaagtgaggaactatccacaattggggagacgcagggacggcgctggggccaggatgtgatgacccaggagtctacagcccgaggaggactgggagagctcaagtgttctggagcaatgggaaaggcagctgttacatggcattttagaaagatcttggggccgggagttgtgggtcatcgcttggtaataccacaagaatcctgggagggctcaaagtggggcaaaacaccttggagggtcacagaattccgaa

SEQ ID NO: 610970 - DNA, 370 bp, Homo sapiens
  misc_feature (48)..(48): n is a, c, g, or t
  misc_feature (54)..(54): n is a, c, g, or t
  misc_feature (95)..(95): n is a, c, g, or t
  misc_feature (129)..(129): n is a, c, g, or t
  misc_feature (154)..(154): n is a, c, g, or t
  misc_feature (197)..(197): n is a, c, g, or t
  misc_feature (213)..(213): n is a, c, g, or t
  misc_feature (256)..(256): n is a, c, g, or t
  misc_feature (271)..(271): n is a, c, g, or t
  misc_feature (313)..(313): n is a, c, g, or t
atccagggatgaagaatcgcctgggtgccatcgagaaggccctacganaaaatnccttttcactgaggcccagcccggatccctccttcttcaanacacccaaaaagatgacagactacgcccaagaancgagggtgggtccctgggccccaanaactactacagttttgccagccagcagcagaagccggaagacnccaccattccctccanagaactggccaaacaggtcatcgagtatgcccggcagctgganatgatcgtcctgaancccccgggcactgggtggggcagggcacgagttatttaaaanagttacactgtcagggtttcgcccaataaaggtggactgacattccctcaaaaaaaa

SEQ ID NO: 610971 - DNA, 985 bp, Homo sapiens
tgggtatcgcgaaccaagcgtacgcagatcaagatggtggcctgccgggtgaaaggcatcctcagccgcttttctgccttcaggatcctccgactcccgaggttatatatgccgcaattttacagggtcttctgcttgctgaccagaacccatattaactatggagtcaaaggggatgtggcagttagttcgaattaactctcccaattcaaaggtaattttatctgagtaaagagctacattcagagttctcagaagttatgacatgcacctctgggctagtgatcaaatcagaagtgccgtcctcatctcatcaaagccaggctgctttattgcaggtgctgatctcaacatgttcagccgctatgcaaagacccttcaagaagtacccacagctatcacaagaagcaccgacgaatagctgacacacttgacgaacgtaccacaaacgccctcatgtggcttgccactcaactggatcctgcctgcgaggaggccttgaggttgccattacagatacaactacagaatagcaacaaccagaccgaaaaaacactcttacgtaaaccctgcacgctcctagcacgacgggccttaaccaggagacacgcagggcaccacaaaggcatgccacaaagagcgagccagtgcatgcagagcatagcgacaatgaaggctagaacaggatacgaaccgaatgcggctggcccgagccgcggcgcaaacgaagaacacgcggcacctggaatcgaaccaccgctggtgaacaccacctggcgaccccaggacctaatacccctcccggaggaaacgggcacacaacacactagccgcgcacgcagcataggcaagaaaatacacgcaaaggcacaagctgcgcaggcagaccaacaccaacaacaccaggaatagcaccgcccacaacgcagcccgcgcgcgacccgcccgcgagcgaacaagacaaaacaaggcgaaacgagccaga

SEQ ID NO: 610972 - DNA, 196 bp, Homo sapiens
cacgaggcctcgtgccgccactgagggtggatgctccagtgtggtcttgcgggacttgacagggacgccatctcccaggtccatgttgctgtcggtggtcagcgctttgatggcggccactatggccgaactggtgtactgggtggtgttgcccaaccacgaatcttcggtcacgctgacccgcggggagccgttc

SEQ ID NO: 610973 - DNA, 511 bp, Homo sapiens
ggaggccttggcccccatttaagagaacaaaattcttcgttaggggttcatttgggaaacaaaactttttgcccagtgggggggggggctgggaaaccccctgcctaaaaaaatagggcctgggcttgttggcagtgctcaagtagacctctcacgacgtttttaccaaggggctcttaaatttcttaaagcggcgggggggggccagggtccaaaaaactcgtgctcatttgcggccccctctgtgaccccccttttttttctcgtcccccccccccggggccggaactgaatttttttggaaaccccccagggcaccccttggttgtgggtttggaccacgagcccttagaaggggaggtggtttcccccagcctaacccccagcccccccaggtttaggccccccctgtgttagaattggccgaagtgtttttgtgcagctgacttttttgacccatgttcacgtttttcacaccccatgtagaaaaaaaaagatgccccggggggga

SEQ ID NO: 610974 - DNA, 228 bp, Homo sapiens
tgcggcatagggtctgtatcgggggcggctcagccgctctcctccgtcctggcggaggtctgcgcgccccagcactacggggcggctgtctgtctcatcctcccgcttctcctctgggggagcctatgagttggggggcggctatggcggtggcttcagcagcagcagcagcagctttggtagtggctttgcgggaggatatggtggtggccttggttgctggcttgg

SEQ ID NO: 610975 - DNA, 805 bp, Homo sapiens
taaggctaggtacgaggctgggggtgaatccatttccggcgtgatgatgcccgtgtggggcgtagtgcagttgggtgacacggtgtcctgctttggcgcgttaggtgttagtacgccggtaataacgcagttcgtcgaggccatcatctgccagccgcgcttttgtgtagatcggaactgcgcacggtaagttcttcggtatcgccgcgcgcatcgatccacggcctggcgtagtttttgccagcccgttgtctgcacgttatctggcaatctgcggatcaccatacgggccggaggtgtcgtagaccggaatcgcttcgtgttcttcgtactgcggctgtgctttgctagccggcagattagcgtcgggctaagctggatctcacgcatcggctacgcgcacgccggggtgtgtgccacgtgagtataaatgcgttatgagtgtgggtaagaggcggtgtccttccagggtgtcgatgaacatgttgggcccgggcgcgtgttcgcggcgggtccgtttgttgcagacatagctcattccaataaagttaaggacgtggcttgtcagacgacggatgaagcaagagacgatcgccgcaggggcgatgcgatagcacgattatctcttgtcccttcgcaggtataagcctgatcaggttccgcggatcccgaataaacggtctcagccagttcaggactccgaaagaattagccccgaaaggggccttgatgttaatgacgcgtaaagggcaaaccaagcagaagttgacaggggggtaaccagggaagtatttccgaaaaggcc

SEQ ID NO: 610976 - DNA, 1028 bp, Homo sapiens
cgcgggccgaagcagctgcagccggtgcgcgtgctgccccggtgtcttgccgtggccgatgctgcaccggcaaggggtcgagctcgcgtcccgtcccctgcccccctgcgctgtggcgcagcatggaatttgtgcctgggacccgggcgctattcgcggctgctgactctgctgggcggcctgtgctgcctttcgctcatctctattcttgggtgccgttgtggtcacctgcgctcctgtcctgtgccccccgtcccccgtggccctggagcggttgtgtcccccggtccggggggctctgcctgcgcctataagggggccgaggctggctggtggccaggggaacattgcagcctctaacaggcaggcggtcgtgcaacaccaacttaaccccgcacgggtgtcccccggggttccccacgggaacgacacgcaccagacggaaggcaacacgacctgtaacggttaaatgcccccattacacaaggctctacgcatgtcggtgcctccacacgggaatgcccgtgccttgagcaggcccggttgccctcatgaaagagaacaagaagaaaccggcgctaaatgttggccaaatgcaacacagaactgatttgagcctatgtctacttaaagagcgttattccccttccagacgtggcgggccccaaaactgcgtttaaaagtcacggattacccacaatgcgatacacctaatagtatccaacacggattggcagatccccataagttcgattagaacgggtacggcaacattaatataaagggctaatgcgccacctatggtgaccacggtccctattactaacacaaccagtctcaagaagacaactgagtgaaacatagccgtttggcatcacgcctattagcagcattaacatataggatagaactaacaaaacacgtactaagctaacataggcagggcaacggatgagcactaaacgttataggacacaagaatcgtcacacctaacaccaacctaatattaaaaaaaaggcatcctaat

SEQ ID NO: 610977 - DNA, 172 bp, Homo sapiens
tggaatccatttttaattttaattttttttaaaccaaggggaaaccggttcccggtttttggcttttaaaagaaaccccaaaaaaaattggttaatttgggaaggaattttaaaaataagaagggacccctttttttcccttaaaccttttaaaataacccctttttgggca

SEQ ID NO: 610978 - DNA, 1043 bp, Homo sapiens
tgaatagaactctgtgtgccaggggctcgggagggtagtatgtctttgagtatgtgtggggtcagaaatggggatgataagtattgggggaaatgatcacaaaggaacaaccgcatgctcgatctgtcgttgagggcagatggagatgccagtgcccgttcgtacttactggcactagtacccggccaagagggcggtcgagtggacgcacgcatcattcccttgaaacggccgcgagcccacctgtggtcgccagcgttccatggaccccggggggcacaggtgttggataggccccagcccggggggaagggtctggactcggaggcctctggggttggttgtcgatcctccaacgcaaggtaaatccttggcactgggtttgatggcgaactgataatgcatgggaaacctgggagggccttgttggctgggccccggctgtcgggagtgagaaacactgacgccggacagcaaaagtcctggtgagcactgtgctgaagtgacacgccctgtgtacaacccgaacaccgcaactaggtaacctaccggagcaggaattcaagcaatcaagaggattggctaggtacagacgtttgaccgtgcctttacctctctgttccaggaaattggcctgtttcgtcccgaatctcccggcctcgggtacacgccttgttaacacacgccgatggaaaaaggcctcggcccaacgaaagaggtcgggtgggaagcaccttgaagggacccggtcaccacaaaagacagttggcgggacaggaaccaaactacccgtcggggggagaacccgcaggaggaacccctcctccaagaagtgcaagcggacgggcgagaagcagcccagaacgcccgaggattgcgggcacccacggaagagagaaaccagattacgtgaccacagtgtgcagaaagcacccggcagcagtacagcccacaacatgtggcccccgagctggcgtgtgacgacagccctgctagcaacatcacggtggacacccaccgcatccaactctgagaacactccg

SEQ ID NO: 610979 - DNA, 401 bp, Homo sapiens
gcgagtacttttgactacatttgtaaggctgtagttgccttacaaatggatggatctgggcagagtaaatgaaacccttctggacaggattcaccattctagatgccatgaggaacatttatgattcatgggaggaggtcaaaatatcaacattaacatgagtttggaagaggttgattccacccttcaggaatgactttgagggattcaggacctctatgggggaagtcactgcagatgtggaaatagcaagagatctagaattagaagtagagtctgaagatgtgactgaattgctgcaatctaatgaccaaatttgaatggatgaggagttgccttcttgtgaatgagcaaagaaattggtttcttgagatggaatctattcctgctggagatgctgt

SEQ ID NO: 610980 - DNA, 84 bp, Homo sapiens
  misc_feature (39)..(39): n is a, c, g, or t
gccgcggacacgcccgtgtattactgtgcgccagccatntaaggggaagccatggctggccttatggcatcctggggccaggga

SEQ ID NO: 610981 - DNA, 234 bp, Homo sapiens
taaacgtcccccagggggtttttccttgggttaaaaaaggaagggggggggggtttttttttttggtttcctcggcccctatgggggggaaaaaaaaaaccctcctttcccttttttccccggggggcccagttcccccccaagggggggggggttgccctttcccctgggggccgggccttttttttgggttttttgcccccccctttggggggattaccctgggccttggga

SEQ ID NO: 610982 - DNA, 274 bp, Homo sapiens
cacggctctaggacactaaacaagtactgcatgtcttcactcatggtggaatgaacaatgagaacactggaccaggtgggggacatcacacacctgtacattaaatacaatcatgtgtgttaactacagggatacatctgagaagtgcactgttagagaatttggctgttgtgggagcatcatagagtacttacacaaagctagatggcatagcctactacatacctaggctatatggtatatcctgctgcttctaggctacaaacctggacag

SEQ ID NO: 610983 - DNA, 890 bp, Homo sapiens
tgcagtggctcacgcctgtaatcccagcacttgggaagccaagggtgggtagatcattgaggtcaggagctcgagaccagcctggcaacatggtgacaccctatctctacgaaaaatacaaaaatcagcccctttacacaagatggccccaaaagctaagaaggaagctcctgaccatcctaaagccaaagcaaggatctgaaggccaggacggcagggtggaaaggggtccacaggcacaaacaaaagaagatccgcgtatcactagccttcatggcggccaagacatgcgatccggaggccagtgcaacgtatcttcacgagcacccccaggagaaacaaagctgtgacaactatgcatcatcaaagtttcctcttgaccactgagtctcccatgaatgaagcaccggacagaacaaacaacgcacttgtggttcactggtgaatgtcaaaagccaacaaggcaccaaggccagaacgctctatgacactgcctgtgggcaacaggtcacacccctgatgcgggctggctggaagagaaggcacgatgttcgaatggtcctgatcaaccaatgctcggggatgttgccaaacaaaatagggatcatctcacgtgataccagaggtaatacaaaaatatgatacgtatcacattacaacaaaaaatatacacgctggggcgaacgctgaagaaccgcaccccgaggtgagccagaaaagcggacacggaagcgcgtgaagaacgccaaccaaggacacacggaaggggaccacgtaaaccgactcatggtgcacaaaaccaggaaaacacgacaaagatacaaggggagaaaccacactaagagacgcgacgggggccaacacgacgcaaaccacaagcaaaacgggcc

SEQ ID NO: 610984 - DNA, 242 bp, Homo sapiens
gggatctagaggatccctctgtgctttgggacggcgggaatcttcaaggacctcgacaatgagctcctcgccaatccagtggagcaactggctgtgtcccaggcagtgaccgtctttcgtcccttgatgagtcggttagaaccacaacagcagtcctgatttatgacccctgcaccttacagggccttgtcttagagagtcgtagacactacatgccatccctggacagtcaccacctgtgc

SEQ ID NO: 610985 - DNA, 197 bp, Homo sapiens
ggcaatgcgcagtatgcagaatgtagagcacgtgtatacagaacattaggatgtacaagtagaaactttgcttgaagccgggaatcctccagaagctgctccccttaactgtaattgctattccatttaagcatacctcactcccacctacaggtaaccaccaagtgccatacacccaaaggaaagctttaggtgaa

SEQ ID NO: 610986 - DNA, 852 bp, Homo sapiens
  misc_feature (37)..(37): n is a, c, g, or t
  misc_feature (41)..(41): n is a, c, g, or t
  misc_feature (43)..(43): n is a, c, g, or t
  misc_feature (46)..(46): n is a, c, g, or t
  misc_feature (50)..(50): n is a, c, g, or t
  misc_feature (52)..(52): n is a, c, g, or t
  misc_feature (83)..(83): n is a, c, g, or t
  misc_feature (100)..(100): n is a, c, g, or t
  misc_feature (121)..(121): n is a, c, g, or t
  misc_feature (125)..(125): n is a, c, g, or t
  misc_feature (130)..(131): n is a, c, g, or t
  misc_feature (139)..(139): n is a, c, g, or t
  misc_feature (164)..(164): n is a, c, g, or t
  misc_feature (181)..(181): n is a, c, g, or t
  misc_feature (186)..(186): n is a, c, g, or t
  misc_feature (192)..(192): n is a, c, g, or t
  misc_feature (217)..(217): n is a, c, g, or t
  misc_feature (236)..(236): n is a, c, g, or t
  misc_feature (264)..(264): n is a, c, g, or t
  misc_feature (276)..(276): n is a, c, g, or t
  misc_feature (307)..(307): n is a, c, g, or t
  misc_feature (321)..(321): n is a, c, g, or t
  misc_feature (324)..(324): n is a, c, g, or t
  misc_feature (362)..(362): n is a, c, g, or t
  misc_feature (365)..(365): n is a, c, g, or t
  misc_feature (377)..(377): n is a, c, g, or t
  misc_feature (380)..(380): n is a, c, g, or t
  misc_feature (397)..(397): n is a, c, g, or t
  misc_feature (418)..(418): n is a, c, g, or t
  misc_feature (448)..(448): n is a, c, g, or t
  misc_feature (485)..(485): n is a, c, g, or t
  misc_feature (568)..(568): n is a, c, g, or t
  misc_feature (660)..(660): n is a, c, g, or t
  misc_feature (683)..(683): n is a, c, g, or t
  misc_feature (747)..(747): n is a, c, g, or t
  misc_feature (782)..(782): n is a, c, g, or t
  misc_feature (815)..(815): n is a, c, g, or t
tggagaaaaaaactttattggtattacagcaaaaaantcananaanaaananaaattatgaaacctcaaagctagacgcaaanaaaaaacacctaattanacaaattctatacaattaaancaanaacannaggaaaanttttttgcaaaaatgtcaaaaaaanatttgatctggtcgggnatagnggcccncacctgtaatcccagccctttgggnggccaaggcggggggatcncctgaggtcaggggtccaagactagccnagccaacttggngaaaccccatgtctaccaaaaatacaaaaantagccaggtatggnggngtgtgcctgttatccccgccactaggggggctgagccncgngaatcgcttganccngtgaggggggggttgcngtgagccgggatcgccccccngccgtccagcctgggcgacagagtaagacnccctcccaagagaaaaaaaaaagatttgatcaaaccnagatttcagaaaaacaaaaccaaaaacactgtgacttggttaacatttatttaattttgggaccacagtcaaagacagaaacnaaacatctatttcttcacaattgtgaaaatgtctggcttgaaacacctttgacatttatctcactttcgctctcaagtttcaggctgctgcntccatggcggctagctggcagtnatgctcttttctgctctcaaggtttctttgggcttggaatagttccacggccgtctattttctntgaatccataaagttttctaagggccactcgagcngcctcttcttctgcaaccaatactgtttccccnggtccttctgcaatcaactttttatcacagtttaagc

SEQ ID NO: 610987 - DNA, 323 bp, Homo sapiens
  misc_feature (201)..(201): n is a, c, g, or t
  misc_feature (271)..(271): n is a, c, g, or t
aaggatcccaggttgtacttaaaagagacataggaatgaaggagggcttcctgttctattttaaagggaacatggaattgtggcctttttttctttaatggtagatatttgatcaatcttatgtgttgataaagtcgaagttgaaagtgcagaagagaggatagaccaccaacagtggtcacagtactgaaagtaaaaganggggtgggggacaaaagcacagagtggggaggttttagtctcaagatagaggttccatgtttcttgaacngtgactaaaaagaagcagatgaaagtcagcaaacagtacaacctgccggtgg

SEQ ID NO: 610988 - DNA, 149 bp, Homo sapiens
tggccccaaagggagcccttaaaccttaattggatactccccaaaaagggagtttttaaccaagttaaggccatgggatatgccctctgccttttcattggcagggggcccctaaaaccccttcagtaaataagggttgtcagggggga

SEQ ID NO: 610989 - DNA, 236 bp, Homo sapiens
accgaaaattgttcctccaaaaactgaagaatattcaacgtagtttaaacaaaatacatacttttattttattttctcgtcattggtggaatacggagctttttttttccttttgctttttatttggaaacggagtctcgctctgtggcccaagcgggagtgcaagggcaagatcgtagctcatggcagcctccaactcgggggcaccattatggagggggatcctctggggtcga

SEQ ID NO: 610990 - DNA, 450 bp, Homo sapiens
catgtgaaactcatctcatcacccttttctgggtttgaagctgctgtctctagaagtgccatctcaattgtgctttgtatcagtcagtgctggagaaatcttgaatagcttatgtacaaaactttttaaattttatattattttgaaactttgctttgggtttgtggcaccctggccaccccatctggctgcgcagcctaggcagtcccgtgggctggcagttcgttgatcttttaagttaccttacaaaaccagtccccattttgggctaaggtttttagaaggtttgttaggggagcatccgggggccagtcggcttattatgccctctccagtaaagtggtttagttaggaaggattgggagaaaaagcttcccacagcccacctgctctgttagtttatattgacaggggtctttctgaaataatgagccagtccctccaaaaaaa

SEQ ID NO: 610991 - DNA, 201 bp, Homo sapiens
actctagctcggtacccggatgattaattcaggataatcggggttatccgatcacctcaccatttattacttctaagcattgaattacagatcttacaattgttggtggctttaaactctttactttgtcaaatgagaaaaacacggcctacagaacctaagtaacttgcctaatgattaaaactttccaggaactgcacc

SEQ ID NO: 610992 - DNA, 335 bp, Homo sapiens
ttttgagatggagtctcgctctgacgcccaggctggagtgcagtggcgcaatctcggctcactgcaagctccgcctcccgggtccacgccattctcctgcctcagcctcccaagtagctggactacaggcgcccaccaccacgcccggctagtcctttgtatttttagtagagacggggtttcgccgtgttagccaggatggtctcgatctcctgacctcgtgatccgcccgcctcggcctcccaaaatggtggaattacaggcatgagctattaccaagcccagctgaaaactatttttctagaattcatgcaacatggatgtctggtcgacgc

SEQ ID NO: 610993 - DNA, 1667 bp, Homo sapiens
  misc_feature (287)..(287): n is a, c, g, or t
tgcctggccacaccaggtcctagtaacacctgcggattgggatatctcgattctttgagattggtggttccttccgccgcgcgcgcctcgcatgtacagctggagaatcgtgagcgaacctggagagttaggttgagatcgccgtgttgactcctaaaaaggatgagtggtcagaggacgtgtgacgcacagatactcacgctttgctgtcctccctgtgttaagcacagtgaccaggcgctggcacgtccgtcagtgcctcctctcttgcgtcctgcgactgtcantgctatccacgtgtcaggcttctcctctagacttcctgattggtctgttgtcgtcggcatgtatgctatgatgagggatcgtggtgccctgagcccggtcggggagccctctagtctctgatgtcgagagctcgatcgtggacccaatcttaactagcctcagctatatgtgaccgcatattgggcggaagatctcttatcaacagctttctgtgtgtgtatggggttgcattagccttttgaagccgagtgagtgagccccatccaatagagggaggaatttccccttaatgagtttggcgtatgggggctttcgagcgcccaaggaaactagagtggtcccttttggctgggtcgcctcaccaatttggggccccgcctaagctctatgcggcgccggaggtctcgcccggtggtagcgacgctagggggggatctccgaggctttcgaacgacgatcccggagcggccttgttcttcttcccgcaacaacaattttatccgcggaccactgtggcttacaagacggcgcttatcgattcggcatcttaggcaccggtttgtctccattataaccactagagaggcccctaaacgaataatgggggccatcggcggccctaacgtacgcgtggttagcacgcacgagacgcgttgagtgtttacaagcttatatcttagcaagagacacgcgcgattcggaggacttttcccctaaggaatgtgggagataacgggctatcggttttggacaatgccccaattgttggggatagttctagccggaacccttaacgcttgggacatgcgtacgtttattgtgccacctttgtggagagcccaaagcagcattcgtttggcgcaatttcgcacctcgggctcccttgctgtactctttttcagtatcggtggcgggcccggaacagcaaatgcttgtcccgggacggataaccccctttgagccggattgccgctcttctctttatttggtcctctacaccggactgggaaaaccggcggcgcgccctccggaggggggcgcaaccgaagtgaggcatcccccacgtgggcaaaaaagatacttccgtttgttaccccccccttggtgcgcggcgttatatgtatcgcaccaaccgtcttcctcactaatgtaacactacgggggggcgattgctcgttgggggagcaacgattatttggcacgttggtgtgtgcccacgatgtagacaaccacttctataaacaacgattaataacatcgggggcgaggacaaccaacacaccggcgggtagcatgtatcgtcccacaactcgcgtactacactagctgtcgaccacaacaaggacacctcagcgctgatcgccacgacatccttcgcg

SEQ ID NO: 610994 - DNA, 910 bp, Homo sapiens
  misc_feature (544)..(544): n is a, c, g, or t
  misc_feature (605)..(605): n is a, c, g, or t
ggtcgtggcgggattgtggtgaaaacgatggcggctgccgcacaactcccgggttgtccgcggtcctgctcaatggtcacgttctgccattacatgcaatagaccaactatcgtgttgatgtctacgtggcctagctccgtgatcgcctagcgttctatcagtgccgctcaattgacctctatgtggagaaggtgcgactgttccgtctagatcatgtggtgattggtggccgactgtggttatgagagcaatcaggagttccatgagtggctgagtattgtttgtcaatcgcacacgttgtgatctgcattggggatcacatggtaattcgatagccctattcggtgttgatcatagtatgacgatcatgcatccttctgttcccgatggtgtgacgctggggcctagcgttcatgtttcatggaaatgaggacagcggacgaagattaagatgattctaatcctgagcgagtaggttacaacactagcaaattgtcgcgtcatcatctgcttattgcgacgacgtacttgggaatacctaanataacgtttgggattcttagacgcgattgtgtcatgtcgaaagattcccgcaagctagttngctcaacgtgtccaaggacagctggcagttgtaaacagttcagttcatgtttcaccagtctgaatgctgaatattaaaaagctcttcgtagagtattttgatgaaataaggctgtaggagagacacgtagtgagagatgcggatttcccgcgaaggccaattatcgtagagccggtcggacatctttggaagagacgcataagattcccttaattcttttgcaaagtatgcattcggttaggtcctatacaccttggttcctgggctggcagacagtaaacaacaggaattgtccgaatgtttcc

SEQ ID NO: 610995 - DNA, 267 bp, Homo sapiens
tgggggagggggtgatctaaaacatcgtagacttgggttaatcgtgtgactgcggtggctggacacgaattcgttattgtaaaggttatcagtgtgtctccgtggggtgtggtaggtaagcgtatgagctgcattgtgcgtagttgatgcttgtcccttttgatcgtggtgattagagggtgactcactgaaacgggatgcttgatgtgtatcttactaagagctaatgaaagggtagaccaaatctattggtgggatcgataaaga

SEQ ID NO: 610996 - DNA, 414 bp, Homo sapiens
aggatcgaggctgtagtctttagactcaggcataccacacgggccggatgggaggatgccgtggtcagtacgagcaccactgtccttctgagatggagagccgtttcctcctctgcactaagagcaacctgatcaggggcctggtcgcacctccgttcattctgaaccttgtgtgaacatcatgttgtaatccttttcacccagccttcgcagaggaattaatttgcctatatcagcacaggacgtaatgacgggagggacccatagaaaagcccatctaattaccatgctgcgcaataaatcctggatgtcggtaatcttgacgtccacgctggtagacacgtaccttgagtagttcctagtgccaggatctctagactgacgggccaactgctatgcctgcctagactgccg

SEQ ID NO: 610997 - DNA, 174 bp, Homo sapiens
ccccaacacaaaatctgtttgctatttataaaggagggtccctgcttggctcctcctttctagccctggtgagcactaatcttctttctgtctgtaggatgttctattctggagacatcatataaataatccttcgtgtgtggcagcatctatttagcacaacactgtctcacg

SEQ ID NO: 610998 - DNA, 92 bp, Homo sapiens
gactgtaagatttgggtttgtttgtattttatgttgtacattgcatcttatatttccctgaaaactaaataaagtttgggcctttttaaccg

SEQ ID NO: 610999 - DNA, 335 bp, Homo sapiens
  misc_feature (222)..(222): n is a, c, g, or t
  misc_feature (262)..(262): n is a, c, g, or t
tcgtgctcagaggatccgcccacggagactagcgaaggctttgaaatctctcttcctcagtgatgactcgagctttctccttcttatagacgttccggacgggcatgaccggtccggtcagctgggtggccagtttcagttcttcagcagaacctggtctcccttctgtgggggccgaggcgcttcctgagggaacgaggatgagtttgggagcggtactcnctttcagccgcgtgcacgtgttggccgtgcagggactccngtggacttgttcccgcctcctcaggatccgcagacaatgccggatggtcgcgggcctctagtatgggtaccga

SEQ ID NO: 611000 - DNA, 308 bp, Homo sapiens
gcagtacccacctatgagtgagaatatatggtgataggttttttgttctcgcgatagtttactgagaatgatgatttccaatttcatccatgtccctacaaaggatatgaactcatcattttttatggctgcatagtattccaagcctgttaatctttaatcaaattccagatatagtgaattttatattttcgggtgctggattatttttcatcctatacacatctgagggatgttttgcacatcagtacatgtaatagatcaacataggcttatgaaattaattattaaatatgagggaaggccag

SEQ ID NO: 611001 - DNA, 160 bp, Homo sapiens
aagatcacatctactcgactgatagtgtctatatcgtagcaacctttataaccagctcaggtaactttctcctcaaaaatccaactttcatgtttgtcacctgatcttatctgccattgaaaagccttctggctcactacaacccttgcgagacacagcc

SEQ ID NO: 611002 - DNA, 373 bp, Homo sapiens
agaggatccccgatttccactggtgatattggaggttacggtgggagtatgtcttagtgtgagtaatcctttggttgttcattttactaactaatgattatttgtgcgtatcatttaacctactctacatacatatctgtataacattcatgataatggcaagtgccttttatcagcttttggctattttgacctttataacggttactaatatttgtgacgttcgttattaacactatacataatagtaacctgattttaaattttagcccactttatttctttacttaattgcataaggaaaagcaattgacatttatattctggtttataatttcctatgttaatttttaaaattattccactttaggac

SEQ ID NO: 611003 - DNA, 413 bp, Homo sapiens
tagggggatccatggggcgcccatctaatgggtgggactgaggcccaccctgttccctcactctgagatgtcatggtccaggaggcccagacttcttttcgaaccctgttttcaagaggaagcttcatgacgaccgtggaggggctgacctttccgccactgggggcaagcaaggccagactctcggaagcccatccttgtccaccctgccatcagcccaggctgcacctgcttatctgagatgcctgtgagaggccgaggtgacctttttctccctcccctgagggaggcctgcttgtcacctggagatacctgacccacccccactctcgcctgagcaggtggaaggctcatcctgggagcctggcggcctgcataatccggccaaatccttctctcaggcatcctgccct

SEQ ID NO: 611004 - DNA, 105 bp, Homo sapiens
ctattattatagcaattagattgaatctgtgtaggtcaactagacatggctttttagagtctatgctatacaggtagtagatgaggaactaatggactaactggt

SEQ ID NO: 611005 - DNA, 969 bp, Homo sapiens
  misc_feature (13)..(13): n is a, c, g, or t
  misc_feature (129)..(129): n is a, c, g, or t
  misc_feature (143)..(143): n is a, c, g, or t
  misc_feature (248)..(248): n is a, c, g, or t
  misc_feature (866)..(866): n is a, c, g, or t
  misc_feature (924)..(924): n is a, c, g, or t
gatcaggaccctntcgctgccgtgtcctgacttctggaatctttgagaccaagttccaggtggacaaagtcaacttccacatgtttgacgtgggtggccagcgcgatgaacgccgcaagtggatccagngcttcaacgatgtnactgccatcatcttcgtggtggccagcagcagctacaacatggtcatccgggaggacaaccagaccaaccgcctgcaggaggctctgaacctcttcaagagcagnctggaacaacagatggtgcgcaccatctctgtgatcctgttcctcaaacaagcaagatctgctcgctgagaaagtccttgctgggaaatcgaagattgaggactactttccagaatttgctcgctacactactcctgaggatgctactcccgagcccggagaggacccacgcgtgacccgggccaagtacttcatttcgagatgagtttctgaggatcagcactgccagtggagatgggcgtcactactgctaccctcatttcacctgcgctgtggacactgagaacatccgccgtgtgttcaacgactgccgtgacatcattcagcgcatgcaccttcgtcagtacgagctgctctaagaagggaaccccccaatttaattaaagccttaagcacaattaattaaaagtgaaacgtaattgtacaagcagttaatcaccccccatagggcatgattaacaaagcaacctttcccttcccccgagtgattttgcgaaacccccttttcccttcagcttgcttagatgttccaaatttagaaagcttaaggcggcctacagaaaaaggaaaaaaggccccaaaagttccctctccctttcagtaaaaataaataaaacngcagccgccaaccaataaaatgaaataaaagaaaccaatgaaataaatattgtgttgngcagccttaaaaaaaatcaaaataaaaatttaatgtgggccaaga

SEQ ID NO: 611006 - DNA, 349 bp, Homo sapiens
  misc_feature (96)..(96): n is a, c, g, or t
ccccccctgtccccaactaggaatccagtagcccagcttaattccccggcaggatgtttgaattccaaccctgtgggctcccttttattttggacnacccctttttttgggtttccctcctggaaattaaccccaggatcctggatttcccagttggcaagtaaagcccccaccactaaaagctatactcagaaaataaattttcccccctgcaacccgtttccttaaaaagggggggggggtatttttttaaagttttggccatttcaaagaaattttgtttggatgaaacatttccctgtttttcccaaacaagggccattttagtaaaattagattgtttgcctga

SEQ ID NO: 611007 - DNA, 406 bp, Homo sapiens
tcctgatgttgcaccatggcgtccatggggaccctcgccttcgatgatatctgtgcgccctttcctcatcattaatgatcaggaccgcatgtaccgtcttatgggacttgaagccctcaggtctcatataatggcttcaaaggctgtcgcaaatacaatgagatcatcacttggaccaaatgggcttgataagatgatcgtggataaggactgagatgtgactgtaactaatgatggagccactcatcttatgcatgatggatgttgatcatcatattgccaacctgatggtggaactgtacaagtctcatgatgatgaaattgacgatggaaccacatgagtggttgatctgactggcgccttgttactacgcggggcatttgctccgacgcatatacccagtcg

SEQ ID NO: 611008 - DNA, 1376 bp, Homo sapiens
  misc_feature (13)..(13): n is a, c, g, or t
  misc_feature (129)..(129): n is a, c, g, or t
  misc_feature (143)..(143): n is a, c, g, or t
  misc_feature (248)..(248): n is a, c, g, or t
  misc_feature (866)..(866): n is a, c, g, or t
  misc_feature (924)..(924): n is a, c, g, or t
gatcaggaccctntcgctgccgtgtcctgacttctggaatctttgagaccaagttccaggtggacaaagtcaacttccacatgtttgacgtgggtggccagcgcgatgaacgccgcaagtggatccagngcttcaacgatgtnactgccatcatcttcgtggtggccagcagcagctacaacatggtcatccgggaggacaaccagaccaaccgcctgcaggaggctctgaacctcttcaagagcagnctggaacaacagatggtgcgcaccatctctgtgatcctgttcctcaaacaagcaagatctgctcgctgagaaagtccttgctgggaaatcgaagattgaggactactttccagaatttgctcgctacactactcctgaggatgctactcccgagcccggagaggacccacgcgtgacccgggccaagtacttcatttcgagatgagtttctgaggatcagcactgccagtggagatgggcgtcactactgctaccctcatttcacctgcgctgtggacactgagaacatccgccgtgtgttcaacgactgccgtgacatcattcagcgcatgcaccttcgtcagtacgagctgctctaagaagggaaccccccaatttaattaaagccttaagcacaattaattaaaagtgaaacgtaattgtacaagcagttaatcaccccccatagggcatgattaacaaagcaacctttcccttcccccgagtgattttgcgaaacccccttttcccttcagcttgcttagatgttccaaatttagaaagcttaaggcggcctacagaaaaaggaaaaaaggccccaaaagttccctctccctttcagtaaaaataaataaaacngcagccgccaaccaataaaatgaaataaaagaaaccaatgaaataaatattgtgttgngcagccttaaaaaaaatcaaaataaaaatttaatgtgggccaagaaaaaaaaaaaacaaacaaccacaacaaacaaaaagcacacaaaagcaaagacaacacaacaaaaccacgaaacgcgagaccacaacgtaagcgcgactgcgacaagcgaccacagcggcgggagcgcaaacagcagccggccgccgcccgccggcaagccgcagacgcgccgagagagagctgaccgcaggcactcggcacacacaaacccggaccacaccgcgcagacgccagccagaagacaccgcccaaccgaccgacacgcgccccaccagacgaacgcagccgccgtgccacccacagacccggccaactgagccatggacgcgcgcgcccccccaggagcacaccgacacaaattcacgccggggcaccgcagagaagaagcaactgccgcacaccgcacc

SEQ ID NO: 611009 - DNA, 952 bp, Homo sapiens
  misc_feature (13)..(13): n is a, c, g, or t
  misc_feature (129)..(129): n is a, c, g, or t
  misc_feature (143)..(143): n is a, c, g, or t
  misc_feature (248)..(248): n is a, c, g, or t
  misc_feature (866)..(866): n is a, c, g, or t
gatcaggaccctntcgctgccgtgtcctgacttctggaatctttgagaccaagttccaggtggacaaagtcaacttccacatgtttgacgtgggtggccagcgcgatgaacgccgcaagtggatccagngcttcaacgatgtnactgccatcatcttcgtggtggccagcagcagctacaacatggtcatccgggaggacaaccagaccaaccgcctgcaggaggctctgaacctcttcaagagcagnctggaacaacagatggtgcgcaccatctctgtgatcctgttcctcaaacaagcaagatctgctcgctgagaaagtccttgctgggaaatcgaagattgaggactactttccagaatttgctcgctacactactcctgaggatgctactcccgagcccggagaggacccacgcgtgacccgggccaagtacttcatttcgagatgagtttctgaggatcagcactgccagtggagatgggcgtcactactgctaccctcatttcacctgcgctgtggacactgagaacatccgccgtgtgttcaacgactgccgtgacatcattcagcgcatgcaccttcgtcagtacgagctgctctaagaagggaaccccccaatttaattaaagccttaagcacaattaattaaaagtgaaacgtaattgtacaagcagttaatcaccccccatagggcatgattaacaaagcaacctttcccttcccccgagtgattttgcgaaacccccttttcccttcagcttgcttagatgttccaaatttagaaagcttaaggcggcctacagaaaaaggaaaaaaggccccaaaagttccctctccctttcagtaaaaataaataaaacngcagcgtgccgacccaatctgatggaattaaaggaccctaatgaaatatatattgtcttgggcacgccatttaagaacaatacaaa

SEQ ID NO: 611010 - DNA, 371 bp, Homo sapiens
  misc_feature (368)..(368): n is a, c, g, or t
agtgcgacgggcaacaggcattatggaggggataacacacttccatgctaaaacataataaataaaaactgcccttaagaatgcaggctgggcgcgctggctcatgcctgtaatcccagcactttgggaggccaaggcaggaggatcacttgagcttatgagtttgagaccagcctcggcaacgtggcgaaaccccatctcatctctacagaaaatacaaaagttagctgggcatggtggtgcatgcttgaagtcccagctacttgggaggctgaggtagaaggatggcttgagcccaggaggcagaggttgcagtgagctgagattataccactgctttccagcctgggtgatagagccagaccttnttt

SEQ ID NO: 611011 - DNA, 81 bp, Homo sapiens
taatataatataaatgaaaattagatatttacaaatattaaattaataaaattatatactataatatgtattattatataa

SEQ ID NO: 611012 - DNA, 674 bp, Homo sapiens
  misc_feature (180)..(180): n is a, c, g, or t
atggctcttcctcccagagcagccggcagctacctggaccggaaatgtcctcatcccctccctggggccaggctctgccctggccttcctctgtgaacccctcctttctttgtgctgggtgtctggcgaccaataaagggggaatatgggatgggcagcagtgggtgcggggagtccatngggcctcggggccccgaagccggtgtggcgtctagagctccctcaggcatgagccaaacgctcagatggaggaggcctactgcttctaggcccgcgcctggcatgactattcgtgagcaccccactcggtaggcccctgccacagtccaagcctgcccagttctttccttctgggcattgaccccgccagggagagttctccagtgcctagggccaggacgagaggccctggacaccctgagcgtgggtgcccgcacaaacgccctgcgaacgctcagaagcacaaatgctgtccatggccgtgaggctgcctgccaggtgaatggacatagcgtgagaggcggtgaggccagggcttccaggctcgttgctgtgctcgggacatcctgaccgtggtgtgcagtgtgtgcccgtctgtgacatttctactcaccaaggttgaagaacggaaacggggaatatcacatggggttcaaaccccacctcagtaggtg

SEQ ID NO: 611013 - DNA, 205 bp, Homo sapiens
aaggcttcgaagagattagcaaggtgctaatccagtggaaataaggagaggtgttaatgttagctgttgatgctgtaattgctgacctcaaaagcagtctaaacctgtgaccacccctgaggaattgcacaggttgctcgatttctgcaacgggacaaggaattggcatatcatctctgatgcatgaaaacagttggagcagggt

SEQ ID NO: 611014 - DNA, 151 bp, Homo sapiens
gaccacaaaccctcctttccctacctaccttcctttaatagcagaattcctattattccctgtattctgtgtattgatcaccctgcaatcctattatgtatctgagtgtgtgtgtgtgtatgtgtgtgttatggggaaaggggggggtttt

SEQ ID NO: 611015 - DNA, 1290 bp, Homo sapiens
  misc_feature (245)..(245): n is a, c, g, or t
  misc_feature (254)..(254): n is a, c, g, or t
  misc_feature (337)..(337): n is a, c, g, or t
  misc_feature (819)..(819): n is a, c, g, or t
ggcgcctcagagttggcagcgacacagatgttattaataacggcaaatcgcaaggccgccggcgcggtgactcacgcctgtcatcctaccacgtttgggaaggccgacggcggcgtgatatcacgtctgagggtataggagattgtgatgatcaagcccgtggacaacatgtgctgaacaccgcagttcactctacataaaagaagaaagacattatcccgatgctgtgatggtggatgccctgntaattcgcntacactctcgcgtcaggagaggggcgtaatcggaggttattatagtggctcctcgagggaaacggctgactccagatgggatngggctcgcgacgcaagtattcgtaggctactctgacttgacagatgatgacggtagcccacagagacgcctaacagcccaaaggaccttacattctcgacttcgtacttgcctccgttataccctccattgtacgtcctggctggcccatcgaccacatgggcaaggcgaacgcagcgaggtgaacggcgcgcatagagacttaccacacccgatgtgtttcccctggaggagcgcccagcacacatgtcgtgtcatacatccaaggaatggcaacaatctagttccacaccctggttcgcaaatacctttcgaaaccgcccacactctagccacaagacggtttccaaccgctctattgtagcccccttctacgcaagaaaacaatcgcgccaactgacaataaaacgcccggtgcgtttccccacaatcggcaggaaccgaggaaagccaccttttccaggaccagccgcttctggcggncttagtctttcccgctttgggcttcccccaatatgggccccaacaggtctatgacaaccacttcgggcaaacccctttggcaaaccccgccccctttcgggcccagcaaaatcccccccaaacgcgcacatcagcgtacctctttggcgcccccctgggccccactcgcaaatcatattggtccccaagtggtggggccctttggcgaaaggcgtatatatccaattggctttgtgggcggtgggtgaaactttacccaacatataatacaacaacgctgtggacaacggtaaataacctatggccaaccccatcagtacccatatcactttggcacctttccccacccgatacacgcttggtaacccgctggttccatagccatggagtcccactaaaatacatatgttacgaccccttgtccaacctgcgaatgttcgcaagtttgcggtgcccggccatttccctccg

SEQ ID NO: 611016 - DNA, 943 bp, Homo sapiens
tgggctctaaagggggtaaagggggtgctatagggtaaatacgggccctatttcaaaaatttctaaggggaataaatttctaggacgatgggcttaaacactgtggttggccccacagaatttcagaagctttgcaaccgtatttataccccgcggttcgctgtctagcggctgaaaaggtggcttgggtatctagacacgtccgggaacatgcatctgttttcaagcctattgtggggcacagctcatgagtgcaagaacgtcttgtgatgtaattattatccaaagtggggcctctacaatcgggaagtatactacttccgactgtgtaaaagcgtatcaaggcagttcaccaggttcagcacgggctatcttaggacatataacgtggggaaaacatatcgtagcgaagtttagaacaatattagctccacgacacgacaactcgagtagacataccaccgctgagcgtcttacagatcacccattgtcgcgaccccacacacgcactcggaactgaaatacagccccagaaaactccgggcagaaacctcacacaactgcaccacgaacaaagggaactgccgactaagcaacggaggcagagagcacaaacgcagcgacacatcaggaaaacaaacaggaagacaaccaccaaaacacccccacacgaaacccagacccacccaacatcacccagaaacggaacccccagaaaaacagaatacaaaacaaacaaaccacaacagcaacgacacagaccaacaccagcacagaaacaacaaagccaccaaccacacagaacacacagaccagccaaaacacaggcaaaagcaaccacaccaacggacaacacaacgaaaaaaacacgaaaacagacaccacacaccaacccaagagacaacacacacacaaacaagaaaacacaacaaaaccacaaaac

SEQ ID NO: 611017 - DNA, 178 bp, Homo sapiens
ccagaggattacggtattgagtggcatgtgagcagtagaagctaaaaataggcatgagccaccgcacctggccttccttgcctatttttagcttctagtggtttgctggcaatctttggcattccttgacttgtaaatgcatggcttcaattccttgttttcacatggccactcaata

SEQ ID NO: 611018 - DNA, 456 bp, Homo sapiens
  misc_feature (87)..(87): n is a, c, g, or t
  misc_feature (115)..(115): n is a, c, g, or t
  misc_feature (118)..(118): n is a, c, g, or t
  misc_feature (130)..(130): n is a, c, g, or t
  misc_feature (143)..(143): n is a, c, g, or t
  misc_feature (147)..(147): n is a, c, g, or t
  misc_feature (157)..(157): n is a, c, g, or t
  misc_feature (200)..(200): n is a, c, g, or t
  misc_feature (211)..(211): n is a, c, g, or t
  misc_feature (236)..(236): n is a, c, g, or t
  misc_feature (240)..(240): n is a, c, g, or t
  misc_feature (278)..(278): n is a, c, g, or t
  misc_feature (286)..(286): n is a, c, g, or t
  misc_feature (301)..(301): n is a, c, g, or t
  misc_feature (310)..(310): n is a, c, g, or t
  misc_feature (317)..(317): n is a, c, g, or t
  misc_feature (415)..(415): n is a, c, g, or t
gtcttctcatacatcatacaattaatttttcaagtattctttatgtacaaagagctactctacctggaaagaaaatttaaaaaaaanggacaaggtaggttatgcatcctatggnggngggggggggggngcggtcgggcacntgtncccgtccccncgaccccacgggccgctgattccctgccactgggctccccccnccctccacgcnagcagcaacgctgggcaggcgaaanccangggagtgggaatcagcagcacttttgtgcctggggggngaagggangccacggtggagagncagcttggngaaagcngatggcggggcagggccagggctggtcctcagcctgtgtctgcacccaccctccctgtgtgcagcttggtgcccaacttgctccgcccccccaagatnggagggtggggagcttgtgccctcttgtgcacccacattgc

SEQ ID NO: 611019 - DNA, 178 bp, Homo sapiens
ccccccccccccggcttcccgggcactggggccttcagccttttaaatttcactgcatcattttttaccttgactgggcagggatgcaaggagctttgtgaagtgacagtgacatttttgtgcctttgggggtgggttgtgcattccagcctgggcgacagagtaagaccctgtttca

SEQ ID NO: 611020 - DNA, 117 bp, Homo sapiens
ccggagtatctgcaggctgcaagcagtgacagtgcccaggctctgatgtgtctctcacatcttgtaaagtgtgagacagctgccttgtgtgggactgagaggcaagagttgttcctg

SEQ ID NO: 611021 - DNA, 390 bp, Homo sapiens
  misc_feature (352)..(352): n is a, c, g, or t
cggtttccggggcgtccgcggccaggtgctgcggcctgggtctgtacgtccgattgccgattcagcccagcagaggtgttcggcagtggcagccatatgtggaatgggcacagcagtttgggggagctgttatgtaccctagcataagaagcagcccactggaagcctccacgcttgagtaatgattgtgcgaccctaccatagaggcacacaagttgctggaagtagagcattgagcccgtgaacatcttttgggggcccctcgcgagaaacacctcgatggcccatgatccggcccaaagttgggcccttgggttaccccggttggtcccggaaaaaccctttaaagggntttggtaaacgtttgggcgggcaaaaacctttttgcgg

SEQ ID NO: 611022 - DNA, 184 bp, Homo sapiens
gaccaacatgatcagccagtcggaaaagctgttcagtatcccagatgcatcaggtcacaatcccagtgagttcctcagttctccttcgtgtgcctcgctgtaacctcattgtgccacagcacgtgatcagatgctgccccattttccacatgccatacttctgacagcaatgaatgtcacatca

SEQ ID NO: 611023 - DNA, 565 bp, Homo sapiens
cttatcccccctgccctcgttgcccccaattggtccctgcccccaattgtgttttcccccctctgtgaaatcacaccgctgggtccataccccctgtatgtttccactattcgccagaaaacaatgtggccttttaagtcacttggaacaaaaaccttaataccctatttccccgtatgtctaaagcccaatattctcccccccgatttgtagatctacctcccgctcacgactgctcttctctccaaacacccaacagtcttgaagactcacaccacccccccctcccgccccctcctagttaatattaccgacgcttccccgctcctactaaattttttacacccacaactcacccccactcaccccatctattctgcatatgttctctccacccacacttttgtcatgtctactacgccaccctatccatactccccctccttatcaaatataacttccctttcctcttatctccccttccctaccttctatgcctaaccctccaccccctatctttctccctgttggcacccactaatctctccccaaacaaataaaaaca

SEQ ID NO: 611024 - DNA, 128 bp, Homo sapiens
tttgggtactctaaggatccccaagttagtcgggacgtggcacgagagggagagggagaccgtggagagagggagagggagagggagagggagaccgtggagagagggagagggagagggagacgtga

SEQ ID NO: 611025 - DNA, 856 bp, Homo sapiens
  misc_feature (852)..(853): n is a, c, g, or t
tcagccagtggtctttgcagcatgagatctcatgtaagctaagctgtagttgtatttcttggaacccttcaagctctcgtgctcattcccccatgatcgccgtaggaagtgatgacagtagccccaacgcaatggccaaggttcagatttttgaatataatgaaaacaccaggaaatatgcaaaagctgaaactcttatgacagtcactgatcctgttcatgatattgcattcgctccaaatttgggaagatctttccatattctagcaatagcgaccaaagatgtgagaatttttacattaaagcctgtgaggaaagaactgacttcctctggtgggccaacaaagtttgaaatccatatagtggctcagttcgataatcataattctcaggtctggcgagtgagttggaatataacaggaacggtgctagcatcttcaggagatgatgggtgtgtaagattgtggaaagctaattatatggacaattggaagtgtactggtattttgaaaggtaatgggagcccagtcatgggagttctcagcaggaactcaaatcttcctagtcactatccagtctcagaattccttaatggatctctgctggagaaagcacagctgagtcagctactggagtactttgctgtttgtgctgtgcttggcccgatggaagcgagtctttccttccaggcgtgactctcccggatacaggcgtatattagcaccaaggttaatcggatttgccacctgccatgatgataaacaggtctggttccccttaggcccatgggaaggcccctgggggccttatcattttcttctttctccttaaaaaacatatctccctctctannggg

SEQ ID NO: 611026 - DNA, 1467 bp, Homo sapiens
  misc_feature (930)..(930): n is a, c, g, or t
ccacgcgtccgtccatgcgtcagacaggaaagttgtcttctaaagatggggatggacattcaggtccttcaataatagatgttcaggactgtgagcgtacttgttagaccctgttagaatgggtgggattgtagcgctaactcgtgatatatccttgtctacgatatcgatgagaatgctaggttagcatgtagcagattggagtgattattaggacgtggtagttctgagattttcaggaagcggtcgaaggatgcatggaggaacattcgacgtaattgtactgactgtggagacatagggctgtgtggggtgatggtggtgttgtcgcacaaggctagcctgcgcgtatgatgggtatacacgtcttcaggttctagacctatcttagagttagcgcttttgttattgactgaaggttatactgggacgattatacatagaataagagaatagtcccctgtgggttgtgccaagaacgcgatactaaagtggattggctcatacgttgtaggtcatcgttggtcgccagccacgtgacaccacctagtgcgaggggagctaggaagatggaagcatggatcgagtctgatcggccaaagccacaacattggcacggtactcggtcggaaacgggggggaccctgggtgggattcagacgtattggtggcaagcagacctgggctagctaaggataatggccaattatctcttgtgaacgaggtactattcttgtagggccatggtggtgattttccaacgtttgctcaaacgttgaatttcctttaggacaagacaatgccctggtccttcccttcgtgtggcctccccgtttgtgtactgggccaagagtgtccatcgttcgactcggatgtgcaagaggcctgtagccttttgggacacacaacacgccaaagaagttaatgtantggggggcacccatccaagttacaagtgggcgcgacgatccctattggaacaccgggaaagtttggtgtcaacaccacttccttaaaggagtaattatatccggtttactctccccacttgacagttgaacccccatggaaacttctgtaaacgggccatcctgtgaaaattatcagggggggccttaatagagaggtcacacaacagtaaggtggccacccggggccgtgagcaactgtcggccccagtggacgcagcagaaagcagcgaaaaacagagacattcgccaacataggtggatgatacaccgggcgagacgacaaaagcgggcacacacaacgggtagaaacagacaacgcggggacccatgtatagacccacaatgagactagtcaaccaccaagcacagtgtgaaaccacggacgcatatgaaaacagggcagcatcagcgaaacaaccatcgggacgaagctaaggcaaggaacacaacaaccagccagacgaaggtgagcaagtatgagcgacatgcaccgtca

SEQ ID NO: 611027 - DNA, 568 bp, Homo sapiens
  misc_feature (96)..(96): n is a, c, g, or t
gggcaaactgggcccccaaggaacctacccttccagtgccccagactttgttcttgaatgtgcaattgacaatctggactccccaaggatggcacncaggtgtttggcttctggctacctaaggttaacatgtcactagagtatttttatgagagccaaacattataaaaatctgatggcaaaagcaaaacaaaatggaaagtaggggaggtggatgtgacaacaacttccaaattggctttttggaggcaaaaggaaggggagaacttggaaaatagtttttgctttgggggtaaaggctttttaaattttcccagcatccgcctttccctttagccagtttgctgtcttgaaacccaaaagtgatggaaagaaaccaacaagagttctcgaaccctgtttaaaaggaatgtatttgttgttaaatttggaagccctgtttacagttttcccccatgttatttatgaattttaaattccgggaatgtaaattgtcttgtaatgttgcaaaatgttccctttttaaagggggtcctttattttaaacagtaaaggggtttttttttta

SEQ ID NO: 611028 - DNA, 269 bp, Homo sapiens
tctggtggtattgctcagtgaggtcatgtccccggaaggactttgaggaaggctatgacatctctgatgcttgtgagatccagtgacaaggcatattcagtctgtctaacctgtaaggcaattcctccatgagggggtgcccgattaatctaaagcctggagcagatgggaaagcattttcacatcctcctttgaataaggtgtggccaggatcattacgctgcagctctgcagttgtgaattcgaattgaaccgactccgtatttcat

SEQ ID NO: 611029 - DNA, 147 bp, Homo sapiens
cggggttggctgaaacccctgggtggggggttggggggaggactaatgggagtcggggaaaatttgtgggtattttttttatttctttttggttcccagttttgacacgtttttatcaaaggagaaccaataaagggattaccctta

SEQ ID NO: 611030 - DNA, 106 bp, Homo sapiens
tacgctcgtccggaatatcagcacgcactcctgtgtgactgtgactacacaggacttcaatgtagatggaggaaaatgaaggtaggagcgtgtgtgtttgtgtgtg

SEQ ID NO: 611031 - DNA, 201 bp, Homo sapiens
gtaactcatagaggatccctttttgcttgcgacatccagactcgtggggggccacccatgcctcggtaagccagcagcccaggcactggcaactaccatagaggcactgctttaattgctgcatacagctgtaacccgacggcgcacacaagcagcaggtcaactgccaaggaggcccccatacacggtcaccaggcgtgc

SEQ ID NO: 611032 - DNA, 1031 bp, Homo sapiens
gcaatgtgctgttgagcctgtgtgatgccagcgtcaacgagcgcctgtgccgattctccgatcaactgtgcaacatggcccggcaagagagccagagcgcatgtgctggccgtccatgttgaccctgtgggcctctgcggtagcttgcccgctcgttcagttggcttcagctcctggggccgacatggagcttggtcacagcaggagaacccagtcgtggcgtcgtgtacccgcctggccctagctgcctgagacaaatgagggagacactcgcgtggggtgcggctgctccttgtgttctacgccaatgcgggtggcctcaccctcagcctatcatgatcaagcgctcttgcattaatggacaccaccaccacgcgtcacctggcgtcatcgtgtctttgcgggttcatcacttgcaagatgcattctgttgaacatgcttcccgggactcgaatatcctccaccatagcgtgcctccgtccggtccatgtctgccacagctaacgacagagcgaggggctccagccctgggttctgaggactttgccaatgtgatctgctgtcggttcagaaggctcacggccggcctgattgtcctgaatactgtcttcatttccatcaaccatgtgcgtcgcaccaagcccctgtggagaaaggagcccttgagcaaactctgatgggcgtgagaagtgcctgtggtgcttgctagggtcaaggtggttgcaaattgtctggtggacctgtagctggtgggacgcactgggacagccacggtccactttgggcgggagggaacgtgcctgctgacatgggtcctgggctggctgtcctggtcctgtggtggtggccctggttcgtgcagcttccttgatttgggtccagtccggaccgaggcgcaaagccgtgtttggcgattggggtgagttccttggcgctggggtgggtgggttgccgcctcgggagaccctctacagggggtctatggcgcgttgctgccgggggaaccttaccttttcgctttgggccgttc

SEQ ID NO: 611033 - DNA, 251 bp, Homo sapiens
  misc_feature (156)..(156): n is a, c, g, or t
ctagtggacttcatatgggtcccatggtgttcttcaagttttatggttcattaccagtaacacatgcactagcttactgggtatgttcattggtcatcacaggggtgttatacagtggcaccattgtcagtgtcatgagccccagtgtcaatagcncatcaggcaggctgcacttccagcaatatcattcacggccagtaccagtcatatcaccgccagttacattttcatgtcagcttcgtgcatttgca

SEQ ID NO: 611034 - DNA, 342 bp, Homo sapiens
tacactcaggataggggatttgtgtgagttgtatgtgcccatgggtatatgaaagtcgtgtgcgtatattagagtattatgggtgttttgtggtttataaaagggtatggaaggggtttaatcgggaagggtgaggtgtgtatcaagggttagttggtaagtgtgtatataaggggtagggggaatataaaaatttaggggtcctcggtgtctgtggtagaaatgtaatactcgcaaatttggtgtgtggcccttggtatgtgtgtccacagagtccgtgcggggcacttatatgtattggataaaactagtataggggggggggatccctcaaagagcaga

SEQ ID NO: 611035 - DNA, 1767 bp, Homo sapiens
cagtctgcatgcctctgatcattgctgctagtgacttcttatgtgccagtagacctggagctttagcttgtaccaaattgtgacttcacaagtagctaagaacgccgacgtctacgaaagtgactgcactaggagttattgccttggccgtttcattgtgaagataactgtgactaattactgttattgtgtataaacaaggaaaacatgtagttggagtctacttacttatggatgttggtatctaggtttcgatatctattagtctacgccctctatctaccgttgtgttttagtattattgtttaaactcacaatttatggactgattagggatatgatggaacagacgccgtgagaggttacatgcaaacacatcatctgtggttcgcgcgcagaatgtggtataactgtgtcacgcctcacacattcaacgcgagggacaccaaccaccaactcaatcttcctttgatggaacgaagccaccactctgtgggggaaatttcccatggggtggagcaagtgcataaataaggaaaaacaaactcactttcagcgaaacgacaacattcccacacactatagtgacagctgtggggttggagcaaccctaaagaaccccctaaagacagtcttaccagaatgctttataatctccaccgtactacgcagttactaacagagtctatacaggagatcaattctttccagcagcgtaaacagcaaaactacgggaaacctgcctgaacccgtcgagtggtcgaccagaagccgctgtatgtgggctcataataaacacgacaaagacccccaaatatcattattacaaatagttgatagcccccccgacaagttatactgacaggacacagtatcgcttagattgtgaggatacaacagcgtttgttaaaacatcgacagcgggagtgatattataatcaagtaaaacacatgggccgagctttcctgacttagtggggtggctctagccccaaaaacaatggagcagaatagacatattgaattagtcatcatccattaccattagcaccctcaccagtgtgttatccacaccccattatcagcaacttcagcaacaacatctatggggtgaaagcaccaataaatagggatgtgggtggtgacgaacccacaaacatttagtgtcgatctatctgtgggtgataataacaggcgaagcatcaccttctttatcaagcgttgggttaagttgagtgtactctattaggatagtaacaaaagtaacctttgggtgtgcataataatttatctgtgatgcaccccgcttgtaatggtgtgctgtgatagtaagacaccgttatgacatcaacgtagtataggcggatataacatcaggggatgaaaggaggaatcattatcccctgacaatactgccgagtaaaacattactgcagccagtgtagaccaagccatcactcggagagcatctatagccgagcaaggctcttacttatagagatgacaaaaacaagtccgtagaatacagccgaagggcagggctataataaagcaatcgagacaaaaccatgggtgagtcatactatagcatataagcaaagaggctggcgaacaagcgtatcaatagaatacattgtctcgatttacagatactcgtggtcgaagcagattaacaatgatatgagcgagaccccaacagcagcatccaaagcgaagagtgacaccgtctacagacaaattatcgaagtatgagtacctattacatag

SEQ ID NO: 611036 - DNA, 275 bp, Homo sapiens
atctccagtcggcggtacttgttcagcctgacgcggccgacatgcatatatctatacaaaccatatcataagaaatctttcctctgtaggcccaagtaattcgattatctatagtgtgctctgatctcgttcgaattatcacttaacttgggggaattaaataaggcactctggacatacgcagccactcaggaacacagctaggtgcgtggatgatcctttcgtctgaaaacggtgcccgttcctctacgcagtcacacctcaccctggcaccc

SEQ ID NO: 611037 - DNA, 1240 bp, Homo sapiens
agcggcggagtaccatcttgacctaatatgacgacatcagttcctaatatgtaggacgtagtggagccacagatgctaggtgtaattaatgtcgcaatgctgttgcgtatagagtagtaagccagggccaattccagcaatatgcatagcccatcatcatacgacgaaagctgatatgtggcttttcgtttggctcttgtcatcttgttctccagatgatcttggaaagtcctcgctcgattctgcctatgtttaggcctccacagcgccgatgtacactcaggcgaaatgagccaagcaggtgagaatcactcaggaaaagagatggtaccacagagaacaagcacggggagatcctcaggaaagagcgtgaaccaaatactggggccaagaatcggccaggctggtacaaaagacatatggcatgagtatagctcaggacgcgagagtaggacaatggcgaaaaggggtgcccgtgatgcatatcaaacatccgttttacaccagcacataagtcgtggtcgacgcatttgtaacacacgatcccgacggggatgacacaggcgggggaatatgagatacaacccccagggggtgtgtcaatagcaaaagctggaacgaccagggaacgtgtgcgcaccgcccagtccaagataagggcaccacgtgtgtggtaacgcacaaaagcagcatcattcaaatccccgtgacggtggggatctgtcccccaaaaggggaagcttagaacgtagcgaactagaagctcaactttcgcattccacacgtcttatgccacagcgacgatcacgtggggtttatcttaatattagcctaatggtgtggacttcgtgaaatctgtccttggggtactcttcaaagggctgtaaagagttactctcaatgagtagtaacgcaaaggtaacaaacaccaatgaggccatcacacagatcaacgagaaggctagcggggaggacacacccaaactcacctgacggaccatggcaaatgcaacgttggataagaggtaacggcccgtcgagccacaaaccaactcattgcaagacacaggagctttgccctaaccaagcgggggcacactgagaacatcgaacggagagagcccatttggcgcctgagggacgatctccagaaagaacccctagggggacatccggaacgacacgaaactgagggaggtcacccacgagaaccacggacgcaccatacgtgtcgcaaggc

SEQ ID NO: 611038 - DNA, 554 bp, Homo sapiens
  misc_feature (491)..(491): n is a, c, g, or t
ggacgcgtgggtcgctgtagactgggtcaaagctaatttaagtatatggtcagagctgtcaaagacataaggagtccataccaccggactggcctggagcaaaaggggcctgtggaaaagaactgacggactgccatctggaccctctgccggatcaggtcctccttccccggtctcaccagtgaccatctgatcctccttcgagtctcataatcaatacaggctcagatgagtctgcttcccgctcagctagtgttcgcgcagattactcagggggaagagcattacacatgccctgaaaatatgtatctgatgacatgaagactcagaagaaaactgccctgaaggctcagagtggtccagtacgcagtgggcccaaaccaatactctgcagctaaaacccaaaacagcccatccccacaaacgagccacaaaggaaggagccagcttgtacttgaattggagggcaagacgctgcgagagtgcgaaanatgaggcacactgtttgcaacctggtgattgaggacgcagagctgaaaaggtgggtaacctaa

SEQ ID NO: 611039 - DNA, 621 bp, Homo sapiens
ttgcctcttgatttatcaccgaggcggtggtcagggttgtaaatcacagcacttggagagggtgaggcgggctgatcacgaggtcaagagattgagaccatcctggccaacatggtgaaaccctgtctctactaaaaatacaaaaattacctgggcgtggtggcgcccgcctatagtcccagctacttgggaggctgaggcaggagaatcacttgaacccgggaggcagaggttgcagtgagccaattgagccgagaacgcgctactggactccagcctggagacagagcgagaatccttctcaaaaaaaaaaaaaaggatgttctgaaccaatagggggatgaattacacaaaaacaaaaatgatcataaggccgcttgtagccacacagaaaatgcttctgatgtaataagcagaagaagcacagtataaaatatatccatttctgtggttacagccatgaaaatttgcttgtaacaaggaaggaaaggcattttaaccgagagcaaattgacaagatttccgagcccaattccgaatcatggacaaagcaattccagagggaaacgccagaataaaacagaacaaaacaacacaagacaaaagaaaaaaacagaaata

SEQ ID NO: 611040 - DNA, 632 bp, Homo sapiens
actcaactcaaataggcaaatggggccggtcccccctcaaggttgcggaccgtaaactttatatgatttcgcgcaaggcctcagcacggaaagccccataaagctctcccgggcgtgttttttgcaccttggtctgaagtgagacacaccgatgttcttttgtatcttgggaagacttttattgggctcggtacattgaagagcctctctacatgagagaacccatctacactggctctgcatatgcttccatgcttggggcattattttcctaccacaaggtcacctgggggcccctgggcaccccaagtgtcacacactctcacattgtatgttcaaaccctctagggccatgtgtagtaggccccattgaggtatcaggattcccatatgttgggccggaatggaagagtctcctattccgtccagttccctggacagctgtaataatctttgctctcctttttaatttgctttcaggggtcctgagtatagcgccccccggcaaggtaaacatagttagcaaggtctttgtccactgtagctgaaatttggcatatattaggcttctaaacactctcttaatcgctggctctcaaactctcacattgtgcctcccggagactagttct

SEQ ID NO: 611041 - DNA, 266 bp, Homo sapiens
ccccgggggggggggggggtttttttttctcccccccccccggttggaaaatttggggccccccccttagggtttttttgggggggggggggggccccctttgtttcccccccccttttgtgtccccggggccccctgggggtttttttggggggggccctttttttttgggtggggccccccccccccccccctgggggggggggccccttttttgggggggggggccccccccccccttttttttaagggggtttgggggttta

SEQ ID NO: 611042 - DNA, 210 bp, Homo sapiens
gtacttagggctacccagacacagatctcatccccacggaaggggtgaaggcctcgtccaaactccgatccaccagctctgcctgactccactgaagcaaaagccacacatcactgatggtcacatgcctctggctgagaccctgtcccacagcctggcaccacaagagtcatgctgcaccgtcatgccacgggtgtgggaccccgactc

SEQ ID NO: 611043 - DNA, 101 bp, Homo sapiens
cctcaaacgcttggattctacagcaacatattaccactgttccatccctgacccatctttctcgtttggaaattcggtccagtctaaaatcagaacgtcta

SEQ ID NO: 611044 - DNA, 171 bp, Homo sapiens
agcggactgccggaagacagagcacaggaagcagcagcaccaggtcacaggactgcacgttcacctttgacaccttggggaccaggaggacagcaggtccagaacctccagtgggtcctgcaactccaggagggcctccttcacctttctcacccgcagggcacgagagta

SEQ ID NO: 611045 - DNA, 152 bp, Homo sapiens
tattcctaggctgctgtagaagcactgaggtccccagacttcacaaaggaaggggaggaggggcaagcactgagcctaccaggtgctgcctgccccgtcctgcattcctgcaggaggtgggaagggagagaaaacggacattcgcgccatcc

SEQ ID NO: 611046 - DNA, 314 bp, Homo sapiens
tcgagcccgacgaaggcggcgccgaacaggccggtgaccgtcagccagagctgggtcttggagagatcgcccttctccatctccagcatggcgaagccataggtgatggaggagaacagcagcatcgacgtgttcgatcgccacgatcggcaggtcgaacgatggtccttgggcgagggccctgggcgcagtagttgcggccgagcactggcgtaggtggccgaacaggaccgcgaagcatgaggcaatctgctcatcatggtatgatccgagaagtccgagcaatcgtgctcccattccgggtgatgctctcc

SEQ ID NO: 611047 - DNA, 474 bp, Homo sapiens
tcttgggattatcggccggaagagaactgagccacccggatttcttgaagctcagagacccactgatagttgggtttgcttagaattcaaacttctttcattttagtggtgccaggactcgaacccttgcacatgctaagcaagcactctaccactcagctacatcctcagccctagaatttaaactctgtacagtcataattcaagaaatagtttgagagttttaacacaaattgggtcctgatctcgatgacagatgtgcctgacatatagactgctctttgcctgagaaagggcttaactaaaagtagttgctttcttttaaaattagatttttattttttaaaaaattggagtttacaacaatgaagaaattggatgtggtaatgtgttaattttgtcttcacccatattttggtgttagaacaagcgtatgttgtatgtgacattaaaacatttaaatgtaaaaaaaaa

SEQ ID NO: 611048 - DNA, 334 bp, Homo sapiens
catgtgattcctagaggatccccaggctctcactttcccacttggttttctccacttgaaaaagaaaagcacgagccgggcgcggtggctcacgcctgtaatcccgacaccttgggaggccgaggcgggtggatcacgaggtcaggagatccagaccatcctggctaacacggtgaaacccagtctctactaaaaataccaaaaattttgccaggtgtggtggcacatgcctgtaatcacagctacttgggaggctaaggcaggagaatcgcttgaacccagcaggcggaggttgcagtcagctgagattgtgccattgcactctggcctaggc

SEQ ID NO: 611049 - DNA, 306 bp, Homo sapiens
  misc_feature (115)..(115): n is a, c, g, or t
  misc_feature (133)..(133): n is a, c, g, or t
  misc_feature (159)..(159): n is a, c, g, or t
  misc_feature (161)..(161): n is a, c, g, or t
tttgtctctgctaaatacacaagattagccaggggtggtggcacatgcctgtggtcccaggtactttggaggttgagccagaagaatctccaggaggcggaggttgctgtgaacnaagatcgtgccattgcantccaggttgggcaacaagagtgaaantntgttccccccccccccaaaaaaagtaagggctctccattagggcccatagaggacttttaatatggaacctgaatccaaggatcccacaataagtggtcagtagttcatgatgaattaaaagactcaatatttggtcttcaccca

SEQ ID NO: 611050 - DNA, 229 bp, Homo sapiens
aataactatcctctgcctgactagacaatgatagtatactaaatagcttcaaagctgaagaatctaaatagtcgtctttgactcaagtaccaaataataataatagctatactataaattacttgtgaaaaacaacacattttaaagattacgtgctatcttggtacaggtataagtagaatgacagtttatacgtacatgctgttagtagtgcattctaaataaatat

SEQ ID NO: 611051 - DNA, 608 bp, Homo sapiens
  misc_feature (39)..(39): n is a, c, g, or t
  misc_feature (48)..(48): n is a, c, g, or t
tagaggatccccgtcaagaagcatcctgagtttactacncaaaccttnggctcacattcttgaaagaaagagcctagatgaccttgcagtgagtaacatactgctcagtaatatgcaccaaggattgtaaaggtcgctatgcttaaatgtgacaagttagagtgtgctgcctagaggtaatgaacaggaggtaaacagctttctcctactgtcaccttacaaatcagcacagaagttctgacatacacgaaagcaaatgtgccaaacaatcatttagaaaaggtgatatgagaggtcagggcggtggctcatgcctataatcccaatactttgggaggccaaggcgggcagatcacctgaggacaggagtttgagaccagcctgggcaacatggtgaaaccccgtctctactaaaaatacaaaaagtagctgggcatggtggtacgcgcctgtaatcccagctactcaggaggctgaggcagtagaatcgcttgaactcaggaggcagaggttgtaatgaaccgagatcacgccatttccattccagcctggacgacagagcaagagtctgtctcaaaaaaatataaaagtaataacatattgtatga

SEQ ID NO: 611052 - DNA, 1409 bp, Homo sapiens
  misc_feature (20)..(20): n is a, c, g, or t
  misc_feature (70)..(71): n is a, c, g, or t
  misc_feature (73)..(73): n is a, c, g, or t
  misc_feature (94)..(95): n is a, c, g, or t
  misc_feature (101)..(102): n is a, c, g, or t
  misc_feature (104)..(104): n is a, c, g, or t
  misc_feature (137)..(137): n is a, c, g, or t
  misc_feature (143)..(143): n is a, c, g, or t
  misc_feature (186)..(186): n is a, c, g, or t
  misc_feature (188)..(188): n is a, c, g, or t
  misc_feature (193)..(193): n is a, c, g, or t
  misc_feature (195)..(195): n is a, c, g, or t
  misc_feature (197)..(198): n is a, c, g, or t
  misc_feature (211)..(211): n is a, c, g, or t
  misc_feature (690)..(690): n is a, c, g, or t
  misc_feature (694)..(694): n is a, c, g, or t
  misc_feature (730)..(731): n is a, c, g, or t
  misc_feature (753)..(753): n is a, c, g, or t
  misc_feature (760)..(760): n is a, c, g, or t
  misc_feature (763)..(763): n is a, c, g, or t
acggtcagagcctccccatnagtcccggggtaaagcgacccattgaaaacagaaaactaattctacccanngncacgagaaatgaaacagaacnntataanngnaaaatacgggaccagaaatggtggcctccgcantaaccnaatcatcctaaatgtcctctaagagaccagacctccccagaantnacccntnanncacctattaccgntcaggagaaaacctcgacttgtcctgcttcacggaatctaacccaccggcagagtatttttggacaattaatgggaagtttcagcaatcaggacaaaagctctttatcccccaaattactagaaatcatagcgggctctatgcttgctctgttcataactcagccactggcaagggaaatctccaaatccatgacagtcaaagtctctggtccctgccatggagacctgacagagtctcagtcatgactgcaacaactgagacactgagaaaaagaacaggctgataccttcatgaaattcaagacaaagaagaaaaaaactcaatgttattggactaaataatcaaaaggataatgttttcataattttttattggaaaatgtgctgattctttgaatgttttattctccagatttatgaactttttttcttcagcaattggtaaagtatacttttgtaaacaaaaattgacatattngctnttgctgtctatctgaatgccccagaattgtgaaacnnattcatgagtattcataggttnatggtantanagttatttgcacatgttccgtacaaccacaacaaccaccaccccccccccaacccaccgcacacacccacaccccaaaccaccaccccaacaacccaacacccccacgcacacacgcacagcaccgcccaaagcacgcagaacgaacaagcgagcacaacagtggcgcggcagccgggcgcgcacaggtcgagccgagcgaacgagcgaggacaccgacgaccagggcgagggcgacgcgacgcgcccccagcaccaacgccgcaacagcaccatgcacccacccacacgacacacacgaaaggagagacaacgaaaaccaacagaagggacgcgacgggcgagcaacactaacgagcgggggggcggaccaagagagaatgagacgacgaggaagaacaacaaaacgaaggaaggagaaggacagcagcaggcgccgcaaccggcaccagcagacagggaggaacgagacgcgcgaggcagcagacgagaccccggcgcgcgccgaggcggaagaaggagcgacccacccgacagaccgacacagaactaacgacagcacacagcagaacgcccgaccacgacgcccaacacggacgcacccgacaacgcagaaccccaggccgaggcgacgacacagcgagccc

SEQ ID NO: 611053 - DNA, 135 bp, Homo sapiens
gttgtgggatcttacccccgcagagggtggtaaagcaggaaataacagctacttctagagtactgaaatacgcatttgcaagctagtaataagtatactataagctaacactgtgaaaggttaaaacataacgct

SEQ ID NO: 611054 - DNA, 296 bp, Homo sapiens
agctgatctagagttatccccgctggattcactgagcttcattgaaatcttcaacgatatagccagctcctgctcgaagctgggattctgtatactgctatgcttgaaaggaggaatttccattaattcctcctcttcgtcactgcttcctgtaggaccatctggcagtctggagcggctggcctaccttgtcactggttgtggccaatgtaaggataaatgcgtatcccacaaacaaggtcttgttgagaggcacccgccctctctgctcttccaggtcagagcgttcaccattt

SEQ ID NO: 611055 - DNA, 1094 bp, Homo sapiens
  misc_feature (20)..(20): n is a, c, g, or t
  misc_feature (70)..(71): n is a, c, g, or t
  misc_feature (73)..(73): n is a, c, g, or t
  misc_feature (94)..(95): n is a, c, g, or t
  misc_feature (101)..(102): n is a, c, g, or t
  misc_feature (104)..(104): n is a, c, g, or t
  misc_feature (137)..(137): n is a, c, g, or t
  misc_feature (143)..(143): n is a, c, g, or t
  misc_feature (186)..(186): n is a, c, g, or t
  misc_feature (188)..(188): n is a, c, g, or t
  misc_feature (193)..(193): n is a, c, g, or t
  misc_feature (195)..(195): n is a, c, g, or t
  misc_feature (197)..(198): n is a, c, g, or t
  misc_feature (211)..(211): n is a, c, g, or t
acggtcagagcctccccatnagtcccggggtaaagcgacccattgaaaacagaaaactaattctacccanngncacgagaaatgaaacagaacnntataanngnaaaatacgggaccagaaatggtggcctccgcantaaccnaatcatcctaaatgtcctctaagagaccagacctccccagaantnacccntnanncacctattaccgntcaggagaaaacctcgacttgtcctgcttcacggaatctaacccaccggcagagtatttttggacaattaatgggaagtttcagcaatcaggacaaaagctctttatcccccaaattactagaaatcatagcgggctctatgcttgctctgttcataactcagccactggcaagggaaatctccaaatccatgacagtcaaagtctctgagacagcatctccccaggttacctatgctggtccaaacacctggtttcaagaaatccttctgctgtgacctcccaaagtgctaggattaaaacatgacccaccatgctcagaaaaaaaaaaaaaaaaaaaaaaaaaaaaaaaaaaaccaaaaaacaaaacaaatataaaaaacataacaacaaaacaaaacaaaaacaaaaaaaaaaactaaaaaaaaagacacaacacaatctcataaaaactcacaaccagacaaacgcaataatcatcaatcagacacaacaacaaacatgacaactcatactgattcacggcacccaccaacacaccacaaaaacagtcataccaaatacaaaacatacactcaccacgtacagcacaacaataaaaaactaatataaacagtcaaccatactgtagacctacactcaagtataataactctaataacataactacaactgttcgtggaggatcatgacgcaacagactgagacgaaaggggagtgggggcgggtggcagcgacgcataagagaggctaacctagagtaacgaatcgagcgcgagcgctggtagatgagtgagacgaggagaatgagagtggagggagagaagggaagaaggagtgagatagatgataggcgcaacgccggtgcgtcggccggggggggg

SEQ ID NO: 611056 - DNA, 103 bp, Homo sapiens
ggcagtttttgcttctattggtcaagaattctttacaaaacccacacacacacatccacacacacacacacacacatgatgcctgcccttctgtcgtcttctc

SEQ ID NO: 611057 - DNA, 338 bp, Homo sapiens
agtctaagaaaatgaatgaatgaatgcatgctgaggtggatgtgataccagaaataaatatgtgccctactaaaattttttcaccgtattcccctacgttgttagtagtgctgcttatgcttatcatagaaaattagtcaagtacacaatttggaagagagtaacagtctattcttaccacaatccatcaatccactcttcttggttaagcgttgtctgtcattccttcatcttttttcctatgcttttttttaactttgccaaggctatactgtataccttcatttctccagtccaccctggtgggttggtgggttggttgattgggttgacgtcag

SEQ ID NO: 611058 - DNA, 386 bp, Homo sapiens
  misc_feature (52)..(52): n is a, c, g, or t
  misc_feature (54)..(54): n is a, c, g, or t
  misc_feature (56)..(56): n is a, c, g, or t
  misc_feature (100)..(100): n is a, c, g, or t
  misc_feature (102)..(102): n is a, c, g, or t
  misc_feature (260)..(260): n is a, c, g, or t
  misc_feature (356)..(356): n is a, c, g, or t
ggtggtagcccattggaggtcccgggagcgaagtccagctgccgttagctgngnantagtcgcacgctggatgcatctacgtccgccgagcccctggcanangaggccgcgtccgccttcagttgtggccggtgcttcgccccctgacccttcgcccccaaagaccagctctaacgttaatttggagtggccgcagagtcagtttcctacaccatccgaggccccacccagcacgagctacagcctccaccagggagggncctgggaaccctcagcctggcactttcctcaaccctcaggaagctcagcggtggggcagtcctagttccgaggttgccaccgtgggaaggacagantgggcagcaagagcaattcaccaccagctt

SEQ ID NO: 611059 - DNA, 147 bp, Homo sapiens
tgagagggttcacatgtgccaggtggtttgaactccttagctcaagtgattcacccaccttggtctcccaaagtgctagaattacaggcatgagccactgtgccgggccagttttaggtttttgttttgttttgtttttcagagaca

SEQ ID NO: 611060 - DNA, 181 bp, Homo sapiens
gaggaatgatcattctattccccctctattgatccccacctccaaatatctcatcaacaacctgacataagtcaccacccaacgaatgactaatcaaactaaccgtcaaaatcaaatgataacacatacacaaacacataaagagacgatacctgactctcttatatactatgtatcctct

SEQ ID NO: 611061 - DNA, 273 bp, Homo sapiens
  misc_feature (2)..(2): n is a, c, g, or t
gncgaccggggatacaggcgtgagcactgcgcacgctgggaagtttaattacttctgcattttccccagataaggacatttgcttctagattgcctgtttggatagtcatcgaggtggtatttatgctccttctgcaattcctcagataaggaataattgtctctaggagcctagttcagatgagtcaccaagtgattttgctctcctcagatctcagaccatattttaaactgtttcccaatttaactatctattgaaatccccgaggggta

SEQ ID NO: 611062 - DNA, 314 bp, Homo sapiens
gaggcaggaggattacttgagccagggaggtcgaggctgcagtgagctgtgatcacgtcactgcactccagcctgggtaacaaagtgagaccctggactcaaaataaaaaataaaaaaggatcatcatcgtgatgacaaaggaattacagggcagggggtaagattcatgtaccctctgaggccaaaccccttcttggagtccagggctgtctgttgctgaggatgacatcaaacctgggtgattcatcacccttaatctttctcggtgccagagcgggtcacaagctcttttgtgggatttgggtcagagcca

SEQ ID NO: 611063 - DNA, 363 bp, Homo sapiens
  misc_feature (122)..(122): n is a, c, g, or t
  misc_feature (155)..(155): n is a, c, g, or t
  misc_feature (188)..(188): n is a, c, g, or t
  misc_feature (191)..(191): n is a, c, g, or t
  misc_feature (236)..(236): n is a, c, g, or t
  misc_feature (244)..(244): n is a, c, g, or t
cagtctcatccaggtcactgcaaatgttgttaattcattcctttttatggctgcatatatatactacagtttctttatccactcattgattgattggcatttgggttggttccatgattttncaattgtgaattgtgctgctataaacatgtgtntgcaagtatctttttcgagtaatgacttctttnctnctgtgtagaaatccagtagttcgattgctggatcaaatggtagtnctactttnagttctttaaggaatctccacactgttttccatagtggctgtactagtttacattcccaccagcagtgtggaagtgttccctgttcaccacatctgcgccaacatctacttttaaaaaa

SEQ ID NO: 611064 - DNA, 903 bp, Homo sapiens
  misc_feature (163)..(163): n is a, c, g, or t
  misc_feature (175)..(175): n is a, c, g, or t
  misc_feature (180)..(180): n is a, c, g, or t
gcttcctggcgcacaaagatgaggagtggtgtcggtctaagtaccacccagatgaggtggggaagcgtcggcaggaggcccggggggccctgaaaaccgactgagggtcttcctgtccctcatggagactggctggttgataaccttctcctggacatagacnaagctgatgccntgtcnagatgctggatgcagccgtgacttcagatggaaggaggcacggagaatgatctccgcactcctggagcaggaggaggaggcggagcaggcaggaaagcctggggagcccagcaacgaacagaagaaggacgggctggagcacggcctaggggcacggggagcgcaaaagcaacgacacacggatgacgaacgcacggacacgacggcaagcaggctgagaatgacacgttctacactgatgacaagaacaacacgaacgtcggacgggtgatggggacccaggacccgcacgcaacgaacagaacgactcccgagaaggaaggccacaaacacggagtagcacgacagcggaaccggaacgcaccagggcgtgacgacagctttgccgagcgccacgcgtgtcaagagcctgcacgtcgggagtccagagcagccgggccaggctgcaggacgcagacaggcaggaggccgaaccaaccgctccaccaggaggagagggaagacagccccacgggaaacaaccacactggagacgaacgcgcaacgcgacgacacgcgggcgccagggacgtggaaaagaccgcgcgcagccgcgcatacgaacctggactcccacgccatacatgccgccacaacagcgccccaaaagcacccgcgggccggacaaccagcccacctccggtacagggggacccaggcaccacagccggggcgcgccaacga

SEQ ID NO: 611065 - DNA, 415 bp, Homo sapiens
tctcacgtctgtgtcactcaatcattaaatcctatcaattttacctcctgaacacttttctttcctaaatttttaaattttcttgtggagaggagtctcactatgttgcccaagctggccttgatttcctggcctcaagtgatccacccgccttggcctcccaaagtgctgggattacaggtgtaagccaccgcacccagccagtgggctctttcttatgagactttgtagacattccattagctgatttgttaaatgatcttcaaaatatttgcttgcatcaagtaaaggaaattggatggtagatatcccctgtatatagctctacctgcctccttccttcatcaaagactcaaaaagcggaatatgtctcctctgtaatccatttcaagaacacattaggtggtgatgggca

SEQ ID NO: 611066 - DNA, 349 bp, Homo sapiens
ggggggggggaaagggggggggctttttaggccccccctgggggccgttgtttggggccccccccccccctaaaggggggggggggggggtttacccgggggggggggggtcccccccccccccccgggggcgggggggggggaccccccccccccttgggccccgggggcctttggtcccggccccccctcaaacccggggcccaaggggggggggtgttttttcccccccgggcccccccccctgggggggggggggggggggcccccccccggggggccccccccccccggggggggggtttggttttttttttttaaaaggaaataaaaccgggggcctttttca

SEQ ID NO: 611067 - DNA, 1230 bp, Homo sapiens
  misc_feature (1153)..(1153): n is a, c, g, or t
gcatcggttaaagtctctcttcaccctgccgctccatgtctaagtcagagtctcctagaaggaggcccgaacagtcgtgaggaagctcttcacttggcagggttagagctttgagaacaacgtgagtgatgaggccgtgtagagagccgatttatagatgctagatgggcgaacagcgtccacggcacttgtgtgggtactcgcagtagatccaaacactccaagcgcctccaggggctttggcgtgttgtcacgactcatgccacgtgctggcaggaggtgggatagcagcttatggaatcgcagaggtcaaccaaacagagtgggatcggtcagcagttgctggaaccaaacagcagagctgtacatccaagaagcatagattctcgaaagtagcacgatgcccgacatatcaacctgtgaaaagagagcatcatttagtctgcgtggctaattgacagatagcaacactgaatcgaacatcaccctagatgaagattattgtgcgagagcaaggtattgcgcaataacactttgaaatcgtgatacgaaccgtcaatggcctggagcctcggaccagcaggtggctagagaagatagagaggtgcctattagaactctaatatgtttacacccatattgaacggaaaccagtgacatccgtgtgggacttagaaaaatttggccagtgccaagagtaggaaaccattgaactggtagcagatgggcccatcaggcgtgttgaaacgttacgacacaaggccccgggtgcaaaagctaaaggagatgggtaggtcgcgtgcaaacccatgggcaacagagggccaaagggggtccagggcaacagcagggccggggggcgaaggaccagaggcgccacaagtggcagacagacacactccgcacacgcgtggcgacacacccacagaccgaacaggagcatggcaccaccagagagtcagcctatttgtgcgtcgcgagaagcaaatgagcatggacagaattcacaaacgtcgcaggagtgataaagaagctggccgcacaccaggcggaatgaccacggacggagcaagaccaagcatgacgcagcaaacaatcacaagttctcctcctgtccatctgtacactcacactattctcctccatgcctacncgacgacgacaccacaacatacagaaaaaagagaacaaataaaagataacacaacgacagtgaaagaacaggtgaca

SEQ ID NO: 611068 - DNA, 1474 bp, Homo sapiens
gtgtctcccccaccaaacgtccgtgtgcggacgacgagaggctcatcgaccacttggttcacgacagaggtctcccccgagcatgtggtcgcttccctctcccccacgcgggggatatttttggggggggcggccgccctccatgtctggtccgaccaccaacgctgtgtttgtttgtaatcgacgaagctacttttttgtggggcggacagaaaacgagtgtggcgcgaccgaccagcgacagcgtcttgtggtgggcgcccgccctcgcccccaccagctctgttgtcttggctgttttgttgaaaaccgtgggttggatagaaaacccccaccaggggggggtatggtcgcccccccccaacaatgtggaagggggtagagataccccccccgggtggtgtgtaaaagaccccctctttgggggagaaaggagggatgaaagaagaagatcccccctggtggggggcccccaccaaccgctcgtctgctgctccagtgtgctccccaccacacaccaccccacacggggggttttataagtgtcccctccccccccctacgagcgcccctcttttttatctcacggggtctgctccccccacctctggtggcgacacttctcacagagggggggacaccccgctctgttgtttgtgtttctctccccccaagaggtggaccaccctcccgcgtgttaatcctactctctctcaccccccgcctctcacacacaaggggtctcctcccccctgtgagagaattgtgggggcgcaaccccctcctctcttcttctctctacgcgcaccccccacatatggggggccccccccccctctctctctttgtggtttctctctctccgcgctctaatattctccccatatctcgcgcgacgcatgctttcttttttgtagactcggagagaaatctttttatatttgtgcccccactctctgtcttatgtgtggctcccctatgagagccagaattatgttgtgtcttgtgagagcttctccacatgtggcacacacacaccctgtggggtgtaatatagtgggagacacacagccaccgcgttgttgtagtacccccgtgtggcgtggaacacacgtggccccacaaacacccacgggccatttctcccgcggcgcgcgccacacctcgtgccgccccacaccacgctttgtgggcttgtgatttttcaccccgcgtctcacatcatcacatctgtggtttctctcttttgtgacacacgctcttgttcgtgttgtccccataaggggtcgcgcagcttggggaccacaggtgcacacacgcacacacaccacgggggggttcacaccacaccctctctttttttttttttttttttttttttttttcctccctctaaagctcgtctgtgcacacacccacaaccacttggcgatcatcgcttttttttggaaattaaacccaccaatccacccca

SEQ ID NO: 611069 - DNA, 168 bp, Homo sapiens
ttctctgtctttctccttagattggaataatggtggaacaggcctggatgatccagaaatattagaaggaagaacttttaaatatgtggatacccatttggcaaggttaatatcctaacttgtggagacatgttttagttttcatttccctggctggcttgatttttg

SEQ ID NO: 611070 - DNA, 260 bp, Homo sapiens
ggggggcccccccccccagggggggggggggcgaaaaggggtaaattttaaagggcccccctttttttggaaattttttgggtttttttccccaattttttgggggggggggggggggcgtttgggtttttcccccccgggggaaaattttttttgggggggccggggggggaattttccccccccccccccccccgggggggggccccccttttttttattttccccccggggaaaaattgggaaaaggggttttttta

SEQ ID NO: 611071 - DNA, 489 bp, Homo sapiens
  misc_feature (288)..(288): n is a, c, g, or t
cagagagtacggactgatgggtcactgctgaaatctaccaaatatttacagaagaatgaataccaattcttctcaaggtataccaaaaaattgaagcaaagttaattcttctgaactcactctacaaggccagtataaccctgataccaaaaccagaaaaggaaaaacaaacaaaaaagaaaactacatgccagtgtccttgataaacatagacacaaaaattctgaacagaattctggcaaaccaaatccaacaacacatcaaaatgtaataaccatgatgaactgngattcaacccaggaatacaaggataatttaacatacgcaaatcaagggatgtcatacatcttagcaatagaatgaaggacaaaaaccataggatcatctcaatagaatcggaaaaagcatttgataaaattcaacatccattcgtgattaaaaaaaaaactctaggccaggggtgggggctctacgcctgtaatcccagca

SEQ ID NO: 611072 - DNA, 189 bp, Homo sapiens
gtgctcgccgtgcagatcggcgaaggcacaggaagcccagatcagacacagagcagacacagcgaaggccctgggatgccccagactgcagacacagggagcccagacgcagacagagcagacacggcgaaggccctgggggccccagacgcagacagagcagacacggtgaaggcacagggagcccag

SEQ ID NO: 611073 - DNA, 895 bp, Homo sapiens
agcgggggcgggcggagcctgggcccgcgggggtgctgcggggcgatcgggtccgggcgcggttgtcgtgccatgagactcacggtggtacagccttgagcttccagccctcattgaggtggccactcccaaaggtgcttggcagccgaaggaacggcctccagaactgtaccgatgtcttattatggagcacaagcgccgaacacggagcggtggtcacaggtcagtcgtcatccttcatatgctccactcgcggtgctctgagaggtgacctatgaatacctgggtacatgcctggatgactacacatgcagagcttgcagacgtcattcagactcagatcatgaggacgaggagaggcatcgtgggggatggggagaccaaggaaaccctttcgcatgactgggtgcaagtattctgtgccaagtgtgaccgtgcgtggaggacgaaagggccaagtcgtgatgatcgtccacaactggcccaggatagtccaacgagttgacggccaggatgcaagggtcctggttcctgattttgcatgtctgggcaaagaggcgctgggagagggcaaaaccgatacgggatagcagcctgctgtcttgaagatggacacgggcgtgacgacttgcttgcgcattgtgccatcgtggcgcgtgacttccgtgattctggaattgcacttgagtgcccgggaggacactgtgcatgtcgcttgaggcatttttcaccgctcgggacctccaatggttgaaagggttgccccatatggcagagcaaacatggagtaagaggccttgatcgattgcatagaggggctcaatgcgaccatgttagcaggactttttggtaccttggaattgtctaggattgaacgctgccattcggattgcag

SEQ ID NO: 611074 - DNA, 966 bp, Homo sapiens
aggaaacaggagctttgtcctataaccctggttagtagcagctgtacgctcggaatcagggatcaattagtgtctggtgcagctattgaatgtgcaatgtgtcacgtatcgtgtattacacgctacaacataactcatttgtaacccatggtataagctggtatttacaaatataacacagacctttaaacttttccttgaatacaaaatgtcatgcatggtcttagctgcatcaactttccatttaagtcaggactgcaatactgattccagttaatgagcgctaagatccaatctgtctaatacagtgaccccctagccatccgggcctggcaatatacaacttttttttcccctccagtttgtaaacactccccttccagaaaggattgtgcaacacaggattatttttaaagtgattctgaaatttgaattacactttttggagaattctgatgatgcccttagaagaaattggacacgtattgagtgtcacaaagctggggctgggaattgctggtctaatgtttcattagacttaagaaacctaaaatttctcagtgggtggataaaaaccacctaacgcttagaaactgttttctcatgcagatatgtttctcttatttatgcctgaggactaatttctggttgctagctgtaatgcactgttgaccttccataatggtgccttcacgccagcgattccctactgtgggggtcacatacagggatgttggggcgatgcatgactgaatcacggctctgataacaaacgggcaggcacaaggatcaaagaataatacagcaaagaaaaatcacaaaaagtaccatccaccaaaagacgcaaaaggtaaacatccctgaacagtgtcagatagtcaaaacaaaggaaaagaaaaggacagtacaaaagggcaaaacggaaaacggacacaacgaacaacacagaagacaaagaaaacaaga

SEQ ID NO: 611075 - DNA, 748 bp, Homo sapiens
agcggagcggtgcacaagaagagaccgaggagggtggacccgagagagccagggcatggaggccaacatgccgaagcggaaggagcctggcaggtctctccgcatcaaagtcatctccatgggcaacgccgaagtggggaaaagctgtattatacaagcgatactgtgagacacaagattcgtgtctaaatacctggcaacaattggaattgactatggagtcacaaaggtacacgtcagagacagagaaatcaaagttaacatctttgatatggctggacatcccttctatctatgaggttacgaaatgagttatatacaaggacacacagggtgtgatactggtctatgatgttgggcagaaagactcctttgacgacccttgatgcgtggactggacagaaatgaagcaagagcttggacctcatggaaaacatggaaaatattatataagtagtaagtgccaaacaagattagatagtaccaaaaaatcgctcgtgtagatgacagtgaaggacgtcttgggctgaaagcaaagggttcctgatactatgaacacattcagcacaaaactggagaaagcactacacgagatgtccagaacatataatactatccataggaagaataacagagacacatggcgggaaaaagcacaaacaaacaaaagcaaggcaagaaaccccaagaacaagcagaagccaaagaagaaaacgaaaagaaaaaaagagggacaagcgggagaaaa

SEQ ID NO: 611076 - DNA, 372 bp, Homo sapiens
  misc_feature (101)..(101): n is a, c, g, or t
  misc_feature (154)..(154): n is a, c, g, or t
  misc_feature (272)..(272): n is a, c, g, or t
  misc_feature (371)..(371): n is a, c, g, or t
aaggttgtggtgagcccagatcgtgccattgcactccatcctgggcaacaagagtgaaattccccatctcaaaaacaaagagataggtagagctggccgtnggtggctcacgcctgtaatcccagaaggctgagttcggtggatcacttgagancgggagtttgggactagcctggccagcatggtgaaaccccatctctgctaaaaaaaaaaaaaaaaaatacaggaattggtcgggcatggtggcaggcatctgtagtcgcagctacttnggaggctgaggcaggagaatcgcttgaaccccggaggcagaggttgcagtgagttgagatcgcgtcactgcagtccaacgacagagtgagactctgtcnc

SEQ ID NO: 611077 - DNA, 797 bp, Homo sapiens
  misc_feature (592)..(592): n is a, c, g, or t
  misc_feature (774)..(774): n is a, c, g, or t
gtaaatgagagtaaaacttatctcaaaggctagcaaaatgatcctgaagtctaactcaggcaatgaggacagtaattcattagaaattaactgttcttggcatgtcacagtcttgtcagcttgaatgttaatctctaaggaaatgacagttattacctgtgctttattgttgatactggacaagatcctcaagtgacacttctgtctgtggatactacatgctaccagtacaggcccggctccattctttgcccccgtttacacacacacaagaacaacaacaacacagaacactctcattctctctgtgtctcttttctcaaagggtgtgacaagaggttcattatacgccactgtgttgtgtctcagggtgtgacaggctaagtggacggggatcaaaaaaagaaggagtgacttaagggcagggaggaagaaccagagaaatatatctcgttaaaagttggaggtgagcaattttaaaaaaaatattttgagccatttaaaaaaaaactttacatgtgggcaaataatttataagttgacaagaaaagtggccgcagaatacgtcaccaaaattaggtgtgttatatcncccttgacaccctcgggaatttacagggcgtgacgcccacttcatggtgggagagtctctttcacccgggaccggcaattatcaactaatgcggggggccccaacggggggagatcccgtggatttccataaaaccccttcgggtgtggaaccaaacgggggggacggggaggagaagtganagtttgcctttctcccactaata

SEQ ID NO: 611078 - DNA, 723 bp, Homo sapiens
ccttctgcaagccatctatctctgctcactctccaattgacccgcctggaaacaagggatgaggaggagtagggggctgggagggaatcctgccagttggtgaacgccctgtggcaggaaggtatatgtggacatagagtatacctgattctcttctcttcagccactgactgcttgtggttgggctgtgaatgataatggaatggctggatgtctgctgtttgtcagaaggcagaggagggtgatgaagtgactgacccacatggcactgggatgtgtgtcgcgtatatgtggcatgatctgctacgttcactctcagtgtgtgatctgggtgcatacatggagttcattgtcctgttgcttacttactgcaatgtcttatggccctccttttcaacttggttcctctgttggtgcccaaaggttgggagtaggagacagttatcccatggctgacaacgtgtgcttgccctttaccttggtgcaccttgtcaaattttatgcctgtgtccttccccacctttgcccctcccaagtggttggtattgtggtgaagcccatctcatgttcctgtgacttcatgtctcaaaccaagtttgagcgtctggtctctgctatgatggtggaatccgacgcctttccctgcccactctggtgcttgcccacattgaccggacattggtttcttgacccttttccttcctctttcttgtgcgcagctga

SEQ ID NO: 611079 - DNA, 207 bp, Homo sapiens
gcgtatgaaagaatcacatcaatagacaaatcaaacattaaaaaaaagtatagcacctctccgttcctaccacggcctggactgtagccatttctgccttggagatttagtaacaaccgttctgcatcgatgtgctagttgagggaatcagtgcccagaaagggcaagacatctgcggaaagtcacacagcttaggaagcagaggag

SEQ ID NO: 611080 - DNA, 307 bp, Homo sapiens
gaccttaggagctgtttgataaactaaattgactttaagcaagtagcaggactcctctattattattattttttatgagacaaagtctcgttctgttgcccaggctagtatgcaggggtgtgatctcagctcacagcaacctctgcctcccaggttaaaaccattttcatgcctcagccccctacagtagctgggtttataggcatgcaccaccacacctggctaatttttttatttttagtagagatgggatttcgccacattggccaggctagtctcaaactcctggcctcaagcgatccgcctg

SEQ ID NO: 611081 - DNA, 184 bp, Homo sapiens
tgtgacatgtcatataccactgacatgttcatatatcgctgagatgtgcatatagcgctgacatgtccatataccgcatgtacatgttcatataccactgacatgtcatataccactgaaatgttagctgtcatagcatgtccccgagaattagatgtgaaccccagcgagaggctggcatgca

SEQ ID NO: 611082 - DNA, 753 bp, Homo sapiens
atcatactagccggcttcggcgaggggctactcccccaaatccttcagcgcccccggtctggcggttacaggcatgaccaacacaaagcttatagactcttactcttctttttatgctactcatgcctagcacccactatcgacggcgcacccccactatatcacgcttacacactctaccctccggggagcggtgaatcaccccagaccatcgttttctcaggccgcgccacttgcttttttcccttacacctaagaacgaagttatactaatatcctgagtacgaagacaacacccattatatccttgcacttctcttcttactctatttatctatatcctgttcaccacttcgcccccccctccttcctgactcctcgcctatcccccacataatacttcttcatttcctccctatagtccccagccccagaaacattccgcatcgagccccgcgccctatatttgtccgccctttttcatcttcgggctcgctctcctcctgcgcccttaaccagatacgacacccgcgacatagaacacaatcgttgactatcggaacgattagcataagcccctaaagtattcaacttaactttactcgttcacgacgccacctgcacaacacgttcttgcacacgatcaccacccactccacggcattacatccgcactattctcctctccgccccgtatacctccaaccgcctcatgcacaccagacggttttggttttataggatacatgtaag

SEQ ID NO: 611083 - DNA, 315 bp, Homo sapiens
acttattctttcattttaaaaaaaaactgttttgaattgacacataactgtgcatatttatgggatttagtgtaatgttttgatatatgtatatgttgtataatgatcaaatctgggtcattatcatatccatcacctcaaacatttatcatttctttgtggtgagaaccttcaaaatctcccttagctattttgaagtctatggcacattattgttaactatagtcactctgctgtgcagtagaacaccagaacttattcctcctatataactataactctgtgcttgttgaccaaccttttattctccctact

SEQ ID NO: 611084 - DNA, 402 bp, Homo sapiens
ccgtgcctcctggtggggctgctgatgaaatcctcgggaaggtgccagtacggtccgcgctcgcggctcttgcctaagaaaccgtggctctggctgctgttggtgaggagtcctggaggttcccagagcctcgggcaccgagggggagaccctgacactgtcctgcctgccccaccagtttgctccccgcagctcctcgtcctcacccgagtgctgctggagggttggcaggaggcgtgaccagcagggtccagcacagtcagggtttcctggggggtccaggaaacaggatgagctgctgtgtggcagctcatggtcagctcggtctgaaggcctccctggggacacacaggcagcgaggtccaggctccctctccctcccccagggtgacagagccaatg

SEQ ID NO: 611085 - DNA, 355 bp, Homo sapiens
gtttacgaaagaagtggtgtctcccggtgtacaatatgatccatagcctcagcctcctgagtagctgggattataggcacacgccaccatgcttgggtaatatttgtatttatagtggagatagagtactccatattggtcaagctggtcttgaacccttgacctcaggtcatccaaccgcctcgaccttccaaaacgctggatttacaggcttgagccacgcgtccgacctgaagtggtatatattagaaagtaactaaaccttttttcagtttaatgacccagggatttatttctgaagggaattgggagcgatccttttaagggcaacaagggagaaaaccaactcttaaga

SEQ ID NO: 611086 - DNA, 244 bp, Homo sapiens
tttgagctcggtacccctgacgaagtattttcaatcgggcgtgtacaaacacccacattatttatgatttatcaaagacataaggatattcttaacttcaaagaagaaacattctatgaacttacagggaactttgaggctgaaagtggctcgtataaaggaaaagcaaagattaagaccacttctaaagatgaaatagacagcctatataatgataatcaattaagcagcgctactaacggag

SEQ ID NO: 611087 - DNA, 119 bp, Homo sapiens
gggacttacctgggtgtcccccgcatgcctgtaccccagatgggtgggggccgctttgcccatcctgctctcctccagctgagggaccctggtgggggtggctccttctcactgctgga

SEQ ID NO: 611088 - DNA, 140 bp, Homo sapiens
ggtcgattagaggatccccagttctggtcccccactttgtagatgtactgaagttttggtctccctgggagtgggtggaggcaggcaggacttacctgtacactgacttgagaccagttgaataaagagtgcacacgctt

SEQ ID NO: 611089 - DNA, 406 bp, Homo sapiens
acaacacactctgctcgggtgcacaggttatgtgcttctgcacgcgggcttagagggataacaatgagagggtgccttgagaagcgctgcggatatagtgactgaggccaggtccctgccgcggaaggcaacccagttcacagagtggcaagctcagtgccagccagtgcaagcaacaggcagttctttgatcctgccttagtcacagcaaacatttagccagcctggctcttctccatagccagcaggttgcctgctcatccagtctgtccctggtcagcgggcatgtgctcaaggagaacaaacacagttcagcacaggactcagctgagggtcactaaaggatcatagactgtgagggtgggaggtcttggtttagaggttgagtctagtgcagctgatcacc

SEQ ID NO: 611090 - DNA, 564 bp, Homo sapiens
cctgtccaaaaggccgtggaagggggagattctattttaaccccaaaaagtttttttttcggagggatttttttggcccttttaccactccggccaggcccccaccccccaattagggggggtggggcccccaagagggatcccccggttaattccctaggaagtccccttcctaaacacatcggttttattggcatcgggggtttcaatcccctgggctccccaaagtttaaaagaaaccccccgaacccaaataattcaagcccgggttattacaattttagggggttttttttttccccccccacaagcctaaaagtatttggggtttcccttccccatttccggggggatttaggggtcaacattttttgaacccacaggtttcccgggatttcaggtcataatggggccaactttccccccaattggtttcaccccccaaaaaaattttccttttaaatccaaacatcctttgggttttgaaccccccccctaaaacgggcattttgtaaatggggtttgacaatttttgtatgtccccctttattgatgggggtttta

SEQ ID NO: 611091 - DNA, 238 bp, Homo sapiens
ggacccctatcataatgaggccccggcggctgtgcttagcatgtagaaaataagcttgcttctgcttatctcagagaacaaatattgcccatcatggccaccgctgcgggaagctctgcagactcctaagtaacttatactaggtcactttgattccttagacgacaagagaccagtattgcggcccactatctgtccttaagatgcccgcctctagattacccttctttggcccatt

SEQ ID NO: 611092 - DNA, 150 bp, Homo sapiens
cttgaagaggagaaaaggaaggttgaggaccttcagttccgggttgaagaagaatcaattaccaaaggtgatcttgagcaaaagagccatatttctgaagatcctgagaatgtggctacagtttcagaaaagtcacgtataatggaactg

SEQ ID NO: 611093 - DNA, 778 bp, Homo sapiens
  misc_feature (449)..(449): n is a, c, g, or t
agcgggaatctccaggacaatggggacccgggacgatgagtacgattacctattcaaagtggtgcgtactatcgtggactcgaggtcgtgggcaagagcaatctgcttgtcgcgcttctacccgctaacgagttctaacctgtgtaggagcaagaagcaaccagtcaggcgtggagtatctgccgacccaagcaatgcgatccaggtggcacggcatatacctatcacagtgcgcagatctggtgacaccgttggccaggaggcgctagcgcttccttcaaccatccgcagtaactagcacgttgagtagcaagtgaggtgctcttgtattggatgtagcggagattcgtcgcgaatgcatccgtagaactactagagaaccgttggaagcagcgtggcttgacgggagcttgaagggaccaacgcagaatgggtaacattcgtcagtnctatgcatagggtggcgcaaagtgaaggaggtgaccttgcgcactaggattgctggggcttgatgcgccaattgaaccgaagcgcccctggggcccattcggctggccagggaagaaactaagctttcgtcgctctcagagtcggagtagcccttccgagcccgttggaagtatcgcgcatagaccgttaagagggacatgcgctttcaaaggaagagcatcccttgacgaaagaggattttacctggcagtgtcgttgttcagcgggtacattcagaattcgcctaacctgcggctgccactacggacgaagttcccgcgggggaacc

SEQ ID NO: 611094 - DNA, 103 bp, Homo sapiens
tgagctgctgcctggcaaccctctggagacatgttgtaaaccttcagaaatgatgcagagattttagacatcagaagacattggatggaaaagcaaatcttga

SEQ ID NO: 611095 - DNA, 250 bp, Homo sapiens
tgcagacagtcactatagacatgcagcgagctgaaatgttcttcgtttatggatcattgaagccaagaccttgcccctaaaagaaatattctgcgaactgtgccttgatgatacccctcttttgctcgtacaaccagcaagaccaaaaggccaagaccaaattaatttttccttggggggccggaacattttgaattcttcagccttccacctcttcatagtatcacagttcacatttacaaggatgtgg

SEQ ID NO: 611096 - DNA, 340 bp, Homo sapiens
gacaccctgaatttatcacagatcagccatgaaatgaatgcctaattcaaataatggtcaacgagaaatctacagagtacacgaagagaataatagtgagtatgaagcaggcataaaaatggataggggggtcgggaaggggcataaggcccaaactactattaggcaatcacttgagcatcgttaatttcattcatttcatactgcacctcattttcaacaatggacatgaaactttcaaccaaaaacaccaacaccaacgccagtaatctcacacccacaaatcaactcacaagcaatgataaggtggcagcacaaaaggcaagggcatcacacagca

SEQ ID NO: 611097 - DNA, 161 bp, Homo sapiens
tccctcctctccttcttccccttcatctccctcctctccatcctcggccgctccttcttcttcctcctcagccccgttctcctcctcctccaccacttctttctctcgctctttccggcttgccttctcctccaccttctccttttactccttcaggtcct

SEQ ID NO: 611098 - DNA, 107 bp, Homo sapiens
catgtggtagctgtttgcctcaatgtaccttctccaacaccattgagggactcctcttcacgtggctgcgtgttgcgtggtcatagctattgcctctgtctagtagt

SEQ ID NO: 611099 - DNA, 412 bp, Homo sapiens
cccgcccactgggatttggattgctgcttggaccagtacaatgacaggatctgtgccattctagacatccctagatacaagagtcggatccagaccggtccatctgctcttttccgtctactgagaattcaagaactcacagcattttaaagctctcgctgatggcgagaccgcatccactccttcctccaattgcacctcccaagctggagacatggagacattaaccttcagctgagacacttcccatgctgctgttacaaggctgagctggcccctctgccccagctgagatggacagatcgttggcagctacttgatgtccttgcccatgccacagcttgactcaggggcagtgcatgtcctgctgccctctctgccagagggcacagaacatgtttgtttaatgaac

SEQ ID NO: 611100 - DNA, 601 bp, Homo sapiens
  misc_feature (17)..(17): n is a, c, g, or t
  misc_feature (335)..(335): n is a, c, g, or t
  misc_feature (342)..(342): n is a, c, g, or t
  misc_feature (395)..(395): n is a, c, g, or t
  misc_feature (534)..(534): n is a, c, g, or t
  misc_feature (543)..(543): n is a, c, g, or t
  misc_feature (590)..(590): n is a, c, g, or t
tatctttcctgagctcngaggtctgtacacacaatggaattttcatttgacctctaaatacttggccacaccctgacttacctgggcaacaaaggcaggaccattatctgacactattgcttttggcactccgaaccttggaaaattttctttaacaatcttcttgatgactatctgatcagtctcgttttacaaggaaaagcttttatctatcttgagaacgttcacaaaaatccagaaggtatttatacacatattttttcagtaaagtctatttttcagtagatgtcaggtctgtcttctcatgagaggactagttttctttcttcagtttntactatnttatacagggtttcttttaccagtcttaatttgtctataacttgatagtcttnagactgtcaggatcattgctctttaggatgcctgggcggttagatttgccatctgatttcttttagccacagcatcttaggtctttctctgcagatgtctatatatagagcttgtattaaagccacaagtttagctttntgggctgangtccctttagggaggctgctggcctagatcacttgctttctgtccancactgcactgc

SEQ ID NO: 611101 - DNA, 474 bp, Homo sapiens
ggcatgagctctcaaatcagtggctcttgggtgcaaggcagcaggcgacaagctcacttgggaagagtcttggacttacagcttctcccccactgaaacactatacactggggccacagttcatggcaaacaacacacacaaacacacactctctcacagtcaaacacacatctcaacaagttggcggcaggtagctcagggtatcatagggtctggcatacgcccactcggcatctaagcttgtcctccacgctcttcccagttcacttccctgctgtaacctgggccgtgtggtagaggcctccagcttctcactctgacacgctgatcgtacaaggcaacagtgtgacaaagtcccctcatgggattggccgtcgattgacagcaggacggctacaggggcccgcagctgccaaggaagctgtaaacgtcctctgctcggctcaagaacatcaagattggatcaggtcagc

SEQ ID NO: 611102 - DNA, 314 bp, Homo sapiens
cctatggcacaacaagggtggcagccaggacaacctttagaactcaaaccgacgataattaccgcagggagacgaaacacttattggggtggtgaaggcggaggctacgtaggaagtggagatggctggggccttcaagaagggccacgtcgaggtgaaggagaccgtagccgcttcaagcagtttgacttccctagcaccaccgccgatttcattggagagcaaaagtacaatcaatccttgattgacgcggagtacagcgcacggtccgcaaccctcactactgaaactgaaggcgttacggggtaccgagc

SEQ ID NO: 611103 - DNA, 952 bp, Homo sapiens
tgttgttgctggcagaccgagtagtcattaaacagataataacatcaagaaataaggttctcgcaattatggaaagactagagaaagtgaatagcttcaagagttggtccaaatattcagtcaattctgggacaatgaaatggtggagttggcacatctgagtggagatagaccaaacatgatttgcaagatgacacagaaaacggcaaaaatggcagcagctagggcagttcttgaaaaagtgtcacaatgatgcttctcacagcttcaacgacatgtctgaggcatcctaactgcgaatcagcccataaaaaacaaagaaggagtattgacccgtatgaaacgtggcatgggataaaggtcatgtgacaactggtgacctgcctgtaaccccgaatggagagactggacatttcatctatcagtattttaactgacataaggaattcacagatgaatattgaagctcttcgggaaaactccttcatttccagttccaaagagaacttctgtgacatggaacgtcatcttgagcgtatggacggcttcatgattctgctacacagcatgagccacagaagacccgcattcttgaaactgtcaaacttcaggcgacgaactggactgcagcgaaggaaactctgtgggatacaaaggccacagacaagaaaccaaaaacgcatccggggacagaactggaactcaagcatcggaaatccagcaccggctacagactacgaacaactcccacagacacggaaacagggacgcgatcatacaaccaggtggcacggggtcaaaggctcaactcggaggaaagcaatacaccgggggcacccggcatcctgacacagactggacccggggcacatctgcacccggaacggcacgcggacaggagacacaatcgggagaggacaacaaccattgggccaacacccatcggcgactc

SEQ ID NO: 611104 - DNA, 246 bp, Homo sapiens
gagatctggagtcaagcttaggcccctgtcgtagtgggaccatattagggagcatctagaattttgagaggcttaggctaaggttacagcccacaagtaagatttagtttcctctaggccagagaaagagatattttctctagcattttttaggggagagtcccgagaaaccgctcactcagaatggaaaaaacactcctcgggcattagaggtgaagattctcaaggaaagcagcgctgttggct

SEQ ID NO: 611105 - DNA, 488 bp, Homo sapiens
cctcggcgcctagcaattccttacatagcacttacgccaggaaggtctccatctgcagtcatagagtcatttcaagtatatcgatatatgttatcaacttgactgacaccatgtcagaggaatttataggggggtacaaaagcatcaagatgatttacaggatgtaacagggagagctgtcgagattggtgttaaaaagtttatgattacaggtggaaatctacaagacagtaaagatgcactgcatttggcacaaacaaatcatatgtttttcagtacagctggatgtcatcctacaagatgtggtaaatttgaaaagactaaaccctgatctttacttaaaggagttgctaaatcttgatgagaacaataaggggacagttgtggcagtaggagaatgtggacttgattttgactgactgcacttatgtcccaaagatacccaactcaaatactgtgaaaaacagtttcggaagttgctaggcggg

SEQ ID NO: 611106 - DNA, 467 bp, Homo sapiens
agactctcctcctcactgcggagtctggtccgcgctcctgcagttctgaggaagctcggcagcgaagtcgtgtgtccttcatgcgctgaggtcctcgatttctttctccagacggaggatctcttccacctgcttattttccttctgtctctccagtacacgggtcagtacagcttccttcgggctcttcggcaaggcttcgagttctagcgtgttcctcgtatcttctatcctgcggggcgcggagctcgggttctctacgctctctctctctattctctatcttcttcctccggtttcttcttttcttcctcttccggtttcttcttttcttctggctcccttttctcggccagcaatggtctgtaaactctcggagcaatctgacctctgagttgcttcggaaaaactatggctgcctttttcaggtgcaaaaatctcctcctcagaaggcatgctctgtaatt

SEQ ID NO: 611107 - DNA, 377 bp, Homo sapiens
gggaggccgaggcgggaggatcattgagctcaggagttggaaaccagtctggacaacatagggagaccccatctctaccggaggaaaaaaaaaaggagtcaggcctggtgggtggtggcgcctggtaatcccagctactcgggaggctgaggcaggacgattacttggagctggggaaatcacggtggcagtggagctatgatggtggtgggccacattccattcctgggtcacagagtgaggacctgtgtctcaaaaaggtaaccatagggaacaaaagaagcctggttttagcacaggtttgaggccagaagccaggatctaaattggtggctggtcttaatgcggaattttaagggcgatgggcagggtggcac

SEQ ID NO: 611108 - DNA, 903 bp, Homo sapiens
gggcagtgggggtggggggtcttctttaaacaggcccccttcccatctacctagccagtacccatccaatgagtccccagagcctccagaagctgctgtctcctctctggggacagcagctcctgccttggaggccaaagccccagatctctccagccccagagctgaaaacaccaagtgcctatttgagggtgtctgtctggagacttagagttgtcatgtgtgtgtgtgtgtttggttaatgtgggtttatgggttttctttctttttttttttttttttttagagtcttaaatttagggggaagggagggcctcccatgtgtgcaagaaacgggggtcttaataagattttcataagggttttccccaatgattgtcggaaattgcggagtgttgcctgaagttgccccaggactcacacacccgttcccatctcactgggcccacccaggggtgacaaccctgcgggggggatataccccgcggcgggactcagtgctcttccccacccccactttgctataaaggctaggccctagaatacgacttctcgtggtggcaaaactccggctaaggtctcgtgttccacctggaggtcgacctcatcttcatgtaacaaggggcggggcgactgctcggaaagacatggccccgacaagaaccaccgtctttccaatctttctcgggacaagaagcccgggggggcgagaccctaacgcaaggcttagaggaaaagactcgacctacgcaaccatcggaaacataagggcgccggcgggcgtccacaacaaaatataccacaacaatcacaacacacacacaacaagcaatacatatcacaccacaacacacagaggggggggcgcaaaaaaaccatcccggggacacacatcccaccacg

SEQ ID NO: 611109 - DNA, 940 bp, Homo sapiens
agcggggaggcggatcgacgcgtggcgcccgagggtatccaatggcctggacctggctgcgcaggcgctgacccgacctggcggtgatgctgggcgctggccttggcttggacgaggccttaaccccgcctgggcggacctggcccctgcttgcgagttggaggccggcgggccgggggttggggcctactcggggccgaactgcgaatgggaccgccctctatggaagggcgaccaccgctgggcggcctggtcttgtcctcccttcgcgccttctgacctgcaccaaacctccggaatgcgctggcgcgttacgcactaatccgaaggacggacaccttaactccacagggcgctacacacagctctctaccggacctaaccaggcacatacacagcgcacatcggcgtctggctctacctcacacccggaacacttggacaaccactcacaaccttgggcacacaacgtaacctcctcacccgagaaggacaaacagaccaatcacaaccagcttgaccttgccacactcaccgcacacactgtaccccaccacctggggcaaataccctataaaggaccacagcggcgtaaagctcggcgcgttctcgcgccttagcacagaagaccaacaccacggcaccccaagtaacctccgttcggacacaccacttctaactaacgccctagacactccacaacaggcccgggaaaacgcgcgacctcggcagccaccgacgcaaagacaaagaggcccaccccacccaaagcagaatcgaggccgcaaacaatacccgacgaaaacactaagtaaggagccgcaaacaaactgcaccacaactcccaacattataccgcgagatggcacgggcgtaccgcgaaggccacaagagcaccagaacgcacacagacaacaagaatagcagacgagtaaagaac

SEQ ID NO: 611110 - DNA, 130 bp, Homo sapiens
catgaaccatcacctgacaggaaacaatgtttcacaaaagaagcctacaagaagtattcatcacagattacatgaaatcagtcaaagggaaacttgaagaatagagatcagaaagagtaaaatcttttat

SEQ ID NO: 611111 - DNA, 424 bp, Homo sapiens
gggttaatttaatggggtaaaaggtatactggtaaataaaatagctgcaaacctcaaaaaaaaaaaaaaaaaaaaaaaaaaaaaaaaaaaaaaaaaaaaaaaaaaaaaaaaaaaaaaaaaaaaaaaaaaaaaaaaaaaaaaaaaaaaaaaaaaaaaaaaaaaaaaaaaaaaaaaaaaaaaaaaaaaaaaaaaaaaaaaaaaaaaaaaaaaaaaattgggccccccttgccccaaaacattttaaacttgaaaaaatttttttatgggccccaaattggggccaatttggcaaaatcccccaaaaggggggggtaaaaaaaaaaaagggcccgcttttaaaaacactcaaaagggaaaaaccctggggttccccaaaaaaaaccctttgaaaaaaaaccccttttcgccagggggggaaaaaaca

SEQ ID NO: 611112 - DNA, 111 bp, Homo sapiens
acctaaatggcgtactgaaagctaagttcaaaccacccttgcgtacaaaggagtacaggtacacatcaacaccaatcacccagcaccccacagccatttagataacagcca

SEQ ID NO: 611113 - DNA, 144 bp, Homo sapiens
aggcaaggtgactcgttgttcactttgcttggaacagggaatggccatatgtgcaattatataccagttcatgggcgcgtagccaatgatttgtctggtatagtcaggggactctagaaggacactatgacttggaaaacctgg

SEQ ID NO: 611114 - DNA, 131 bp, Homo sapiens
gaggatccggggacacgggcatcattatacgttagcgtgtatctacctggcttacatgcacagtgaggcacagcacctttccttaaacttatttatgacacagagacctgtgctcccgctgtcccacctct

SEQ ID NO: 611115 - DNA, 471 bp, Homo sapiens
gcgaattcactagtgattgtgagctgagatcgcacccggtccaagcactggctttgagataagcaatattaaaaacattttcagcttcatcagatgctgactaactgacctccaaccactgttccaccagccataactacagctttgattggacaagtgactgatttcagtaactttttcctgacaaggtgactacccatcatggactggttctggctggcttacagagctcctgcacttgcatgtctttgtgtcctgaaaagaccttttgccatatagggcctaattataatacatttaaatgttaagtctccaccccaaagtgaccatgggttatatgttgcatgcatgtttgttcaatatgcatgtgtcagaaccactttcatgaatattcatagctcctcatgtaacctgttgaatgtgtatgtttagtccatccattgagcatgaagctccttacctaacccctcc

SEQ ID NO: 611116 - DNA, 1143 bp, Homo sapiens
cactggaagacgtgcttcgtggctgctcagcaactgggatcctctaccagtaccctggacctgcacctgacgtcatccctctgctctcgtgtgaacatgggtggtgtgtgagcagtgctggtggctgcctggatgagccaacaccacggatctggccccacgccttccagtgtcattctctcctgacctgtgccctgcctgtgagctaatgtgcctgagagctgatgtgccgagatggccgagctggatgcacgcatctctgccagtgctgtgtccaaagtggtgtcatcccccagggctgtagctccacagcccctgcataccctgctgcctggctcctcacggatgacctgcctctttacgtgccatgaggattgccagaccagcttcttccgcatctttgggcacagcccaacctggcgcgacatcagcgcctgtctccaccgagcctgggcaaggagtactgcgtcttggagttctcccaggacagccagcagctcctccctgcctgggtcatctacctgagctgcacttctgaactggaccgattgctgtctgcactgaactctgggtggaaaagcatctatcaggtggactcccccacacaggcgatccaggaagcctccaacaagcagacaatcggaggatgccttgcagcctcatccacaggcctggcagcggagcgaaggtctctgccgcggctgagcctcgcgatgaccctggtgctgcctgcagagctggtggcgtccctggtgtgctcggcatcgaccgccggcacctggcaggcacacatggtaaggctgttgtgccttgctgccaagaagccataaggccaacccttagccttgtagtcggagaaaccccccaagatgtgggcataaagcatagggtccctccatccaggagtccaagcaacatgtgccagcgaccccttgacattcttgcgacaacggagacacatgacgattgcggtcaagagactcaaccaatatgcgctatgagagcaccaacactaatgccgcagcagcgaacgactcctcgggcagcgagacattcagaaggacacacacggcgccccactccttattgcggtcgatgcaagcatgctatcatcaacagatcgagacgcgacaacatgcaagg

SEQ ID NO: 611117 - DNA, 954 bp, Homo sapiens
  misc_feature (278)..(278): n is a, c, g, or t
cctgatttcttcccggcgcaacaatttcccaggccgttttcccttgcctttttgggccccataggaaaagtgtgccaagaccggcgtggtcccgctcccggactccgcggaattttctcgctcccccccctctgggaaaattccgggttgctccacgggagcccggcaaacgcccgggggtttgacccggcgttcccccgaacgtttcgcatcccaccccgccagctctggtggcctccttcgtggaatgccacacttctccgcggggtgaccccccnccccctggggttctcctcttcttctctgcgccgagaagagcctcccctcccgtcttgtgtgacgatgccggcgccccttgccgaagagaaaggaagagaaaccccggtgtgttatcctattttacgaactctgccttccgcgagaataactctttccggcgcccctcttgtgggaggacccgcaacactgccagttgtggtccgcagggccccctatatacctgctccggcctctttcggggcaccccccttcttcggccccccgaagccctctcttctgttggctgtttgtttgggcttcccatcccccgaccgacacctggtgtctagcttccgtgtgcccctgtagtttcactgctgctctttcttggggccccccccccggagaccacaagtgttttgtaagatgtggctgttgtgtagccctgtggcgcatgttcccccaggagagaagggccccctgttgccaccttccccggcccttctcatgaagaccaggatttctatctcacccccacccgaggggagctctttccctggagcacaaggaggacccctcattctaccccaccaaacttgttttatttccccggaaaaccaaccccaaccctggggacctttttgccggtagggtgggccccccccggctttttggaaaaaaaaccttcttcccgga

SEQ ID NO: 611118 - DNA, 946 bp, Homo sapiens
agatatcaccgtgcctccctcctactgtatgatgcgatgagtgataatgagtgtgctttcaagtcggtttactactcatactgtgcacccgatactgatgaatgctggcgccatcgaccttcttgtcgagcgacatcccttgaacagtgtaatggtggagaatcgcgagaacccaaactcgagcgcgcctccaggggatactttgaccacgtggtgctccggggatcttccggaatggcggaataatggagaaggtctctctgcttctgatggacatggtggggtaccgtgataccagggatggatccggacgtccaagttacaaatacgcggagttaaaatacaggggagcccttttcgtgaagacagttttgctacaaagtgaggggagaataaggcaagtaaacattgaaggagtgtacatctttggagaaaatcaatctgtcatatgaatgtgatcggaagttgatgcatttatataataccggatcgtagtatgaaagcggaaaagatgagtaagacttcgtatgacacggggcatcttatccagaacaaaatgatttttgtaggtttgaagcaagatcaacactgtaactatttgtttgaggacttgggggggcagaactgccgcactaattgtcgtgctcttgtgaaaacgtctcatgccggacctgttgcgtccacttggacaatcgaggagaagcgagctggaaaaggggcgtacgaaggcgataggtacctgttgaatgaggaagccaactgtggatatctttccacatccttttgtccgaaacaatggcgtgatggcgatttgcgataccccatttactcttcaagcgtccgcctagcatcaaggtgcgcccttcaccattgtgcccattccagttaacggagacaccttgcactcttccgaaaacacgataaacgcgctgacttgagaagcgag

SEQ ID NO: 611119 - DNA, 182 bp, Homo sapiens
ttttcttcagccaagcactctgcattctctctactcaatatatatatattttttgagacagagtctcactctgtcaccctggctggatggcagtggcacaatcttggctcaatgcaacctccgcctcctgggttcaagcaattctcatgccttagagtagctgtgattacagatgtgcacca

SEQ ID NO: 611120 - DNA, 363 bp, Homo sapiens
aagttgattcttgagtatacccgtctctctttgatcctcttgaggcattcccagatggaagtatcaaatataagagaagagcacgcaattgcccatgcccttagctggagtaagtctgtgtgttgcctccagtctcgtctcatggcattgctgggactggcacttaagtggcagctgcctcagggattgcttcctcctggtatgaccatagatttgtttcgaggcaaggcagctgtcaaagatgtggaagaagaaaagtttcctacacaactgagcaggcatattaagtttggtcagaaatcacatgtggagtgtgctcgattttctccagatggtcagtatttggtcactgggtctgttgat

SEQ ID NO: 611121 - DNA, 777 bp, Homo sapiens
tcttggccaggggcggagggccatgtaacaaccccaagcccgaacgctagagagcaataggttgaacttctaaggtgaccagttgttccagcgcaataagaagagcaccgctttactctgatatcatccgacgatggagtctatcgagctctatcagctgtttctgggggagggatgcccgcctccatatcaagtgctgaaacagagaaaagccttgtagcccacaatcgacctataccatattcataacacctcattatgatgcatgccactgtgatcattaactgagaacccatgcattgtgactcaaaatgaaaatgcggctactagagccggcttatcctgcttgcagaactcactctccacagatatctgacaccaacttctcgtacgtgtgtgctatccctctaaacaagcttgtgcaaaaaaatcaaactttttggtcacttataacaaagagagccagagtgctgcacctctaactatcgcctatatctattgagatatcactggtaccgaccgcaatccttttcaaaagacattctctttactaaacgcaggagttttctgccggtaaaacgtgagtaaaacaaacagaatacacctgctctcgcgcataggaaaggataaaaaagactcaaacatccttttgacccagacccaataaaaactaaattgacgcgattagcaatatattaagggatgttaaaggtaagcaactacttttgtgcccccgggcgccggaaatacccaagtttagcaccctttaaaagccta

SEQ ID NO: 611122 - DNA, 859 bp, Homo sapiens
  misc_feature (10)..(10): n is a, c, g, or t
  misc_feature (67)..(67): n is a, c, g, or t
  misc_feature (70)..(70): n is a, c, g, or t
  misc_feature (89)..(89): n is a, c, g, or t
  misc_feature (118)..(118): n is a, c, g, or t
  misc_feature (149)..(149): n is a, c, g, or t
  misc_feature (152)..(152): n is a, c, g, or t
  misc_feature (164)..(165): n is a, c, g, or t
  misc_feature (168)..(168): n is a, c, g, or t
  misc_feature (171)..(171): n is a, c, g, or t
  misc_feature (200)..(200): n is a, c, g, or t
  misc_feature (205)..(206): n is a, c, g, or t
  misc_feature (243)..(243): n is a, c, g, or t
  misc_feature (270)..(270): n is a, c, g, or t
  misc_feature (279)..(279): n is a, c, g, or t
  misc_feature (289)..(289): n is a, c, g, or t
  misc_feature (293)..(293): n is a, c, g, or t
  misc_feature (320)..(320): n is a, c, g, or t
  misc_feature (344)..(344): n is a, c, g, or t
  misc_feature (351)..(351): n is a, c, g, or t
  misc_feature (376)..(376): n is a, c, g, or t
  misc_feature (401)..(401): n is a, c, g, or t
  misc_feature (424)..(424): n is a, c, g, or t
  misc_feature (426)..(426): n is a, c, g, or t
  misc_feature (431)..(431): n is a, c, g, or t
  misc_feature (467)..(467): n is a, c, g, or t
  misc_feature (479)..(479): n is a, c, g, or t
  misc_feature (489)..(489): n is a, c, g, or t
  misc_feature (572)..(572): n is a, c, g, or t
  misc_feature (608)..(608): n is a, c, g, or t
  misc_feature (618)..(618): n is a, c, g, or t
  misc_feature (620)..(620): n is a, c, g, or t
  misc_feature (627)..(627): n is a, c, g, or t
  misc_feature (667)..(667): n is a, c, g, or t
  misc_feature (726)..(726): n is a, c, g, or t
  misc_feature (792)..(792): n is a, c, g, or t
  misc_feature (824)..(824): n is a, c, g, or t
caggcctggnaacctgaggtgtagagcacccagaaggaagggtaaaagcagggggcaaagcgggggnccncccgggcgggggggcacgncggggggggggccagcggaaaccgggggncaaggagcgggcagggggggccacacccgangcngggcaaaagggnngcnggnaagggcgggcccagggggggcccaccggnccagnnagggaggggagcagggggaggagggcacaggggggcnagggcggggggggaggggcagggaggnagggggggntaggcaaagnggcncaggacaaggggcaggcggagggcagngggagagggaccgaggcaggggcncgcaagngaagggggagagggggaaacaaggngggcgcgaaacagggaagcgggcangggggcagggagggggcgggggncnaaggngggggggaaggggggggggggggaagggctggcctncaggggaggggnagaaggaggngggggggggaggggaaggcggggcagagcaggggaaggagtgaaagccaggcaggaaagtggaagaacaggagaagctcatgnaatggattaccctccacaggattatgttccttgatncctgagagtntnttctctngattttaccccctcagtctatcactgcaagagaaagaggnagaaaagacaaacagaccacaaaagacaagaacccagacatatagacagacgcacctgntgcatgtgcatgagccagagcctggggagagaagagagagcgtgcaagagagagctcagagcaggnaggcagcccaccccctgcagcagtgctgggcntcactggagcccctgcaggaagtccagcagccctg

SEQ ID NO: 611123 - DNA, 1076 bp, Homo sapiens
  misc_feature (54)..(54): n is a, c, g, or t
  misc_feature (357)..(357): n is a, c, g, or t
  misc_feature (404)..(404): n is a, c, g, or t
tccgggagcaacctttttcctgcttttgttaacgtaaccttgcgagttgtacgntcaaatagttgaacatgtaaatcttcctccatcttttttattcttcgcgttaatgcaggttgcgtaatattgagtaatttagcggcattgttaaacgaactggactctgccagtatgacaaatgccttcatacttgataattcatgcttcattattactccggaaaatggaagcgacgattttgggtggctggccgttaaaaattttaactgcatttagccaacttaaattaatgaaaaaatgttattaatcgttgagctaaagtcattagagatgctttgcccttaatgtaaccatatcgcnataagttatgtttttaaattgagggcattattatgaaaaaaataccntgcgtgatgatgcgaggtggaacctcgaggggcgcgttcctgttagcggaacatttacccgaagatcaaacgcagcgcgataaaatattgatggcaattatgggttccggtacgatctggaaattgacggtattggcggcggtaatccactgaccagtaaagtcgccattattagccgtttccagcgatccgcgtgctgatgtcgattatctgtttgcgcaggtaatcgttacatgagcaacgtgtcgataccacgcctaactgcggcaatatgctgtctggtgttgggcattcgccattgaaaatggttgattgcagcgacttcgccagttactcgcgtacgtatccgcaacgtcaatacgggtacgttcatcgaagctgatgtgcaaacgccaaatggtgttgtcgagtacgagggtagcgccagaattgacggcgtaccgggtactgccgcaccggttgcgctcactttcctgaatgccgctggaaccaaaaccggaaaagttttcccgactgataatcagattgattattttgacgatgtcccggtgacctgtatcgatatggcgatgccagtcgtcattattccggctgaatatctgggaaaaacaggttatgaattaccggcggaactggatgccgacaaagcattattagcccgcattgaatcta

SEQ ID NO: 611124 - DNA, 104 bp, Homo sapiens
caactctatggaatatgacatttccatttgcctcattgctacttcaagctctttaaatcaccatcttccctatttctgcgagtggtattgccatcctttacatt

SEQ ID NO: 611125 - DNA, 315 bp, Homo sapiens
  misc_feature (171)..(171): n is a, c, g, or t
cattacaaatattttactcatatatctttaaagttaaagactaagggctgggtgtggtggctcatgcctgtaatctcagcactctgggagaccaaggcgggtggatcatttgaggccaggagtttgagccagcctggccaccatgtctactacaaatacaaaaattggccnaggcgtggcagtgcgtacttgtaatcccagcttcttgggaggctgaggcatgggaatcacttgaacccaggaggcagaggttgcagtgggccaagatcatgccactgcactccagcctgggcgacagaatgactcccatctcca

SEQ ID NO: 611126 - DNA, 887 bp, Homo sapiens
agcggagacctaagagtgtgcgactagacccgcgggtgacaaactgggactggggccaacagtcctgggtagccgcggtgctgcaaagcgcaccatggcccgcccagggcgccgcgcagcacggccttgggggttctgcagaggccttcgggttgcgcgtctcgtcctctagcccatggcgtgtccgcagcgcttggctgatcctgggcctggtgctgtgcctggtgtgctgggggggtctgatcctggcgtgcgggctgcccatctggcgggtgaccgctcttcctggaccagctaatcgatctctgacggctgctgatcctaccttggagccgggctgtggagtgtcgtgctgtggtgcatgagcacctgggcacattgctgtgctgctggtgtacgacctcggtagcttggctctgatgctctcgaggtgccgtgccggcagcggtgcgctcttccgtagagctgccgtgactgctgtgcgttacgtttgcgctcattcgttgacccctggctgggctgcgcaagtgtcaccacctgctgtgcgcccacgtggcccgtgcctacgcgtcgctggtgtgcgtccctcacgagggaggccgtgcgtctaccatggtacttgcggagctcgctaggcgcgctcgttgccacctcttgactggcttctgccaatctattgtccgtcccgcgaagttttacccgacccgtcttgtgccccgtggtcgcaagacagtaccgaatgctgggctgcagcgccttgtacagtcgggctgcggcgtggccaccgctgcctgcttccatgtgtaggcgagctgcactcttggtgctgcgggcgcctgaggtctgcaccggccgtcccgtactcagcttccccgtggaagtactca

SEQ ID NO: 611127 - DNA, 395 bp, Homo sapiens
tccaatctcaccctctttccactcgccacactcaagtaaaccacagtatccattgctccctttttttctgtgttcatgtgtactcaatgtttagctcccgcttttaagtgagaacacgcagtatttgattttctgttcctgcgttaccttgcttagaataatgccctccagctccatgaatgttgctgcaaagaatatgattttattcattttattaacagcatagtatgccatggtgcatatttaccacatttcctttatctagagactcttgttgggcatctagattgattctatggctttgctattgtaaattgtgccgcaatgaatataatgcgcatgtctctataggatagaattatttatatttctttgggtatatacacaggaattgg

SEQ ID NO: 611128 - DNA, 612 bp, Homo sapiens
gtctctaactcccagcctggctaacatggcaaaacctcgtctctactaaaaatacaaaaatcagcccggcgtggtggcgggcatctgtaatcccatctactcgggaggctgaggcaggagaattacttgaacccaggaggcagaggctgcagtgagccgagatggcaccactgcactccagcttgttgacagaatgagaccctgtggaaaaaaaaaaaaaggccctcccaggccagaaacagaggagggcagtcgtggtttcaattaagagaccctgtggggtcctttgggggtgggtcctggatttaagagacttcacttggaggatccaggtggctctttggacgctggggtctcaggtccccttcccattggtccgtgggcgcctctggcgcggccacctgggtgttcaccacttggtgggtgagtccactcggtaggagggacttgggtataaagacactctcacaactctcgcggggggccctacagccaggggggtcttatctcccagaaagaggggcccaaagagaagagcggagtgccgcggggaacacccccaagcgtttccgcacagggctcccgatcacgcggggactggggggaaagccg

SEQ ID NO: 611129 - DNA, 1091 bp, Homo sapiens
  misc_feature (798)..(798): n is a, c, g, or t
tctcaccagttttgatgatgaccattttaagaaaagcttgtgtggctctctcctatcatttacagacctccagaagctggaaaatttgatgcttttactgaactcttcctgaaggtttaatactggagtgggaactcagttttggtcctaattatattagaagaaaggcttccctcttctcgtactcctttgttgcaaacccatctcgtggatagctagaaaaggaacttcagaaatgtggcactatattgtgatgcaccacctgtgttatgcactctaggcctctaatcgtgtcctctatttaatggtgggtgacatatattcgtcagaagttacttacccctttcgtgagttagctacatattattctccatattgccagattttctttaacagctcttcgggagtgcgtgccctttttaaacatttgtgggtcgtatatttgtaaacgccctctttgaggtataacgggggttgcagggtgaccttttcctatagaattctcataccagttagcgcagtttggggccatgtgttatagcgtgcaacgggaaacactgtggtgaattccccatattttcccacctccattccataccattatcagtggcatttgggggatccccatttgggtctcctattcctcatttgacggctttccccaggacatttcagaaatttctagatataggaacgggtccactgttcataaatcgtcgtgggacccttggtacttttacactcatccctccggttcccctatctcttccgtttaaccgacattattttgtaggggtnaaaatccctgaacagactgatagtgtagtcttgaaaaggttaaatctataggggtcacgcttcgtataatatatcccgtggtgacgacccatttcgttgtacaaggggcccaattgtgggtggttcttgttaactggcaggcccgtatgtgttgtatattagcgggaggaaatagcgcgccaaggaagtgtgttcttccacaaaagtggctctgcagagattacaaggggtgttcttgaaaacggtttaattgtaacagcgggatattttgaaaggaaaacccttacaacttc

SEQ ID NO: 611130 - DNA, 464 bp, Homo sapiens
  misc_feature (7)..(7): n is a, c, g, or t
  misc_feature (175)..(175): n is a, c, g, or t
  misc_feature (215)..(215): n is a, c, g, or t
  misc_feature (409)..(409): n is a, c, g, or t
  misc_feature (421)..(421): n is a, c, g, or t
tgcccanttaacttttttaatgggtcccaaaattccgtggacaaatttttgggtcaagttgtcctcccattaaaaagtactggattttaaaaacctaataacttaaaactgccacacgcaaaaaagaaaaccaaagtgggtccaccattctcctttccttctgaaggtttacgangcatgttatcataaccatctttactactaaacttaaaggncaatgaaacaaacagttctgagaccgtcttccaccactgataagagtggggtggcagtattagggataatatcattagccttctgagcttctgggcagacttggtgacctgccagctccagcagccttctgtccacggcttgatgacacccaccgcaactgtcgtctcatatcacgaacagcaaagcgacccgngggatagtctgngagctcccacacacagggctgccaggaaccatttcactggcgc

SEQ ID NO: 611131 - DNA, 251 bp, Homo sapiens
gttattccgtgcttgtctgactctagcaggatccgtaggaggctgcagtgcactccagcctgggcaacaagagtgaaactctgtctcaaaaagaaagaaagaagtgaaagaaagctctggcagtcagcgtgtaagtaaatagccaggcacgtgtggctcacacctagtaatcccatgcgcttgtgggagtgctgaggcagcaggctggatcacttagagtccgaggagttcacagacctagccatggtgca

SEQ ID NO: 611132 - DNA, 223 bp, Homo sapiens
caagcacagagcgaaccagccacagggcatggaaagctccaaatccatgacagacaaagtcactgacaggatataaccctgaattctactagttcctccaattccatttactcccatggaatcacgaagagcaagatccacgctgttccagaagccctataagctggaggtggacaactcgatgtaaatttcatgggacaacccttgtacctgactagagtgg

SEQ ID NO: 611133 - DNA, 186 bp, Homo sapiens
atttctgctagtcacaaagcccaactttttattgaagtataacatacacacagaaaagtgcccagatcaaaagtgtacagctccaagaatgttcacaaacggaaagcacccaggtaaccggcaaccagatcaagaaacagaacaccccagaagcaccacctcatgcccccttctgtcgtcttctcg

SEQ ID NO: 611134 - DNA, 498 bp, Homo sapiens
gaatatgctgtctcacgctgaagctggagtgaaatgcacaggcgcgatcccacgtactgatccagcacgggagttcgagctgctccgtttccgaactgggacaggttctcccctccttaggcaacctggtggtcccccgctcacgggagctaccatattgatgccgaacttagtgcggacaccgatcggcatagcgcactacagcccagaactcctgggctcacgcgatcctcccacctcagcctcccgagtcgctggcattacaggcatgaaccaccatacccaaccatttctttactcatagatataccttcaagttttcacagtgctttcatatttgtgttacacttacaacaagacattatgagggggtcaggagtaattactgtctccactttatggcccaggaaagctcacacagcgacttggtgtcacgtggtctctgtgggcccaggaaagctcacacagtgccttggtgtcacacggcctctgtacctc

SEQ ID NO: 611135 - DNA, 153 bp, Homo sapiens
  misc_feature (23)..(25): n is a, c, g, or t
cccctaaaagccaaaatggggannnaaaagactcctatcaaccttgtgcgtcattggacacgtggattcgggcaagtcccccactactggccatctgcttctgtaaatgcggtggctcggacaagaaacccttgaaaaatttgggaggcggcc

SEQ ID NO: 611136 - DNA, 107 bp, Homo sapiens
tgcactgtagatcgctccatcttgtaaaataaaataagctggttgtcatggcacatgcgctgtaatcatagctactgtaatcccagctacttgagaggctggcatgg

SEQ ID NO: 611137 - DNA, 1040 bp, Homo sapiens
gggtccctcagtactacagcttgcgttcaccaggcctggctggttgcctgactctgtagcctaccatgctgatgatgcgcaagctgtacaatggcgagccaatgggccgcctagtgtgggtcatagtgcaattccggggacctggagttggctgtggcattgagtcctgtgtcctttgatgttgcagtacctgccgcatggatcttcttcaaccaataaatgggtaagcgacggtggagcatctactcatcagtgcccatgatccccagatggactgttcccagccagatgggcatgctcttccctgggtcgacggaggttgcgagcatgcatctcaatgcttgagctggagtccgtcgatggacgacagcgtcgagtgatggtggacagtctaccgacgcgattgaataggggccaggcataacatacatgtcagacgtcttggtggagaacttcgtgccttgggagtttacatatcagcgcgacatgcggcgagtacaagcacttcagttgcgatcgattggctgtggttgtgccctaggggccacttggttgacaccaaattcagtcgctccgtcgctagggcgacgtacctctccgacgcgtggaccgattcagatggtcatcccgtggaaggacgcaaatctgctaacaatttggggcgcatgactttgtcttggggcaacgcgaaccgacggaccttatttcgcctctaaagtataacaagggccaacctcttgggcctacgttcatcccacccatgaggtttctggcgaggaaatttacttccactggccagcaacggaatcgtcgtgaaacgcaacatcgtttccctattgctcgccacgtgtactcgtttgcgtagtgaacccaccatgttcgagggttccaccactcctggcttaagcacgaccgcgacgccaacaatccattggccgccttgagtagcgtactggtcaatagtttcccccccccgggcgtaatcataacccatttgtggggcaaacagcaaggacaggcgggaacacaagccgtacctc

SEQ ID NO: 611138 - DNA, 327 bp, Homo sapiens
tagcaagaccccatcttaacaacaacaaaaaaggcaaaagacatgaacaaacacctcaccaaagaagatacacatatggcaaacaagcatatgaaaaggtgttcagcatcataaatgtgtacaaacccatagaatgtacaacaccaagagtgaacccttacgtaaactgggttttgggtgataatgatgtgtcagtgtaaattcattgattgtaacaattgtgccactgtagtggggatgttgatagtggcggaaggttgggtgtgggggcagggactgcttcagtttctgttgatccgcccgcgaatttagtagtagtagtcgacc

SEQ ID NO: 611139 - DNA, 580 bp, Homo sapiens
ggggcagtgatgcgactggcgtgtgccgcgcggcgcatttccgactctggcgaatggctcgtctgtagtgcactgcctgtgtggcccagctgcgaccccgtgtcccggcccctggtgtacccctgtgactatgtgaccgaacgtgttccaccgctcgatcgttgccctgtgcaaatgacgcctatgccacaatgagaccaatccatggtgaccaccagtaattgatgagatgcatcgagtttgcagcaagacgcgaatgcaagactggtaggcattgctgctatcctgactacaacagtgcagcaggtggctgcatcctgctggtgcagacaatcctcagtgacgatgagtgcagcaccagcatagccagccaagaaccgcacacccgagacgatacaatgactcgacttgtgcgtcacatcatgtgaccacatgtggtcagcatgttgctgacgagtcgtcacacgtgagatacagcgctaatgtgtcctcgctcgcgtacaccctgagcgcgtcacacgccgcgatcgtaggcatttgataagtgcaaaatgggaccgtgacactgagagaacgtaga

SEQ ID NO: 611140 - DNA, 232 bp, Homo sapiens
  misc_feature (54)..(54): n is a, c, g, or t
  misc_feature (65)..(65): n is a, c, g, or t
  misc_feature (83)..(83): n is a, c, g, or t
  misc_feature (96)..(96): n is a, c, g, or t
  misc_feature (109)..(109): n is a, c, g, or t
  misc_feature (112)..(112): n is a, c, g, or t
  misc_feature (117)..(117): n is a, c, g, or t
  misc_feature (122)..(122): n is a, c, g, or t
  misc_feature (130)..(130): n is a, c, g, or t
  misc_feature (147)..(147): n is a, c, g, or t
  misc_feature (150)..(150): n is a, c, g, or t
  misc_feature (202)..(202): n is a, c, g, or t
  misc_feature (218)..(218): n is a, c, g, or t
acgcattttaatctacctttgtcttaatttacagcaggttttgtatgaattttnaaccttttaanaaactcaccaaatctggntgatgcctttganagtaatgaaaacnatnaaacnaaaanaaaataanaaaaaaaacggcttttnaanttataaaaaaaatgaaaaaacgaagggaaaaaaaggggaattgaaaaaagancagaaaaaaaaatcanccgcaacaagaaat

SEQ ID NO: 611141 - DNA, 288 bp, Homo sapiens
  misc_feature (56)..(56): n is a, c, g, or t
cctgacggctgttacctcgatgaaagctgaagacctgatcaaaaatgaccaacgantgcctgagcgtctgttcaccccgatacgccacccagtgctacacgtctagccttgcaaaaatattgccaaggagatcagcgaaacctcctatacctatctgctgtgccgagctggccgaaagttcgctgagttcggaaattctaggccgtccaggcgccaatatcagcctggtcaggatcgagatagaggaggtcatgctcgaagccgatgtgatcaaggtaaagaccgtcg

SEQ ID NO: 611142 - DNA, 208 bp, Homo sapiens
taacatatgctgatgatctcagaccaatctgacaccatcgcgaatcggctcttcaatagcagtgcgacagtgtgaaggtgaatttccacccggagttctctacctccgcaagcccactgctcgctgtggactatgaggagtttgtccgtggctgtcagctatggcagtcttcccctcctactatgagccttggaggctacacaccggc

SEQ ID NO: 611143 - DNA, 308 bp, Homo sapiens
ggcacgaggtcttgtgatataatccaaaaaaaaaattgactacaagttagcactcagaggagaaggagtaagggtaccacaagcagaggaacaatatgtgtacggccacaggagtagacagcacagtgaggacacacctgaggactgaacacattgtaatggaggagagtacagactctgcaactagactgcctggattcaatccttgcctgccgcgataattagctgtgtagccctatctggtcatttggctctgggccaaagttttctcattaataaaagaaagaatattggtgtctcccacaaaa

SEQ ID NO: 611144 - DNA, 285 bp, Homo sapiens
  misc_feature (43)..(43): n is a, c, g, or t
  misc_feature (63)..(63): n is a, c, g, or t
  misc_feature (270)..(270): n is a, c, g, or t
aataataattaaatttatagaaagccgagaggaaattgctagnttattcctggtagaggaatntctgtatttgaaaattctccagaaggaataatataaactgtggactttgggtgataatgatatgtaggttcgtcagttgttaacaaatgtatctctctgttgggggctattgataatggggaaggctgtgcatgtgtgggagtaggaggtgtatgggacatctctgtaccttctaatcaattttgctatgaacttaaaactgctctnaaaataaagtttatt

SEQ ID NO: 611145 - DNA, 450 bp, Homo sapiens
  misc_feature (159)..(159): n is a, c, g, or t
  misc_feature (162)..(162): n is a, c, g, or t
  misc_feature (165)..(165): n is a, c, g, or t
  misc_feature (177)..(177): n is a, c, g, or t
tacatggcaataatctcattaaaagtatataaataaaaagacaattgattaaaacaaagtaaaaaaaaaaaaaaaaaaaaaaaaaaaaaaaaaaaaaaaaaaaaaaaaaaaaaaaaaaaaaaaaaaaaaaaaaaaaaaaaaaaaaaaaaaaaaaaaaanaanaanaaaaaaaaaaanaaaaaaaaaaaaaaaaaaaaaaaaaataaaaaaaaataattttaaaaaaatattaatttgaaaaaattttataaaaaacaaaaattaatactttttaaaaaatattaatttttaaaaactattgaggtttaaaaacttaggggctcactaaataaaacctaataataataaaattactttttaagccaaaatgggtatttatggagtcgaattattaatttattatattctgcataaaatttataaaaaaacaattaatttttataaatttta

SEQ ID NO: 611146 - DNA, 538 bp, Homo sapiens
tcctagcaggatctcttttgcggtgcctttactcttcatactctctcttcttcttcctcttggggaggccccggcagagccggctcagagggggtgcctattcttttgcacctccataggaaggggctctcaacctccaaggtggtacctccttctcctctccttcagagttatctgcctccttgtgacgtttaggagagtctccagcaagtcccctgctctcctcttaaacgctcctttctcgtacttctccttggctggctcatcaatgaccagcttcccttcctcgtcgcttgctgccctctgtataccccttcttatcaccgtcaacctctgtagcttcgggcctctggttcaggctcttccacacagctctttttctgggaggactgatagccgggaagccttgacagtagggttgttctcgatctcccacagaccctcgctgaaccctttcctcttgttgggctatccaaacttctccttggattcctcgtaagggaagaggtctttggggcccaggaaagtgggagaaggg

SEQ ID NO: 611147 - DNA, 432 bp, Homo sapiens
  misc_feature (159)..(159): n is a, c, g, or t
  misc_feature (162)..(162): n is a, c, g, or t
  misc_feature (165)..(165): n is a, c, g, or t
  misc_feature (177)..(177): n is a, c, g, or t
tacatggcaataatctcattaaaagtatataaataaaaagacaattgattaaaacaaagtaaaaaaaaaaaaaaaaaaaaaaaaaaaaaaaaaaaaaaaaaaaaaaaaaaaaaaaaaaaaaaaaaaaaaaaaaaaaaaaaaaaaaaaaaaaaaaaaaanaanaanaaaaaaaaaaanaaaaattaaatttggcaaattaacctaatagggaagtcttttaaaaattaattggaacgaggtttaaaaagtacaaaaacgggaaaaaccctgagtttaccaaattaaattgccttgtagaacatacccttttaggaaaaaacctattagcaaaaagaccatgaccgttcgcctttataaaaatttgcacaccttgattgaaaattgaaaattgaaagcgtaaatattttgtaaaaatttgggttaaatttttgt

SEQ ID NO: 611148 - DNA, 223 bp, Homo sapiens
gcatctgagagtgtaattttcagctgtttatatcactaaaataagatcatgttttaattgtgagaaacagggccgagcacagtggctcacgcctgtaataccagcaccttagaggtcgaggcaggcggatcacttgaggtcaggagttcaagaccagcctggccaatatggtgaacccagtctctactaaaaatacaaaaattagctaggcatgatggcgcat

SEQ ID NO: 611149 - DNA, 946 bp, Homo sapiens
  misc_feature (18)..(18): n is a, c, g, or t
  misc_feature (61)..(61): n is a, c, g, or t
  misc_feature (102)..(102): n is a, c, g, or t
  misc_feature (106)..(106): n is a, c, g, or t
  misc_feature (113)..(114): n is a, c, g, or t
  misc_feature (129)..(129): n is a, c, g, or t
  misc_feature (142)..(142): n is a, c, g, or t
  misc_feature (155)..(155): n is a, c, g, or t
  misc_feature (157)..(157): n is a, c, g, or t
  misc_feature (169)..(169): n is a, c, g, or t
  misc_feature (179)..(179): n is a, c, g, or t
  misc_feature (184)..(184): n is a, c, g, or t
  misc_feature (188)..(188): n is a, c, g, or t
  misc_feature (226)..(226): n is a, c, g, or t
  misc_feature (239)..(239): n is a, c, g, or t
  misc_feature (303)..(303): n is a, c, g, or t
  misc_feature (320)..(320): n is a, c, g, or t
  misc_feature (327)..(327): n is a, c, g, or t
  misc_feature (387)..(388): n is a, c, g, or t
  misc_feature (438)..(438): n is a, c, g, or t
  misc_feature (499)..(499): n is a, c, g, or t
  misc_feature (505)..(505): n is a, c, g, or t
  misc_feature (525)..(525): n is a, c, g, or t
  misc_feature (783)..(783): n is a, c, g, or t
  misc_feature (785)..(785): n is a, c, g, or t
  misc_feature (898)..(898): n is a, c, g, or t
tttatatatgttgtaaanaaaagtgtagaaatagtgaatgattaaagtgtgtgtgagaaantaggttgggaggaaaccagcatgtggtccttttggtgtganccancccatcnnggaggtggtcgggtntgggtggatgtgntgggcagtgagtntntcgctcggtaantgtttggttntgaanattntctcgcttcaggaactgatgaggttctcttcttttgantgatggagattanaaaactcttggattctctgaattatacttctgtaggctaacgtgggtggggaatctggggggtnaatgaaaaaagactggnctttgtnacaattcttacctatgaggggatccagggggactctgccgaggagagggacctgcaagtnntggcacatgaggtccgcgcgcccggttgtgggagggaatatctgagattntttgttggacttaggagagatgaagccactgatgttctccaccaccccgatgatggggagnttgacnttgggggagaagttgatttntttccggacattctggagtgtgatctcctggggagtggtgatgatcactgctccatcgatgtgtgctgtggccaggtaccggacgaccgagaggtgttcatccgacgtcccaggtggggtgtccacaatgaggtagtcgacctctccccagtccacatctcggaggaactgcttgatcatgccgtttttcttgggtcccctccagataacagcatcatcaggactgctgagcaggaagcccactgacatcacccccangnttgtcttccacgtacactggagaccagcctgagccactctggtgaacctgctctccttccaatcccattatcttgggaatcgatggcccacatatatcgatgtctagaagagnaatctgtgtgttttcatcctctgctaggccatgggcaaggtgggcgct

SEQ ID NO: 611150 - DNA, 753 bp, Homo sapiens
atagcaaagatgagagctggtagacacgactctgggctcacttcaatagagaaaatgtttcagcctataacctcaaatatctcttcattcgtaagagcacacatgtcagacatcgtggatggtcacttagctgagcatggatcccttacaataatattgtccgtactgcaatagacagcaattggcagtcagatatttgggacgggactcacgtctttgcacagcaaagttcttattgatgaaggctttgggtttgccaatctgtgaaaagtgctcgaattgccaggaacacacaaatcatcattcaagaagaatctgggattcccagagtggctgatccttggggcaggttcttcacatgatgcgaatgtctcagcaaatgatgttctatgatgctgctttacaagctcattacatgaacattgacagaacatgggtggacatggccaaagctgtagcatgagggcaatacctaaacttcgaattgaagaatgtgctgcccgaagaacaaggctacgcaatacgcacttctggctgcgtgacacgtaccatcgttggacgtagactaacgtagccagttggcacaaaacgaaggcacgctggtagaaagctactggcccacttgcacctaataaccttacagttgctgaaaaccaggaccagaatttgacaaaacacctttcaagcacgcatctacaataccaagccaggcgcattcacaaccctccgggctgaaagcgttgacctaggctg

SEQ ID NO: 611151 - DNA, 208 bp, Homo sapiens
tcaccatacctggtgggtgcgggggtcccctaagcaggtgggctgtggctggggggcgtctcccgggacaggcggggcggcccccccagatgggtctgcatgtaggccggccagctagggcagagggtcttgcatgtgcacggctgcaccagtttgccacaggatgcggtcaagcccgctgggccctatggagccccgtggtcccttc

SEQ ID NO: 611152 - DNA, 133 bp, Homo sapiens
gatccctcttcgcgaagaacaacggcacatttccagtgaggccccatattaaaactagcgacgacctcatactacctaggattacttactaccctcccctagcttaattttagctccacagcaataaattcta

SEQ ID NO: 611153 - DNA, 135 bp, Homo sapiens
ccactgtctcgtctctcctgggcgtccccggcccagctcgatctgccgcaggtccttgtcgacgtttctctgctccgtgttgccgctggcgccgacgtgcttgttggacatgaagcccttctccccatcacggat

SEQ ID NO: 611154 - DNA, 115 bp, Homo sapiens
ctcacctggatcttatgctatacacccacacgtaatctcatgaggtagtgctttcttatactggccgtgatttaacaggttggtatggtggtatagagtggatagggtggtatag

SEQ ID NO: 611155 - DNA, 220 bp, Homo sapiens
aattactgcctatctagtctactgtttccttactaatattgctctcttgtacataacggaaagtgaagatatggaatatcctactataattgtattgctactctttgtgtttattcagttttgtgagtatttgcttgatatagctgaaaccccaatatgagacacacacacagtaatacacacatgtttagtagcgaatttttaataccggatcccctag

SEQ ID NO: 611156 - DNA, 582 bp, Homo sapiens
ggaacgttttgcctgttctagaggcaacggtgttattttcacaggcgcgatttgctattcagaaagcaatccagtcaggagaggggggatagcttactatgccggggaaatcagccactttttcaaaacataaaatgactcccaatggcattcagtgtattgacaggaattgctgatgattgcgaaaaacgtcttactcattgcgatgtttgtaacgcagcaaagaactcacagcactcttggatggtgagccaacaagcgctgagagtcaccagggtccacatttatgtgctcttctcacctatacctctagccacctgtcttaacaatgacacaggtattatggagcatgagctcatggtccgcaagttataactgatgatataactttactcgacacaagctcctctaacatgttatcagcacttccaacccaattaaagttccactatatttagaacatggttgagttctacaactttacatattatttgagcataaagtatctcaagtcttaaacagatttagtatactgggggacccatgctattcttgtactacacttaccttcttgtgggtgtc

SEQ ID NO: 611157 - DNA, 810 bp, Homo sapiens
tgacatgcggaaaagccctgacggacgttcaatgcaagaggaattccagcatctgaagactaggctagagcagctaccactaccacctccagcctgggagataggaccttgcttgtctgccttctggattcttggcccgcaacagagctggggactgagggatgcgactgatgctctttagctacaaagcgtggctttttagacagatttgttcatagaccctctcaagtgcccgtactccgagctggtaggcattccagctcctcagtgacttcctcagttacacaaaggacctcagctgcttctcccacttggccaagcagggacggaacgaagctataggccaagggctctcctttcaacttcttcgccttcagatgttctctcaccaggggctggcttcacggagggagcacatgaaaggcaaggtgaagcaaccagcttggctaggcggagcacgggggcccaccagagctgtggagaggggaccctaagagctcctacggcctggctcctacccaccgcccttgccgaaccaggagcatgcatcactacgtcctcacgggatggcacgattggccacgtcttccttgtgcctgaggttcccccccacgacaggccctgtcactcagggcaaggtccggcctcaggtgggccgcaggcgggaaaagacagcccatggccagaagtcaagcccagccacgaggagcatagagtgaggccctgaggtctggctgcttgccccatgctggcgccaacaacttcgtccatcctttctggcctctcaaatacacctaaagcctaggcgcc

SEQ ID NO: 611158 - DNA, 428 bp, Homo sapiens
ggaggaatgtatgtggaacgacatgatgctgccgactcgccgtacttcgattaactgttaaaactcatcagggcatcggctaacagtgtgacaactgccaaatctgcctacaccttctgacctcactctggtgtggacttgaagagggtgctcttggatccaagacttgagaccaactctaactatcttaatctatttattgagagtgtatcagagcttgcataaccaacccaatgtgtgggtttgggtgtagagagcaaacacagtagtcctgaaggctggaaagctgctctttcacctggaatgggtgggcttggacattacctctgcattgttggactgtggaatggcctcacaccacataaagatgcagacatccttattaacttaataataaatgagaggcgttgagcctgtcaaaaaaaaaa

SEQ ID NO: 611159 - DNA, 872 bp, Homo sapiens
ggtgatcatgccgccggttccccaacgggtggggtcggcccgccccccgtgggggtgacaccaccagtgttgggagccagagaacttactccgcggggtgtactcacactaacgcctagcgggtgcgcccacgaccatgtctgtctgtatgtgaacccgcgcctggtggtgaccccgcactccgtggtttgtctcagccacgctctgccgaggtgacccaacaacacaggatgtaccgtgctccacccagcttgtctcggcgagccagtaagatagcttgctactctcgggagtagcaaacaacatgattggtgtctcatgtggcccaaggttgtgcagatacatacacaggtgggtacttacttgaacgctccagttgggagaatagaattttatctacggacggctctcgtttcgtcacgtactcgccgcgctggaagaaggttcgcggcatctcctgcctcgagtggatctttttgactcggcacgtacattggtcggagcaaatcttgcgtgagacacaacctacagcatattgtgggggatatacattcaatttttggtaggtactaacacaaggatggcgggcgcggctccccgacattcttctcctgggaggatcgccgagcgctactactatatgattttgttggttggagccacactaaagttgcggtgaagccactacgcggaagtccattcttgctggtccgccacgccgcgccctccgtggggtgagcaattctttcttctctctccctcgcctccccgcgtctcaggcagggcatcgtgtgatgatgtgcccaccgtggcagcagtcgtgtcatatatactgtcatgggggcaaacaccccacaaaccaacataacaca

SEQ ID NO: 611160 - DNA, 1450 bp, Homo sapiens
ggcgcgagcggccgccgctggtgcttcttcttcttttagtgcagcgggagagagcgggagtgtgcgccgcgcgcagcagtgggcaggccgaagggggcaggccagggcagcaggcgccaggcagcctttgccagcccacgcgcgcgccttccctgtcttgtgtgcttcagcgcaggtcagcagcgggcgcgcggcagcgcgcggggcacttaccttcgctgctacgcttatcgcgcttcgccggcacgcggccgcggctgtacgtcctcgagcggcacgccggcgcgacgaccacctagccagctatgttcgggacggagcacgcttccggccgaggcgcaccgcggcgccggcgaggcacgcccggccacacggggcgcggcagggttcagcgccgggctccggcgcgtgcgccgccggcccagggcacggggacgcccctgggctcggcccgcgatgaaccacacgcgggcgccacccgcgtgccgcgggccgccagcaacagcgggcaccaccgggggcaccccgggcgagagcccgcgcatacccggcgctttccttgggcaagggccacgaccgcacagcgggggagccacgcggcccgcaagctacggcgcagcgcgcggaccgaacatcaatttggacggcccaggtctcacacgcacaccgcacgtgccacggcactgcaccggggcccaagctcgcccagagccatccagtcccccccacacgacacagcatctgccccagcgcaggagcccagggacaccaaaaccgtgggttcaggcaccctgggccacccacaccggctacacactccggcgagcgacccctctacgcgccgcggcgcccacccccacaccaaccaccgccaccacgacccttcgaccaggcgaaccccaaccctacaccccccaacaacttccggcacggacacgccggcacgccagccgcgacacagcctcgacaccgctcaagaaaccccgtcactcacccggccgcccgaacccaacgggcggctccccggggccactcacgcacgagcaccccccccgcacagtcgcgcgagcagcagacccacccgcagcgctccacgggcgccaaaccaacaataaccttctacattatcaaatagccacaaacactatccaaaccatcaccaccgcaaccaactacatacacactaccccaattctccagcaccctctccctccgcccctcctccctctcctctcccactacacccgctgcaccatattgacatctctacacgacatctatctacacaccccttgcacccacactctcactacaacaacacaacgctatctataccttcatcatctattcacatatactcctacctcaccacccacacccccccccctcaccctcattctccctctctcttcacatcaacacgacaacaaccacacaaccacccactacc

SEQ ID NO: 611161 - DNA, 101 bp, Homo sapiens
tgcgaaggggacggtgtgaggcctcagagcctaacctgctcagagggtgtcagtggggaaaaatgtggttagaggtcaacccagaggtggtaggagaggaa

SEQ ID NO: 611162 - DNA, 524 bp, Homo sapiens
  misc_feature (235)..(235): n is a, c, g, or t
  misc_feature (312)..(312): n is a, c, g, or t
  misc_feature (420)..(420): n is a, c, g, or t
cacgttccaaagggtctcgctgttggagttggatttggggctataaaaaagacggcatctgctacctttgagagggccaggaatttggccattggaatcgggatccagaatttccccgagggcctggctgtcagccttcccttgcgaggggcaggcttttccacctggaaaactttttggtatgggcaacttaacggcatggtggagcccccggccggggtttttggggcctttnccgtggggctgggtgagcccatcctgccctacgctttggccttttctgccggggccatggtttacgtggtcatgggngacatcatccccgaagcccagatcagtggtaatgggaaactggcatcctgggcccccatcctgggatttgtaatgaaaaagtccctggacgttggcctggggtagggnttaaaccctttggaccccgggaaaggccatacgaaaaaacaacagtgggtgggttttatggggcaacaagcttcttttttcccattaaaacttttttccctcca

SEQ ID NO: 611163 - DNA, 593 bp, Homo sapiens
agcgacatttgcataatattcatgatactttctcctttgtaccgcgtggatccaagcattagcagattagaaggataatgtatttaaaggcagtctgaaaatgggacactctgtagagaagtcatttccttcttctcctccgcatgtggaatggaagctttgagggaaggaaaagtaggaaaagagcggaatgggatgggatgggatgggatgggatgggataggaagagaggctggggaatgggcagagaagggggtgctgagtgtgctgtgagatagagcaagatcacaagaaggcctatctgtaagtgctataagataaggtgcagaagctgactgcaatgtcgctagtgctgcctatgtacatattcacaagaatcaaaaattccagctagttcacattatctcgtccgttctgaggcatccactccaccttgcgggccttgaccggaggcaatgcagcacctccactgcccttgtgggtccttgaacttgagtgagtagccctgggagatccagcaggctctagaaacacacgtctaccaatgggctggagtcctgagttaaagagaaagtccagtactggagttgga

SEQ ID NO: 611164 - DNA, 281 bp, Homo sapiens
  misc_feature (116)..(116): n is a, c, g, or t
catttcgtatacgtggattccagaggggtgacagcgcaacgtgtgaccatccagttacaggaaaacaagcttaacatgcgcactgattctacattatgctcctacctcccggcagnctctccagtgccagaactttctccagtcagcctctacagaccaagctcatgactcacaatgggctatttagtgccataccctacctcatggcagtctccgcagatgatgctactagctcacaacagactccacaggcacagctccatcgttacaatggcctcttt

SEQ ID NO: 611165 - DNA, 162 bp, Homo sapiens
tactggccggtgtcctctactcaccttcttcgatcccgccggaggacgtgagaccccattctattaccaacacctattctgattattcggccaacctgcaggttgagtattcatattctaccaggcgtcggaataatctcccatattgttacttactactcc

SEQ ID NO: 611166 - DNA, 297 bp, Homo sapiens
agcttaattttgaaaggggaacaaagtttcctattccaaccggttcatttttaatactcttacgaaaactattttaaagggggcgggagccaagccccaaaggacccccccggttttaaatggctgtgataaggccccgcgggtattaactgaaaccttcccccttgggtttttgttattttgtttttttagcccccccccgggtttaaattatggataacccgaaagccagccccggggaaggcccgtaatgatttttttgaagtttcaagggggggaaaaaaatttctgttttta

SEQ ID NO: 611167 - DNA, 116 bp, Homo sapiens
atatactaaatcaagctaatctcataacaaagtgataaccatacacaacactaaagagacgaccctgatcgcttatactagtatccttaatcattggggctcctctagagtctgac

SEQ ID NO: 611168 - DNA, 460 bp, Homo sapiens
  misc_feature (57)..(58): n is a, c, g, or t
  misc_feature (86)..(86): n is a, c, g, or t
  misc_feature (152)..(152): n is a, c, g, or t
  misc_feature (165)..(165): n is a, c, g, or t
  misc_feature (217)..(217): n is a, c, g, or t
  misc_feature (219)..(219): n is a, c, g, or t
  misc_feature (221)..(221): n is a, c, g, or t
gagtttgcgttcctgccaacagtacaggatttttccagtttgtctatatcttcatgnntgcttattttctgtttgttttttaatangagctatcctaagtggatgtgaggtgtgtagattttttttttttaatcagagttgggttttagccnagctaacctgctngccctttgagaaatgtatttgcatgagggagtaaagcataaggccagctagnangnaattgcattgacttagatttgtggtaatgaggaattggtttgattgtggtgggacaatgtgattttgagaggtgacagaaaaatggaaataatttattcaaatttaagaaactgagagaaatgacatgaaaatgacttttacatttgaatttgattgtaatagaaatgtggaagtaaagggaaggagagaaagaataacttactgttcttcagcgttttgggtgttgcgcggggtaccg

SEQ ID NO: 611169 - DNA, 244 bp, Homo sapiens
ctgtgaggtcgtctagaggatcccattaggcgcgttctgcgtcctgtggggacgctcctagagagagtcggccgcagcgagggcacagacaggctcgtggacatcacgactgcaccatggacgtcagccagcaggccccggggcagagtggcatgggggcaggaatggtggttacaccaacggcatgagctcattttccaagatggatctagagcaggtcccacccacgcagaacgcgcctaat

SEQ ID NO: 611170 - DNA, 219 bp, Homo sapiens
cttttggggggggggggggcccccccggttcccttttttccccccttgggtttttccccccaaacaaaaaagggccctttggtaaaaggaaacccgccctttttaaagggaagggccccccccccagaaaatttttttggaaaaccctttttttccccccaattttttttcccctttaaaaaccccctttttaaaaaaacccctttttttggggtttta

SEQ ID NO: 611171 - DNA, 120 bp, Homo sapiens
ctacatccgcgctccgcatcatggactcgcgtaaacttttggcttcagtgtcttccctgttcatatggttcgcagtgctgtcctgtctgccactgtccctgtggggtccgtgctgtcttg

SEQ ID NO: 611172 - DNA, 789 bp, Homo sapiens
taggtggccccaagggggtttcctagctcttttttaaggggcccgcgcccgcaaagtcaattataaaaacacaaaaatgtcccatcagtttaataacaataaaaaaccccaaaatgtgtggaaaatctggagggggcaggggaaggagaccctgtggccaggggcacgaggacgccctgctcttgggcaccaggcctgggccgcagggtcccccggttattgctggttggctacaagtgttgggggggcacgcgattggtcctggtggggacgccaccgttctcctgggtgttgggggaccctccgatctttcttcctggggtgtgtgtggctccagtcttctggctgttgccccggtttcttgtcccagcaggccagaatatggaaaggcctcctgtgggtgtttggtaccccattgtcaaaccagggcagtctctctttggacctcctggggcaggcccgggatatcgtgtacactctccaattgtccagggagctcatctccaggtcaattcttccagttctggggatcctcctcttccgggcagtcgtaaaggcgcgtgagctgctccaggatccactcctctaggtggagggcgcttcacagaagctcctagcgggcaatactgtgagggagaccttccctttgggccctcatggggcctctttgtccgcccgaccgggcccttctctggggccggggggctataatgtacagcttgtgctggcccacattgcggcccggggccgggccgaaagccgccctagcgttttttttgtttcagaggc

SEQ ID NO: 611173 - DNA, 224 bp, Homo sapiens
tacaaaattgtgaaaatgtgagtgcctgggaagtgtgtgccttgggtcacgctctttgagtccaccacagccgctgggagggggaagggcacctggggagcacctggcctccttactgagcatgtggtgtccctgtctggacttgcctggccccaggagtgcggccaccacagaaatcagggtatagggctgtggagcaggctgggatcctgcccagcatgccc

SEQ ID NO: 611174 - DNA, 105 bp, Homo sapiens
taagctccagaatgtcatgtctttggttaatctatcattgttaggcaccgttgatgtattcacttaaagtactattgttatgcagggtacctgacgctcgatctt

SEQ ID NO: 611175 - DNA, 296 bp, Homo sapiens
actgatgggaccagagagctagcagacgcactttagtagcttatagcacttcctgactggaagagagaggtggtggtgtacttgatggtggaactgccgcctccaacagagactgaggccacccccaatggctctgccactgctggaactgaagccaactccaacgcaaagaacactgccactaggagtagctgcttcctccacccaggcctaagccactgccgacaccactggaaccgccatagccactggaagacggtagactgcaccacagagatgttgcctatcggagaaga

SEQ ID NO: 611176 - DNA, 101 bp, Homo sapiens
atgatcgtgatagttcatcgagcatctgtgggatcagtggaaagaatgattgctatcctcacagaaaactatgggggcaaatggcccttttggctgtcccc

SEQ ID NO: 611177 - DNA, 727 bp, Homo sapiens
  misc_feature (72)..(72): n is a, c, g, or t
  misc_feature (82)..(82): n is a, c, g, or t
  misc_feature (84)..(84): n is a, c, g, or t
  misc_feature (92)..(92): n is a, c, g, or t
  misc_feature (152)..(152): n is a, c, g, or t
  misc_feature (158)..(158): n is a, c, g, or t
  misc_feature (167)..(167): n is a, c, g, or t
  misc_feature (227)..(227): n is a, c, g, or t
  misc_feature (308)..(308): n is a, c, g, or t
  misc_feature (355)..(355): n is a, c, g, or t
  misc_feature (400)..(400): n is a, c, g, or t
  misc_feature (480)..(480): n is a, c, g, or t
  misc_feature (494)..(494): n is a, c, g, or t
  misc_feature (508)..(508): n is a, c, g, or t
  misc_feature (510)..(510): n is a, c, g, or t
  misc_feature (552)..(552): n is a, c, g, or t
  misc_feature (658)..(658): n is a, c, g, or t
  misc_feature (680)..(680): n is a, c, g, or t
ttgatggtacatgacaaggtgcggctccctaggcccctaccctctacaaggggtctacatggcaactgtaangaggggagantnagtgtggngggggactgagtttggcagggactccccagcagtaagggtctctctctacctctagtgcncttgcnggggctggnggtccaggggtctaactccttggaggccatgtgggccatgaggcccaccaccctgtcgcngtggccaaaaccgtggtaataccaggaaatgagcctgaaaaagtggtcgtggagggcaatgccagccccagcgtcaaaggnggaggagtgggtgtggctgtggaagtaagaggagaccacctggggcncagtgtagcccaggatgcccttgagggggccctccgacgcctgcntcaccaccttcttgatgttatcatatttggcaggtttttctagacggcaggccaggtccaccactaacacgttggcagtngggacacggaaggncatgccagttagcntnccgttcagctcagggatgaccttgcccacagccttggcagcnccagtttgaggcagggatgaagttctggagagccccgcggccattacgccacattttcccggagggccatccacagttttctgggtggcagttatggcatggactnttgtcatgagttcttccacganaccaaagttgttatggatgaccttggccaggggtgctaagcagttgg

SEQ ID NO: 611178 - DNA, 437 bp, Homo sapiens
  misc_feature (408)..(408): n is a, c, g, or t
ccggcaacacgcatggccaggcgtacccacgatgatatggggagcttccatctgcaagtttctgcaccgtcagcacgcttcgttggtgcccccgatacatgcgttacaggaggcgcccatgtagtctcctagtgccatgaccaccttctgtatctgagcagagagaggcaggtgctcatatgtcagttaccactgtgcccagcaccattctttcatgtttttcactgtattgattcctaaccaacaactttgggtcatgcactattattatactcacattcagcttagatacaggcataggctataatccactttagatcgtgctgtctactagtgtttcaaagactggatttcaatctctgtctggttcctgagtgtacagtgattcacaatgaggccgctcagatnattatttcagtttctttactctagatatt

SEQ ID NO: 611179 - DNA, 421 bp, Homo sapiens
agcgtgtgcagggagagcccattttattgataccccccagctgttgcagtaaagtgttcattgaatgcaggcgcctgggagaagtaacttcctgggcatgtgcatgaaaagacaaaatggcggagtatgacccactcggggcactccacaggaaaagggaagaaagcctcagaccggcatgtgcacagctttttaaacacactgcctgtgctcacttcccaaggctaaggaggaccccgtgcatttgggaaataatgccccccctgagggaagaatcatgggaaaggggcaagcctacaaagtcctggggtcaaggttaaacactgcacctgacctcagtgcccacttgggactcttccaagcgtactttgtttttttccctgttttaaagcctttttaaataaacttccactactgctca

SEQ ID NO: 611180 - DNA, 307 bp, Homo sapiens
gaaatgaatgaactgattaatgaaatgatggaatgatgtgaaaaaatgagtgaaatgaagaaaatgatgaaatgaataaaagaataaggaagaagaaaaaaatgtgaataataaatgcatgaatgaaaatgaaatgaaaatgatgtgaagatggaagatgaactgaagaaaagaggaaagaaggaggaggagaagaagaagaacaaggagaagaagaaagaagaagggagaaggagaagaaaagaaggagaagaggaaaaggaagaaggagaaagaaaaggagaaggtaggtatgatgaaggacggt

SEQ ID NO: 611181 - DNA, 317 bp, Homo sapiens
  misc_feature (28)..(28): n is a, c, g, or t
  misc_feature (164)..(164): n is a, c, g, or t
  misc_feature (242)..(242): n is a, c, g, or t
  misc_feature (274)..(274): n is a, c, g, or t
  misc_feature (298)..(298): n is a, c, g, or t
  misc_feature (311)..(311): n is a, c, g, or t
gcggtgcttaccctgtttctatataatnattagacgtattagaagcaggaagtgccgggcgtggtggctcacacctgtaatcccagcactttgggtggccgaggcgggtggttcacgaggtcaggagatagagaccatcctggctaacaaaggtgaaccccgtntctactaaatatacaaaaagttggccgggcgtggtggcgggcgcctgtattcccatctactcgggaggctgaggcagnagaatggcgtgaacctgggaggcagagctttncagtgagtcgagatcgtgccactngaattccagcctnggtctc

SEQ ID NO: 611182 - DNA, 291 bp, Homo sapiens
ttttttgagacggaatcttgccctgtcacccaggctggagtgcaatggtgcggtctcagctgactgtaacctccgcctcctgggttcgagattctcctgcctcagcctcccaagtagctgggactacaggcacccaccaccacacctggctaatttttttgtatttttagtaaagacggggtttcactatgttggccaggctggtctcgaactcctgacctcgtgatccacccaccttggcctcccaatcttatttgctttacaagtcctgcttcagggttaccttcgtcg

SEQ ID NO: 611183 - DNA, 525 bp, Homo sapiens
gataaactgacgatatacaggcacattatgtgacacatacacatcgcaattgaaaccgaagcttggctggactgggcgtggtcttgcaaaatgcttccaaagccaccttagcctgttctattcagcggcaacctccataagcacctagttaatgcactcactgatcacctcaatgtggcatgcagcccccatgcccaccgggacctggtcagcacagatcttgatgacttgccctttctagggcagactgggagggtatccaggaatcggctccctgtgcccacgggcgttttcatgctgtacagtgatcctaaagttggtaagatgtcataagtggaccagtccatgtgatttcagtatatacaagctccatccagaggcccgtccgaacgccgatataacaccccacccctgttcgcttcctgtatggtgatatctatatgtaacatttactcctgtttactgctgattgttatcgttacatgttctaggttagtccattgacatcagctgtaatcatttcca

SEQ ID NO: 611184 - DNA, 470 bp, Homo sapiens
  misc_feature (8)..(8): n is a, c, g, or t
ttggagtntgaggagtgtggtggttgctcatggtgtaggatttctgtcctggcaggggggcatggggtcacagaacgtgggcccctggggagctctctctgtgcctgtggccccccaggagtctctcagttttgctgtggtcttgaggatggcacagcgtgtccctgagcgccctcagtgtggacagctgggcttcaaactcacttcagagccgccgtgtgggggtggcgcctctgagggcttgaggttattttcttgtgcggtttctctctcctggcctaggtttttctgggttttttgcacctcttggtgttgataagaaacaagctcccttccccttttaaagcccacagactttcccgatctcctccccatcccctgccccagcactgtcagggcgtctgggcgtctgagctcagctccttcctggtggcatcctgcaaaaagatacactcgctcagtgactcgga

SEQ ID NO: 611185 - DNA, 634 bp, Homo sapiens
caattccattgccagcgtacaatccagttcgcagagtatatacaataccattgcagcgtagaaatgagtaagtattcaatcaactaagtgatatatggcttcttaaagaccttgatgttggtatttgataatgagatttttctttcatgcagttagaaaacttggaacagttacgtaaggaatcatctgtgttctcaggttccatctcagtagaactggtaaattttttcaaagtcagtgggaatgtatggtgtccctatccttggtgtttctctaattcttttcatctgtggcccattttcttctcatggtttgtcttttcttatatggttaaatattcagtcatcacttaaatttgggctgccaatatagttatacataatctaactttctggagaagatgaatttagaacaagcaattctccagagctggaggacgcatcagcactggcctttagagtggggtagtccagtttacagtctgactccactggttctgtgactggctcaggcaaatttttctcattggaaatatgaagatgatgatagtgcctattgaacaggaattttctgagaattaaccagatttagtacttaaagaccttggatagtactgggatataatagcaacaat

SEQ ID NO: 611186 - DNA, 564 bp, Homo sapiens
tgacagtgaatgacttttgtaggacctgtgcgtgcaaaacccatggcaatgtcacatcctcttggtatgctggcagatgcttctcttggtgaattatgaaatccactgttcacattgggtgcctaacagaacatttgcttcttgtgggatttagtgaaaactattaaacttgttaagttgattttatacaaaacgataaataaaaagctctaagaagaaaatgtataatcttagagctgaaataaaatatagagaccatctagtaaatgacctcattaatatatctgtgaaaactggagactcagatggtatgtctctaagaacacataattagtaacagatcaagacacttaacaacttttccctacaaaaacccttccccttggggcccccccccccttttgggacctttctctttcctccttggcagatttctaggaccggcttctggctcagtgtcttcattttcttccatatttgtttatttcatttttctttttcctaatttaagggttttcccaattgggtttttaccattttctccttggaaactcaaaatttaca

SEQ ID NO: 611187 - DNA, 533 bp, Homo sapiens
  misc_feature (512)..(512): n is a, c, g, or t
gttcagtgggaatggagtctctctggatgtacttcaaggaacatcatcagctgcagaggattggtggagtcagaggatctgtgcaggaatcgtgtcctgtcctgtgctctccagatgccagctacgtcaatcggggtagtaacaattgacggtgtgtcagtgctatctccatctcggcttctgagagtgtagtgggtgtcggctgcgtagtctgtggtcccaggcccaggagcctgagggggtgtctaggtgatcatttggatctggaggcagagtctgccattctgccagacatagcaaatttgggggcttactcatgctaggcattgaggaagaagaaaaacgcattcggcattctccttaggacttatctgcttgtagatttggctgatcacaaattaacaatgtggggttcttcggtgtgggtcataggtgagcatgaaggattttatggaagctagtgctaaggaggaatcataagggaaaggagtagaagctcaggcctttgaagntacccctcggcctctcttaat

SEQ ID NO: 611188 - DNA, 1318 bp, Homo sapiens
  misc_feature (1318)..(1318): n is a, c, g, or t
gctttaaaggtgccaagaaggcaccgtgttgaaaggtgtccacagcgcagcaaacaaagaagaagatcccgcacgtacataccacgcttccgggcggccgaagtacactgcgactccggcagactagtcgccaaagtatcctcggaagatgcgctacccaggagacacagagcttgagacaactatggctatcgatcaaggctttctcgactgaacgcagagtgtagctctgacagtgaagaagataggaagataaaaacacaccttgtgtgcaattgtggatgttaagagccaacaagcaccagattaaacaggctgtgaacgaatgctgtaatgaccatttggactgtgagtcacaggtcacaacacgcctgatttcgagcctgatggacgacgaacgaaaggcactagtgtatcgattgggcttcctgacttacgaatgctttggaatgtatgtcaacccaaaagttgggatcctctaagacttgaagtccatgcttgcgctaatgtctgtgaatatatatatatatatatgcctgacaccagacgactataaaaaaaacaccaaaaacaaacgaagagacattcacaagagaaaaagatgtgaagcggaggagaggggaggccaaagagaggactgagccgcaagggggccccaaatggagcaacacacaccggtatcaacagagagaacacggaagaagatcaaaatagggcgaagcacaagcgtcgcgcaacaaaatgcaaccggggaaacaagccccaacataagagacacaaacacgcgaacaataactaggaccgatcgacaaacgcgagggcaacacacaaatggaaaaagaaagaccaaaagggaccaaaaccaccgaagacaggaaggaaaaaaagagacaaaaaggaaaaacaaagagataagaagaagaccgtagggaagaggagaaagggcgagaagggaagaggacgacacacacagaaagagaaacaagaacaaacgcgccggaagagaacagatagaaaaacataaaagccaaaaggaaacagaaaaggccgaccgacaagcggaccgggagaggacgaaggaagggcacaagagaaggagcagagaaggagagcagcaaggggagagggaaggaggggaacgcacgggaggggacgagacggagagcaggacggaagacaaacagacaccagacagaaacgaggggagaacggggcagcgaaagagagagagagaaggacaaaggacaacgacagaaaagaggagagaacgaagaagagggagcaggatgaaagaagacagaggacgcagagagagcgn

SEQ ID NO: 611189 - DNA, 369 bp, Homo sapiens
ccattgttcagctagcctacgtttgataagctcatccgtacagaaatacaagcatcagaatatcacgacatatattgaaagtgtttcacgcctgtaatctcagcactttgggagcctgaggcgggcggatcacctgatgtcgggagttcgagtccagcctgaccaacatggagaaaccccatctctactaaaaatagaaaattagccggacatggtggcacgtgcctgtaatcccagctacttgggaggctgaggcaggagaatcacttgaacccggggggcggaggttgcgacgacgagccgagattgtgccattgcactccagcctgggcaagaagagcgaaactcttaacaacattcttcagcacg

SEQ ID NO: 611190 - DNA, 152 bp, Homo sapiens
cccccccctttttttgggtttttttggggggaacccccggggggcttttttccaaccccccttttcccccccaaaagggggggggggggggggggtcggggtcctttttgtttaaaatcccccccccccccaaaaaaattttttttgcccca

SEQ ID NO: 611191 - DNA, 709 bp, Homo sapiens
agcggattggtgcgggaaggatcctgaaccgcgcggccgaactctccggtgtaccgatccaggctaagcttgagcatggctgaggcaggagcccacagccgcagcagctggctcctagattgcaagctggagaacgaggaggatgagcgactcggttgcaactacatagcccccgggcccagaatgagcatccaggagatccaggagctggacaaggaacgacgtagtagccgtgcgaataggtatcaaggaggccactgactgggaccgacgttggccagtgtatccgctagacccgaatcgttcctccaatgctcgtggtgactgggctgactcctggttgtgcatgctcggatccacggagccccctggagactggtactgacgggcgagctggaaagcttcaagaagccatgtcgtttgtgctgaaggagggtgtggagtaccggataaaaatctctttccggagttaaccgagagatagtgtacggctatgaagtacatccagcgatactgtactaggataaggcgtcaagattgacaagacgtgactacatggtagagcagctatgggccccgggccgaggagtacgagttcctgaccgcccgtggaggaggcaacccaagggtatgctggcccggggcagctacagtcatcaagtcccgcttcacagacgacgacaagaccgacacctgtcctgggagtgga

SEQ ID NO: 611192 - DNA, 524 bp, Homo sapiens
  misc_feature (86)..(86): n is a, c, g, or t
tcatcttgggcctgtgttatcttttgccataggttattttatagattttattttaatatgtcatctgtgtttttaatgtatgctgnatattattattgcatatacttaggtattagttatccataatggtgcaacaatattaccacaaacagttgcttgaaacaacacgcatttattatctcaccatttctgtgtgtcaggaatgtatgtgtagcagagttgggttctctgcttaagggtctcacaaagctccactcaaggtattggccagagaggtggtttcatcttagactcaatgggcgatggatctgcttgcagacttacacagttggcagaattcagttcctgtaggctgctggacacagggcttcagtttcttgctggctgttagcttgagtctgctctcagcttattgccctgtggccctctccatatggcagctcacagcattgcagcttgtttcttcaaagccagtaaggaagatagtcttcttcaagacaggcattatagctttatgtaatgta

SEQ ID NO: 611193 - DNA, 888 bp, Homo sapiens
  misc_feature (28)..(28): n is a, c, g, or t
  misc_feature (151)..(151): n is a, c, g, or t
  misc_feature (167)..(168): n is a, c, g, or t
  misc_feature (171)..(171): n is a, c, g, or t
  misc_feature (175)..(175): n is a, c, g, or t
  misc_feature (211)..(211): n is a, c, g, or t
  misc_feature (215)..(215): n is a, c, g, or t
  misc_feature (218)..(218): n is a, c, g, or t
  misc_feature (220)..(220): n is a, c, g, or t
  misc_feature (246)..(246): n is a, c, g, or t
  misc_feature (249)..(249): n is a, c, g, or t
  misc_feature (262)..(264): n is a, c, g, or t
  misc_feature (303)..(303): n is a, c, g, or t
  misc_feature (337)..(337): n is a, c, g, or t
  misc_feature (423)..(423): n is a, c, g, or t
  misc_feature (452)..(452): n is a, c, g, or t
  misc_feature (456)..(456): n is a, c, g, or t
  misc_feature (474)..(474): n is a, c, g, or t
  misc_feature (520)..(521): n is a, c, g, or t
  misc_feature (551)..(551): n is a, c, g, or t
  misc_feature (618)..(618): n is a, c, g, or t
  misc_feature (620)..(620): n is a, c, g, or t
  misc_feature (867)..(867): n is a, c, g, or t
ctctttaattaattccttaggataaatncccagatatttaacagctagggcagacttctaatacaataccgaaagtccttccaaaaaccaagtggttgccaacttatgtcccttagcattataacattcttgagccaatagtgtaaaaatncgctgacaattttatnngcnaacntttctcttggtttctttctttccacttattactaangttnttntnccctaaattgttgctcctcatctgtnggncttcttcctggtnnncctatcataagttgatactatcaagttgaaatgcatttngtacccggataaacctatcataaagttgacaatntgtcaattgaaccagtgtaaatcagaggccatcttccttcatactcatgaagcaactatagtgggatatttttcccctttcgaganagcctaggcttgttgacacactgtcctcntttnctggctctctggtaattnagtcataaatggtcaaacatcaaattctagacaagcgtatatttgnnttctcatcgctataattcaggctgactggnttgccaaactatgttcatagtatttgggttatatctgtggtgattgtttcaactggcaagctaagtngnatgccttaaagaatctatccaagattagttggcaggcatttccagtgttggtaaatcaaaggcccacgaaggtatgctgagccttgatagcacaaccttgcttaggactttgcctcaactaacatactttttagtttggcaagttacctgaccctccaggtaactcatttttctccatagtctgctacttacaagattgtcatatttttgtaatctagaagcaattatagaggatattttattagantttacaatgacaactgcataa

SEQ ID NO: 611194 - DNA, 911 bp, Homo sapiens
  misc_feature (192)..(192): n is a, c, g, or t
gtcttcgggtaaggatggcggagcgcgggtacagacttttctggctgtagctacattcagcccgtcgtggtaaatcttgtcacagattgacatatgctttggactgctagtagctggaaggagccccagtccgtggggatattaaacgctgcaacatggtgtggctattatgcagcgtgagacaagaacagnaaattctcgattctcgtaatagatgagcgaagttgtacaacgagagtagaacccaacttcaccatgacatactaagggtttgggtgctacaggtggcctagttggagtccccgaaatctacagaagtgcgtatggtgcaccaagacgacttgcgaaaagcgtagacattcgaatcaaatacccagtcgtttggatgttacccacaaggaaccccgaattcctggacagcctcgaagttggttacgagcagcagtgagctgtctgatgcagtgcaagtaataatacttcagtcaggtggtggatccgactccaatctctggaagtaatctttaggtatatgcgcttggtcaggaagtgaagggaacgaccctagtaattatatttcagatcgggatggcactcatggacgcttacgtttgcccgtgggaaagcgtacaagctagatggtggagagaactctgtggaatgggcaagaagtttccttgcgtaaaagatatactgaagatctggcaactcggaagatgccaattcataccgcccatctttaacctaagggacagcctcgcaagggccgactgacggcggcctcctgttgacactcgcgaatcttgcactgcgccggatcgggaagctaacccaacgggacgtgacggtcaaggctgccttgatatccggcgcgccgggcatcccaaatcccacaccttctgctcccctgtcga

SEQ ID NO: 611195 - DNA, 859 bp, Homo sapiens
cgtctgactcaagcgccgcacagcgatgtcttcatgctgagaatgtaacgcctgccgggatcagtacagattctgcgagagattcgacaaggcaatacaaagcaggtatcgatgagttgaggcaatgtgagagctggaatcatgcatatatgttcttcataagctgaaccaccaacagagaaaacgcaggcctttgcagatatgatggaatagcatcccaccttgccaaagcacttacaccagtttgactgtgctagctaaaagacaaatttaaggggagctcttcaacattaaggcagtatgatatcatgcttggttccttaccctcatcggtccaggcactggcgcaactggtgtcccattgccgtcttttcacatatttcttctttcgcctcctctctctttctctgtttgccacgatcacaccactcacatacactcaccgtcctgacaactgtgtcatgtcgtggtcccccgaacttgttgtccatttttcacacgcatcccatggtgcacccatttccacacggggttccccgttgccccttttccacttattgtaccgcctacttgtcccccatttcctgcttcttcacctcaccctttctccgtcacggtggttggccccttcctccttttgattctttgccacgtggttcgctttaggccagtcaatttgcccacccctgtcgccctaacgaggacctcgctggccagtgctgttgttaagacaccttgactgtgtcgggttctgcccccgctgggccaagctcctgtcgaacccttcctggttccgcctcttcggcctcatgactctcggagacgccattaccgagcgtttcactcgatctctgtgttc

SEQ ID NO: 611196 - DNA, 420 bp, Homo sapiens
ggtacccggggacgaaaggagcacgaagaacaggcacggagcccaagggaatgcccaagtccctccaggtgtttcctcggtcacggtccgccggcgcaggcgccaatcacagggtcctgaggtcgcctgacgttcagggcagccggaagacggggaggtctggacctgaaccgagacaaggaggtaccacactattcactgctgcgtcgcagagcgggctgggcggctgtctggacctcgagaggcctgaggcaaggatcgcgtcagaccccgaaagctggtttgttgattagtgatctaagaccgccggaagcgcttcttctcaatcaagctatgccaacagaagttccttcgatttgctcccacgggagttccgtctggtggaagtccatgacccacccccgccctttcgtcccccgc

SEQ ID NO: 611197 - DNA, 901 bp, Homo sapiens
gtgtacagcttaaatcatgggtccagcctagaaaccaccatttaactttacactgatcaatattgaatcatggaactgtatatggctcatcgttttaagataaagcatcattaatgcacgatctgctggggttagcctaaacaggcccaagactgtcaatacacttcacacatcattagagaagttctctatattcttcttttataatcataagataatcactataaatacaataatataaataagcacaacaaattgttgctccgtcgtgagctccttgggcgtaaagtctatttaacagcccaatcgcgagtcgcgagggtgaattgcgtgagtccaccccgtaaggctcaatggggcgacactcgcgcgcgtctatggaggcgggggcggccaagagggataactcacgcactctgcagctctgagggagtgtgagatctcttgcccctaatgaacaaaaatatacgtgctgaccgcgagcgagaggagcacgaggcctgattgtactccgacatataataacccccaaatgaggttgagtttacttgaagtggggacaacacatcgaggccttactacatgcgagaggctacactaagcgcccgtggccggtattgcactaatccgtcacccgtttcggggggggatgggacaccctacgtcattggcaacgctaagttgtggaaagcagccaacccttagcacatatcaaaaccattaaaacttcctctcacttacagattaatcatccttcacaaattctaatgtctaagttgaataatccatagaaaattcgttggtcgactttaatgccagagcttactgttttgcacaacttcttaggtagcttctacctgccacgaaacaattataagagaacacagtgaacccaaacaca

SEQ ID NO: 611198 - DNA, 258 bp, Homo sapiens
ctgagctcagctcatcctgccgctcgtctccacagtgctgcgataacaggtgtgagccacgacccggcagctgctctatctaatctgaacttggaaacaccttcctactttaaggcacaggatcaggataagaacccacattgtacgagctaacagagctgcaacttcaaatttactacagtaattaattttcccttcattggcttgcgtctttggtcgaacagttcacaattcccttttccttagatacacctgatt

SEQ ID NO: 611199 - DNA, 828 bp, Homo sapiens
gtcgctgcacgcaggcgccgtgtagtcgtcgccatcgctcgcagcccgtgctgccctcggcgtcgtacccgccgtgctctcatgcccgtcgccggctagtggcgcgctcggccgccccggacagggtccgctgcggtccgcggcgatgggcacgcgaaagatcgacaatacgtagggtgttgctcgcgggcgtgccgtacaagcctgggtgcgcgacttagcggcctcgtgaccgtcagtcatgaggttgatccgtttcgaaatatgacggctccggaccactcgttcccctggacgagtcaggggtagcggactaccgcgagcaccttctagtcgcatgcatgtggcgacagcattgactgtccgcgttagtatttgcctatacggtgcgctatcgagccgaactcggggggatgccaatagatgcaaggaggtcccagatgttttgcgccatcatcgagcgttggatctggtggagaacggtccaggcggggactgcagcgagcagtccaaatagcgggcatgggataaatcactcgctggctggaaaggtgatggtcggtaccaagacatttgtcgcataaagcgcacgttgtagaatccagagtgaattcggacaggcgacggctggcgaatggacatgagttcttcgttccaatgacgcctgaagatgtgacagcaacggcataggagagtggacccgaatttacccgaactcgcacgggataggtaagttaaactcccaaagcacgccaaaagaaatgatcactctgctgaaaatgctaatcgacttattaccccgtcgcgataaggatctgacggcacatc

SEQ ID NO: 611200 - DNA, 376 bp, Homo sapiens
gctcaagttgatccttccacaccttcagcttcccaagttagctggaactacaggcaatgtgccaccaggctgggctataatttttaaaattttttggtggagacagaatctggccaggtggcgtaggcgggtgtcaaactccgggcctcaatggatcctcgggcctcagcctctcaaaaggctgagatcacaggcataagccacggtgccgggcctattctcttcttataagacaccagtcagatgggattagggcccacactactgggcctcgctttcacctaatggcctctttaaaagcccggtttccgaatacaatcccacgctgaaatacggggggtaagggcttcagcgtatgaatggtgcgaggatcact

SEQ ID NO: 611201 - DNA, 559 bp, Homo sapiens
catcgcctaagcacgcagtcttcctcactctgttgttcatcacacctgcataggaaatatgagatacacagagaaaaaaaagtcacactttcagaattctgatgctttatatttctgatgcaatttaattatttattgtgtcctttcccaaggtgttatctaaaaattactttgatgaagaggaattttcaccccacttttctccaaaataaggttattttttctttttctttttctttttttgggtgacagagtctccctgtgttgccccggcctgggactgccagtggctgtgactgcaagctcactgcagccttagccttcctgggctccaggtgattctcctgcctcagcctcccaagtagctgtgcctacaggtacatgccaccatacccagccaatttttgtatttttagtacagacgggtttcgccatgttgcaaaggctggtctgaaactcctgagctcaagtaatccgtccacctcggcctcccaaagtgctgggattacaggcatgagccaccgaacctggcagaggtcttaattttttaaagaatctc

SEQ ID NO: 611202 - DNA, 821 bp, Homo sapiens
  misc_feature (26)..(26): n is a, c, g, or t
  misc_feature (126)..(126): n is a, c, g, or t
  misc_feature (171)..(171): n is a, c, g, or t
  misc_feature (191)..(191): n is a, c, g, or t
  misc_feature (193)..(193): n is a, c, g, or t
  misc_feature (195)..(195): n is a, c, g, or t
  misc_feature (207)..(207): n is a, c, g, or t
  misc_feature (210)..(210): n is a, c, g, or t
  misc_feature (227)..(227): n is a, c, g, or t
  misc_feature (259)..(259): n is a, c, g, or t
  misc_feature (270)..(270): n is a, c, g, or t
  misc_feature (281)..(281): n is a, c, g, or t
  misc_feature (286)..(286): n is a, c, g, or t
  misc_feature (300)..(300): n is a, c, g, or t
  misc_feature (317)..(317): n is a, c, g, or t
  misc_feature (322)..(322): n is a, c, g, or t
  misc_feature (326)..(326): n is a, c, g, or t
  misc_feature (330)..(330): n is a, c, g, or t
  misc_feature (367)..(367): n is a, c, g, or t
  misc_feature (370)..(370): n is a, c, g, or t
  misc_feature (373)..(373): n is a, c, g, or t
  misc_feature (386)..(386): n is a, c, g, or t
  misc_feature (392)..(392): n is a, c, g, or t
  misc_feature (431)..(431): n is a, c, g, or t
  misc_feature (510)..(510): n is a, c, g, or t
  misc_feature (562)..(562): n is a, c, g, or t
  misc_feature (607)..(607): n is a, c, g, or t
  misc_feature (631)..(631): n is a, c, g, or t
  misc_feature (731)..(732): n is a, c, g, or t
  misc_feature (759)..(759): n is a, c, g, or t
  misc_feature (769)..(769): n is a, c, g, or t
gggagagcatctttcagagcattacnccaatagaaataaatatgattgtaggaaaagaccagaggaaagtttctattaccaacggtttagactcttggcgcgaagaaatgctcaatgatcaaaganagtctatacgtcgatggtgactgcaaaatggacatccggaaaaanagacaaggaggggagccaanananaatatagctgtnggnagagctaaaaaaacatnagtaataatcatgggaaaagaaagtgtccacngaggcacactnaacaaaaaagnatatnaactcgctttatanctgaggaggtctgatgngtaancaanctcnccccatctaactaacaactgtcttcatcaacaacccnaanttntctttacctattntctaangtcataattccagtttacacaatgagatcatatgtatgntaaacacatgtatgtaaccaacccttatctggcaacataattgcagcacaataatgatttgcatgataccttgaaattngggggagggggcatgccaagttgggcatcactttgtcttagcaattaatggngatattgattactaaaataagttaatattaagcaaggtgccggtngtacaatctctgatcagtgtcttntcagcactttgagcatttacttggctcatttagtcttccttttgtagcgcatggttggggaggaaaaagtgcatgcatcattccttcactcttctctttnncccgcccccccctcccttcgcacatangcatttggtnttgcttccatctttttttatgcagtgcctgttttttttttaaccaattaaaa

SEQ ID NO: 611203 - DNA, 159 bp, Homo sapiens
cgggggacagggaggtgaatagaaggacacagctcctgccctccaggagctcacaatctgatggaggaggtgacgttcttgggtggtgttccaggaaggacagattcagagggagaggagacagggaagaggaaaaggtttcactttggacaatgatga

SEQ ID NO: 611204 - DNA, 247 bp, Homo sapiens
ctgatctagagtatccccctgcttgtcctgcccttgaagataagttctacaaaaaaattccaggtctgggtgtggtggcgtcacatcctgtaattcccaagtaccttgtggaggccaaggtgggtgggtcacctgaggtcaggagttcaagatcagcctggacaacatggtgaaaccccatctctactaaaaatatacaaactagctggatgcggtagcacacacctgcagtcccagctacttggga

SEQ ID NO: 611205 - DNA, 244 bp, Homo sapiens
  misc_feature (5)..(5): n is a, c, g, or t
  misc_feature (234)..(234): n is a, c, g, or t
ccggntggatcacctaaggtcaggagtttgaggccagactggagcctggccgacatgatgaaaccctgtctctactaaaaatacaataaattagccaggcgtggtggcaggcgcctgtaatcccagctactcgtgagaggctgaggcaggagaatcacttgaacccggaaggcagaggttgcagtgagccaagatcgcgccattgcactccaggctgggcgacaagagctgagntccgtctttt

SEQ ID NO: 611206 - DNA, 626 bp, Homo sapiens
  misc_feature (143)..(143): n is a, c, g, or t
tcaagggaacggccaagctttttgcccgaggagttctaaggcccactatggccaccccacaaagggaaccacaggaggttttcggtgtcccacagtttgtccgcacggcacaattgacccacttcacggcgtgcacagtgttncacagcggtatagcgcccctccacagaactgtttttggcgcccacaacaataatatgtgagccacttggttcacgccacatgttataagaggcactcacactttgggtctctcacggagatgagcacattacactggaacgccttttatctataaatatcccttaaagaagaggagactgaggcacggagggcacgcccacaaaccacagagaaagcccacgagagtacaccacggagaatatgacactttcccccacgtacattcagaaaacactggtttggctcactgagtgaaaatggaaagtccccggggacctggctaacaaggctgaggggagaaaataccaagatgagtcctgttgagtctcccccttgatattggacgtcgttaaaaacataaggagagagatttttaacgaggtaaatcgagagaatcagtggattcccgagactcccagtcactcaagggaaaggtcagctga

SEQ ID NO: 611207 - DNA, 224 bp, Homo sapiens
ctggggttcgcattgcgtgaggtttgccagccgggacacccattttaactgctcgttcagctgctccagcagcggatgaggttttgagcatcttccactggcacccactatagcagctcgctgtatttcctgttcaacctctcagcgacctggagggattcgtcgagctcccgccgcagcttagcctgggaggcgctgttggtggaacagtccacagacaagat

SEQ ID NO: 611208 - DNA, 226 bp, Homo sapiens
gtggcagacgcagaatgggagcgctggcccctgaggaaggccccctctcctgcgcatctgctctcttcgctcacctaagcctgtccctccccctaaagagctccctccctcgctcgcgagccctggtctgcgccacgcgccactactcgcctcccacaggcaccactcgcctccccgttgtcgcccacaggtggcgccgccattaggcagccccttcacggcgcag

SEQ ID NO: 611209 - DNA, 251 bp, Homo sapiens
  misc_feature (21)..(21): n is a, c, g, or t
tagcattaaaccgcgcagtangttgtagaaactatgtcctgtgccttgagaaaggtgcttgtgacaatgcacacttaggaagaggtgtcaccattaccgtctgagcctggcccaggaggtacacatccggattctcacgacttatgtgttttcatgagcacagcctgtggtcctgggtggatctgggagcatcaggaagcagcccttccttcctctctctccctcctccctccctctgattctccctaaga

SEQ ID NO: 611210 - DNA, 263 bp, Homo sapiens
ttctcaggtagaggtcaggcggcgcggggggaggcagtcccgcgcagaggcgacccagtgaagccaggccccatacggacgggcctctccggggaggagaactcgcttcgtattggtaccggttccgagttttccaggcacgatagtctctctttaaaacacatggtctacctcatggtagaaggagtgcctcgaggggttggaacacacttctgtcatctcagggaactgggggtcctgcgaaggagctggccttagggtgg

SEQ ID NO: 611211 - DNA, 1040 bp, Homo sapiens
ccagccaaggcaaattcagttggcatctagggcttgaaaactgcccaagattaaagagctaagatgaacatagtttgaataaactggtaaaataacaattcatactatctctacatatttttaggatatgaatttttttttcctgctgggtagatggtccagtgacttatggcatgaactttcttttcatgctaccttcaatcttcaactaaacgatttctaacaaggggtaagaacatgaggcagtagctttacttaaatacatagacagtacacagctatcatatgctgtggcttcgacgaacgtcacactttagtggactatgaaaccaaaggcaagaattcccatgtagcatacacttaagaatagggcaaaaacatctacctaaaagatggttgtccctaaaacactggaaacatctgcaaatgctctatacatgtccaaattcctgggagcttatagccccatgactctgacgtttgtcaattcaactacagacagaactagaaaagaagctaaaactgtcaacaacctttggactcatagagtgctatgtgcccaatagggtctcgtcattagccccagtgtacatgtgagtgaatgctcaccgtgccgttaagtcacaacagtggtcttgaaatatgttgtacacacgcttatctcacgacaccacgatcgaggcccttgggccgcaacagaggccataagtgagagaaaaacactgtaatgacaataccacactgttcatgccccatcctgagcaagcatagtcaatccggggaaccaacaacgcaactgaggcgacagggagcacacaattaaagattactaaacttaacacggcacgagaacacagacaacgagaaaacagggctgtggacacccatgacaagagcttaacaacagcagaaaggctggaccccgaacataaacaactaagcgaccagcaacaaccacagaactacagcaacaatatgctatgttataagacctcagagagacattagaagacaggaaacagaaacacagagtctagcgc

SEQ ID NO: 611212 - DNA, 868 bp, Homo sapiens
gagcggaaggagctattcgcagagaaacagcctcgcacaaaaagccacctgaccccgaaaccctgcgggaaatctgtttcctgtgaaagtgcctgtgcctccggtgcattgtgcggtttccctgatcctctctcccaaattttcctggcaggggattgatcgaggcgacatttatgactggggtgggcgagggagtggcaggttctcgatacccaagttacaggtgcaggacgtcataggccaatgcgtagccaagatcgcgccgacctgtatgcttgagggatgtgcgccgggattcgaaccaatggactgtgcccaatcctaagccctgctgaggtctttgtggaaccgacatgacccactctttggtttgtccagagaccagtgagccaggtaacgagtactgtggtatgaccaagtgcaaaatggcacatgccactaacacacttgagaaggtctgaagaccacatcaagttgagaacacgatctttgggatgtgagattcagtggcacctacccgacgtgacaactagaccatgactatggtactacaagcaccccatcactacttaacgagcactttgaactcactgtgcaagaaatacccgagttgggatggcagctttacagacatcgtcctgtcatacaatcggcaaacaacacattccgcgaccgagcctcttctgggtaacaccaacagacgccgtccttttgcacgagaccccacggaattgtaggtacaaccaaatgatagcgaacactccagcaaccaggtgtcccctctccccaaaatgggttggaacgctattggctgattatcccccaagtattcaattcggtggtattcgccaggatatgcccaatcccg

SEQ ID NO: 611213 - DNA, 409 bp, Homo sapiens
  misc_feature (287)..(287): n is a, c, g, or t
aagaagtttctttaaaggtgtcagagaccccaaggtcagcgaggaccagcaccccaaatagaaggaagtgtggaggtgagacccaatttggagcaactggccccgatgcttttgctgcccggaagtcaaggggttcaaggggtggaggctgagagggatgtggtagctaagaggctgagaagctaagtggggccttctcagactcatggagctggagggacaaacactggaattcagtgtccatctaggaggagaggcgcagccgggcatggtggtatgcacatgtngtcccagctactcgggaagttgaggcagcagaattgcttgaacccaagaggtggaggttgcagtgagccgagatcatgccactgcacttcagcctgggtgacagagcaagactccttctcaa

SEQ ID NO: 611214 - DNA, 496 bp, Homo sapiens
  misc_feature (41)..(41): n is a, c, g, or t
  misc_feature (95)..(95): n is a, c, g, or t
  misc_feature (97)..(97): n is a, c, g, or t
  misc_feature (234)..(234): n is a, c, g, or t
  misc_feature (379)..(379): n is a, c, g, or t
  misc_feature (491)..(491): n is a, c, g, or t
gacaccaccgggcggctggtatgtgtccaccggcccctagngcctcgagcccgcccctgggagacgcaggctcatccccgcggagagagcccgangnctgctccgaaacccgcgggagggcacctccggtcacccgagccgcaaatccccgccgtccgaagaaggtgtcgccccgggctggcggcccagcgtggcttaggcaggtacaaccggcagcgccgccaaagccctggntaagggacgcctgcgggaagttcacggggaaggcgccggtgtctgaggtctgagaagacaagcggccaccggaaaaaggtgctaattgtttgcagaccccgatccatcgacaccccaaggaaattgctgtgaacaaaatttcaangagggcctttttcgaatagacgcatgaacggtgttttgtgtctggattcgttcaagcttcccggattcatttgggaatctagcttcttgctttgccttttccaggcgcgaancaaca

SEQ ID NO: 611215 - DNA, 129 bp, Homo sapiens
accaatcagcgccgccagcaacgatttcagtggattttgactcatcatgctacccagacaggcaatagcgaataccatcagagcaaaatattcggccggcccgaacgccagcgaccaacgcgccaacag

SEQ ID NO: 611216 - DNA, 1154 bp, Homo sapiens
tgtgtgtagattcggctttgcggggctattgtcgttggagaggatcgttttgtggtgaacacaattcgtggcgtgatgcttgagggaaattttaattaaacgcatgggtgaaaaggtttttcttaatgttcttgggattaagtaatttatttagaaggatggggctaattggcctgtaatatatggcagacgagatatcggcgatgtagcatagtcggctatatgttgtggatggaaatattggctaatagatatagggaaggattgggaaaagcaaataatgtacgttttgtttgacaggtgtatgcatatgttagggctcttttggattctggaatatttttagatggacataaccaatggggattggggcatttaaaatgtatgggaatagaattggattgaaaaccattgtttattcagctatacctatagggctatggcctcaaattttcttcgtcattgtcgcgtagttgatttcgatatcaacggcaactctaaagtggtaagtggcttccagtactcaccagtacaggatactgatatgtcattccttgcgtaatcattcacggatggcgctcttgttgcgcaaatatacccttaactcgatagatggcgttccgcccaatgcaattacctctgcaagatctctacctagcggtgaactagaagatgttgcgcagtttgcaggcaacagcgccggcaaggactcttattaatgcaacttactgaagaagaaaggcctaaaaacttcttaaagagcatgctacataacttactaggctatctcgcctaataggagtagtgttacaaaagacggatgatattgaatcctgtcttggtgaagagtatcaggacacagtatattcaagcaaagcgagtgacaagtatgtgtgaacgagaaaagtgactatcagtcaaaagttgggctaaagcatagattttttgtagtgttaccatctagatgtcagcataacgtatgtgtgggacagttcgagctggcattaggctatccattgtcggtcttggattttgtaaatcatcactgaatattcatcacatgtaaacaagttatcagatacaaagttaattttaatcaagctgttatttttgtactgataatttcgaaaatccgagttcgagaacataagcgc

SEQ ID NO: 611217 - DNA, 233 bp, Homo sapiens
ccctaagggcaaaaaagttttgttttggggcttaccccggggaaaaaaattatttttttgttttcccaactttgcttttaggggcatgaccctctttggagctttatggtaaaccaaaatttttggtcctttcctgtccaaaaatttttttcccttgtgttagtgaagcctgggttttccgggttaaatgattgggacccatgtataaaaagtaaaatttttgccaaatttta

SEQ ID NO: 611218 - DNA, 629 bp, Homo sapiens
gcccaaggggtggtggacagaaaaatggatcaacacactgtggtccatccacacagtggaatattactcagccatgaaaaggaagggaatcctgacgcaggctacagtgcggaggcatcttgaggacctcaggctcagtgagagaagccagacacagagggacaaatgccgtgtgattccactcctaggaagtccctggagtcatcaaattcacagagacagaaagtaggatggggatgccagggctggggagggagatggggagtgagtgtttcatagactcaaagagtttcagtttgggaagataaagttctggagagggtggaggtgatggttgcacagccacgtgaatgtgtttttaacgctgctgaactgtgcacttagaagtaggtcacgctgggcacagtgactcacgcctgtaatcccagcacttcgggaggccaagacgggtggatcacctgaggtcaggagttcgagaccagcctggccgacatggcgaaaccccgtctctactaagaacacaaaaattagccaggcatggtggcgggcacctgtggtcccagctacttgggaggctgaggcaggaattgcttgaacctgggaggtggaggttgcggtgagctgagatc

SEQ ID NO: 611219 - DNA, 1765 bp, Homo sapiens
  misc_feature (1285)..(1285): n is a, c, g, or t
  misc_feature (1295)..(1295): n is a, c, g, or t
  misc_feature (1441)..(1441): n is a, c, g, or t
  misc_feature (1488)..(1488): n is a, c, g, or t
  misc_feature (1525)..(1525): n is a, c, g, or t
gttgtcacttatctaatgtcgtcctagtttccttaatgtggtcatattgtaattgtggcccccaacaccacgtcgtcggtgtgttataaatgcggaaccacccctcctcctcccttcggggttggtaatataatgggggcccctacagaggaaaaactagggtttttttaggaagtggagtgcaaacacgcaacagagtggctctcaagcacactgtatctgacacacagtggtgtttatataacctcactgccataatatatcgtgtcccaacctcttcgctgcgctatagttaatgaaataggggcggtcccccaccactcggtaggataggggtagagatcgctctgtgcactctctcttagaagaagtatttatagtggttgagaggaaacaccctgtttttaagggtggggtgagaaaaccccacacggggaagttcctaccaatgttggtgcacctcggggtaaacttcgctcactgattgatgttgaagaaagaaatctcccacggggtgataaattgcctctcaggtatgatggtataataggtatctcctcctcatggcctttcctaataggagaggggatgggtaagggaaaacttctttttggggaaattatataaatgacgggaatatctatagaaatggaatttatacccgcggggggtcttattatgtgataacttccactcataggttgctccaccgtaggacgaccaaccacaaacgttgtggcgtttatcaagagcacccccacagaggggttttcaagaaggtggacacaagtatgggtccactctcgacggctatttcctcccccatgaaaatgggtctaaagaaatgactctcgtgggagatttcacgaccaacacttggtttcctccaggaatataagtctctcgcctcatataagggtatccccagtcgacatgtattagacgagatgtgatgttcttataaaagaggtttctgtgtggttaaaaaaagcgtattaggggcgtctcccactgttggagtctgaagtatttctctcacaggagagtttttgatagagcgctctctcacaaggagccacacgcgcgtgtttaaaagtcacacaggtgtctccgaccacaggtgtcttttctggacacccccccccccctctcacacatttgagagagagtgtgcccccctctctctccacgagaaaagggagacaccgtgagatctctctctgggagagatatttctcaagcgctgctttgagagagaggagcgcactacgcgcggtgtattagntacaccaccnccccctctatattttgtagagagggagagttctcatcgccaccagctctccttttctctgccacagcgcttctttatacccaacggagtcccacatgtgaactccacgcggtgtctcttatgagagagaagccccacgcgcacagntctaataagggagcacacacgggagaatgtcttgtgtgggcctcgtntgtgtgagacacacggagaatctcacagagatatccnccttttgtaaaggagagcacattctctgtctttatacaagagagtctcgtgaaaattgtatgacctcatatgtgaaagtgtcttctgagattttctataaatattttttgagaaggttaaagagaaaacacactaaactttaaggttctaatggggctagagtttatcgcccccacgttgccacgttttctaagcgcttacccaatgaatgaattaacatgagcttgcgctccttagcca

SEQ ID NO: 611220 - DNA, 465 bp, Homo sapiens
  misc_feature (234)..(234): n is a, c, g, or t
aatagtaggtgtatatatttatggaatatatgagatatttcgggccaagcatgcaatgtgtaataatcacatcatggaagatggggtctccatcaccttaagcatttatgcattgcattacaaacaatccaatgatactcttttagttattacaaatgtacaattaaattattattgactatagccaccctgttgtgctatcaaacactagggcttattctttctatttttttngattcatcagccatccttacttaccctccaaccccccactacgctttccagcctctggtaactatccttctaggctctatgtccatgagttaagttattttgatctttagatctcacacataagttagaacatgtgatgtttatctttctgtgcctcatttatttcacttaatataatgacctccagttgaatttattttgtctaaagtttttcttttaacattggttttt

SEQ ID NO: 611221 - DNA, 246 bp, Homo sapiens
ttactaaccctaatcgcattggtcatttaatttctttaaattggcgatggatatggtgatattacatcttttctctgtaagcgtttggatgtgtttcgtctgcccaagtattatactttttattccttataagtaattgggtatgaatgctgagtccttttttctgttcaggtggtttgtgccagattttattgtaccaacaatatggttatcttatttggtcttatttgggcgattagggttagt

SEQ ID NO: 611222 - DNA, 828 bp, Homo sapiens
gtcacggtattatagtacaccttgttaccaaataggtgttctcttccccacccacctttgagctttgctctaaaatacattcaggttccaagcctgaccatcctgtttaatctatcatactcttccaggtttttttttttgggtctaaggctggaactttttctttttttcagctgaagtcttatgacttttcatgagtcaaaatggttgggatttcagcaagtcaaatctggcaaaggcctgcatattttttttaagattatatgaagtctggtgcaaaagctttaaaaaaatgcctctgcctggcctgcaatacatgcaaggtatgtaacttagtctctcttctcagacactgtgggtagttatttccggtgtttccctttttttaaaaaaaaatatggacttatgggggtctatctgagcaggttctaacattcacatgcaattgggtgtggccattagctataaggagtcaaggggcagaactggtccgatatcggaagtgtctctccccttttcccatgacgtaaatacataggtgtgtcccaggattggtcaggttttcccccctcctaatctggtacattaaggtggtactatgtgtcagtacaacatttaacttcgacctggcatgtcccagtgattcatccagcagggataactgctgggggcgtgacccacactggagtatccgcaccgtggaaatgggccctaaggacagcggcaacgtcggcacagttaaaaacaaaccggggggggggcaaacaacaaacacgtctgcacaacagtgcaaacacccaacggcagcttacaactggacaaagagat

SEQ ID NO: 611223 - DNA, 306 bp, Homo sapiens
gacatataggcggtggtggtgcatgtctgtaatcccaactactcgggaggctgaggcaggagaatagcttgaacctgggaggcggaggttgcagtgagccgagattgtgccattgcaccactctgcactccagcctgggtggcagagcgagaccctatcacacacacacaaaaaaaaaaaaaaaaaaaaaaaaaaaaggggaatttaaaaatttcgagattacaacccccgggggtgtttgtgtgcacagatgaaagaacatgttaaaaacccaatgaaaaaggggtgcccatctctgcacccaag

SEQ ID NO: 611224 - DNA, 183 bp, Homo sapiens
agaggtactaccactagtctgcagagataatgctggtcagtcgagttcctctcttctagagaaattccctgttcgcccttcctagtctaactccagacccccgccctctctcctgagcttctctttttttatttgttttggccatttccggaatccttctcatcccctttggttcccaactcc

SEQ ID NO: 611225 - DNA, 863 bp, Homo sapiens
  misc_feature (4)..(4): n is a, c, g, or t
  misc_feature (75)..(75): n is a, c, g, or t
  misc_feature (101)..(101): n is a, c, g, or t
  misc_feature (109)..(109): n is a, c, g, or t
  misc_feature (134)..(134): n is a, c, g, or t
  misc_feature (151)..(151): n is a, c, g, or t
  misc_feature (157)..(157): n is a, c, g, or t
  misc_feature (209)..(209): n is a, c, g, or t
  misc_feature (736)..(736): n is a, c, g, or t
  misc_feature (862)..(862): n is a, c, g, or t
gtgnccgtacaagctgactcacgagatactacagcccgattacactcgccactgagtgctttgtgacagacagtnctgagtgcacgaagtcacactgtctntcagtcanacgggctttgtcaatatctctgatnactccagcccctctacnacaganactaccctacagtctcagactcacacacccagctctctccaggacaagaggntgtcctggtccctgtctacctccccaccatccagagctgctggaactacggcttctcctgctcctcggacgagctccctgtcctgggcctcaccaagtctggcggctcagatcgcaccattgcctacgaaaacaaagccctgatgctctgcgaagggctcttcgtggcagacgtcaccgatttcgagggctggaaggctgcgattcccagtgccctggacaccaacagctcgaagagcacctcctccttcccctgcccggcagggcactttcaacggcttccgcacggtcatccgccccttttacctgaccaactcctcaggtgtggactagacggcgtggcccaagggtggtgagaaccggagaaccccaggacgccctcactgcaggctcccctcctgggcttccttcctttttgcaatgaccttcaacaaccggccaccagatgtcgccctactcacctgagcgctcagcttcaagaaattactggaaggcttccactagggtccaccaggagttttcccaccncctcaccagtttccaggtggtaagcaccaggacgccctcgaggttgctttgggatccccccacagcccctggtcagtctgcccttgtcactggtttgaggtcattaaaattacattgaggttcctna

SEQ ID NO: 611226 - DNA, 579 bp, Homo sapiens
  misc_feature (155)..(155): n is a, c, g, or t
aacgccgcgatggctgcgcagcgagagccccaggtccagttcaacacttgtattcggttggtgatggtggtactggaaaaacgaccttcgtgaaacgtcatttgactggctgaactttgagaagaagtatgtacgccaccttgggtgttgaggcncactcccctagctgttccacaccaacagcaggacctattaagcttcaatgctactgggacacagccggccaggacgaacacttcggctggaactgacgagcactggcctattatactccaagccccagctgctgccactcactaactgctttgatcgtaacactcgagcagttacttacaacgaactgtgcctacactggcactagacgatctggctacgagctgtgctgaacacacatccccacttgtgctcgtgctggcaacccaacgtgcgatcttaacggaccaggacacagtgaacggcgaaactccaccgctcttccaccgcacaagaagaactcttcagctactaccgacactttctgccaacaagctaactacaacctttgcaacacagcccctttcctcctggctctgctaacga

SEQ ID NO: 611227 - DNA, 508 bp, Homo sapiens
  misc_feature (381)..(381): n is a, c, g, or t
  misc_feature (507)..(507): n is a, c, g, or t
ttggaaaggttttttttttgccatagtttcccctttttaaggttctggaaagttttcttttcccaattccttgaccctcccctgtttaaaagccccttcttccttcccttgccgggcagggcatttaagggtttccgcacggtcatccgccccttttacctgaccaactcctcaggtgtggactagacggcgtggcccaagggtggtgagaaccggagaaccccaggacgccctcactgcaggctcccctcctgggcttccttcctttttgcaatgaccttcaacaaccggccaccagatgtcgccctactcacctgagcgctcagcttcaagaaattactggaaggcttccactagggtccaccaggagttttcccaccncctcaccagtttccaggtggtaagcaccaggacgccctcgaggttgctttgggatccccccacagcccctggtcagtctgcccttgtcactggtttgaggtcattaaaattacattgaggttcctna

SEQ ID NO: 611228 - DNA, 447 bp, Homo sapiens
ctagagtatccccgcctggagctcttgatcccctggagtccgcacacatccgcgggttcatcacaccagggatctcctcgcgtcctatctggaggctcaggaggactacctgtgctcgcgaggccaagctcctaaagcgcgaaggctcgccctccgcccccaccgccctcacgggacctgatctaggcctacaacacgctggccctgggtccccctgaagctcaagcccgcccatgagggcctggtgcgccaccggtgcaatgacgcgggccgcctcactccatgatatcccgcgcgaggagctccggcacacgccccatctgcccctggcccccctgccgctcaatgagggctccatcacgcagggcccccctctcaattacatccctgcgcgttcatcactggctccaaaaagcacgacttaccccccctcatcggcagccccgc

SEQ ID NO: 611229 - DNA, 682 bp, Homo sapiens
cgcagtggctctcgcctatgatctcagcacttcggggggcagatcgaatcgcttgagctcaggagttcacgagtagcctgtgctaacatggcaaaaccagcgtctctaccaaaaatacaatgtacattagtcgggcatggtgatgtgtgcctgtggtcccagctacttctggaggctgaggtgcggaagattgctttggagctgggctaggcgcaggttgcagtgagtcaggatagcaccactgcactccagcctgagtgacagagtcaatcaaaaggaaaacaaagacactactgagagacagtgtacccgccccaaaatcagcaaatataaatgacagtcgtatctaagtggtgccacaactagccttgaatgtagcagcagcatgacgaactttggactagacatctagtgtcttaattcaaacattcttacacagttactgtgacttatctggttccccactctattcacttgatacggcatgatgggtctggatatttgtatagcttgggatcgaacagaattaccatacttttaaaacagaagtaggctgggcatggtggtctcaagcctgtaatcccatcactttaggagacctgaggtgggtgggcttgcttgacgctctggagttcaagacgcagggccggggcaatgttagtgagacctgtctctataccaa

SEQ ID NO: 611230 - DNA, 375 bp, Homo sapiens
  misc_feature (32)..(32): n is a, c, g, or t
  misc_feature (71)..(71): n is a, c, g, or t
cgaaaaccccgggccgcacgcaactactcaanttcttcaagctagacgatgatcggcgtctggtcgacctnccgggctacggttatgcaaaagtacctatcccgctgaactgcactggcagcgtcacctggaagcctatctgggtggccgggagagtttgaagggtttgattctgatgatgacatccgtcatccaatgaccgacttcgacctgttgatgctcgattgggccgtcgccagcggcatgccgatgcacgtcctgctgacaaaggccgacaagctgacatacgcgcagccaagaacaccctgctcaaagtgcaggcagaaatccgtaagggttggggcgacgcggtgactatccagctgttctcggcgc

SEQ ID NO: 611231 - DNA, 849 bp, Homo sapiens
  misc_feature (849)..(849): n is a, c, g, or t
gagccgagatggcaccactgcactccagcctggcctataagagtgaaactgtgtctcaaaaaaaaaaaaaaagttacttgggttcatgcctgtaatcccaataattttggggaaagaactggaggtgggaaagggtcacttgaaggccaggaatatttggggaccccgtttgaaccccaaggaagttttgaggggctcgcagtgatcgtcctgcattggtcgccacacttggcactccaagcctaaggcacacagaattgacgaacactggtctcaactatcagagggaaaaaaatttgtgctgggcaacgggtgggctttaatccgccgtgtaaatcccaaagcaaattttggaggaaaggcgctttggagggccggaacagtatcaacggaagggtccacgggcaagatatttgggaacaccaaatcctggcgtctaaaccacctacgtggaaaaacccgcaacctttcttactaaaaaaatgtcaccaaaaaaaatgtaaaggctgggcgcatattgctgtggcgcaagggcccaccctgtggttaatgttccccccaaagcataaaataccggagggaaggcgccttggcaagcgcccactgggaacaaaaaattgtgcggcctttagacacccttgtgggagacggcgttggggaacgcctttgcgccatcgtcagaccgctttgagaagaaatccggcacaaccacatcttttgtcagtctcccaagccctgggtggttcgggccatggctggcaaacagaccctcttgtgttcgcccagaaaacacacgaccaacgcgcgcgggcggcgacaaaaaagccccccaaagcttaacgtagcatn

SEQ ID NO: 611232 - DNA, 433 bp, Homo sapiens
taatcggatagtacttgagctttcatgatgttctcatgggccgttctgggagatgccagattggtgaaagaagctccagtgtagctaacacgtgaatatagtgagccttagtttccactttagttgtctgaagttctttctctatctgggaggcctggctaggcttctcctgataattggtgtgttcattcggttagtccacaaatatttactgagtacctcatctgtgtgtcagattcccggagaagccccgttatatcagctgtactctcctattttccctcgacctcctcccagtactttagggaagggggcagatgagaattacagccaggagaggacaattatgtttggtagtcccatagtgctctagtactatcctggaattacaatccaccgtaggtatggtggggggtgggtcagaacatccggg

SEQ ID NO: 611233 - DNA, 356 bp, Homo sapiens
atggtccgagccgtcaatccccactgacccactaactcgctgtcagccatgggctcctctccaggccgtgccctgcccgctcccatggccgagttgaccctcgtacccaatgagccacgctgctcctcgcttcatccaggcctctgctctgaggccagctcctcaggctcggtcagctctggtaaaacagcagccctaacctcggggtcctctgtctcctccaccagtttgtatcccttctacagttctcactcccttcacagcagcaggtggaatggacttgtttgaatccccaattattatgcagcttccggaaagaaaacatttttgccccagcaccttttgggaacctatgg

SEQ ID NO: 611234 - DNA, 212 bp, Homo sapiens
ctacaggcagtctaggatttgaatattattatcaagagcctcgagatctaccagacaaaactggtgactgatgacccaacgtgctaagacgaaaaataacctggcatcctgctatttgaaacaagggaaaaggggttttttccaacacaatgccaaaggccaaagtgggaaacaaaaaaaaaccaaaaacccgttttggggatttaaaccac

SEQ ID NO: 611235 - DNA, 272 bp, Homo sapiens
  misc_feature (35)..(35): n is a, c, g, or t
agttcgacggagactctctctgtgatactttctgnttggttagaatctgtgaaggaagctatcaccagggaccgagaaaactaagctcccggtgaagaagccagtgtacagatccaagaggaggaggagacccttcaggacgaggaggttagggatgctctgacagacaattacatcccttcagtctcagaagactggagggatccaaagatcgaggctctgaatggcaactgttctgacactgagatccatgagagtctccgtcgaactgt

SEQ ID NO: 611236 - DNA, 896 bp, Homo sapiens
agcggaagtcacgggagggcgtagcaccgaagtggtagagagctgtggctccggaacgcccggcaggcccagagacgcagcgagatggtgcctgaaagagagagggcgttgatgaaagcgcccgtgggctggagagcaatgccgtgacccggccaccggtgcatgccgctgaggagaccgcggacagccccggaaactccctatccggaggttctttctgctgcacatccaccggcaccggtctctctctagaccccagtctgaaatgaaggccataccgggggactacagaacctgtggttcaagtttcatagaggcataactgtagatccctcggattatctgcttcaatgtgaattactgcctgccgtgctgccgttagaggaagccagcggagctcgttcgatgtggctgcgaagtgtgcccttcgagagtggagactaaggcacttactcgtcatagggtagcgtaccagcatcaagcacatcttctgggaatactgggcattcatctctctcaaattcagtcttctttcattcaatacaacaacagatctctactatacctcggcagccgtcagcgaggaaaccgtcatggaggaggcgcgtggagcacactcggcaagatggcccgcgggctggttgacaacactgtcggagggtcgtcgtgcctctattgggacacattcgagcactggcttgccatggacaacagcttccggacaaactgcctcaagcgatggaccaggaactagccggactctctgacaacctcgcgtgacgctacccaaagcgcatccccaccacgcaacacaagaaccaaacaagccaagagaaggggtccagaaggcaaactcgccggcacagaagggggccagacctcgccacagaaggcgg

SEQ ID NO: 611237 - DNA, 281 bp, Homo sapiens
  misc_feature (17)..(17): n is a, c, g, or t
  misc_feature (111)..(111): n is a, c, g, or t
aaaattttttttttacnggcccgggtggagggggaatttttacccccccaaatttttttcccttttggggggggaaaagcggggccccccaattcccaagggcttttgggncgtgtttttaaaaacccccctggggcaggggagggggagggttttggttgggcaaaatttttaaaccccccccaaacccccggggggccccccacctttccccctttggttttgggggggtttggggggggccccgggggttcccaaaaaaaatttgggggcggctccca

SEQ ID NO: 611238 - DNA, 423 bp, Homo sapiens
gccggcggggtgtaaggtgatataacgattaaatgctgaattaatctatgaataaaagaggcaaggcttttgctgaggaggaggcttttgctttaggaggggcagtacacacaatttgacgtaaacctggaacttcagtggtatcaatcaaccaacaacagcttattgtgagactactctatgctgctcactttaccaggtaatagggaaactgctgtgaacaggcatgcaaagtagctttgccttctctgaagaggagctgtgaaagatcatatataaccatgttaatttcacaaaccagtaaggatggtgaagaaaacatagtaggataaaataaggtgtaaaggcagacattggtagcagcttatgcctgtaatcccagcctactcttagatcttaaactttataactctcagtcccgcc

SEQ ID NO: 611239 - DNA, 146 bp, Homo sapiens
tatcatcgacttgctctgctggtattatcccgtgaaccttctcttcccgggatgtactttttaggttgggtctctgcaaactttatagcatcaaactgggccatcttctcacacagtttcacttcgcccaagacagcccggaaaga

SEQ ID NO: 611240 - DNA, 629 bp, Homo sapiens
catagaaaaagtaagtgttttattttggtgtataagtgaattaatattttttggacgtttctttaaatggcatttcatttcttctctgccattactccctcttgtttttgaagcagcaaaaggcttttgaatagtctttacatttcatttataacgtgtttcaaaatatctaaagttttaaaatgtatattctaattcccaagtttttaattgacaaacttgttagtagtatatgtctgatttttacaaaataatatatatgtttagaaaaatttaaaaatagtacagaagaacttgtaatgaaaggcaatagtcctattattctctgtatccattgaagccaccactgtaagtcacttttgttattattttatatatacatgcacatattattcatatacatatttttaaaattttattaaacattcaatggatatgtgccagcctttcatatgaaagaaattacttgttcaaaactgtttctgtgaaattttgatcaatattttttgattataggtagctaaagcagccttttatagaaagaatgatcctttagatgctgccattttttaccttgcaatgaaaaagaaagctgtgatttggggattatataggtaggtaaaaaaaaa

SEQ ID NO: 611241 - DNA, 489 bp, Homo sapiens
  misc_feature (204)..(204): n is a, c, g, or t
  misc_feature (260)..(260): n is a, c, g, or t
tgaggatccagtgtgaagaagttgcagagtgtctttttattttattttaaaaagggggaaggggcttttggttttgctttgttttttggatgaaggagtgagggaaatgagggaatacccccaccagaaacatactgaaaagcctgcctgtctcttgtagatccttctttgtcttgttagtggtacatgggaagttatgttttnactggtgtgtgtgtgtgtgtgtgtgtgtgtgtgtgtgtgtgtgtgtacttaatgangggaaggtaagactctgatcaggattatgaactgcggtccttgggaccaaaggtgtggtcatggtagagagttgtaggacaatagggtgttttcagaatctgggtggccacagagtgggatttcctggtatggacatcagaagtcactggactcttctcccaaccccagagttatgggattttggtgctttctcagggtctctccccagactcactcttctcacccata

SEQ ID NO: 611242 - DNA, 87 bp, Homo sapiens
tttttcccccttttttttttaccggggggggggggggaggggtttttttccaatccccctttgggggagggtttaaattaggcccca

SEQ ID NO: 611243 - DNA, 2084 bp, Homo sapiens
cccccccccccccccccccccccccccccccccccccccccccccccccccccccccccccccccccccccccccccccccccccccccccccccccccccccccccccccctaacctctgctacgtgtgctgatggccctgtgtgccttgctgaactttgtgcactgagtgcccctgccccttgctactttcacttgcacacgtgctgtgactacttggctgctgatgctcacatgctcctgccacccaacctatgccacatgtgtgccacaccaactgtgcctacctcactccacttttccactctcctccatgcaacactttacactgctccactgctgcacgctgcatgccctccccaccttcctctccaactgcacactgtggacgcactttgcttacacacctgtgacacctctcttctctcccacctcccaccgcatgctgctcccccttgtgccaatgccactcgcccccttgccttgctggcctctgcaccccctccacccttttctaccctctccccactgctgcacacactgctacccccaccttgcaccctcctgctctcttgccactgccccacctccactccccacgctcctcccccctaactccactgccctctcccttgcttctcttgctctgctgcacacccccctctcacccaactgcctctcttgacaccgcaacaccctctccttgactgccctttgcacaccgcactccctgcccactcctcctctcgatgcacttgccgcctctctctctccaacgcactctacaccaccactgcctttgtgcttgcccactgcacgcacttgccttgctactcctgcgaccttgcttggcgcgtgtgcaacgcccttgcacccttgcggaatgcttggacacccttcccttgcaccaccccaacttcaccttatttcctcttggcaccaactcctgtggccttgcttgcctgcacacccctttggggcttgctcgaacctcttgtggccccttcctccttccttgcgcccttccacgcccactacccaacttccttctgctgcggcttcccctctactgcgccggcaccttctcggacacccttctgcctccctcgcggaccgcccaatcgcggccaaccgcttgcgggaccgctgcaccttcgcccacaccgcaacctgcgcaaccccttggcaactcgccctcccttcttccacaccttggcggccaacttcaaccccccaacacccctcccttggccaccaactttcttctcccaccttaaacccttggcgccccttccacaaacgtccccaaccacaccgccaaccacccaaacttctccctcttgtgccacaacggcggctaccccttgtctcccttaaaacccaccgcgctttcccacaacaaacgccgtcacacaccgccaccttcgtgtcaacccaacgtcctctccaaaccctactcgtcttctctgccccctaggcctgtccggcttgtcaaacaccccccccacggtccccccccgtggcctcgcccccctggtcgaagccctttgcgcaactttcaaccccaagactcgcgccttgcaaacttcttccaacaccctcgccccccaacttttccctcgagcacaagcctttctccaaacagttggcgccccacaactccccaactcaaagcgcgcccctaaacagcgttcactcacacttctggttagctcccccctgttgggccaagacatgggccttcccccaagtcgccgcgttcaaaaactttccccaaccctataagctcgaaacacattttcgttctctcatttctgagacaccccctctcgcgtctgcctctcgattcccctctccccacacagactcctctctttggcctcaaacacccaaacacccctctccttacaagacgcacgcaaacccgcccctctcttctgtcgtctctcttcggtccacctccacaaccccttcttgtcatacccttccgtttgctccgacctctcttcggtcttctccccgttcacacacatcatacccccccacaaccattcttcgttcaacaaccatctcagctcacgcca

SEQ ID NO: 611244 - DNA, 151 bp, Homo sapiens
ggctaggaatacggttcatgcaggagcataggcatcggtggcctacagccgcagtggtaaatgcacagatcgatctcacagaagcaccaccgtacactattgtcacaccaacgtaaacatgatcctcgagttcacagatgaacgactcatg

SEQ ID NO: 611245 - DNA, 451 bp, Homo sapiens
  misc_feature (77)..(77): n is a, c, g, or t
  misc_feature (118)..(118): n is a, c, g, or t
  misc_feature (438)..(438): n is a, c, g, or t
gaggggcatgagctgattcacattctgaaggacctctctagctggccagtgctgaggaggttggagagagaaagggntgaaagcaagagagaccacgtgcagggcctgttaacagggnttgcaggcgaaagactgtgggtgctgtggctcccctagactaggactccaagtgccctcctcttcccaaagagacaaaaggccacttgcacttgaaaggaggttggggaaaatgattatgattcttgaacactatggtaaattatttttcacagtcttttctcaaaagaatacaaaatatttaacaatagtttttaatctatgttaaatataatacaatttatagatgtccctaagtgttttaccttaaataagtgtatcactgtttttcccctgttggtgaatgtagcgctgggataaaatgcttcttaccctataaanaaatttctgtcga

SEQ ID NO: 611246 - DNA, 205 bp, Homo sapiens
cagtggggactgcacgacctggatcaggcactgtaagtctgggtagtgatagatgactatagatagcttctgtgttgaccgaaaaatcagaataggtgttggtatagaatggtgtgtctcctcctaccggtggtgttcgaggaagggtggggtagcggttgcggtcggttaggagtataagtgatgggtaccgaggcgacgaagt

SEQ ID NO: 611247 - DNA, 202 bp, Homo sapiens
gcaacagctatctaccaggctcgggaagtttgtcgcctctacctataaatcttcccactattttgctacatagacgggtgtgctctatttagacatagtgcttagagtagcccgcactggtttacgaggggtcttcagctttggatctccttgcaaaggttatttctagttaattcattctgcagaaggtatatgggttagt

SEQ ID NO: 611248 - DNA, 106 bp, Homo sapiens
ttgtaaaatatccttcgtttcccaaataatctcctgaaaattgttgtcgatacgttacaaggaaaattgtgtgggaactctccgtttcctcccccaaaatgaagca

SEQ ID NO: 611249 - DNA, 448 bp, Homo sapiens
  misc_feature (7)..(7): n is a, c, g, or t
  misc_feature (14)..(14): n is a, c, g, or t
  misc_feature (86)..(86): n is a, c, g, or t
cttgttngaacggnatcttttcctttttcaagccgggaaggtttcgaggccaattgatgggagaccaccggggatggccaggtgantagagccccgattgcccaaaccctgggcccacttgtaactctgtgcaggcatagcggaccattttcttagccaggcggccgcttgattcccagagaggtggcaaccaagtcagcactttgggaagcttgaggtgggtggatcacaaggtcaggagttcaagaccagcctggccgacatggtgaaaccctgtctctactaaaaatacaaaaaattagccaggcatggtggcgagtgcctgtagtcccagctactcgggaggctgaggcaggagaatcgcttgaacccgggaggcggaggttgcagtgagtcgaggtcgcaccattgcactccagcctgggcaacaagagcgaaatccgtctca

SEQ ID NO: 611250 - DNA, 907 bp, Homo sapiens
cggcaggacaggtgccggctgtttgcaggagaggcatgtgtgtggagaacgcctaggagacacgtgggtggccaccgaaccctgatcgtgcaggtcgagaaattcttccaggataatatgtggtggatcgtgtctgcctaaaagtgagtcaattctgcccatgagcaagtcttccagaacggtggggccctcgacgaagaacgacctgcaaagccgggtaattctctgcgaaaggacaatgtccaaagactcatcgtgaggcactccatgtctgtcctacagacgaagcttccgcgtggacactggcagggacctaggcgtcccggcagttgtcaggagccagccctgggctcaggtggctccagagtacttgtcaaaaccacaacgatgttccaaaaagccaatttgcattcagcccatgtcagaagtgcgctgataaggaagtagcgtctctatttcctgggatggggagttatatgctctggggtatcagataatattatgctgtaagctagtcagtcaacatccttcgttttcttctgccgttaggcagattcaggtcgattcatggctactgcctatcactgctttgaagttatcaaaaatcttctaagagacacctgccggagaattgcagaaagtggagttgattgagagaactcctgacggtggtccgttgaaggtaactgcttacaggctcagcgtgacctttggagagaaagcaattatcagaatcgggcagacaattactggacacagagttctagcttgatacaattcacgcgtttagcaaacaaggatttgtgaaggggaccacagcagtaagaggtcaccgggtcgtgatacatggatctggaagtacctttgaccgcatggtcatcaagatggggccactctggtatgggcg

SEQ ID NO: 611251 - DNA, 129 bp, Homo sapiens
tgtagtcccaccacacaagctaaacatgtctgatcagatttatacctaaatgtttattttttctaaaacaaaaaaaaggtgattgtaattggtactgtttaaaatgttggcttctttatttaattacaa

SEQ ID NO: 611252 - DNA, 445 bp, Homo sapiens
  misc_feature (61)..(61): n is a, c, g, or t
ggcgagcggaagcctgcctcctcttatgtggggccccccatcaacaagaatgctcgcgccncgttcagcagcatcagacacatgatccgcaagaacaagttccgccccgacctgggcatggtgagctggggtttggggatcaggcttggggagactggccagtgctgtggggaagggcctccccctactggttgcaatatggggtggaaagggatggatttttgctttcagcctactccccccccccagcattggcctagggggcggcttgtggagggtatggggtgagccctgttttgttcccccgcccccaggcagccatccgcagggccagggccatcctgggcagccaaaagcctgtgatggtgaaaaggaagcgggcccgcccccccaagagctcttgagccccctgcccccagagcaataaagtcagctgggtttttca

SEQ ID NO: 611253 - DNA, 999 bp, Homo sapiens
  misc_feature (149)..(149): n is a, c, g, or t
  misc_feature (193)..(193): n is a, c, g, or t
  misc_feature (254)..(254): n is a, c, g, or t
gctgatggatgatgggtgggtatgtctgttgtgtgactacattgtgatgacgtctgtcgtgcagtgtgcgtgcggcctgtgctgcctggtgcgcgttctgctcatgtgtctgtctacatagtctcgtcgtggtctgttcagctctcgtntgttgtgttgtctgctctggtctttttgcgcggttagcccgcantgttgcggggtaaagcgcgtgttcccgccccttttgcgtgtgttcatcatcccgcgccccnagtatgtgttaatgcaggcctccacatatggggccctttgtgtttctctcgcccaccgccaggctatgttcgcggggctcctctcgagtatcccatttggtctcggaggatatcggccgtcgcgcataagcttctgctgtgtggcacaacccctgcttgagcaatgtttttcacattcgcctgggttccgggacaataattgcccgcgcggttttcggccccctatcctcgtccccgcgggaggtcttctatttttttctagcgtgccgaccagttgtccggttaccacagccccgacggcgtccgtcaatatcttcgccactacctctcgccgtctaaaaatattcctcgtttggggcggaccctcctcgcgaggacgggatcgcccaccgtcgcggcgaccgtgacaaacgctctcgtagtagtgtctcctcccttgccaggcgacttctttgaattatcgcctgcggggctgcccataccgcttggcgccacaccggggccacacattttccctcaatgggaagtaccaccgccccactgtcgcttttttgtaagagagccgccacattatcaaccacatataggggggtaacaacgcccgaagctccggagcacaaggacaatcttcctgttgggcgccacccccccgttttaaaagtgtccgtattgtcttcacacgaggtaaaatttcgtaaccctgttgttgttcccccgggtcccccgcgggtttttttctccccac

SEQ ID NO: 611254 - DNA, 106 bp, Homo sapiens
ttcagaagtgatgtctgtgtgctcacagctcactgcttgcaaggtacgtctgggtagtagtttctggaaatgactgtagagtgtgccaaatgtcttttgagcttct

SEQ ID NO: 611255 - DNA, 220 bp, Homo sapiens
gatgagctcggtaccctctcctcccacctctaaaaagaaaaacataaatgaatcaataaaataacagctatatatctgaaggcagagatttggggaaaaaaaaaacagccttaggaacccatggtacaggatcaaatgctcctcactagaaaaaaatgagggttgggcgcggaggtttcaagcctgtattcccaacacttttgggaggccaaggttaggt

SEQ ID NO: 611256 - DNA, 112 bp, Homo sapiens
accgctgagtatactctggttagaaatgagtcgcataagaatgcgatttccgtgtaaaagatctttaatattcaacagactacacttttaaggtaaaagtatgctcagcgct

SEQ ID NO: 611257 - DNA, 277 bp, Homo sapiens
ccagtgaactaacccagtagcctaccttcacagatattgtaatttcttatagatggattgtggagagagatcatgtgtagatgaattcctacatggtcccagtgttttaagtatagtagtcttctgccactctaatattgaataagaagtgctagtggaaaaattgggtgatcgattacttatttccactctgagatcaggtctcatttaccttgaatttgatttgttcttcctcagactcagtgtttctgatgcaggtggtgttaggtctacctgg

SEQ ID NO: 611258 - DNA, 672 bp, Homo sapiens
tctttctccctttctttctctttggtcctttttttctgctttcttatttcggtctgcttttgctgtcttcacttgacgccctctcgcctgttccttttctcgttgtcctttttgtgctgttccctccatgctcgtgttttcatggtgtatgcttggtctccttcttgtttgacggtcatgctctcgcttttgtccgggtctttctccttctctctgtccttgcgtgtttctgtttgctcttttcgttttgcccaatatgcctgttttggtatctctgttagttttgtgtctgctgtcatttagtttctctggtgtcatctgtactgttttgtcccttggtatctcttccttttgcttgtccgctttctctccgcacagccttcaaggccaccctctacggtcatatatatcactcaggcgtagtaagaaaagacacatagttttatcagaatctttgtaataaaatggaagtgtgccaacgaagaattctgataagaactacctctaggtgtgcctccacgctggccctagctattcccattgctgttccattgcctgagacaaactgcgtaaggctccctttctgttattgaagttttatgaatggtaagtcaggctttgctgttcgtcacagtgtcaatatccagtcaggtaccatcacctggtcccatt

SEQ ID NO: 611259 - DNA, 883 bp, Homo sapiens
  misc_feature (87)..(87): n is a, c, g, or t
  misc_feature (90)..(90): n is a, c, g, or t
  misc_feature (108)..(108): n is a, c, g, or t
  misc_feature (122)..(122): n is a, c, g, or t
  misc_feature (125)..(125): n is a, c, g, or t
  misc_feature (127)..(128): n is a, c, g, or t
  misc_feature (157)..(157): n is a, c, g, or t
  misc_feature (221)..(221): n is a, c, g, or t
  misc_feature (780)..(780): n is a, c, g, or t
cgaccgacgtagaacgtaggtcttacatacgtccgctcggcggccgcccggggatttccgaagaaatacacaatattccagatttgnagnactggtaaaaatattcgnggacccaggccttnggnannacctgacctcctccaagaaagaaatccanaaagccttaagactaagacaacttgactctgctgattcttttttccttttttttttttttaaanaaaaatattattaactggacttcctaatatatacttctatcaaggggaaaggaaattccaggcccatggaaacttggatatgggtaatttgatgacaaataatcttcactaaaggtcatgtacaggtttttatacttgccagctattgcatctgtggatgaaagtaacaatgttggccacgtatattctacacctcaaaataaaaaatgtgaatactgctccaaagaaaaaaaagaacagcacgaccaacacggacaaaatcgcaacaccgaaaaaaaagcaagaaggaaagaatgggcctccctggacctcaagggaggagctttgcgccccctttccttttggggggggataaagacacagaccccgctctctcccctcacggaaacaggaacaacagccagcggataggagtgctactcgtccataaaggggagagatctgagctgcacgaccaaaatcagaggcagtaccctctcacaacaccttgccagctccacccttaacgaaggcgctaccctaccacatctttgcgccacgaggagcggcagatttggcncggtgggtcgcatcacgcagagcgagccgaatcaatgaacgcgatctccgatgtagggagtgttccctccaccgctaagtgatgtataatagctccctcgtcg

SEQ ID NO: 611260 - DNA, 792 bp, Homo sapiens
ggaagtgggggtggctatggtggggacagaggcggcggcccctcgacgtggcgcccttccctccgcttctctgtgctccccgacgccccatattggcgtctggccccggaacacgaacatataatcacgaaaacatatcacctacaatcacaaaaagaagagaaaaaaaaaaagaaagaaaagagaaaaaaaaaaaaaagaaaaaaaaaaaagaaaaaaaaaaaaaaaaaaaaaaaaaaaaacaaagaaaaaaaaaaaaaaaaaaaaaaaaaaaaacaaaaaaaaagaaaaaaaaaaaaaaaaagaaagaaaaaaaaagaaaaaaaaaacaaaaaagaaaaaaaaaaaaaagaaaaaaaaacaaaaaaaaaaaacaaaaaagagaagaaaaacaacaagagaagagaaaagagagaagaaaaagaaaaaaaagagagaaagaaaaaaacaaaagaaaaaaaagaaagaaaaaagaaaaaagaaaaaaaaaaaaacaaaacgaaaaaaaacaaaagaacaagaaaaacaagaaaaagagaagaaaaaaaagagaagaccaaaaaaaaagagaaaggaaaaaaaaaaacgagagagaaagaagaaaaaaaaggaagaaaaacaaagacgaaaaagaagaaaacacagaaaagaaaaagaaagagaagagaaaacagaagagaaaagaaaaagagaagaaagggacagagaaaaagaagaaacgaaagagagaagagacaagaaaagaaaagaagaacagaagaagagaagagagaaaagagaagagcacgctat

SEQ ID NO: 611261 - DNA, 575 bp, Homo sapiens
  misc_feature (18)..(18): n is a, c, g, or t
  misc_feature (29)..(29): n is a, c, g, or t
  misc_feature (32)..(32): n is a, c, g, or t
  misc_feature (34)..(34): n is a, c, g, or t
  misc_feature (37)..(37): n is a, c, g, or t
  misc_feature (44)..(45): n is a, c, g, or t
  misc_feature (48)..(48): n is a, c, g, or t
  misc_feature (55)..(55): n is a, c, g, or t
  misc_feature (57)..(57): n is a, c, g, or t
  misc_feature (61)..(61): n is a, c, g, or t
  misc_feature (76)..(76): n is a, c, g, or t
  misc_feature (89)..(89): n is a, c, g, or t
  misc_feature (92)..(92): n is a, c, g, or t
  misc_feature (108)..(109): n is a, c, g, or t
  misc_feature (117)..(117): n is a, c, g, or t
  misc_feature (120)..(120): n is a, c, g, or t
  misc_feature (124)..(124): n is a, c, g, or t
  misc_feature (138)..(139): n is a, c, g, or t
  misc_feature (158)..(158): n is a, c, g, or t
  misc_feature (166)..(166): n is a, c, g, or t
  misc_feature (178)..(178): n is a, c, g, or t
  misc_feature (185)..(185): n is a, c, g, or t
  misc_feature (188)..(188): n is a, c, g, or t
  misc_feature (195)..(195): n is a, c, g, or t
  misc_feature (198)..(199): n is a, c, g, or t
  misc_feature (220)..(220): n is a, c, g, or t
  misc_feature (223)..(224): n is a, c, g, or t
  misc_feature (232)..(232): n is a, c, g, or t
  misc_feature (238)..(238): n is a, c, g, or t
  misc_feature (240)..(240): n is a, c, g, or t
  misc_feature (248)..(248): n is a, c, g, or t
  misc_feature (269)..(270): n is a, c, g, or t
  misc_feature (272)..(272): n is a, c, g, or t
  misc_feature (282)..(282): n is a, c, g, or t
  misc_feature (285)..(287): n is a, c, g, or t
  misc_feature (290)..(290): n is a, c, g, or t
  misc_feature (297)..(297): n is a, c, g, or t
  misc_feature (302)..(302): n is a, c, g, or t
  misc_feature (307)..(307): n is a, c, g, or t
  misc_feature (314)..(314): n is a, c, g, or t
  misc_feature (320)..(320): n is a, c, g, or t
  misc_feature (334)..(334): n is a, c, g, or t
  misc_feature (337)..(337): n is a, c, g, or t
  misc_feature (342)..(342): n is a, c, g, or t
  misc_feature (345)..(345): n is a, c, g, or t
  misc_feature (351)..(351): n is a, c, g, or t
  misc_feature (354)..(354): n is a, c, g, or t
  misc_feature (377)..(377): n is a, c, g, or t
  misc_feature (387)..(387): n is a, c, g, or t
  misc_feature (391)..(391): n is a, c, g, or t
  misc_feature (397)..(397): n is a, c, g, or t
  misc_feature (401)..(401): n is a, c, g, or t
  misc_feature (405)..(405): n is a, c, g, or t
  misc_feature (410)..(410): n is a, c, g, or t
  misc_feature (417)..(417): n is a, c, g, or t
  misc_feature (429)..(429): n is a, c, g, or t
  misc_feature (431)..(431): n is a, c, g, or t
  misc_feature (434)..(434): n is a, c, g, or t
  misc_feature (442)..(442): n is a, c, g, or t
  misc_feature (445)..(445): n is a, c, g, or t
  misc_feature (447)..(447): n is a, c, g, or t
  misc_feature (455)..(455): n is a, c, g, or t
  misc_feature (460)..(460): n is a, c, g, or t
  misc_feature (466)..(466): n is a, c, g, or t
  misc_feature (470)..(470): n is a, c, g, or t
  misc_feature (472)..(472): n is a, c, g, or t
  misc_feature (474)..(474): n is a, c, g, or t
  misc_feature (476)..(476): n is a, c, g, or t
  misc_feature (478)..(478): n is a, c, g, or t
  misc_feature (497)..(497): n is a, c, g, or t
  misc_feature (501)..(501): n is a, c, g, or t
  misc_feature (503)..(503): n is a, c, g, or t
  misc_feature (507)..(508): n is a, c, g, or t
  misc_feature (510)..(510): n is a, c, g, or t
  misc_feature (525)..(525): n is a, c, g, or t
  misc_feature (528)..(528): n is a, c, g, or t
gccatgtggctgcataangaagatattgncananagntgccctnnaanatcttcncnaatnttttcgataggagcntctctaatgatanggnctacctcattgcgtcnntgatgtgntgnccanaaagcacaattgcnngtgcacttgcagtttcctnctttctanctcttataagcnaccccanganttagcanttnnggggggtacatcagtgctggncanngttgcccnagtatncnatcaagcngcagtgtgcaacctctatttnncntttgccattntcnnnttnaggaatntcctnggggnactaaanactttngcagggtttttccnagntttgnttntcccgnttngcccaaagccgagcccctgcctnacacagctgncaangaatgngaanctgncattntactctnaaagatggtgtntntgngcataagnttngnctgaaaanctttntccatncccntncntnanacaaataccatgtcatganaacncncccnncnaaagagatttatagncanaattattttattgtaaagattttaactaaagtttttccttttctctc

SEQ ID NO: 611262 - DNA, 330 bp, Homo sapiens
  misc_feature (12)..(12): n is a, c, g, or t
gacaccattgtntggactccagctatgctcaagctttctttcttggccccatacctagaaggaacctgactatttgtgcatttgtgcaatggaagcacagccaggcaccaccattcatcggtggcagctactcaagttgcaggcataatgcctaaaaggagatcatgagcttctccagacaggctagccctgcttaacccagacttatagagtaacaataaatgtcacagagggtagcccattaagctactgatacctagaagtgggatcactttcctccagggtggcagagacttctgggttgctgggagacaaaggtgacaggcattt

SEQ ID NO: 611263 - DNA, 199 bp, Homo sapiens
ttagcactttgagaggctgaggcaagagaactgcttgtgtacaggagtatgatactagcctgggccacatggcaaaaccctgtctctacaaaaaaataaaattagcctggcatggtggtgagcacctgtggtaccagatgcttgagaggctgaggtgggcggatctctggagccagggagtttgaggctgcagatgagc

SEQ ID NO: 611264 - DNA, 798 bp, Homo sapiens
gtgttccctgtgcttatgtctcgccgtcgttgcctgccccgtccctgccttcgtgccccccgcctatgtgaccctgcccagcctgctctccctgtcctcctccccttaaccagccccacggtttcttgcctgtcaggtggccctggtggtgacctggtgctggatagatagcctgtactggagcagctggagcttgagctgcaagttgacctggtgcatgtgctagctccagtgtatgtgtcactgtgaatgcagtgccaaccgtgcaggtggaacacaggcagacccctggcatgtgctgtatgtgccccctgaaccctgagagtgcacttaatcagagcacataatcccactggaactgtgacaccttgaatgtgggtgcttgagcttgggccatcatgtgtagaaggactgacttggaactgcaatcattcttgaatgctgaatacctaaataaccccaattccaacgggtacctgctgagacaaaactattcccacaacaggcgatgaagctgattatacaagagacgcccagtagcaaggagtccagaatgacaagaagatgcgaacccccgcaaacgcacacccccatgggaaaagaagaacgcaacaggtggaacccctaccaagttggttagccaccccaagatggttggcctgaggcattgccaatagggagtttccaaaacaatttggcccaaatgcacgcaacccggagtgccattggcaacacccctagcacacaatcatggggcccattgggaccatacagcagggatgacatcataggaaaact

SEQ ID NO: 611265 - DNA, 314 bp, Homo sapiens
gctcatagaggatcctctctgtctcgcctgacaggtacgcatactagactctacatgtacaaaatcgaatacaggatgatgggagtgacaagacaggtcatctatgcacaaacacggaaatacttcattaccccaactcaacattgaaactgcttacagatatgctgaaattgtctcaatttggctatcagattcggcaggttttcctcacattcgtgtaagaaaaaaaaaccctgacattcgccatcaattatttctccagagactggggagtgggccctcaaaagctacagacaagatgcagtgactataag

SEQ ID NO: 611266 - DNA, 297 bp, Homo sapiens
  misc_feature (3)..(3): n is a, c, g, or t
  misc_feature (17)..(18): n is a, c, g, or t
  misc_feature (26)..(26): n is a, c, g, or t
  misc_feature (37)..(37): n is a, c, g, or t
  misc_feature (56)..(58): n is a, c, g, or t
  misc_feature (60)..(60): n is a, c, g, or t
  misc_feature (80)..(81): n is a, c, g, or t
  misc_feature (90)..(91): n is a, c, g, or t
  misc_feature (95)..(95): n is a, c, g, or t
  misc_feature (108)..(109): n is a, c, g, or t
  misc_feature (120)..(120): n is a, c, g, or t
  misc_feature (124)..(124): n is a, c, g, or t
  misc_feature (134)..(134): n is a, c, g, or t
  misc_feature (139)..(139): n is a, c, g, or t
  misc_feature (145)..(145): n is a, c, g, or t
  misc_feature (148)..(148): n is a, c, g, or t
  misc_feature (169)..(169): n is a, c, g, or t
  misc_feature (180)..(180): n is a, c, g, or t
  misc_feature (183)..(185): n is a, c, g, or t
  misc_feature (193)..(194): n is a, c, g, or t
  misc_feature (220)..(221): n is a, c, g, or t
  misc_feature (230)..(230): n is a, c, g, or t
  misc_feature (272)..(272): n is a, c, g, or t
  misc_feature (290)..(290): n is a, c, g, or t
gcncgagaatttgcccnnagaacccnctaaatccccntgtaaatttaactgttagnnngnagaggaacagctctttggannctaggaaanngccntgtagagagagtnnaaaatttaacncccntagtaggccnaaaancagccncgnattaagaaagcgttcaagctnaacacccactnccnnnaaaatccnnaacatataactgaactcctcacaccnnattggaccnatctatcaccctatagaagaactaatgttagtataagtaacntgaaaacattctcctccncataccc

SEQ ID NO: 611267 - DNA, 692 bp, Homo sapiens
tcaatgcaggttgtcgatcgagtactcagcacagaatgtggatgtcatcctccgaaaacatagtgatcagcgaatgagggaaaaagcatacattcaacttcttgttcacactattgatgagttaattgataagctctgcaagtatatgttaagtagtatcacatgttgtggttggtatgtaaactaatgtatccagaagattggaagagggataagaaatgagagtatcctgatactgtataggtatgtccctttaccgtctattttgtaaatataagatgagtattatttaatgatgtatttgcataagtagtgcaaatctgtgagagaaggaccagctgctgtttagagaaattttctccttccttctgtccttgatggttctccattaaagtatttccttgtttttaattcaagaaaagtttacctttcttatgcttatgttagactatgccagctcttaatgggcatccttttctaacttaggattattcaataacagcgtgaatattgtgttccctattatagacagaaatttgtaacattacttctgagtttgaacaaatgcaagttcacaaaatatagggaaatttttatcgaagtaaattttgaaatgatggagaaatttgcagaagcatcagtaaagttcacgaataaggataatactttatataatgtctaacagtatatat

SEQ ID NO: 611268 - DNA, 183 bp, Homo sapiens
tttgccaggtcatttttcctcttttttttttaattgggtaggccccccaatataaaaccagtcaatatttgccaatgtggaattcccaaattaaaaaagaatcctatgaatgtattcatattttttttatattgaataaccaatgtaacatagataccaatataaataaaagtggtatgccca

SEQ ID NO: 611269 - DNA, 165 bp, Homo sapiens
gcactagcctacagaggagcgcgacagatatcgggatagaacctggagagcctggattggtcggtttccaggacctacccggactgccctgggctgtgggacagatggttcagttgatgctcaggtataccaggatcatctggaccccctggaccaaaaggacag

SEQ ID NO: 611270 - DNA, 141 bp, Homo sapiens
gaagcactggtgtgagtgactcgagcactgggatactgaaagtgtcactgtcctatagacattaacggtctgatttgaatcttttcgaagggactgaataagttggcgaaacaacatgctttagtggtcatatgactacac

SEQ ID NO: 611271 - DNA, 768 bp, Homo sapiens
  misc_feature (30)..(31): n is a, c, g, or t
ccggtacctggaacttcgggtctcggcaannttaataataagatcgaagcttcaggactgagtttagctgtggtggaatgtgaagagatgttgccagttgataacctttaaagattttttaaaattagggggaagagataaattagaaaaataaagatttccttcaagttttataccaaaagtctcactgggctatttttgtattttaaataaattacatgatattttgctggaaaataattttttctcctatcccatcctctccaagcaacttctactcacattataagactcactgtcagttttaatctcccctagtaaaccttttggcctatggtagaagtgactacttctactctgcctcccctgtaccatatatttatttctatcatatttctaatagcttgtggtacctatttatgtttatgtcctactgaaatatatccattaaggctagggattatgttttagtggtctttgtatctcctagtgctcagtaaattgcctggcacatacttaatacatgtttgataaaactttttctggtgccaagcgtggtggcttttgcctgtaatcccagcaccctgggaggcggaggtgggaggactgcttgaagccgggaaggttcaagacaaacctgggcaacaaagcgagaccccctctctacaaaaaaaactttaaaaattagccaggtatggtggcatgcatctgtagtcctagctactcagaggttgaagcaggaggatcactgagcccagggatcctcta

SEQ ID NO: 611272 - DNA, 265 bp, Homo sapiens
caccagtaatagactattaccgagggccatcaagttcatcactacatagttatcaagtgtaaaacgcacttgcctactaacccaattaccgacagacgcccctcttcctctgagtccgtcctaatttcagacattcctacttctcctatctctcccagtcctatctgttggcatcactatattaactaaacagaactgtagaggctactacatgagccacctcgttctttccgcagccctgcacggaacgatggagtagccccga

SEQ ID NO: 611273 - DNA, 456 bp, Homo sapiens
acgagttagtcaggatgttctcaatctcctgtacctcctgatctgctatgcgtttgtgctcccaaagtgctgtgattacaggcatgaggcgctgactggccaaaaattttagtctttctaatagatgtgtagtagtagctcattgtggtctttatttgtatttctctaattattaatgatttttaatatcttttgatgtgcttacttgctgcctgtatgtcttctttagtgaagtacatgttcaaatcttttgcccatatttttgaattaattttcttttattgagtttcaaaagtgttttatatattcttgatacaagtcttttgtgacatacgtgatttgtaagtatttccttacagtctgtggcttgtattcattttttttaacattgattctcacagagtaaaacgtttcccattttggtggcatcgataaacacggggtcctctagagtcg

SEQ ID NO: 611274 - DNA, 261 bp, Homo sapiens
  misc_feature (212)..(212): n is a, c, g, or t
ttccccccttccctttcttttaatagaaatgtttcttggtgaggtgcagtggcttacacctgtaatcctagaactttgggagaccgaggcaggtggatcccttgaccccaggagttcaagaccactctgggcaacatagtgagactccatcactatttaaaaatagaaaaatttcctaggcgtgatggcatgaacctgtagtcccagctacnttaggggactaaggtggaaggatcatctgagcccaggaaggtcaaggct

SEQ ID NO: 611275 - DNA, 422 bp, Homo sapiens
  misc_feature (234)..(234): n is a, c, g, or t
atgagggcatgtgaagagacaccattaaggcttgtgtgagcaacatggctgtttatttcacctgggtgcaggcgggctgagtccgaaaagagagtcagcaaagggtggtggattatcattagttcttacaggtttgggatagggggtgaagagccatgttttgcaggcaggggtggatctcacaaagtacattctcaagggtggggagaattacaaagaaccttcttaagggtnggggagattacaaagtaccttcttaagggtgggggagattacaaagtacattgaagagttagggtggggcagaaacaaatcacaatggtggaatgtcatcagttaaggctatttttacttcttgtgtggatcttcagttacttcaggccatctggatgtatacgtgcaagtcacatggccactcaata

SEQ ID NO: 611276 - DNA, 246 bp, Homo sapiens
cgacaaagtgcggaagataacgtttggaacatacgtcgtgtgttgccagtagcgcatcgccgagcgttctgcttcgtcgacggtcagcatcagataaggctcgctcgccagatcggccagcttgatactatccttgcgcagaagcggatgattggcgcacgtccacaagcggcgtggcgagcgtagtaacagccgggagcggatggagtcccggtcatgcagattcgagacgagtatgattgccgc

SEQ ID NO: 611277 - DNA, 555 bp, Homo sapiens
  misc_feature (421)..(421): n is a, c, g, or t
ggacccctcatggatactcacataagaaaatcatactgtagataacctacaaatgtaaagattgtgacaaagcctttaaacggttctcacacctgaataaacataagaaaattcatacttgagagaaatcctacaaatgtaaagaatgtggcaaacctttggatgatccacaaaccttaatgaacatgagaaaatttatactgtagagaaaccctggagatgtgaagaacgtggcaaagttctttacctcattctcaaaccttgataaacataagagaattcataccggagagaaactgtacaaatgtgaagaatatggcaaagcctgtgaatggtccacaaacctgaatgagcagaagaaattcatagtgcagataaaccctacaaatgtaaagaatgtgacaaagcctttaaacaattntcgctcctgagtcaacataagaaaattcatactgtagataaaccctacaaacgtaaagattgtgacaaagcctttaaacggttctcacacctgaataaacataagaaaatcatacttgaggtaatccgtgaggg

SEQ ID NO: 611278 - DNA, 143 bp, Homo sapiens
aagaagccatcaggatcgcagcgaaaaattgtgagctgcaagctaggctgcaggccaggaagaacagcatcaggaagtcagaaggcaaaagagcagacatagagaagctgaaccaggctgtgcttcgctacagatgaaaggag

SEQ ID NO: 611279 - DNA, 764 bp, Homo sapiens
gttatagccatttcatagaagaaactgaggtacacagaagttaactaacttgcccaggttcacttgacttaggaggtagttgaacagaagattaatccgtatatggctaacatgaggcttctgtcttctgagcctggtaagaagctggaagaatgttaagtaattacaaattgttaattttggcagttttctccagtagataaaagcaaataaatttttgcagacctattcttataaagcatagttacatcaacaccttaaaaagtctacctgtagtttaatcagaaaaacattaggccttatcttatcagtttattaacgttattaactcatgacacatttagaaaacttttgtttcctgacattatatatatttattagcaaaataacattttatattttacaaaaatctttctctttgctttgtggaatactgatctgatatatgaagacttcaaggatgggtgtcgtatctagggtatatataaaggggttatgaacaggagccaaaattactgtggtgaataatatttaaaagtccaaatgtttactttttcttgtgttcttacagagataggcatttaccagaactaaacacgatgatcagattataaacttggtctttaaaactgagctactaaaaaatttccttgcctcatcaagctgccatgtagaaacaaagtcagagtgtcagaactaagtaagtacctggaaatggatttaactaggcagaaacgtatatacactatatacataacacctgt

SEQ ID NO: 611280 - DNA, 1475 bp, Homo sapiens
  misc_feature (199)..(199): n is a, c, g, or t
  misc_feature (418)..(418): n is a, c, g, or t
  misc_feature (1075)..(1075): n is a, c, g, or t
gcttactatcagacaatcttgaccaaaccatttacccagatataaagatataggcgatagaacttgaatgtctggcctcgagtagatatagtaccgcaatgggaaagatgtacataggattgagtacccaacgacattagatataggccatggactaaccccataatagcatgtcttgctactaggtgtaatctatccntagtaataatagcttctctgctataacggagagccagcagcttaagtacccccgcacaaccaggacgacgctatgcttaaggagacagcataaagacgagctcaggccgatctagtgctgaaccaaagacagtcagtgtgggacacagcagtttctcatcaggttgagtagtgccgaaccctagaccctatcacggagcacgtggaatgtcactcaccntgtggtgtgatctccaaggtcatagaaactcgttatgcttctaaactctctccaattatgaccacgactagaagcccaacgtacacatcgctcccctaatagtaaaaggtttgaaacacgtagtattcaaatacgcctatagaggcaccgagatatccagggttcgttgaagaaggacaacgttaagggttacgcaagaagaccgtctgatacatccatgcatggagttgacacagagagatgatctacacccatctcctattcagatcacggcgcgttcaaaacaggcgaaggaccctattccccaacatatgaccagaaaaaagggccgatggtcgaaaggccctacgaaacacgaaggaccccatcatggacctccttttagacaaacgaccatttggcccttccaacaccacttatctcatataggactttgccataaccgtccgctttcggcaattacccctaacaatgtggggaggtaactctcacacttgcgtttcttccaatagccgcgttactctcatgcaaagaggcaaaacgcttgaaaattgtttctaaaagtacttaccacacgtaaaaccattttgtacctcaaaccaattttcgtatcacgatacgcggaactagttatagcgccccttttgcgcgaatccnaagtgaattaataagaaacatcaacgtatggacatcccttgaacaacactttaaaaaccacaggcgcccaaaaacttcaattccttatgcgataacagacccaacactcccttaagattataaaccggtcacagtgtaagatcttccactccccacttacctaagttggttcccaatacccccaaaatcacaactaagggccactttggtctaccatttaacgtcgacaaaggatggttcaatgacctacagaacgtccaacaacagggaaacgctccatggagcaagacatcgtattaagccccccgggccttgattgaaaccgaagcaccagccattccacacctacttgaaagacattccgaaccaactggagcttccaggaagggacgaccccgga

SEQ ID NO: 611281 - DNA, 492 bp, Homo sapiens
accggaacgctgactggttctaattttaacagggaaggaaaaagttacagctttttgcaccatgaagttgaggcagagatggagacgcctcattcccacctctctggaacaggaaagatgattggggagggagcacaggtcagcgtgggaagagggtcatggtggacatgggggtggggtggtctccccacctcctcacattatgcctacaagaacacagacacatgcaggtgcctttgcagaaacaaagccagggttcttcaagtcacaaagggaagggcaggaacaactcttgcctctcagtcccacacaaggcagctgtctcacactttacaagctgtgagagacacatcagagccctgggcactgtcactgcttgcagcctgagagtagctccctccttttctatctgagctcttcctcctccacatcacagcagcgaccacagctccagtgatcacagctccaaagagaaccagtcagcattaacca

SEQ ID NO: 611282 - DNA, 117 bp, Homo sapiens
gcgtatatcacatgatgagcaagaaggatataattcctacgaccttctcagccgatgaacagttggaataggttgtacgcggtaactaagattagtatggtacttaggaagatgagg

SEQ ID NO: 611283 - DNA, 883 bp, Homo sapiens
ttcgttgtggacggagctggtttgtgcgactcgtcgattgcggttctacctcgggctgcggacacgcggcgcggaggtctggagtagactggctcaaggaatgcaggggtgacgatagaatagggagaaatggccacgagaccaagctagactggtcgctaaggtccacgcggtggcgaaaggcccccgtgaacaggtgggcgcgaacagccgtcgaggaaaggctgctgccactcctactcggcagggagtggaattaaggcctccattgactaaagaggctccggggcaccggtgtgcctgctatgcgatgagcattacgatcgttgatcgagaatgtgcggaacggagcctgtgtcagcccggaagggtgggcctgccagtaaggtagagcgagggataatgcgggcaggattttgcataacgctgaactggtagggttatcaggaagggcaagaccccttgggcggtagccagccggcccggagagctacttcggaaaggcggaattaacgctgggttgcgggtctgtgcaagaaggataaccaaaacactgttgtggcaaatcgcagtggcgaacagaggagggtcaccagtcattgggccaaaagggaacgcttcggatggttatgagatacagacacagtgataccgggcgaaaggcggaagaggctgcaagggtgaacggcaggtcctaggatggagagttcctgtaggtcaaaattaacgggcaaaaaataacttcgcgccggaaatgccgcgaagtttttgggtgacgaaaatgggtccataattgttgtgcgcattcggcgttcatgtcctgccatctttgactccgggatcaattgcaaaccttgctgttccccgaacctccggatgtcgg

SEQ ID NO: 611284 - DNA, 233 bp, Homo sapiens
tggcagcgaagcatatcgtgagtcttttgtccctcccactgcagtcctcggtgtcagacatcatctctgccacagcatactgacgagcatatccctccgattattacttcaggcaccctaagtacatgatgagtcgcggccttcactgtcgttactacacagcaagcagattcagtagtcccatgttcctttccatgatagttggggaggcggggtgggaaatatagcgctca

SEQ ID NO: 611285 - DNA, 244 bp, Homo sapiens
caaatcccccgggggggggggcccggggtttttaaaacccccggggggttgggggggggggtttaaaatttttaaaataaaaaacccccttttaaaagggtttgggggggggggcggttttttttttgggggaaaaagggtttttgggcccaaaaggggtaaaagttttttaaagggggggtttggttttttaaaatggggggggtttcccccccccccatttttttaccccccccggggggga

SEQ ID NO: 611286 - DNA, 299 bp, Homo sapiens
taggcgggaggtcaaagtggaatatgagccaatagaggcttcttaatagacaaaatggggatgttagcatgatgcaagggaaatgaacagtatcgcaatgtccggtatacaaaataacattaattcaaggtagatccacttcacactagtttaaaatatgtgcattcacttgtatgggtcagtgtatcagtctttttggaaagatgtgctctgtaaatgtagcttttttttttttttcaacaaccttgcaagtcaaaaatacccgggcacaagtgccgagcatcttacaacaagggcca

SEQ ID NO: 611287 - DNA, 344 bp, Homo sapiens
tggtaagtcagggatttttccattatgtgccaggtgtggggcctagcctgggacccaccccagacaaagtgcagatgagggcagaccctttcccgcatggctagggtgtggctctcccacatgtccccaggccttagctagaatctaatgtccccaagctaggtaaattggacaattttcaaaagtcaaataagcagtttatgaccttaaagcattgagtaaacttcatatcctacctgcataatttagaccaaatgtctttattttaccaataatctttaaaactttttatttcccaaagattacttcagtcacatgagctaaataaaagttattacactatt

SEQ ID NO: 611288 - DNA, 723 bp, Homo sapiens
  misc_feature (20)..(24): n is a, c, g, or t
  misc_feature (26)..(27): n is a, c, g, or t
  misc_feature (30)..(30): n is a, c, g, or t
  misc_feature (85)..(85): n is a, c, g, or t
  misc_feature (258)..(258): n is a, c, g, or t
  misc_feature (270)..(270): n is a, c, g, or t
  misc_feature (273)..(273): n is a, c, g, or t
  misc_feature (275)..(275): n is a, c, g, or t
  misc_feature (280)..(280): n is a, c, g, or t
  misc_feature (294)..(294): n is a, c, g, or t
  misc_feature (307)..(307): n is a, c, g, or t
  misc_feature (310)..(310): n is a, c, g, or t
  misc_feature (324)..(324): n is a, c, g, or t
  misc_feature (327)..(327): n is a, c, g, or t
  misc_feature (342)..(342): n is a, c, g, or t
  misc_feature (356)..(356): n is a, c, g, or t
aacatttttttttggagctnnnnncnnggnataagccagcttaatatttaacaatcacttatatgtgtgtcgaagagttggtttngttcgtcatgtatgggtacaagcagatacagtataaactcacaaacacagatttgaaaataatgcacatatggtgttcaaattggaacctttctcatggattttagtggtgtgggccaatatggtgtttacattatataattcctgctgtggcaagtaaagcacacttttttnttctcctaaaangtntntcccngtgtatcctattanggatactggtttngtnaattatgattcttnatnttctctccttttttnaggatatagcagtnatgctattactgaattggaatttcctttttctggaaatggtaatcattggatggctggattggatagaatttaagtactggtaacacagggcttatagtcatcactggtgagagatttgagaaaaaaggcttagagggacctattaagtgtgcctaacaggactttggtgcggccacggggtaatcctgggggtttccctcactttaatacacggtatttcagacctggtactcctatcatggcgttcagcagtctttgggagtgaccagcaactttgactgttggccctaagatttcatgtgaatgccagcaacgtgcaagaggttccgtcggtccactacaataattctctgactactgtgcgcc

SEQ ID NO: 611289 - DNA, 248 bp, Homo sapiens
taacatcatgttaaagtagcagaaaccaagtacagcagaaaatctggacatgtcgtagctaaactcaccttggtaggccacattttctgcggaccccaaagccgcattctgatacattctgtttcctcctgggatgcacattcaccccagctgactctccccctccttcccggggctcccttactgggcgccttcagaaatttggagctctcatagcaccgtggtcctctctctgaagtgtatcgtta

SEQ ID NO: 611290 - DNA, 244 bp, Homo sapiens
gatccgaaccgaagaacaggtagtttttgcggcccagactgaccatccgcaacgcattttcagcgatgttattgtccgcctcagcccagccatcatctgcatagtacgtcagcgccggccactggttcaggggcgtatgcgaacgctttcgccagttctgagtgtcgcgacagggttttcatcttttcacgcagccagctttccagggatttagcagcggtttcgttttcaactgagcttcggg

SEQ ID NO: 611291 - DNA, 123 bp, Homo sapiens
ttatttccataaaacctgttgatgctgttgttggcgatcccgtttccatcgtggtcggcttggtggtgatctacctatgctacctgctcgagcagcgcatcctatacggtggcctggatggaa

SEQ ID NO: 611292 - DNA, 443 bp, Homo sapiens
cttacatagtgttataatccatactctcataatgccactgtcccaaatttggccattgggagcttcttggaaggtcatcctctgtctttctgacatggcactaagggtctttcaacacctcctcgctttctgacacaagcatggcaagctaaccttgtatgtttcctgtcccagacctcaaatcagccatttctccaaggagccctgaaacctttcactgggaaatggcatttaaaaaccaagctcggagaacacaatgcatctcggttaattaagtatcactgcttgtaggctctttggacagagcaaggatattttaaataggtaaatcacaagttcatggtgacaccctgaattcaaatccaacacggaggcttcttcctctgctccctcatctctccctcatctcacattagcatcgccgttccaccacaaggaaaacc

SEQ ID NO: 611293 - DNA, 547 bp, Homo sapiens
atcatctcaggatcggattctagtttcagagtgtttctgggccacggatccgggccccgtggcctcctctgcacctgaccacactccctactcagggctagtctgttcttcccggacatcttactggtagaccgctgcaggagcagggctagggtaggggcagaggccaggagagggacctaggtagtagtacacctgcccaccacctggctcatccctacaggcccaccctgaccctacattacataggttacgtcagcctactgtggactgttgagcaaagcattatctcctattctgggcctcatttgcactagatgggcctgtggtcccaaagtaggtcagtaggttggggttgctgacaccccattggagtgcagactttgggacagatgagctggcatctgatactgtacactgccctctccctagactgggggctatgtgcactccagacccacatagccaggctcagtgcccatgaggtatggagacacaccataggaccaccaggagctaggaggcaccagaccaactccacctggaa

SEQ ID NO: 611294 - DNA, 967 bp, Homo sapiens
gactgaagataccttcatcgctgagctgttttgttggggctagtgcactgggcagatcaagactggtgccccttgccgatctgatgcgcttggcacaagtactaaccagctcctcagaattgaatgaggagctgggcagcaaggctaagtttgccggcaggaacttacagaaaccccttggccaagataagctgtgggcagagcaagcccattcggtcacctagttaggactacacagaccacctcaccctacgtgtcagctacaggcagctcgaggcccccgagcaaccacttgcaggagtcccatgctagttaagcgcccaaacgcctgtgagagttcagtaaaccgactttccttaacgaaaatatctaacaagaaagccaaagctccctagagaagaccactgataagagcacgatacttacgctattagaccagtacctgtgttacacttggagaccaaagtacaattcggtatctcgcatacagcacctcaacgtattactcatagcaaacagatgtgctaagcagcgctcaatgtagacagcacatcagttgattcaaatctcacgagggatgggcccacacatgagcctacgaataccccatgggtggtgtaataggttgcatcacagaagtaaacaaacgacctacagagtgaaccccaaaggaagaaacataaaagcaaaacacaaacgacagcgaaaacaccacacaacgacagaccccacaccggcaccagacgcgaaaagaggaggagcgaggaggagaatacatcaagataacaagaaaaaaagcaccacagagtttaacaatgaccgtgcatactaaagcacagcgccactgtactgcacaccacacacggcacagaaaccccgcgaaaccacccacacatcactacggcgaccatcaaacatttagcgaaccgagcgcgataaaccccagaggacatccgacactgacgag

SEQ ID NO: 611295 - DNA, 177 bp, Homo sapiens
gtcacccatccatcaagtatacttcaaaggaaatttaactaagcactcaactcacagtttactgctaaatccaacttcgaccctaaagtttcataagggctatcgtagttttctgaggtagaaaatgtagcccaattcttgccacctcataggctacaccttgacctaacgtcatta

SEQ ID NO: 611296 - DNA, 720 bp, Homo sapiens
  misc_feature (304)..(304): n is a, c, g, or t
ttaggctaggtagaggctgggtgtttaatcggcgaggctgtcgcggggttgagggaaggggcgtgcccggtgcagcccaggtgctcgcgtgctggctcatggccctggtcacagtgagccgttcgcccccgggcagcggcgcctccacgcccgtggggccctggaattcctgagagaggggaggggacagccctccccgccctcacctgccctggggctgctctctcggcaggaccaggcggtccagcgaaggagtcgactccagcgaagagctttgcggtgctccgtggggctgtcctgggantgcaggatggaggggacaatgatgatgcagcagaggccagttctgagccaacagagaaggccccgagtgaggaggagctccacgggggaacccagacagactttcggtgcaaggatcccagagtccccagaagcaggaggagcagaggcagcaactgcaacctcatggtacaggcgtgctgaggccgcagggatgacatccgacttggaagcccaagctggaggcacccccgggctccccgggatccggataccttgcttggtagtttctacacgagaagggagaaggtctgagcccaggatgagacggtcctcctgggacgtggatttccctgacagcaggttcgagcagggagaggaaaggaggggcaaagaggggcttcacgtgagtctggtggcaaagcggatcttcaagcc

SEQ ID NO: 611297 - DNA, 296 bp, Homo sapiens
gctggaggaggaacttcgaaccatggaccaagccctcaagtccctgatggcctcagaggaggagtaaatttggggacctagaggaggagctgaaaattgttacaacaacttgaaatccctggaggccaggcggacaagtattcaccaaagaagataaatatgaagaggagatcaaactctttgaggagacgctaagagagcgcttagacccgcgcagatgtacacccacatgtctgtggactagattgagagacatcactatctcgagagtccttggcagatcacacggagagagg

SEQ ID NO: 611298 - DNA, 646 bp, Homo sapiens
ataatggtagcataaaccatctgcagttctaggaatactaatatgatcgctcacacctcatatcctccctactatgcctagaaggaataatactatcgcggtggcattataagctactctgcgataacccgtcaggacgccacgtccctcttagccaagtattgtgcctattgccatacgtagtctttgccggctgcgaaggcaggcggtggggcctagccctagtagtcgcaagctccgaagcacagtatgggcctaggaggtacggtaacaataagcgtagagacctagcgtccaaatggctgaaaacgtaagtcgtcccaacgaaatctagtagttactaccgactgagcgatgacgtttccagaagaagacacgataatttgggagtcgggagcacgaaggcaggcccaacgagggcctagatttatgtagggcatgtccatgtcgcgcttcataacgctaagtgttgttggggaagaggggcgaaaaattccaaaacgaaaacaaaggccctcaattttagggcgttggttttccgcccaaaaagcgtttatgatcccgtgcgcgaagccgcgcgcattaaacaaaacacgcgtcaccttcccttagaattaggattagaggttaagcctggaacttcctt

SEQ ID NO: 611299 - DNA, 165 bp, Homo sapiens
gtctgaccctgtgcacaggttactgacttacagtgttttgttgtagcgacgcgaaaagttcaactgctgcacccatgacaagtcagcatcattagggcatccgtcgtgtcccccagagacatctcatcaaaattgcaccacgtcaacaggagcttccgtcaccat

SEQ ID NO: 611300 - DNA, 110 bp, Homo sapiens
gtctatccccatcctccttcagcttagtcaacttgaagatgacaaggatgaagagctttatgatgatatacttcccattaatgaacagtaaatgtagtttttcttcctta

SEQ ID NO: 611301 - DNA, 384 bp, Homo sapiens
  misc_feature (16)..(16): n is a, c, g, or t
ctagcagcacctcgcnttacgttatgtaggaaaaaaaaaaagggggtgttctatggaaactgtactaaattttggcctacaatttaccttgttacatatggtagataaatggctaatactaatagccaaatagataccactaattgcttggttaaacaaaaccggaaaaaaacaaaacaaaacaaaaaaccatgagcaggggtgtcctaatgaagttatgacatctgtcctaaataagtttctcaaaatacttttactaactaaaagggtttggaagcaactgttaaattttaaaaattttggaaaactggcaaataaccctttggtccagaattaagtagatggttaaatgcaggacatcaactacataagggaaacggggac

SEQ ID NO: 611302 - DNA, 975 bp, Homo sapiens
  misc_feature (132)..(132): n is a, c, g, or t
  misc_feature (163)..(163): n is a, c, g, or t
  misc_feature (165)..(165): n is a, c, g, or t
  misc_feature (170)..(170): n is a, c, g, or t
  misc_feature (172)..(172): n is a, c, g, or t
  misc_feature (178)..(178): n is a, c, g, or t
  misc_feature (183)..(183): n is a, c, g, or t
  misc_feature (193)..(195): n is a, c, g, or t
  misc_feature (247)..(248): n is a, c, g, or t
  misc_feature (270)..(270): n is a, c, g, or t
  misc_feature (299)..(299): n is a, c, g, or t
  misc_feature (331)..(331): n is a, c, g, or t
  misc_feature (353)..(353): n is a, c, g, or t
  misc_feature (355)..(355): n is a, c, g, or t
  misc_feature (357)..(357): n is a, c, g, or t
  misc_feature (360)..(360): n is a, c, g, or t
  misc_feature (369)..(369): n is a, c, g, or t
  misc_feature (387)..(387): n is a, c, g, or t
  misc_feature (390)..(392): n is a, c, g, or t
  misc_feature (406)..(406): n is a, c, g, or t
  misc_feature (417)..(417): n is a, c, g, or t
  misc_feature (420)..(420): n is a, c, g, or t
  misc_feature (426)..(426): n is a, c, g, or t
  misc_feature (429)..(429): n is a, c, g, or t
  misc_feature (431)..(431): n is a, c, g, or t
  misc_feature (435)..(435): n is a, c, g, or t
  misc_feature (455)..(455): n is a, c, g, or t
  misc_feature (540)..(540): n is a, c, g, or t
  misc_feature (552)..(552): n is a, c, g, or t
  misc_feature (611)..(611): n is a, c, g, or t
  misc_feature (617)..(617): n is a, c, g, or t
  misc_feature (623)..(623): n is a, c, g, or t
  misc_feature (631)..(631): n is a, c, g, or t
  misc_feature (636)..(636): n is a, c, g, or t
  misc_feature (638)..(638): n is a, c, g, or t
  misc_feature (648)..(648): n is a, c, g, or t
  misc_feature (654)..(655): n is a, c, g, or t
  misc_feature (666)..(668): n is a, c, g, or t
  misc_feature (672)..(672): n is a, c, g, or t
  misc_feature (697)..(697): n is a, c, g, or t
  misc_feature (738)..(738): n is a, c, g, or t
  misc_feature (753)..(753): n is a, c, g, or t
  misc_feature (773)..(773): n is a, c, g, or t
  misc_feature (789)..(789): n is a, c, g, or t
  misc_feature (807)..(807): n is a, c, g, or t
  misc_feature (820)..(820): n is a, c, g, or t
  misc_feature (826)..(826): n is a, c, g, or t
  misc_feature (844)..(844): n is a, c, g, or t
  misc_feature (846)..(846): n is a, c, g, or t
  misc_feature (848)..(848): n is a, c, g, or t
  misc_feature (851)..(851): n is a, c, g, or t
  misc_feature (864)..(864): n is a, c, g, or t
  misc_feature (866)..(867): n is a, c, g, or t
  misc_feature (963)..(963): n is a, c, g, or t
ggagctcgcccaccgcccgcccagcagtggctgcaccatgcacgtgaacggcaaagtggcgctggtgaccggcgcggctcagggcataggcagagcctttgcagaggcgctgctgcttaagggcgccaaggnagcgctggtggattggaatcttgaagcaggngnacagngnaaagcngcccnggatgagcannngaacctcagaagactctgttcatccagtgcgatgtggctgaccagcaacaanngagagacacttttagaaaagtngtagaccactttggaagactggacatttnggtcaataatgcgggagtgaataatgagaaanactgggaaaaaactctgcaaantnanttnggttctgtnatcagtggaacctatctnggnnnggattacatgagtnagcaaaagggnggngaaggnggnancatnatcaatatggcagcgttagnagggagcgctgcgggatgcagacattggaaaaccgggcgggcagaagtgcggccggcttcagcagggagcgcccagggggacttnagaaccgcgggnttcccttttcccaagcagaaagagagaaagaacatggaggaggcatggcgactcttttnagaatnccagcncagtaatngcagntnttctgctcanatttcnntatagaacttnnnctcntgtttcacctaactgtaagcgagtntgtctgggaaatgcagtctagctgtgtgcctaagagaagantggatttcagagggnagctaatcatcttttccacngcatgcaatcctaaantatagtattttcagagtngtatgatttagtntcagcngatatcttatccttcaanantngcnttaaacctctgtntnntttttttggagcaactgagttaagtgactttactctttaaaactctaggaaaaatcatcaatgattcttgaatagtcaagtgaattgtgaggttangaagctgatcac

SEQ ID NO: 611303 - DNA, 1202 bp, Homo sapiens
tggactgacattgcgagtcgtcagggtctccggaggctttgtcttgctgctgtgtgccggctgtgttgatgtgctgctgtggctgtgtaactgcgggcaccctgggacccctgtatccaggtacctgggacggatggcgtcagagccgcgcaccgcggacgagcagggccaggcatcagtacccctgctgactctgagcatggccccacagactctccccatgctctgtcagtggagaccctggtgccaagagacccttctcccatttctccctatgggtgcctgaccttgaggggctgagaccatctagacgtgttgtattcaaggccacagcaggggagcagcacaggacctggcctttgaacgacattttccttctacgcgttacgccttcttggaattatctacagacgagggtgccttgttatggactcccgtgctccgagactttggtgccccggctgtccaaccttggcaaagccgtgatggttgtcgagctcccgaagggagcggttggtgggccttgcgaggaagcgccccccaagcccaggattgcaagttgcaaaaaaggcgcttgcacctgagaatttggaaaatttcgttgcctaccaacacttggcacaaggccaagcttgggacaaacctcttgggaccgatggggcttggccctggtaggacccaattgcgcggacatcaacccatattccatcacccccggagggtaaagaaatccaaggagataacccacagtatatggtaaccaacaagatgtccttgtgcgacagctaataaaggggacattgggcagcttggctggggtggcccagagtagacgtaacacgccatgggggctattgcgcatattttcattttcccgttacacaacaagtgttgccttcgttatacccaccggattgggcattgtcttcttttctcacaagacacgtgtgtgaacactgcagacagcactttgaacgcgccgtgcgccccaatccaaaagacgggccttggcgcccccaaaaaattgagccaccaagggttccatacaccgttccgaacggtcggaggaaccgaagtgagtctttgtccgctgtgcgacagtaattgcttggttgccaacggtaaacctttgcgcaatgcggcaatcggacgcagtatctatggcggtagagagtatcacggttaggtccttggacggttcc

SEQ ID NO: 611304 - DNA, 889 bp, Homo sapiens
  misc_feature (132)..(132): n is a, c, g, or t
  misc_feature (163)..(163): n is a, c, g, or t
  misc_feature (165)..(165): n is a, c, g, or t
  misc_feature (170)..(170): n is a, c, g, or t
  misc_feature (172)..(172): n is a, c, g, or t
  misc_feature (178)..(178): n is a, c, g, or t
  misc_feature (183)..(183): n is a, c, g, or t
  misc_feature (193)..(195): n is a, c, g, or t
  misc_feature (247)..(248): n is a, c, g, or t
  misc_feature (270)..(270): n is a, c, g, or t
  misc_feature (299)..(299): n is a, c, g, or t
  misc_feature (331)..(331): n is a, c, g, or t
  misc_feature (353)..(353): n is a, c, g, or t
  misc_feature (355)..(355): n is a, c, g, or t
  misc_feature (357)..(357): n is a, c, g, or t
  misc_feature (360)..(360): n is a, c, g, or t
  misc_feature (369)..(369): n is a, c, g, or t
  misc_feature (387)..(387): n is a, c, g, or t
  misc_feature (390)..(392): n is a, c, g, or t
  misc_feature (406)..(406): n is a, c, g, or t
  misc_feature (417)..(417): n is a, c, g, or t
  misc_feature (420)..(420): n is a, c, g, or t
  misc_feature (426)..(426): n is a, c, g, or t
  misc_feature (429)..(429): n is a, c, g, or t
  misc_feature (431)..(431): n is a, c, g, or t
  misc_feature (435)..(435): n is a, c, g, or t
ggagctcgcccaccgcccgcccagcagtggctgcaccatgcacgtgaacggcaaagtggcgctggtgaccggcgcggctcagggcataggcagagcctttgcagaggcgctgctgcttaagggcgccaaggnagcgctggtggattggaatcttgaagcaggngnacagngnaaagcngcccnggatgagcannngaacctcagaagactctgttcatccagtgcgatgtggctgaccagcaacaanngagagacacttttagaaaagtngtagaccactttggaagactggacatttnggtcaataatgcgggagtgaataatgagaaanactgggaaaaaactctgcaaantnanttnggttctgtnatcagtggaacctatctnggnnnggattacatgagtnagcaaaagggnggngaaggnggnancatnatcaatatgtcgatcttttagccaggactcattggcccggttgcaccagaaagcccggttcattgtggctttcacatgcattggtcaatagtgggattcacaacgctcaagcaagcggtggggctgggaaatcattatgaaccagtggtgtgacaactgaatgacaattggtacagagctttggtgaaccaaccaagcacatccccttggaattccaattgggacaccaacgacacgaacaacaacctttgggacccaccagtatttagcacagtcatgaggggaatcacataatcaagagcgacatctgcccttcgaccattctctaagctcgcaacgatctggggcacaccccaccaaatggaggtgggcccaaggagactttgcgaacacaacttccatggcacaccaacgatgtctcctaaccgtggcggcccgataacgctactccatc

SEQ ID NO: 611305 - DNA, 209 bp, Homo sapiens
actctgaggatcccgtagaagacgacagaagggggctgggagggagaaggggatcgacagctaacaaatataagatgacatatacagagaatccttatccaaactaactgtatatatttcttctaaaatgggtatgctgttcagagtcacagagaaactccatcgtctaacccacctgagagggcacccagccactgtggtgttgcgtg

SEQ ID NO: 611306 - DNA, 366 bp, Homo sapiens
cctgaaacctatttacctttcatgaggatgcacacgattctcctcttgtgaaagccttcctcccgagaaccatccctcccagtccactgcaactggttctcaaacagagacggctttggtaccccataggacatctgccaatgcccagagacatttatggtatgccacactggctactggtatctagagggcagaagccaaggatgctgataaacatcctccaatgcacgggacaggcctctacaacaccagcagaaacatcacagtgccaagctgagaaaacctgctctaagggcgaagcaccctctccctcttccttccctgctcccactgtgcttgctcgcatttccatcatcgcctttagaa

SEQ ID NO: 611307 - DNA, 1038 bp, Homo sapiens
  misc_feature (523)..(523): n is a, c, g, or t
agcgggagtctgttgagcccctggccggaccagcctgggccccgtacagacgaggaagcactcccttggcaggacaaatggaggacatcaagctggaggactctctcgccccgggatcaacgtgggactgtcgtcctgccatgctgagtctctgacggacgaccgccaagtgacgacaggcttctcatgtccttcataacgtacggtgcttgaggtgcctggctgcctcacatggatggacaagctgtcacttgcgaggacatacggaggaggacaacgggtgcactgtgtagcggacgcgggcactaggggacacgggtcgggcaacttgccactcgtgatggcagccagacctggtagccaggagtagctgagagctcatactacccttacagagctaagttcctggtcgctcctctctgtaacttgaggccatgccgcttggatcaaagtacttatagacgagatgcccagttgttgcactagattggcacatggacttaccatggagcaagagaaacantcgcgggatcgattgtggcgaagtgcccgcgtcacacgttcgagggacaagtggaactagtagaacatcgtcggagcgcgatagttgcgaggcatggacagggggccgccgtatcctcgggaggagaagctaggcgaaggaagaaggcgacggaggagggggaatatgatgagtgtatcattgatagtgatgtgaggtaaattgcggtttctatttctttattaacaatcaggatcaattttattacgttgaccgtgtgccatggaaagccatagtgttatttcataaatggtaacttcagatgaacaacgtgttcggagaagctatttaatagcaggcttcaattgtagggtaacatatactactctctggttgcgggtgaacggggatttaaccaggaattagagaagtattaacgtgaaattctatgagaaataaaaaaggatgaatctgtaaggagatatgtagggtcttaataatgtattaatgcttgaaaagtgcagatggataaatgg

SEQ ID NO: 611308 - DNA, 197 bp, Homo sapiens
gggatgtatgcgaaccttcttcatttggaacttgatttgtggactatcaactacatacactttggccaccatgtaagggtcgtgtagtagagcagggaagggaactattcctgcctatatattaaaccctggtgccgacggattcgtcggaatactgcttgatcatgagactctagaggccaacacacgcatacata

SEQ ID NO: 611309 - DNA, 604 bp, Homo sapiens
aagcagtggtatcaacgcagagtggcattacggccgggggcggggcgcggtggctcacgcctgtaatcccagctctcagggaggctaagaggcgggaggatagcttgagcccaggagttcgagacctgcctgggcaatatagcgagaccccgttctccagaaaatggaaaaaaaaaaaaccaaaggacaaaaaaaaaaaaaaaaaaaaaaaaaaaaattttgggggcgcctcgggacctggaaaaggtttgaaacacattgggggggggcgggggcccaagtggtgtcaagggacacgggggccaagaggggtcccaagggaaacccgggggacagaacaaaggggcgggagggtttcccccccatataagaaaaaggcccgggggggacacccggggcgtgtcgtgagaccaaacccagagaagggagctccagagagcgcccaaagagggggacgctatcaacacacggggggtgtcccaaagggggagggcccagattcaaaatttacgccccggggcgtgtggggggggaatgacgaacttgaggacatgccagagcaatcgcacagaggacacaacacatgagatacacacaggacagg

SEQ ID NO: 611310 - DNA, 726 bp, Homo sapiens
gggtcgcagcatgtctggggggcacatacgtagactcggaggcagacgtctctactccgttcccatccggtaacgaggacaacatctacaagccctacaacaaggccagggcagacgagctgatcggtaagcaggtgtacggaagcgcacatgcatagaaagatctggacactggatcgacacacggcgacccttattagctactcttccaagcgatagacagttggtcccagattgacttttgacagatgatgattttgcagacacccagaggagggtgactaagcttactgcttgaaggacgtggcatttgaggacaggccgcgaaatatcagcagctgtactatgtagaactgaaataacatgggttggtcacccgctgtgtctggatgcgtgtacctgcgttgggtggatccccagataggccatcatcgatctagggtgccattccacgttgcgacgacttctgggtcttacctgccaatctgggtcatgtgtggcatgcttttaagagctttcctgatcagagcattcaaagttgcgttcagccgggtctataaacatgctactgtacgcgaaaccgtgcgtgtgactcagtctgagaagctgtcggggaaaaatatactaagacaacgtgggggataaaattgcatgtggggacatatcactgaccgtttacgataaagtaatacccggattgattggcatgaaatttttccggtgtgc

SEQ ID NO: 611311 - DNA, 918 bp, Homo sapiens
gatgctaaaaccattagttaaagattgaaacattctgtgaacaatcttaggatcactaaaagtggcgtcaatcgcacgacaattcatatagcactcgctaagtataatgtggacagcgtaacaaactatgatactagaatctgattaagcctcgcagatctaacttctaatttagaggacatttggacagggtagagataatcaagttcattaccaccatgaggaatcatttgggataatccagaaggcgaagatcattctacaagagtcaataacttggtttattcaacaagtaaatgttatgggatgtggggcagaaagagcaaggtgtcaggaggaggactgtcctagcttataggatacttaagagacataacagcataagtgtaaagatgtgggtctagtgtggagtactgattcaagataagccgactgtaaaatgaacacattgtcgggacagtcagggtaaaatatgaataaggactgagtgttaaatgatattaagtagccattgttaatcttgttggggtgaaattggcctgtgcttatgtaaagaaagataagaccagcattacctgctgaagtatttagtgaatacacaggtctgatgttagaatactccagcagtcagtcattcagtcagtcactgggaccgaagaaaccatgatgggcaacctgttgagttattatggaaggtcgtgtactggggtgcctggaggttattatactattctctctaattttattggcatgtctaaaaacttccgtactgaaaacttgaaactttaagttccaaggctgggaatggagggtcatgctgtaattccaggcacttggaaggccaagcgggggaataacgttagcccggaattgaaaacaaccgggtaacattgtagagccggtcctaacaaattacag

SEQ ID NO: 611312 - DNA, 105 bp, Homo sapiens
agagacgtgttgcatgggatgtcaggtgtatgaagcttatggtcaaacagaatgcacaggtggctgtacatttacattacctggggactggacatcaggtcacga

SEQ ID NO: 611313 - DNA, 145 bp, Homo sapiens
ccatctcgttatttcaaaggtatgttgcccggggttgtacacctgccctttgcgcaagggttgggacacagccatctgggcagagcctatacttgggctaactctcctccaacagtccttgccctgactgcccagatggctttgt

SEQ ID NO: 611314 - DNA, 147 bp, Homo sapiens
agtggctcatgagggggtagagggggttatagaggtaaatacgggccctattacaaagattttaggggaattcattctaggacgatgggcatgaaactgtggtatgctaccacagatttcagagcattgaccgtagatatacccccg

SEQ ID NO: 611315 - DNA, 261 bp, Homo sapiens
ccaggtccattcttcggattggctccatgtctcacgattggtcggggcaggagactccgagctcactgacagtcacagctgagatctaagtagtgctatctcctggacctgtatgtggatcactcatttaatactaaacaaccttatgacttaggtactagttttattttcatgtctgtttagcacatcaggaagctgcaggcaggtcaagtgacttgtcccaggcccacacggctggttagtgaattctaacccagtgtg

SEQ ID NO: 611316 - DNA, 402 bp, Homo sapiens
cgcggtgcagggtgctcgatatatagaatcctcccatgatatattccaactagttggaactaaactcaactcacacttagggccttgtatgcagaacgatcaccatctttttaggacacttaggtttatttacaaaataattctttgaaggcccgaacatttctagaatctgattgatgatgagcaggagagagaaagtgcatactacaaagcggcagagtcttaaaaattcaacatcagcctaattaccaggaatttgcagtttagttactctgtgtacatgtaactatttataaatttcgacatcaacagcttctattttaactgatgagatgtccaattgggacacaattataaatgctgtgaggctgggtgcagtggcttatgcctgtactcccagca

SEQ ID NO: 611317 - DNA, 106 bp, Homo sapiens
ttgcctcatgcttgttcttgagcttgaggaggctcttagatttctcctcttcttctgtgaggggggtggtgaactcagctattctgtcttccagcagtttcttttc

SEQ ID NO: 611318 - DNA, 228 bp, Homo sapiens
cgcttcccccgggtgctgtcccaaccgcaggtccgagccctccctggccggggtgagctcatcaacattcccccccttatggtggagctcaagaagcataagcccaacttttgatgtgccagaaaccgccctgagatttgccggtcatttccttgaaccctaacctctcccctcctgggtcaagaattactccgaagtcagtttgcagaaaataaatatttagtatga

SEQ ID NO: 611319 - DNA, 195 bp, Homo sapiens
ccccaatagacagtacaaggcatgcaactagcgggtcaattccagacactgcactatataccccaccatgaaccctgactggtctggctgtgacccctatgccggtcccgtggtcgggagccagatgaccagacaagcccggcgcctctacgtgggcaacatcccctttggcatcactgaggaggccattcaacg

SEQ ID NO: 611320 - DNA, 99 bp, Homo sapiens
cttcctggcaggaagcgacgttgacttctgctggaacagcatgctaggtggaggaatcagccacgttgtaaacctcctgaggtggatgggcgcctcacg

SEQ ID NO: 611321 - DNA, 140 bp, Homo sapiens
aacccctccactatctacccgacaccttggccaaccatttacccaataagtttggcgatgaaattgaaacctggcgctgattgtccgcaagaaaagatgtaaatttaccagcatatttgcaaggctacccattcccttgc

SEQ ID NO: 611322 - DNA, 384 bp, Homo sapiens
cgatggcagtgtggtgttccaggtccccacaagaccttccgggcctggtcatggccagacaagctcattcatctggacgatcaaacccgcaattctcgggaaccacgatcataagggagctgcaggttctgcatgagtagcacgtctccgtacatcgtgagcttctatgagtgcgttctacagcaatggcgcagatccagtatctgcatggagcatatggatggcaggtctcgtggatcaaggcctgaagaaagctggaaaaatccgtgaacaagttttcaggaaaagtcaggatggctgtaataaaaggcgctgccgtatctgagggagaagcacaagatcatgcacagagactgtcaagccctccagacatcctagtcaact

SEQ ID NO: 611323 - DNA, 415 bp, Homo sapiens
  misc_feature (272)..(272): n is a, c, g, or t
gcggccggtcgggcggaaggcaggaggcgggcggtcggtagaagcggcggccaccaggcaggcaggcaagaggaaggaagtgggtggctggcggcggttggaaggaaagcaaccaccgccggcggcgacaggaggaggcggcgccggcgggacgatggtttttcctcctacgcggcggggaggcggtcggtcaccacgacgatgactactactacttcgtcggcggcgctctcgtcgcccctcttctctcctcgcggcgtctcgtgcggggntgtgaggagatagagagcgcgcgcagagactctctctctgctctctctcacacacaaaatagaaatagaaatataaaatatattctctctcccactacccacacacaatataacaaataataataacaaaacaataaaagaaa

SEQ ID NO: 611324 - DNA, 266 bp, Homo sapiens
  misc_feature (209)..(209): n is a, c, g, or t
gggcttggtagggacttggtggctccgccagagagggttgagtgcccggcacaggctatgtctcgatctccgcgcgctggtactgtggtccagcgagagcgtcaagttttcgtccagtgaaggactgcagtgtactcttatggtcggcctcgtcctcctgggtccatggacgcccagtgtctgttcgcactggaactcgctacacgcgnatgcttggactagccctgggaagggtcgtcggcaatgtgggttagcccctggctctc

SEQ ID NO: 611325 - DNA, 307 bp, Homo sapiens
cattacctttaacaccatgtagcgtatgttgtgttctgaagaactgcaaccacagagttatttgttggtactgagagacttctgctttattctttgtttttgctatcctgtcctatataactttttttaaagtcataagcttaaagttttttattacgaagaattttatatttatgcaaaagaaaatagtatctgtatgaccaatcatccagattcagcaactaagaggatttataatagatttaaaggttcaatgtttaataaatatcttaaagttcactagagaaaaaatccttattgcgagata

SEQ ID NO: 611326 - DNA, 386 bp, Homo sapiens
cctggcttgtcaggtctcaggatggagtgcagtggtgtgatctcagctcactgcgaccagtgtctcccgggttcgagtgattctcctgtctcagccccctgagtagctgggattacaggcacccactatcatgcccagctaatttttgtattttagtagaaatggggtttccccatgttgcccaggctgatctcgaactcctggactcaagcgatttgttcgcctcggcctcccagagtgctagtattatatgcgtgagccactaagcccagcctcttccttttttttctttttctttcttttttttttttttttttttggaccttcctggggtgctccccgcaaagggcattcggccgggtccccggccccttgggggggggggc

SEQ ID NO: 611327 - DNA, 383 bp, Homo sapiens
tttctgacaatccttaggagctctgccatcctttcagttaccaagactcaaatcttagaggaaccaaaagctcctcttttccctgatctccaaacaatcaaagctcggtaagctctccacattcttctttccccacactggttctaacacccgttctttttccttttgtcaaggccatcatcccatttcacgtcatctgaatgtcagatctgatttttagccatgatttcctaaagggcatcacttcttatgaccaaagtaattggttacatttcacttcattagaaggaaaagtttgtaagggaagtgatttccgcatatcttttcactaatgtgttatcctaatacctaaaactgcctagagcatacacagaagacactca

SEQ ID NO: 611328 - DNA, 443 bp, Homo sapiens
  misc_feature (416)..(416): n is a, c, g, or t
caattcctcagcgtaacattatgcaacaagtaatggctaaaactgcaattactgtttgcatcaaccaaactaagtatagtagtgagatgaatcacagttgtttctttggatgcttattttgaataaattgacagctctatttccatttccatgagctgtgttggaaacctccttgttctcagagataatcaattttaagtcctctctgcactttatatgcctgttgctacatagaccggctgactctgaagtatagattgagctctatgtctgaggatttttttttttttttgaaacggattctcactctgtcacccgggctggagtgcagtagcgcaatctcggctcacggcaacctccacctcccggcttcatgtgattctccggcttgagactcccaagtagctgggactacnggcgcccgccaccatgtctgggtattt

SEQ ID NO: 611329 - DNA, 108 bp, Homo sapiens
acctagcagctaacgccgttgcacacgtacgcagtgcatactactgtaactacactaacactagcgcagagctgcagtagtgcggtagtgcacactgctgtcggcgac

SEQ ID NO: 611330 - DNA, 115 bp, Homo sapiens
atacgaatcgaggctgaacccctagtttagaagtccaatagctataacaagcattctttctcctggggaagaagaccactgagtcgaggaactaataactaattgaatttttttt

SEQ ID NO: 611331 - DNA, 327 bp, Homo sapiens
tctacatagtgttctgttacgtttaggccatttttcatttgtgttttcttgctattgaatagcaagagttatttatatgtctatgctgtcagtcattgtcacatatagatatgtaactgattttctcctagtctgtggttcacctttttgtttttttttggatggtgtctttggaaaagaggtttttaattttaatgaggtccagattatcagtatttttcttttctggttttggcttttggtgtctaagaaatttggcttacccagggtcatgactccgtactattccaccccaaggtaaccacggttctgcctatatcatcaaca

SEQ ID NO: 611332 - DNA, 122 bp, Homo sapiens
cgacgccgacgagaactgacggacggtgagaacgggggggacagtaaaccactgttctatgaagtctcacgaggcaacgtgctcaaggtaacacaacagcagtcctgtgagcatcgtccacg

SEQ ID NO: 611333 - DNA, 342 bp, Homo sapiens
acatattgtactgacacaacacccacagaaactcatctactcaacctcagcatcaggccaggtccagggccccgggcagatgctgaagcaggatgaagaccagtaagtctcagtgcctgtattcacaggaagctgtcagagaaggaagctaagacccacagatcctcatagaccgtgtgtgtgtgggtgcccctgagaagtctggggctcaggtgggagaggcccaagcctgggagctctggcaaggcttcctggagaggggcaccattagggactgcaagacctgagggtgggctacgaaggaagctttgcacgctggaccctctgtgccctgtacactct

SEQ ID NO: 611334 - DNA, 125 bp, Homo sapiens
tgaagaattctctctttacattcgttgctttccttagagttcctccccttgtcctcaaacagtaatctcatttcaggatacccagtattactgcgtcaaaagacttggacatttgagcatttgaa

SEQ ID NO: 611335 - DNA, 115 bp, Homo sapiens
agaggatcccatgtgcatgtatgtgatgtgacatgacctaatggaatgtatgtgacctcatgaatgacccccttcaaattcatgaacaaatggatttcctggtccaaactatgtt

SEQ ID NO: 611336 - DNA, 1502 bp, Homo sapiens
  misc_feature (378)..(378): n is a, c, g, or t
tcgtgttggtcctcagaatccccgcgtagccgctggcctcctcctaccctcgccagtgtttcttacccggtactgatgtacgacatgtgggcgtgcaatactttttctcccgcaaggaagattatttcaaggtgcgaatatgccagtatgaggtctatcaagcttgcgttcgtacagccattggagatccagacattcagagggtgtgtgcctagctgtggagaagagaatgacttccccactgatggagcccagcagctattgagaaaattgtagagtattgcatgctcacgataggtatgtgccatgagtgggctcaattgctgatgctaagacttctaattgataaagccagagtggagacacagaaccactggnttcaccttacaatgagacaatgacaagtggagagtgtgacccaagctgttgtccgaatctggtctgtatgcacgtctggcagaagaacgatgcgagactccaggtgccatgtctcggtccctgtggagctagcgattattatttggaggagttgatgcagacaggaccccagcttgtcccatatggatccatcttgggacctttgtacagtgtgatgctcgagcaattgggctctgcttcagagggtgcccagagctccttgcaagaagtttaccacaagtctatgaccttggagaggaacccccctccaggtcttccgtcaattatcttcgaaccaagtaatgggcgcgaaaaggtgcactgtccacaacaatgggccttcgcccgaggaaacctgggccacaatttccctgtgtgtccacagggacacatgtcaaagggttatcgagagctagggagacccgtgacctccggaaacctctggtgcaacacgtggccctatgaatgccccacataattttgaccccggctgggcggagacccccggggggtaggtaaacagacgtagtgacgacggcgaccacacccccaacacggacgcgactcgactcccgcccgtgccgacgctgatcctactgaccgaatatgactcgtttgcgtttatttttcttgcttggtacggtagcccagcgagcacgaggcgcccggggcgagaccggccacgggccgcgcgggacgtgggggagcgggatggaaggacacagacgcacgacgatggcgccaagggccggcagggaacagacccgaggacacgacagcacgacgcggccacggacacgcacggcggcccgagagcacggcgcggcgcggcgcggcgaggcaggcgcgtcgagagcgcggcaagagtggcacgaaggaaaggcgagcacccagccagccacctccggagagggggcgggcgacacatgagcagaggtgggagcccgagacacgcggggcgcgcgagcgggggtggaggcgcgcggacgcgacggagtgcacggagacggcgcagggaggacgcgagagcggtggggcagggggcgggtcgagactgcgggggtgagagagggcgagcgacgcac

SEQ ID NO: 611337 - DNA, 401 bp, Homo sapiens
cactgtgagtttttaattaaaagccagtgaattgtgcctggagctagcagaagatggaagaggcatgtgaaagatctcccctatagcactgatccccaatctttttggtaccagggactggtttcatggaagacagtttttccacagggggatgcaggggggtggtttccggatgaaactgttccacctcagatcttcaggcattagattctcataaggagcctgcaacctagatgcttcgcacgtgcagtccacactagggttcgtgctcctgtgagaacctaatgccgctgccactgataggacaggaggcgaagctcaggtggtaaggctggcttgcctgctgctcacctcctcctgtgcggcccagttcctaaaaggccatggaccagtaccagtcc

SEQ ID NO: 611338 - DNA, 379 bp, Homo sapiens
ccattcaaacccagggcccttgttgagcttgtgaaacccaagcccaaggcaccaaaagagcccctgaaagctgttatggatgttttccccgcttttgtaaaaaagtgctgcaaggctgccgataaggagccctgctttgccggggggggtaaaaaacttgttgctgcaagtcaagctcccttaggcttataccctcccatttaaaagcttcccagccccccatgagaataagagaaagaaaatgaagatcaaaagcttattcctctgtttttttttttggttggggtaaagccccccccctgtttaaaaaacataaatttctttaatccttttgcctcttttttttgggcttcaattaataaaaaatggaaagaattta

SEQ ID NO: 611339 - DNA, 998 bp, Homo sapiens
  misc_feature (25)..(27): n is a, c, g, or t
  misc_feature (911)..(911): n is a, c, g, or t
  misc_feature (913)..(913): n is a, c, g, or t
tcttatctgctaccttgtggcgtcnnntttgccacgacttgccaatttcagcagctgctagagaaaccattcctaggaaagtgcccggcaggacgagggtaaagaagaggaacctgtggctgaccaagaacatcgcctgaactctaagaaaaggctgtccacatccacaccctcccgtctcctagagcctgtctctccctaccctcacctccaactacactctagtagttccttgctcctcccgcctcaccgatcgtcacaaccaacaacttcccacaaaacttccatgatatcgacgctagacgaagctctggacacgccaacgtacaacaacaacccacctcctgtactcgtctacttatccccatcaactgcattagccgcctcccccgcccccttccgccctctctttccttactttcttccccatcccctacttcctccttccttttcccgcaccccctcccttcctcccttccccctttcccctactccatccccgcgtatcttattcccgatcacccactcgcgataaccggccaaccccccccactatagcggaactttttattgaaccgatatgttgatgtctgcgccgctccatctcccccccgtttcctcctctctcgatccaccgactcaccacccacctgccgcaggtataagtcccattccatttccatagctcctctttcacacctacccccgcgcacattatcctactatccatactcctccctctatccacgctccgccgccttcttgatatgccggcactcactccgtagcaccagcagtattttttacggagtcatatctcgccctgacgtgatactcctaccttatcccacaccgacaccgtctctcgtttccgcgaacctgcgcccgcagtcctattgtctatcgcgaancntcattcaccgttcctcatatcgatcactacctcacacacccctctctcacccctatccccatctcgtaactcatcatatataatg

SEQ ID NO: 611340 - DNA, 180 bp, Homo sapiens
cccggctggatgcgcaacaacctctcgctgtaggtcagcggaacggcctcctgaacctggcccaaccccttattggcgttgccccccgaaccgtccccaacggaccaagaggacaatggaccatggcagtaggacgagcgcccatagcggaggaattacttcgcagctagccctggagca

SEQ ID NO: 611341 - DNA, 303 bp, Homo sapiens
tgcgcacccaggcggtagacgacgatgatccccagggtgaacgcgatcttgcgacgcaggtcgggcgtgcgcagaacgcgcgcgagggcgctgaacacgtggatgtcctccagaacgggatgccggcgcgcgccgcgcgcacagagtcccaggttatcccacagccgccgcagagcagacggcggaggttgcgagggaatgcgaacaggggccggagcatgctccgacccctgtctgcgacttacttgacactgccgcccgcggcgacggtcttctgctcggccgagccggagaccttgtcga

SEQ ID NO: 611342 - DNA, 131 bp, Homo sapiens
gtgtgccacctggtcacacaagataaagttcattccagaaatggtgggcccggatattagaaaggacatatcagtcgacggaggcatggaagtgggccatagtatgtgaggataaagatttgtggagtgct

SEQ ID NO: 611343 - DNA, 228 bp, Homo sapiens
caacgcatgtgccgctcccgcggcaaacccaaagcgatcgtcgccctcgagcacaccctgctcactgtggtctggatcatgctgaccgacaacgtcgtctacgacgaacccggcgccgattactaccagcaccgccatcccgaacgcaccaagaaccgcgctatctacgacctacacaaactcggatacgaagtcaccatcacaccccacggagcggcacatccgttg

SEQ ID NO: 611344 - DNA, 1076 bp, Homo sapiens
  misc_feature (684)..(684): n is a, c, g, or t
gggacaactccaagaaaatgtgggaaccaactggggccctggaccaaccgtgacccggtgcgtcccggtcaaaccacacacgcccacgggcccccccccggggtccaccacgaccccacgggagggatggagagaaataattttttggggttccacgaaaggaacgttttaattgaattaaatatggtatgccaaacactttttctttttaggttaaatttgttggaaccccccccacaatgattgtgtcccctcacttctcttttttggtttgtttggtccaactctggaatttgtttgggttgaaaacgcttgggaacctctgtgttttgttatagaaggaccaccaggtttccacctcgtgtcttgggtctcacagtggggttctaaacacttttctcgaaaagtgtcgtgcttggcaaaaaggtgttctgccactcgagttatataattttcacgcccctctaaaaccgtgttttcacttcccaagagacccccctcaccacgagagtgcgaattactctcgttggagagtttccaccaaccctccacgcgcccacatactttgtggggcacagagagaaaaggtttttatagttgttgtgccacatccacgccactctatattcactcgaatatatccacggagactcgggtgtaactcttgggtttaaaaggagaggnggtttctataggagagagatgcttggtccctcctcttaagaggagcaccctctatactctattgagtgagaagtaatttgtggagagaagttggtgttttatagaaagtgagagaaatgtcctcgtgatatttccacgctgagtcactccctcgtggaaaactcttgtaatcactcttatattaaatcactccctcgcctcgtgtgctattattataattcactaatcttctaacgcctgggaaactctttctgccccacaagtgttactcgtgcccttgtgttttggctaagtgtgtgttgttgagaaaaaaaacactttctctgcctcgaggttttaatttttgtcccaagttattttaatctataccattaaaaacttttgcctatcca

SEQ ID NO: 611345 - DNA, 452 bp, Homo sapiens
ccggcccccagtttattagaaaaaaaaagtgaaggacgtgagggttatgaccagaggcagccatgttagagaacgggtcacagcgactaatgagaatgatagtggagagagggcatgggtaccttttctcgaatctccagtgcccgctggcgcagaggctctgcctccttgtacttgccccttttgccatagagcacagccaaattgttgagtgtggcagccacctatgaagacaggcctgtccccatcagacatttgggttgcaaaagacctatgggaatctgaggttccccacctcccagcagggcccaacactcactgcacaactctaagagacaaagtctactaccctggagccaggggctgaagggaggggaaattgctgaacaggatggctctgaggctaagggacagtatcgccctctaggggattttaagaaatttctggaggt

SEQ ID NO: 611346 - DNA, 110 bp, Homo sapiens
agcctctctaagaacatgataggcttacttctgctccataataaagggtgataaaaaagccagaatataacttaagactagagaactgcgtacatgatggaccatttttt

SEQ ID NO: 611347 - DNA, 171 bp, Homo sapiens
gcggaccccagcacttgggagacatggcggaaggacgctgaggcaggagttcaaaaccagtgtaggtaacagctagaccctatctctacaaaaaatttaaaaattagctgggtgtggtggtatgtgcctcaagttccagctactcaggaggctgaggtgggaggagaggaa

SEQ ID NO: 611348 - DNA, 634 bp, Homo sapiens
  misc_feature (374)..(375): n is a, c, g, or t
  misc_feature (379)..(379): n is a, c, g, or t
  misc_feature (384)..(384): n is a, c, g, or t
  misc_feature (399)..(399): n is a, c, g, or t
  misc_feature (404)..(404): n is a, c, g, or t
  misc_feature (407)..(407): n is a, c, g, or t
  misc_feature (413)..(413): n is a, c, g, or t
  misc_feature (424)..(424): n is a, c, g, or t
  misc_feature (427)..(427): n is a, c, g, or t
  misc_feature (430)..(430): n is a, c, g, or t
  misc_feature (438)..(438): n is a, c, g, or t
  misc_feature (443)..(443): n is a, c, g, or t
  misc_feature (450)..(450): n is a, c, g, or t
  misc_feature (459)..(459): n is a, c, g, or t
  misc_feature (468)..(468): n is a, c, g, or t
  misc_feature (475)..(475): n is a, c, g, or t
gtggccaaatattgttagaaacttctggtaacttagatggtctggaatacaagttacatgatttggctacagaggagtctcttcccaagagactgctggcataggagcatctgctcacttggttaacttcaaaggaacagatacagtagcaggacttgctctaattaaaaaatattatggaacgaaagatcctgttccaggctattctgttccagcagcagaacacagtaccataacagcttgggggaaagaccatgaaaaagatgcttttgaacatattgtaacacagttttcatcagtgcctgtatctgtggtcagcgatagctatgacatttataatgcgtgtgagaaaatatggggtgaagatctaaganntttnatagnatcgagaagtacacnggcancantaatantcagacctgantcnggnaaccctcnagacnctgtgtnaaaggtttnggagatttnaggtaanaagtttcctgttactgagaactcaaagggttacaagttgctgccaccttatctaagagttattcaaggggatggagtagatattaataccttacaagagattgtagaaggcatgaaacaaaaaatgtggagtattgaaaatattgcttcggttctggtg

SEQ ID NO: 611349 - DNA, 159 bp, Homo sapiens
acctggcccatgttacatgagtaggtagctgcagtaatgttagcggatagctacggcaggctatagcttgaatgagtaggctgatggtttcgataatcactagtatgggagataaggggtgtaggtgtgccttgaggtacagaagtgcggctagggcat

SEQ ID NO: 611350 - DNA, 410 bp, Homo sapiens
  misc_feature (238)..(238): n is a, c, g, or t
gggggtacaggagcccagacaaagcccaggccttgtcaaggagacgccagagggccccttgccaagggttttggccccgagggacccgtgggaccgaggctgcagaagctctccctccctactcccgtgggagccacgtgctggccatgtggccagggacggcatgagcaggaggcgggacgtggggggcccttcgtggtttggtggtcaacaagcctcacagggagccgttgaaacnctatgagggggccccttcaagggcagggggggaacacgcggtggcgttaaaaaaagacccccaaaagggcgaacaccaatttttttaacaacagattttcctttggggaccacaaagtttcctttccaaaggggaacaccactacataagaaaaaaatataacaaacaaagt

SEQ ID NO: 611351 - DNA, 208 bp, Homo sapiens
ccagctagtcaaggaggctgtatagcacttagaagacgaatccaaagaagactacatcagggcatttaataattaaattcccaaaggtcaaagattaagaaatgattctaaaagcagcaagagaaaagaaacaaataacatacactgaagctctaatacatctggcagcagacttttcagtggaaaccttgcaagacaggagagtgac

SEQ ID NO: 611352 - DNA, 115 bp, Homo sapiens
gatctagaggatcccggtcatcttctacacgatgcaggcttggatgcgaattcttttcccgattgcgcctcactcatgtttgaaacctatcagggtgtgtagtgtagaaattgaa

SEQ ID NO: 611353 - DNA, 152 bp, Homo sapiens
ttagttctgtgactttggggaatgcacagttaaaatttttaatggaaagagaaaagggctgaagaggcagccatgaggatgcttcccaagggataaagttcaaattcttagcggtagcatatgtaccaacagacaaaggcattgcccaaatt

SEQ ID NO: 611354 - DNA, 755 bp, Homo sapiens
  misc_feature (4)..(5): n is a, c, g, or t
  misc_feature (9)..(9): n is a, c, g, or t
  misc_feature (14)..(14): n is a, c, g, or t
  misc_feature (23)..(23): n is a, c, g, or t
  misc_feature (27)..(27): n is a, c, g, or t
  misc_feature (66)..(66): n is a, c, g, or t
  misc_feature (94)..(94): n is a, c, g, or t
  misc_feature (114)..(114): n is a, c, g, or t
  misc_feature (127)..(128): n is a, c, g, or t
  misc_feature (150)..(151): n is a, c, g, or t
  misc_feature (154)..(154): n is a, c, g, or t
ggtnngcgncggcntgcgcgtcnctcncggctcccgcttcctttgaccgctccccccccggccggnggcccgcctcctccacggcactccgctncttccctcccttcgtccttnttctctccttttnnccttcttccttccctcctcgcnncancgccaggaccgcggcgggggacgagctcggagcagcagcagagtttattaaccacttaacctctcagaactgaacaaagacaacattgttcctggaacgccctctttttaaaaaagaaagcataacccctactgtagaactaaatgcactgtgcatgaaacttggaaaaaaaccaagttgtataagcctgtatgacccttacatctcgagatgcagtaccacctataactaacaacatgagaggaggatgcttatacccccgaaggtactaataacccattaccagttccaccattaacttaatcaagtggaactttctgtgggaggaacagcaaatataatggcaaaggaaagacaagaacaggctgcgaaaacacgatgctgctgaccaacagcggtagcagagatcactgcgagaaactgaagcaccctgacccagagcaggcctggagggtgaaatggacagaagaataccagaaaggaaaaaaaatcaacaaaacaagtctggacaaaaacgacaaagtgaaagacattagcaactaaacgcaacacgagccagacaatacgaaagtgccagagagaatggccaccccaaatgaca

SEQ ID NO: 611355 - DNA, 509 bp, Homo sapiens
cagctcatcgatcacctgcgggtagctgccttccgggtaggtgtcctgcataggcccacgctccagggctaccacgtgcagacccgcgtcagtcagctccttggccatgatcgcgccggcccagccgaagccgacgatcacggcatccactttgttcaacacagtcgccatgcttcaagccctcttgccgggaatcgatacagccggaaacgggtaaggctcgttgcgctcgacccagtccatgaagtcggcgcgggcgccggggaaaccgatctgggtccagccgaccatgcctttgttgccaccatggatcgggtcgcagaagaacccttcacgggtgttttacaccagcaagctgaagaacaccttggccggaacggtatcgaacaccagctcgcctgcctcgaccttgctgagaatacggtctcgggtagcgctatcttgcgcagcaaaaggctgcccgccgttggttttgcaccagccgtccacggcagcgatgcccaggcggt

SEQ ID NO: 611356 - DNA, 309 bp, Homo sapiens
ccacgtacagatcttaataggctgccagaatatctcctctgggcaggcgacccaggaaatggtatgagtgagtgtgtgagcccttacttgatattttacaagtttggctttggtgttcatttttgtccttgtcccgtatgttcctgttgactaacgggtcatcttttccttgtagaaggttttacaagatgtgcttttttaccatgtcactaaaggccctcgggaccaagtgatcacgtcatgactccggtgagttcacacgtggtggcctgaaaagagtggctaaagtggtatcaagactgcctggat

SEQ ID NO: 611357 - DNA, 403 bp, Homo sapiens
accagggacatacttaaacagaggccactaactataaacagtgaataggtacatgtccttgaaaaaggccatataagattcaatgaatagggtacatataccagacccggtgtcacatctaatatagtgtgtgaatccatatctttagacaatgccaactcggaataagaagctagagccatgtccttgaggaaggacatctctgtttcttaaaatattgccatataagaagacttccgtcccataattatatacaatgattgtggtggtgacactctactaaagcagaatcttctccaggataacacaaaggaaccagccatgatataaaggactgcataggccctgggaacacagaactaatatgagattaaagtacacagaccacaacttaatccactca

SEQ ID NO: 611358 - DNA, 290 bp, Homo sapiens
ctgaggtgactctaaggatcccggctacctggaccttctgcatacctggaccttctgggctcaagcgattctcgtgcctcagcctcccaagtagctgggaccacaggcgcctgaggcaggagaatggcgggaacccggaaggtggagtttgtagtgaaccgagatcatgccgctgcactccagactgggcgacaagagcgagacttcgtctcacaaaaaagaaaactgacaaagaattgggaatcagaatatatcaagaactagcacagagctatcagaaggtccaggta

SEQ ID NO: 611359 - DNA, 126 bp, Homo sapiens
gatgcagaagagtccagttgatagtggtgttggttccatggcggggtaccgtagggattcatctgttctcttcacttccctttgcatctgagatcctgctggaaaccattgcaacacggtctctca

SEQ ID NO: 611360 - DNA, 211 bp, Homo sapiens
cctaaaataaagtattaccgaaacgttaagcacatgcctgttaatgccttccaagcacactacacgatacgaatgtcttcaatgtccctatacgtgaggccctgcatccacccctgaattcccttgggacctctagggtagaacgggtcctgtaaatttctttgcatccacttaaaacgccccctatttctgtttgcttcgttctcttcta

SEQ ID NO: 611361 - DNA, 465 bp, Homo sapiens
ttgcttgtgattgctagcctcattccgtccgtctggaagatcgtagacaactgcgcttcttacctaccatattgacagagtgtggctatgaggtcctgatggatgtacatactgctttgctgtgataacaggtgaacctggttagaagtcgcttgctgtgcacctgttctatagcatactacttctccatttccagttgcaaaactttgtggactgcatggttgcacatcgatagtatcacctgaccctcgagggctctccttgcccctgtagtacccacaggccttggtccacatctttcaatttgggagccaggtaggagagaaattgtgtacatgccgcatgggaggtagagaatgtaggtgactttttatccctgccacccctcattttgtttccttctctgaagcacctgccgctgagctcagttccccaaagaggcaggtgggcaaccaagtgggagtg

SEQ ID NO: 611362 - DNA, 526 bp, Homo sapiens
  misc_feature (36)..(36): n is a, c, g, or t
  misc_feature (106)..(106): n is a, c, g, or t
  misc_feature (128)..(128): n is a, c, g, or t
  misc_feature (130)..(130): n is a, c, g, or t
  misc_feature (149)..(149): n is a, c, g, or t
  misc_feature (228)..(228): n is a, c, g, or t
  misc_feature (239)..(239): n is a, c, g, or t
  misc_feature (260)..(261): n is a, c, g, or t
  misc_feature (305)..(305): n is a, c, g, or t
  misc_feature (334)..(334): n is a, c, g, or t
  misc_feature (370)..(370): n is a, c, g, or t
  misc_feature (382)..(383): n is a, c, g, or t
  misc_feature (409)..(409): n is a, c, g, or t
  misc_feature (525)..(525): n is a, c, g, or t
atgaagcagcaaagtcactgggtctgtttggaattnagcaatttgcatttctgattggcagccgccctgggagtgtctgtatccaagaagctgacttaatcaaacnacatcagcagtaatttggaaancngcacaaacaaggataaccntcaaccataagcataaagaaaagagagaactagaatcttaatgcagaactatccaatgtaaataccaaaaggaaaccanaatggtacttngagcaggaaaataacataaanntcatttaaaaagttgtatttatagccccagaaaccggaaagaantaaaagtaaatatggaagtattataatcngaccataccaagagtcaaaaacaaagagttcctacnaaagaggaatannttcaagatgatctggtcacatcatgngcatagttaagattgtttgttttaataaagattcttttgcaaataaagaaataaaatttagtaaagttattcttctcttgatgaaaaaatcttaaaaatgcaccactggtggtttnt

SEQ ID NO: 611363 - DNA, 888 bp, Homo sapiens
actgaacgcaaatcagccacttcaattaagctaagcccttactagtagcaatgggacttaaacccacaaacacttagttaacagctaagccaccctaatcaagctggcttcaatctacttctcccgccgccgggaaaaaaggcgggagaagccccggcatggtttgaagctgcttcttcgaattagcaattcacatatgaaaatcatcctcggagctggataagaatagagggcctaacccctgatcgttgtagattctacagtccaagtgcttcactcagccattttacctcacccccagctgatgttcgccgacgcgtaagactagttctctacgaaatccactaaagagcatgggaacactatacctattattcggcgcgatgagctggagtcctaggcacaggttctagagcctccgttattcgagccgagctgggccaggcaggcagaacttctaggtaacgagcctacatctacaacgttatcgtcgcagacccatgcatttgtaataatcttcttcatagtaatacccatcataatcggaggctttggcaactgactagttcccctaataatcggtgcccccgatagtggtcgtttccccgtcataaagaacatatagctttctgactcttacctccctctctcctacttcctgtcgcatctgctatagtggagggccggagcatgaaccaggttgaccacgttcttacctccccttagcaagggaactactcccaccctggagcctccggaaaaactaaccattttttacttacaacttaacaggagtctcctcaaattaagggcatcaattcatccacattttagttaaaaccccgcaaaaccaatacaaagcccttggtgaacccaacaggagcatcc

SEQ ID NO: 611364 - DNA, 1771 bp, Homo sapiens
  misc_feature (526)..(526): n is a, c, g, or t
  misc_feature (620)..(620): n is a, c, g, or t
  misc_feature (902)..(902): n is a, c, g, or t
  misc_feature (999)..(999): n is a, c, g, or t
ctaagtagaaaaatagaattttataactacgttttacagattattccaagaaattatcatgggtttattttattctttttggaaatattattcctttatttaacacgacactaaaaaacccggtgtaaacgcctgcattatactatttcacactattagaaaaagatatcacatatttattgcaaaatattattgtaagacaccagaacacaccacctattcttaatatggcccatatggtgtcacccatcttatacactgtgtgtgggacgcaatgttattatattatcgaagtgttattggacactattggcgactattatatttatcaccatcttagaggtatcgggtggtctttgcgcgaggggaggcacagtgtgagggcctatattctgtggtgtgtgcgcctttttgtgtgcaacacaccaccaaacacctgtgtgtgtgtgctatattttcaatgtgccgcaacacgtgtgtgttataccacattttatgtcgcgccacaaagacacacatctccgangcttaatgaggcacagcgcgccgacttaatcaccgtgtgtggagaccacacgtgtgtcttttcagagaaatatccacactatctgtgaacagtngggacacacaccatattttctcgtatctctcttcagaaaagacagaaaaacacaacacagaggatatatgttctctctctttatatctctcccctgtgtgtataatagtagtgaggggataagcaactctttctttgatcaaacgccggtgtaatgaagaaatattctgcatgtgtgttcgattatacccccccgataggtggggggggagctactcccaacacagagaggggtggtcacccctcataagcagtgatcatatttatattgagacattgtgcnacccacgaagtgttggaaacacacaaacatattgttggggcgagaacacaagaaacacattctccgaggagggccattctatgttgttggggcacgncgacggagtattatactcgcaccccaattatatttgatgaatcaccaaaagtcattgcgaggcggtcgttgatcgttgctgcgcacaaactattcattctgcagaagagctcatacattataaacaaaacgtgtggcggcgaggaagaagacaaccgtggtattaaagaggcgcgcgccattattttaacaatttggtgacgacagagcgggtctttacaaaacaacgtggtgtgtgtgtattacgaccaggcaggggagaccaccacacagggattattcaactcacggggagggggtttatacaaacccacgtgttgatgcttacatcaacaccaacccagagactattcatatcataagagagatatataaaacaacgcgcatcgttgttgattcaagaacaagaattttattatcgcggggcgagcagcaaaataggttggccgccaacggcgcatcttgattggggggagcgaaattgtggttgtgttataaaaacgacaccagacacgttgagaaaagcatatcttctctcattctactgatggaagagtggtgagggcgcacacacctaaaaaaatacgagggggggggtgtatgtgagtacgagcgccagttatagtatatcattaatctacaagcaggggaagagaaagttttccagccgacccaagttatacaccagagaataatcggatgttttcgtctacagcacgagagatggattgtggctcccatccatatgcagcaccgagcagatcacatcatgt

SEQ ID NO: 611365 - DNA, 497 bp, Homo sapiens
  misc_feature (8)..(8): n is a, c, g, or t
  misc_feature (14)..(14): n is a, c, g, or t
  misc_feature (100)..(100): n is a, c, g, or t
  misc_feature (105)..(105): n is a, c, g, or t
  misc_feature (154)..(154): n is a, c, g, or t
  misc_feature (198)..(198): n is a, c, g, or t
cacagccncattanaaattcttaatgttttcaaattaacccattccccacgcagaattaatctgggtcacattgacatccagtgcaggaagttactttantgttngaatataaggtgtgtaacacagaaaaaaagcctgccactgaattccagntgacccctagtaagtgattccctttcttggagcttcagttttgncccctataaaatagagataacggccaggcgcggtgactcatgcctgtaatcccagagctttgggaggccgagtcgggcggaacacgacgtcaagagatggagaccatcctggccaacatggtgaaaccccgtgtctaccaaaatacaaaaatcagctgggcgtagtggcacacacctggagtccaactactcgggaggctgaggcaggagaatcgcttgaacccgggaggcagaggttgcagtgagccgagatcgcgccactgcactccagcatgggcgacagagcgagactctgtctc

SEQ ID NO: 611366 - DNA, 553 bp, Homo sapiens
  misc_feature (184)..(184): n is a, c, g, or t
  misc_feature (186)..(186): n is a, c, g, or t
  misc_feature (493)..(493): n is a, c, g, or t
  misc_feature (527)..(527): n is a, c, g, or t
  misc_feature (540)..(540): n is a, c, g, or t
agagctgatcatgaagtccatcatcccagtggttatggctgggatcatcgccatctacggcctggtggtggcagtacttatcgctaactccctgactgatggcatcaccctctacaggagttttcttcaactgggtgctggcctgagtgtggggctgagtggcctggctgctggctttgcattngnatcgtcggagatgctggtgttcggggcactgccagcagcctcgactgttcgtgggcatgatcctgatcctcatctttgcggaggtgcttggcctctacggtctcatccgtggccctaatcctctccacaaagtagtccttttccaccatcagtcacaggataggatgtaaagatcacccctcctcattccagaacgaacagcctgacacatgcacgggcagctgccctcaagtagttgggtcttgtaaatgttgcagtgtcctagttgcccattggttctggtcggcccccgcctttggcccctaantgcaacgtgctggttggaaatacggggccaattnatcttccaaccanggcccttgaacaa

SEQ ID NO: 611367 - DNA, 806 bp, Homo sapiens
gcagcgctacttttggtccggggtcggcaggaggccgcgggtaccgcatcacagctgacgtgaggactacgtggggccgctgccggtccgggttgctgggcggggcgccgtttctgagcggggtcgggctcgccgtctcccacctcctcgacgtccgtactcagttgacgaggtccgctacgataaatcccttttgcgggggacgaaatgaccatgtgaaacatgttgaaatcccacgcatgagtggaagtataacagctcctttagacagacgagcaaagtctgctcatgttgcagacctcagacttggccaaaaattcagatcccgtgctatagcctcaagttgccacctggtgacatgccaagttaccagatccgagctcctacgtgctgcttgtgccacagggagtggtgatggctagcatcgcccggaaagtttgcacagcccccagcagctggcagaagaagcaagacgcaaaacgagagctgagggctaatgacaaaaccggggaagctgcccgggaagtggtcggcaggaggaagacgggaatattgtcaagaagtgtctttgaaaaattccggtggtggcttgttgctttgaaaaaccaaaaaaaaggacttctcatttgagggaactcaagggccctccaaaagatcttaatgtgccataaaacgtaagaggtaaccgtgttcttggactttggcccttggttaacttctaaatcaagggcaggcagatgcagcacgccctatcttatgtgcatgttggacttggtgcgaaggaccacggtgtgacccttaaagat

SEQ ID NO: 611368 - DNA, 320 bp, Homo sapiens
  misc_feature (18)..(18): n is a, c, g, or t
  misc_feature (37)..(37): n is a, c, g, or t
  misc_feature (276)..(276): n is a, c, g, or t
  misc_feature (279)..(279): n is a, c, g, or t
gattacaggcgtgacatncatgcccggtcctattgtnagttttttgaggaacctccaaaccattctccatagtggttgtactaatttacattcccaacaacagcatacaagggttcccttttctccacatcctcgcccccattccttattgcctgtcttttggatagaagccattttaactggagtgagatgatatctcattgtggttttaatttgcatttctctgatgatcactgatgttgagccccttttcatatgcctgtttgctattttttnttnttttttttcagaaatgtctattgagttctttttcctatggg

SEQ ID NO: 611369 - DNA, 184 bp, Homo sapiens
aactctgaaccaacttctctatgatctctgaatccacatctgagtccaacttctctatcaccctctatgaatcccatttaacttctacacctgcaagtcctggtatatataggacccctccctccgagctgaagtacacctttgaccttgccacacctttcaccccccaccccgtcgggtggag

SEQ ID NO: 611370 - DNA, 101 bp, Homo sapiens
gctcacacagctggctggatatagagctgatgagtaagaaaacctggcagaacaagttcagcgttttcaggaactcttgatcttggtagtggaagcgtttt

SEQ ID NO: 611371 - DNA, 104 bp, Homo sapiens
tggcgttaacacagtgaattcattgtccctttctcttcaatgctgggacctcacctggtctggcgatgtgctgggtctcggcggtggccgggttggcttcatgt

SEQ ID NO: 611372 - DNA, 304 bp, Homo sapiens
ctagaggaccccgatgtggacatgtcgggcagcaacagcgtgtactggatttcccgatatcttttctcagttggtctttatgaattccctctcaacaacgtggactagtcttctacatggaatcattttctcgccaagcatgttatcttcagtagccaaccagacagtgctgttggttgaacgaacgtaatggcacactgagaggaaaaacaggtcttctgaacacagagaactgaagacatgcatggcagtaggccccatgagagctaccacccagtgagaccaggaaacaatgcaaacaatt

SEQ ID NO: 611373 - DNA, 262 bp, Homo sapiens
ctctatcaccctattataacgacactaatgttagtataagtaacatgaacatattctcctccgcatcatcctgcgtcagattcaaacactgaactgaccattaacagcccaatatctacaatcaaccaacaagtcattattaccctcactgtcaacccaacacaggcatgctcataaggaaaggttaaaacaagtacaaggatcgcgattaatctcagcccgcttgtatgccaaaaacgtctactcctaccccttactgata

SEQ ID NO: 611374 - DNA, 160 bp, Homo sapiens
gaggtgtaattagcagcggggcccggcccctgagctctcggcgagcgcggccggtaaacaagtgggccaggatgccgtacgagatcaagaaggtgttcgccagcctgccgcagttggagagggtgcttttgcaagattattcggcggcgaacctaaggga

SEQ ID NO: 611375 - DNA, 263 bp, Homo sapiens
tgcaacggtctcgtactgactttacgctgacgtcttcctacgggaccactccacgcttcctggtgacggtactactgaccactgggggtcttacgctctggacagagctctacgagacctctagacacagacggacacggacaaaggcttctgtctttctgactgctgactctccaccagcaccggacaattgcgcacgtgttgacacgtctcactgctggtctgtaaagccaggccacgacacgacggacactgagacctac

SEQ ID NO: 611376 - DNA, 200 bp, Homo sapiens
gccgggttgacaatgtggtttagctcttccagagagatagttgcagggttaaactccaattcatttttcgggccctcccagagttttcgtgagttctccgcagctcatacctgttggctgtgtatccctgggccacagctgggtgggggtcgccttaaaatcccaggccgtgaggagttagcgagcccttctcacactcg

SEQ ID NO: 611377 - DNA, 320 bp, Homo sapiens
gcggtcgcctactactactaaattcgcggccgcgtcgactataatctctttttgaaatctctctgaggccaggcatggtggctcacgcctgtaatcccagtgttttggaaggccgaggtgggtggatcatgaggtcaggagattgagaccatcctggctagcacggcaaaaccctgtctctactaaaaatacaaaaaattagctgggtgtggtggcgggtacttgtagtcccagctacttaggaggctgaggcaggagaattgcttgaacctggaaggcagaggttgcagtgagctgagattgtgccattgcacgtcgac

SEQ ID NO: 611378 - DNA, 1058 bp, Homo sapiens
  misc_feature (332)..(332): n is a, c, g, or t
taggtaaaatcttttttattcaaaaaaaaaaaaccccaaaaaacaaaattttcccaaccacacccgggaagggactatgggtaggggcgagggtgctctgtccactccagccctgggcccccagcccagtgtgtggtttgggcagcaaataaggggctagtggggctaatgtggcccaaaaaataaaagtggtcggcggtgtgatatggggagagaacaggggggtgcacaagccgtggtggggacgccggcagaaggggagacacgggaccaagaccaagggtctcacgacaccgtggagaaccgcccagacaggtgtggacaaggccaanttctcatataaccatcttctctgtgtgtgagacctcaaaacccacgccgggtgggaaccacctcttgcgttgtgccccccattacaggcagccggacacatacgggcggtacgtgtggctgcagggtcctgtgggcgtagcaccgcggttgcacacctttgtgacagcggggtggcgtgggtccccccccgcgcggggtgccctactgtgggatcccacaaacgatctcccatgtgtctctaaattttgccgcccaattactcgggagccagcccgcggcgaaagatccccgagacatatccacgcgggatacaaacttttcacgtgggacccccccacaaagtgttgttacgaagccccatatatccacgcgcgataaaaaacacactttttgcacccgcgggattccttgtgtggccacaactcccgagcggacaaaacccaaaactctccccaagactgagcgaccgctgtgtcaatcgtttcggcaacacaaaaccgtctatatcccccgcggggagacagcgtgggtgggcccccacaacacagggcacagggccgaaaagatcccctgtgtataagcccccccaaagaaaaatgggccccgccggtcttccattagaaaaaaagggtttcccgcaggatgccaggcacccaatagaaagacgagttatggtcatcacacacttattatcggggtggaatcatcaccaccgctggtgggcc

SEQ ID NO: 611379 - DNA, 834 bp, Homo sapiens
  misc_feature (154)..(154): n is a, c, g, or t
  misc_feature (158)..(158): n is a, c, g, or t
  misc_feature (169)..(169): n is a, c, g, or t
  misc_feature (185)..(185): n is a, c, g, or t
  misc_feature (212)..(212): n is a, c, g, or t
  misc_feature (226)..(226): n is a, c, g, or t
  misc_feature (258)..(258): n is a, c, g, or t
  misc_feature (312)..(312): n is a, c, g, or t
  misc_feature (320)..(320): n is a, c, g, or t
  misc_feature (327)..(328): n is a, c, g, or t
  misc_feature (332)..(332): n is a, c, g, or t
  misc_feature (341)..(341): n is a, c, g, or t
  misc_feature (349)..(349): n is a, c, g, or t
  misc_feature (367)..(367): n is a, c, g, or t
  misc_feature (372)..(372): n is a, c, g, or t
  misc_feature (375)..(376): n is a, c, g, or t
  misc_feature (408)..(408): n is a, c, g, or t
  misc_feature (427)..(428): n is a, c, g, or t
  misc_feature (432)..(432): n is a, c, g, or t
  misc_feature (438)..(438): n is a, c, g, or t
  misc_feature (440)..(441): n is a, c, g, or t
  misc_feature (443)..(443): n is a, c, g, or t
  misc_feature (452)..(452): n is a, c, g, or t
  misc_feature (465)..(465): n is a, c, g, or t
  misc_feature (596)..(596): n is a, c, g, or t
  misc_feature (608)..(608): n is a, c, g, or t
cttttacaattaaaaaatagcacttcttcatcttatgcctgttgagaagatattaaattttcacatgttgacagtgaaatgctatgtgggtttataagattacagaccattgttttcatgtggataattttagtgcattgtcacccggtatgtntttnttttttaactngaacatttggctggtnggttttcttttaattagataatcacanggaaaattaagcgntcatatctttaaattaggatggcaaaccaggnaaagaacgcattggagatttaagatgtcacttataaggggagaagtgttcttanaaagtcancagaaannggtnatgcctttnattggttngcaaggatgtcttggaangtgtncanngaatagaatatccaatagagataagctgactngaatcatttggagcaattnngccngtggtntnntnttgttccangcacatattggcngtgggattttctccaacagaaaggtgctttcactacggcccgttaacaagcagcaataggttttatattccaactccgagcactgcggtgagtaacatcacctcaatttttaattatccttaaagatatgnattcatatcctnaatcattaacggatcaggggtggacatagggattttacgtttaccattctctcacacattagatgaggtcctatgtgttagaggggttttaggctaatggtgagaactatcagggaacggagggctaaggtaagtgggcttacgatgtgtgttgcacgaagttcgtttgtaaaaggagcggtataattggccaaggaaagttggaaacggttggataaaagtcttg

SEQ ID NO: 611380 - DNA, 1117 bp, Homo sapiens
  misc_feature (712)..(712): n is a, c, g, or t
  misc_feature (1034)..(1034): n is a, c, g, or t
ggagcggagccggcgagctaacccgagccagccggcgggcgtccggaggcggtggcgcagggaggggcccgacgctcgcacgtggccccggcggccgccatggcggacagcggcacctgcggggggcgctggcgttggcggccccgggccccccgggccggggcagttggctggcccagtgaccacgctgtcatactttcagaagcccccccggggggccggcaggagaggggcccggggcgggggcggacgaatgacgggcccatgtgacggcgccaaagggaagggtcaccggtcaagttatgaccgcaagggagcttacggaaaggcgccttcaattctaagaggaggtgggatccgtggaagcaagctcagcggcgccctctacgaagtggccagcgacagagcgagattcccgagaatctggagatttggacgcgtggattgaagcctccgtgggaccagtgcgagaggtgaccgattgcccggggtctgccaagggtcaagggacgctgctgggtggacctgtttacaagacccacagagggccttccatttcttggcctgctgggaccaagatccgggggcattgcagaaagctgagcacaccccaagaagaagttgagggtccccgacccaggagaacgggtggctcccacaggacaatcgctgcccccaaaatctcgtaggcaacagcaaataccgggggacnctgcggacaaggcctggtgccatgagcagggctccttcgtgcgcctggcccaggggttctcttccccttgccccctcagtttttccactttggaggagtccactggtattaccgttgatgcgacttttggggttcatattggactctgcggcagcggccctttaataaaggctaggatacgcctttggtgcacaacacaataagatgagtaagagaacaaaagaagacgcggggtatttgtggggggaacagaagtattaaggagacgtggtataattttttgaccttttttaagggggaaagcggccattgggttttgttngatgttacttgattttttgatgaacaatacaagaaaaaaaataagagtgaaacaataaaaaaaagataaaataaatataaaga

SEQ ID NO: 611381 - DNA, 140 bp, Homo sapiens
accagaatgcaaccctgggagactggacgacgtctgaatactttgaggtctacatgaaggcccgtggattattgagtttctgccacccgcaagattgcaagtacgctctcactcagacaaatggttattgatcacatgac

SEQ ID NO: 611382 - DNA, 498 bp, Homo sapiens
  misc_feature (284)..(286): n is a, c, g, or t
  misc_feature (318)..(319): n is a, c, g, or t
  misc_feature (331)..(331): n is a, c, g, or t
  misc_feature (341)..(341): n is a, c, g, or t
  misc_feature (351)..(351): n is a, c, g, or t
  misc_feature (368)..(369): n is a, c, g, or t
  misc_feature (381)..(382): n is a, c, g, or t
gagatgaccagtgccttggccacaatgcgcgttgactacgagcagatcaagataaaaaagattgaagatgcatccaaccctctgctgctgaagaggcggaagaaagctcgggccctggaggctgcggctctggcccactgagccaccgcgccctcctgcccacgggaggacaagcaataactctctacaggaatatattttttaaacgaagagacagaactgtccacatctgcctcctctcctcctcagctgcatggagcctttttgggggggggggggggggnnnaaaaaaaaaaaaaaaaaccccccttttggggnnccccaaattttncccgaagggngtttgggganactgaattctgccttgnngttctggccacnncccagagtgggagaggctgggaggttgggaggctgtggagagaagtgagcaaggtgctcttgaacctgtgctcattttgcaattttatcagtaatttgacttagagtttttacgaa

SEQ ID NO: 611383 - DNA, 468 bp, Homo sapiens
tcacagttttcgctgtgctaacttaggtctctctccagagagagctatatattaaaaggtgctgtttcttcactttattccttggcaacaatgaattatgcataaagtaaaaacattgcctctcaggaagtaaagccatcagaagatgtctcagaacagcgtgaaatctgtgggatagctttttttttttccaccggcaataaactcagggcattccagaaaaactcgacctttcattactccgagaagggcagtttggtaagcacttctcgtgtcgaggcaccttggtaaaccagctgaggggaactctgcacccagcctccggtgtttgtctgggtgtaaacggggcaccaaatggggattcaatgtggccggggtgttctccatggccaccagcatttcctaataagggcaacttcacttttttggccacggtgctacacaggtaacaaaacacatatttgtgct

SEQ ID NO: 611384 - DNA, 359 bp, Homo sapiens
gtggataccactaacgtatgtctcacgctcaggcgtgaagcaaggctgtgccaggcctggcaggctagcaggatgacagcaaacgcatctgaacgtgtagcaatcaggtcccctgtaactgtgcttggagacgtgtggaccaagggccgacgatgacgcagctatgagcttgtggcaagggaatgcggggaacgcagaacgggcacaaaccagaagtactgcagcggacgaggctgggctctcagggaagccgcctgtcacgtgccatggtggacagccaagctgcacggcgggggacggaaggagggcccttacctctctccttacttgtccattgggaccattctatctgcagccct

SEQ ID NO: 611385 - DNA, 302 bp, Homo sapiens
ccatgtccatgaagatatttgtcttcagaactaaaactgcccttaattttaatatacctctcaatcggccactggccatttggggtctaagtattcaattaagtgggcactccctggaagatggtcagctatgaagtaatagagtttgcttaatcatttgtaattcaaacatgctatattttttaaaatcaatgcgaaaacatagacttatttttaaattgtaccaatcacaagaaaataatggcaataattatcaaaacttttaaaatagatgcggtgtagattgcggtgtttgtggtacc

SEQ ID NO: 611386 - DNA, 397 bp, Homo sapiens
  misc_feature (36)..(36): n is a, c, g, or t
  misc_feature (49)..(49): n is a, c, g, or t
tgaatgaataaataaattggtggattaatgactganatggagtacaganagactgtggtcccagaagacccttaacattgagcttgctgcagactgaatgtttgcctcctctcaaaattaatatgttgaaacctaatccttaatgtgatagtattaggatgtggggcctttggaaagtgattaggttatgaaggtggagccctcgtgaatgggagtagtatccttataaaagataccccagagaggtcccttgtcccttccaacatgtgaggctacagtgaaaagatggccatctgtaaaccaggaagtgagtcctcaccagataccacatctgttgtgctttgatcttggatttccctgtccccagaactgtggtaaataaatttctgttgtttgt

SEQ ID NO: 611387 - DNA, 362 bp, Homo sapiens
ttcgcacgaggtggaacttggccccctaaaaccaaacccgtgggccgggaacttgtcctcggaagccccaactggactctcattcgccaaggaacaaccccgctgctgcgtctcgtcccggggcacaggggacgggcacgacggtggagagacccagaccagctccccgcctccatcaaccaagatggaggagctgcggctcccctgagctgggctcccaccggttggagggctgaggcctccctgggcgtccttggcccgccgtcctgtgtccgcagcccggggcgactgccctgcccaggcctctctaccgcctgccaccgtctcctggtcctcaatggttgatggagactccatggagg

SEQ ID NO: 611388 - DNA, 138 bp, Homo sapiens
tgaccaagtgtcgccccaaagtgagagcaacttttagagctacattagtgcttttgcactaacgttccgaggtaaaatggcgaaaatttcagcaattggcatgcaagaaccagtctaaaagttcatcactggtggtac

SEQ ID NO: 611389 - DNA, 286 bp, Homo sapiens
aagatgtcaagtctctacgtaatggcattttgaagtgctcccatacagagagatagcgcataattttaagacgaccctgttggacaggacgaagacatggagagggcagatctgccgtttaggcaaccttagttcgtgatctgcaaccaggaaaggagtgctgaggcacagggaaacaaggggagccaaaagggctgccggggatggtgttgtgcagggctatgggaagaaggtcctgcccatgagaggctcatctcagttgttgagcagcttccttcagggaaac

SEQ ID NO: 611390 - DNA, 762 bp, Homo sapiens
ggctctccgtgactctctgagccgggagctgccctggaagccccctggatcatggaacgagaaagcgctagaggtttatgatttgattagaactatccgtggacccatgaaaatgcccaatactttagcaagaactggaacgtggtctcggacacagtcgtgtggaatgttcacggagataactgaccgcacagaatatctggtaatctatcaggttcagcgccaacaagtacctcatttgctctttggccgactctatatcgggcgcctgtgctttccggcagctacacacactttccagaagatgtttctacccaattttacagagcaatcaacgcttgcgacactcctaccacttctctcgcaaggcacaccccaacatcaaacaagaagcgcacagcagcattcaacttacacggccgtggattagatttgacaacaatgaagcataagttgcgccacgactttgcaaatttgcggacaacagcgcccaaatcttataagcgagtgcaacactttggcttgggcaacccacaggttttgcgttggataccccttttggaaagcccccttggaacctttggcattaaagatttggttcacatcacagtggaagcccccaatacttgtggccgtggctaaaagtacgggtatgtggcactatgtagtacagtcgcataccagaaacgctatctttgacggcaacattcaatcatggtcacgaatacacctacaagtggttccaaaccatataccaagtag

SEQ ID NO: 611391 - DNA, 309 bp, Homo sapiens
taaaagaaatctatttcataccagggaggaaggctctgtcccacatatatttccacttcttcattctctcggtatagtttggtcacaattatagattagattcaaaagtctacatacctaatacagcgtgagcctagtgtagtagtgctagtgattaaattaacttatgtaacttttatggtcttgggcattaacaggtgtttcaaaaaattttcgtggtgttttacccattcaggtgatttcattcccaaattctctctagaagcattaaggtgtcctcaatatatttaaacacatatggaataattc

SEQ ID NO: 611392 - DNA, 130 bp, Homo sapiens
caatgaacatggctcagacttgctgtgggcagtgtatcagtcggggttcaccacgagaagcagaagcggtaggtgtatacagaaagagatttattatacaggaattggctcatgcaattcatgtagcgcg

SEQ ID NO: 611393 - DNA, 359 bp, Homo sapiens
  misc_feature (60)..(60): n is a, c, g, or t
agatttttagctaatgtccttcaaacatattccataataccaataactgcttatacctancatgtataagaacttacctgtgtcaggttggatgcagtggcacacggcctgtaattccagtactttgagaggctgaggcaaaaggatcacctgagccaggagtttgagaccagcctgggtaacatagggaagccccatctttacaaaaatcagctgggcatggtggtgcacacttgtagtcccagctacccgggaggctgaggtgggagcattgcttgagcccaggaggtggaggttgcagtgagtggagatcccaccaatgcactccagcctcggcaacagagtgagaccctgtctca

SEQ ID NO: 611394 - DNA, 1812 bp, Homo sapiens
  misc_feature (1010)..(1010): n is a, c, g, or t
  misc_feature (1151)..(1151): n is a, c, g, or t
cgggtttcctgcccgctgctgcgtcgccttccttccggctgccgcctgatgggtgtggggtggccccatttggcctgcggtgtggtggtttttgtggtgttcggacacaccacgggtggtcgagcgtggttggttgccttcgtgttcgggggggcccccgccttgataacggggcttgtgtcgcggtttcttccttgcgttcctttagaggaggtgtggcttgtttcggttggcgtctatgaggaggggggtcccccgatttttctcggggggagtctctctctattcaggggggtctgtctccacatgttgggcgctttcttgactaggcggtgctcgcttgatcagcgggcgtgttgcgtgtagcgccgccgacaatgtgcgctgtcgggcggcgcggcgagggagtcgtccgtattgtctctgtctgggcgcgccggcagctcggcactgttgttttgggagccgcggcccgtgtggtgcgccgctggtcttgtagatggtttgttgtggccggaagcgattagtgtgccgtcggttgggtttctcgtctagtttggaggatgcttgtcgtgtaaagagggttgctcgcggaggttctcgtcgactctgcctcgcgctcatgggggtgtttgttcccccccccccccctcctgttttgagagggggggagattgccctgcgccggtccgcgcgcgccacaatgggtttgtttatgggagagatagtgattggggcgctcctcttttatagtagcgcccctgtttgtgtgctaaacaaacaagcgggggggggggttggcgtgtgccccctctgtttctctgggggatgttggtataagacgtcaccgcggtgagttccccgctgagtgtcgcccccccgctgtcgggggtggagaagaggtgtttgtcgcccccgctcgtgctttcttttggtgaagacaggcgatgatcgtcgctcttgatgatgagcaccccatctcggcgaggacacagcagttgtgtgtgtgngggtgtgtctctcatatgcccctctccccacactgtatgaaagagtggtgtcagcagagagccgcacagagagcacagcctcggggtgtgggaaagacacactgtggggagagcacagcagtgtaaccacagagagcgtgnggagatgtttttttttgggcgccacatttggtgttttttcacacaccgcgcgggagtagttctctgtggggaattctctcgtgtgtggaatataaaagagatataaaggtggagacacacggcttgtctcctgaggtgcctccacaagaggatcttgggagatttaaaagggggttattggaaagggacgctgttgtgcgcccggtatctcatctcgtggaggtggggtacccctgggggtgcgcacatcgcacacaggggggtttatcttttggggacactctctcgtgtgtagaggttgttcactgctcaggacattctctgtctcgccactctcctctcccacccgagaatagcccagcagaggatttcctgtgaagaaagaaagactgtggggtttacactccggttagagttagagatctctaagaccacaattagtgggactgtaatattgcgtttgtttggaaccacgtggttgtgaagagaaagaggcccaaagaggacattttataataatttgcactacgtgtagggaattggtcttattctcctggaaaaaagtgaccggagagacttttgctctttaggccagaagagtttctcagaagtttcctggtgtgtgtaaattataccccgcacgtctttgccagtgtgaata

SEQ ID NO: 611395 - DNA, 992 bp, Homo sapiens
cgcggcggcaccggggcggctgcgtgcgcgctcggagccccagagggtcacgcgtgccgggcagggtcggtgtgctgcccccttgcgagagccggggccccagtgccctggcggacaccatgaaccacctgaactgtgctggccaaagcgctctatgacaatgtggccgagtccccggatgagctctccttccgcaagggtgacatcatgacggtgctggagcaggacactgcagggcctggacggcatggtggctctgctcgctgcatgggcgccagggcatcgtgcctgggaaccgcctcaagatcttggtgggcatgtatgatacagaagccagcagggcctggctccggccctccctgccaccccggcccagcctcagcctggcctccatgccccaagcgccgtccggcctccccagtaacaacgcccatgctcgccaaaacactaccagacaccagccagacagcgtctacctggtgcccactcccagcgaaggctcagccaaggccttctaccaaaggtcccgggttcccagccctacagttccagttctcccccaggccaagcaagacaattccagcttcttcgaagcagaaacaccatcagcccggatttcccaggcccggcccacaagacctgtaccaagggtgccccagggccttggaagggccttgccaaggaatatttaaccagggtgaccaccttttcttgcgcgcggattcggggcgcaattgacaattcataccaaaggtaccacgcccgtttcccaatggtacaacatgcgccaagcgttgtggggaggggcgctcatcggaaacgacccccccggggcgaaatgacgttggtttgtgtgtcgcctaacactgcgatctgtgaggggtcagggggcataatgttatacgtaggggcctgtccctaggccgtgatatccaggggaacggcagcgattagcacatatcccggataaaaccatagtttgtgccacaggg

SEQ ID NO: 611396 - DNA, 391 bp, Homo sapiens
tcgtgtggttcttcgctgttgtagctccggcgtctcggcgtagactcgcagtaggagaggcggtctcttctctctctccttccttttgtgagatttttttgatcttcagctacattttcagctttgtgagaaacctcatcatcaaaggagatggctagcaatgttaccaacaagacagatcctcggtccatgaattcccgtgtattcattgggaatctcaacactctggtggtcaagaagtctgatgtggaggccatcttttcaaagtatggcaaaattgtgggctgctctgtgcataaaggctttgctttggtccaagtatgttaatgaaagaaatgcccgagctgctgtagctggcgaggatggcagaatgattgctggccaggtttta

SEQ ID NO: 611397 - DNA, 1118 bp, Homo sapiens
  misc_feature (145)..(145): n is a, c, g, or t
  misc_feature (496)..(496): n is a, c, g, or t
  misc_feature (541)..(541): n is a, c, g, or t
  misc_feature (652)..(652): n is a, c, g, or t
  misc_feature (687)..(687): n is a, c, g, or t
  misc_feature (760)..(760): n is a, c, g, or t
cttgatttggtggtatcgatacgctttcttcgacgcggcgctgggacgagagcatttcggcgcgtgtcaactcacgctcctggcgctcatcgatatgacgctgcacggcgcggtactcttcggcgtcgcgcttggccttcttgtngcgtgtaaacttgggacggaagatggattggttgagctgagcaatcaaacgagcattgtcttcagcacgtgaggcatgggccttggccacgtcgagactgcgctccgtatcaccgatcgtgtcgctctgctcacccagtctgaccatggtgttggtggccgtttcttctgcctcacgtgcgagacgcaccgcattgcgtgagctgctgagactctcttgcttcgtactccgtagctggtatttgatatcctgaattgcctcttcatcaggatcaaactcggtgcccgcaccctgcgacgtgtatggatcgcggtacactgacgttggctgtgggagacgcgatacgggcgnggctgaacctgagccatactcggcgagcagctcggcatcggatgnctgcggcgtttccgtgctcccgctgccgtatggatcacgcggccggccagcagcgctcttcgctgatacatacggattcagctcactgctattgctcggttccgctggcgnctgctctaccggcgggatcttgggtttccgtcganacaagggcttcatgagggcggaaaaacaagacgcaccgccccccagtggaggtatctcagcttccatgggccnacaaggatccaaaccggcacggacgctcggagcgcgggtaccaacgggccctcttaaggcgccgagcacagctgcacctgctgcgtctcgtttccataaggatgaatgtacgtacaatctacttacacatgagcgattctcagcgatgcgcgtgatccccaattcatgcggaatctgagtgcgctgggtcctgtggtgccccagcagcctgtggatgcgcctactcacgaggggcctatgatgggcattatacatgcgcgtgtacgcaatgagcgcgaagaggaggagggctcagcgccaggtcttacggctggagatctggtgcgccttttgaccgaataccaccaaaaacacggag

SEQ ID NO: 611398 - DNA, 254 bp, Homo sapiens
acaagaaaaaaaccccccatttacagatatgataaatccccgaataaattttattaaaatcgcgggggctaggaggagataatgccatactcttttacactgaaacagcagcattattgcctagaactttacccattttagagttagatactaaggaaccaaactagtgggccaccatcatttccttttttccttttcctttttttttttttggcccttaaggtgccataaaaaacctggtttttttccttttg

SEQ ID NO: 611399 - DNA, 643 bp, Homo sapiens
tcctgtttacatcgtgatgggtccctgctggtttggttgctgcagtcatcaagaggagccttgtcctcttgttttccttgactggatctcgccccatcatcatgtcttctactctgtctctccatgatggctgactgctccacagtgctgttggatctgtggtggaggcattcaccctctcctctgcctcatgagacatctggaaatacttggtaatgctatccaaggcaccccgaatatctgtgttttttgtacattccagtttgttcagcaagttctttcacagtgtttgtctaggctttcggcttctttctgtagagaatcctgttctttggcttgtcttttgctttgggaagttgtgtcagataatttcacttctacttgagccatcatttttgtaacatctttaatcagtttctcttgttcctcaaagagattcccaatgtttttcagtgggtctgctgcggggttctgcgccaggatgtcttttatctcgctgactatcctctcaactgagtccagagtctcatgggaaggccggtcacacattgatcttcaggcttgggttctccaggatctgtgttcctgagggcaaccggatgtcacatccagaggaaagctgtggatgtgtgagcaggcagcc

SEQ ID NO: 611400 - DNA, 147 bp, Homo sapiens
aggatccccctcggaaatcgggtgctgggggctcagtgtgccacttccctgctccaagttctggaggcgaggaggcaatggaccctgttgaggcagggcagtgcccagctccatgtaagtccatctgtctgggtccctgagacccaa

SEQ ID NO: 611401 - DNA, 314 bp, Homo sapiens
agatacgtgtcatttacgagatgtggaagatacatcctataagataaacatataaactgtaaataatcgaaagaaggctatttacataggggttttttatgcttaaggttgataggtctcttaaaattgctacatgtgttacataatttcaacttcatattttggcttattttttacaagcatgaacaactatagaactcttcagaaacgtatctacttgtgagaaaaagaataccttagaattttcaacacgatgcggtattctacataacaaaatacacacatgctaacttttactctgacaaaatacatgt

SEQ ID NO: 611402 - DNA, 185 bp, Homo sapiens
  misc_feature (25)..(25): n is a, c, g, or t
  misc_feature (34)..(34): n is a, c, g, or t
  misc_feature (48)..(48): n is a, c, g, or t
tgctgggattacaggcgtgagccantgtgctcgncctcctttcccttntagatccctgcattccaggtgtcacggatgggaaagtagatctttggaggggctgggagctggggtatctgcaggcctgtctgctgacacacgtactgactgaactggtacatggcgggggggacaacatggcgaaa

SEQ ID NO: 611403 - DNA, 540 bp, Homo sapiens
  misc_feature (84)..(84): n is a, c, g, or t
  misc_feature (248)..(248): n is a, c, g, or t
  misc_feature (286)..(286): n is a, c, g, or t
  misc_feature (300)..(300): n is a, c, g, or t
  misc_feature (373)..(373): n is a, c, g, or t
  misc_feature (410)..(410): n is a, c, g, or t
  misc_feature (505)..(505): n is a, c, g, or t
  misc_feature (534)..(534): n is a, c, g, or t
ggaggagtgactgagccccgggctgtgcagtccgacgccgactgaggcacgagcgggtgacgctgggcctgcagcgcggacagnaaagcagaacccgcagagtcctccctgctgctgtgtggacgacacgtggggcacaggcagaagtgggccctgtgaccagctgcactggtttcgtggaaggaagctccaggactggcgggatgggctcagcctgttatcaaagtcaccaaatatttctcttctcnttcaattgatcttcttatctgggcgcatgatcctgggntcgggtgtggatcnggccgacaagagcatttcatctctgtcctgcctcctccagtcgttaggatgggggctatgtcttcatggcgtnggggcatcatatgctcatggcttcctggctgcatcgngccgtcaacgaagtccgtgctgctgggctgtatttgctttccgctcctgatctcatgccagtgacggcggggcctcttctattctggcaactgancagtggtggacgtgacgagtcattgaganacgctc

SEQ ID NO: 611404 - DNA, 475 bp, Homo sapiens
  misc_feature (84)..(84): n is a, c, g, or t
  misc_feature (248)..(248): n is a, c, g, or t
  misc_feature (292)..(292): n is a, c, g, or t
  misc_feature (300)..(300): n is a, c, g, or t
  misc_feature (338)..(338): n is a, c, g, or t
  misc_feature (344)..(344): n is a, c, g, or t
  misc_feature (354)..(354): n is a, c, g, or t
  misc_feature (363)..(363): n is a, c, g, or t
  misc_feature (366)..(366): n is a, c, g, or t
  misc_feature (378)..(378): n is a, c, g, or t
  misc_feature (403)..(403): n is a, c, g, or t
  misc_feature (424)..(424): n is a, c, g, or t
ggaggagtgactgagccccgggctgtgcagtccgacgccgactgaggcacgagcgggtgacgctgggcctgcagcgcggacagnaaagcagaacccgcagagtcctccctgctgctgtgtggacgacacgtggggcacaggcagaagtgggccctgtgaccagctgcactggtttcgtggaaggaagctccaggactggcgggatgggctcagcctgttatcaaagtcaccaaatatttctcttctcnttcaattgatcttcttgtaatatgtcccatgccgtcctgaccanctccggantctccttccagggcatcccagcctgagcctttccaganccgacnggccggggantgagggganttngttggtagggantgaagacgaactatctccaaggaanctaattgggtggtgaggagantccctgccatcccagtggtcctttgacaagcactggttctgcggccttccc

SEQ ID NO: 611405 - DNA, 400 bp, Homo sapiens
atggcatgctgcacccctgatgtaccatggtaaatgcctatcactggggtcggcgcccctactcctgtgtggatgccacctagcatgtatctggctccccacacattgcacggcaggagcggctggccagcactcgggactgggcacttgcggaccagaagacaagaaaatgatttgaggacagcttcaatcgcggtgtgaagaagaaagcaacaaaatgaccccttgaaaccattgcggtgggaaaacatctaaagaaaggggtccatgtggtacatcgtcatagctgggaacagtctaagacccaacagccaagtgatttttccattgctgcgaaagctggccaaagttacattcggtgtggcccattaggtcttccggaagttactttgttgcggta

SEQ ID NO: 611406 - DNA, 250 bp, Homo sapiens
aatcgagctcgcaccgcttcgtgagatccatgttcctttactcagtgttctgctgcttcttcagtgaccagagctgctgtcctcctcatgtgacaagtcctggggaagggcctgcaaagcactgtccccagagatcccaggcagagagtagatgacgctgtggcagtggtcaagggtgtggaatctggagtcagtctgctggcctgacgctccctggctgtgtaactttgggccggtgacttaatctctc

SEQ ID NO: 611407 - DNA, 1011 bp, Homo sapiens
cccacgcgtccgaaaacagaaaaaaagagagaaaaatataactgagaaaagagatgtttcttcttattcaaattctacgatttttggttcgatttttggtttaacaattttattttttacgttaaaaacttaatgctacatagtatacgaaaaaaaaaaaaaaaaaaaaaaaaaaaaaaaaaaaacaacaaaaaaaagaagaaacaacacaaaaaaaaaaaaacaaaaagaagaagaagagagaggggcggcgcgcgcgcgcgcagaatatatctatcttcctccggcagggcgacccccaacaccacaccccccaccctcattttatttacaaaggcgagggcgtagcccatattcacggcgtggtctgcttttattattataaccaagaggcggaggggcgcccctcgtgtaataaaaaaagacaacacagccgataggggagggagacaaacacgcaggaacgaagacgagaaatgttgtacgaggcagacgagacacccacacgaggagagggagggagaaaggagaaaacagcgggagaggaacaacacaaaacacgaacgaagaataaaaaaaaaaaaagaaacgagacgcgaacaacaaaaaaaacaaaaactaagcacagggagacacaaaaggagggcgccacacacaacaaaacagagccaaaaaagacgggcggcgggagaacaagaaagactgaaggggcggagaacgaagacaaaaccgacctaggaagaaaaaaaaaatatataccacccggggacaaaagaagaaaaacaacacaaaacacaaaaagaaagaagaaaagaaacactcagcaacacaaggaccacaaccccaacaaccagacacacaggagcaaaggaagtggggaaagtggaaggcgagcaagcgagggcggcaagaaaagccggcgggcgcggagggggaggggagcaggggcaacaggagagaaaaaaaagaagaagaccgccacaaccccggaaaacacagcaaaacacaaac

SEQ ID NO: 611408 - DNA, 782 bp, Homo sapiens
cccccctacggtggtaaagttttagtccctgggagtgccgctgttttaaattagtgggtccccggggctggggaatagccagacaaagaagcctggtttttctggtttcttggaagggtaccccccatttccacggagtattataacggattttctgtcgtgttccttatcccaatcaaggccattatgtcatccttgtacaaaggtatgtcacaggttcttttttgttacatcaggctcactgggaggctctgttcttgtaccattactacaatcaacttgtaaagccccaagatagaacgttctgggtgtgtattctcagcacccccatgttagtcgcatctcatacatgttaccggtggaaagtcaggtttcctccctagagagaagggtgaccaaggctcgctttacgcggccagtcatatcaactgtgatgaatactgattctctggccacactcaatggctagcgtatgtcatcaccgcattgcgggaggatcaagcatgtgcactgcttcagccctggcgtcccaggtcagcctggccagcacaggtaggcttcgtctcgacaacatacgttttatctctaagccgaacatggtggcacttggctatggtttgtgctacgcacggctagtatcggcgattcatctgagctcagagtgttgagtgcacagtgccccgttcttgcccatttattctagagtggggaccacagtgtgccctgctgtctaaaaaaagaaaggtgtatctttcctgctggatattgtaacgagcttcggc

SEQ ID NO: 611409 - DNA, 337 bp, Homo sapiens
gcggccgcctactactactaaattcgcggccggtcgacgcaatcagtgttgcagtgttaagattttgaagcctggcacaatggctcacacctgtaatcccagcatttttggaggctgaggcgggaggctcacttgagcccaggagttcaaactagacttgacaacatcgggagaccccatctctagaaacaattaaaaaaagaaaatagctaggtgtggtggcacatgcctaggaggctgaggtgggagggttgcttgagcccagaaggtcagggccacagtgagccatgattgtgcactgcattccagcccgggtgacagagcgagaccctgtctc

SEQ ID NO: 611410 - DNA, 319 bp, Homo sapiens
tcttaatctattataacagtaatttctatctccatattcaaattactcatatttctgtcatctccaatctaagatatttatatagattgtctccctcttctttgattcagcagccatttacagacactataaccttaacctaattctggtttttgacacttataagacagaatttaagaaatgcaagcatgttcttttctttgtcatcactgaccattttttcagttacctcatcctctatcatgatggttctttcactactgcagttctcctgtatatcaaccatcattctggtttccaggtaaatggacgaaggaga

SEQ ID NO: 611411 - DNA, 215 bp, Homo sapiens
cctgacaggatctggaagaggagctggtggctgccaacctgggcgcccggcacaggcctggcgtttcccccttcccatcaagccagggctcctcctcctgtcgtgggctcattgtgaccactggcctctctacagcacggcctgtcggtgtttcaaggcagaaccacgacccttgactcccgggtgggaggttgccaaggatgctggagctgaat

SEQ ID NO: 611412 - DNA, 347 bp, Homo sapiens
attagaggatcccgtgcgctatactactgccgagggcctgcacggctgctggacagccccaccttccacctcaccctgcactatcccacggagcacgtgcagttctggtgtgggcagccctgtccaccccatgcaggctgggtacgctgatgggtgacacttgtccatgctgctctgcctgggggtgacggcagccccagcccgtgagtatacgcttttcctgccttcagtgatgagcatggaggaagtgctgaattgtgaatctctgaggggaacttgaccctggatgggagtgaccctggggccagagctgggaccctatggcttgcagatgtggagtgattacg

SEQ ID NO: 611413 - DNA, 235 bp, Homo sapiens
tattcctagcctgccagtgggggaggtggtgaggggagggtcgggcgggcaagcccctacccgctgcgcggtgctgtcctgcaagcgtctggtgcgtgggtttggggggtcagggtggtggtcgagtctcctgtggtccgtaagcgtggggactgtggctactttcttcctgtgtgagcatggtttgggcacttggcgcaggcttaggacgtggtaccggagcttcgaattcgta

SEQ ID NO: 611414 - DNA, 930 bp, Homo sapiens
atgtggcacaaggtgccctattgactttgtctgtgtcaaacacccctcgtcgtgtctctcctagaccactctgcccgttgtttaagccccctgggtcccacacaagcgctatgtgccacgtgccttttcagcccgaggcccgcgttcgacgggagccgctgcccccatcttcgggggaatatttggggtgaccgcgcttctctgatggccgcggttcccccatgtcctgctcaggagcagggccctcttcgttcccagcaatcatggtctggcccccgccggggcgtttctctcgtcgcgcccgcccaagggcatttcaatttttgggcgcccaagacacaccaccacagttagtttcatgataccccccggccccacttccactacggttccttgggccccacacccccacccgttctctgtaagcacaatataggcatccttaataattgttgttcttatggagacggggttgtaaaccaccacaacatattatcgtccttttcgagacaaaatgtctatatatacctctccccctctttagccacccctggttggtaattaaaacccccatgtatcctctcgcactgttggttatacaaacagtatcttttttgtgcgaccccagtatttaactacaacggaactttaatttcccccgtctccgctggatgtatttccctgcatcacccactgcctcctgttgaccaattacctctgtgtgattaccctactgagtcccacgttgaatccccacaccaattaataggatgtacgcctcacctgaatccccacacctatattagtgtaaccagaccgcggctttaatattatctgagggccccctgagtgctttccgtctaacaataaaaaaattcccaggcccccccgaacccaaaaaaacccttgtggcattcccccacaaaaaca

SEQ ID NO: 611415 - DNA, 748 bp, Homo sapiens
  misc_feature (18)..(18): n is a, c, g, or t
  misc_feature (74)..(74): n is a, c, g, or t
gcctgagccagaggaagngaggaaaacaatagcaaaaaccaggacccttcggacttgccgctgaatggggattntcgtcgcgatgttgagtttacctggaatgccccggtgtattttgggaaggcagacatcccacggaaacaatgaagtggaaaagaaaacagctaaagcaaaatctagagcccagtttttgccaaaccagccccacgtgggctgggcaggctctggaagcccaagtcaggccgatgaagagcggctgaggccgtggggatctggtttaccaggagggcacatggaggatgcaagaaaaggaagagccgtattcaagtccccacttcagtgatgaggcagaaagaccctgcgcctgaccacgtgggaacagcctgcagtgagcggtgacgccgcctggcttgagctaagtgctgggctccaccattcattggctgagtgaccttagatgagaagagaatgagccatgtgtttcctgaaatcatccagtggcctcaccggagaatctgcaagagccggtaaacccagaagcttggccgtccattcctggaagcagacattgtgtcttcgtccagcaagcccctggctctcaagactcactgtggtggcaagaacatggcaccttgaccctacacagttcttccatcttttcagaagcacggtgagcacagattgctgggattacagacgtgtgccaccatgctcagcccacactcgtctttaagaaaattaacataga

SEQ ID NO: 611416 - DNA, 515 bp, Homo sapiens
  misc_feature (154)..(154): n is a, c, g, or t
  misc_feature (216)..(216): n is a, c, g, or t
  misc_feature (226)..(226): n is a, c, g, or t
  misc_feature (281)..(281): n is a, c, g, or t
  misc_feature (329)..(329): n is a, c, g, or t
  misc_feature (338)..(338): n is a, c, g, or t
  misc_feature (343)..(343): n is a, c, g, or t
  misc_feature (350)..(350): n is a, c, g, or t
  misc_feature (373)..(373): n is a, c, g, or t
  misc_feature (427)..(427): n is a, c, g, or t
  misc_feature (443)..(443): n is a, c, g, or t
  misc_feature (464)..(464): n is a, c, g, or t
  misc_feature (477)..(477): n is a, c, g, or t
tgctgcgggtcgctctacaggatctatgcgagatgctactgaaattactgatatgccgatctatgggcaggtcagtttgctacaatagagactaattatcacatgctatacggtccatgtcaaggtgctaaaagcacctagttccccaagtatngtttagttccctctcccccacaccactgatgtgttccatgttatcttcagttacaatgcaantaaaggaaancacacaactgagtcagatataccaaagaatcaagtttgcactttttatctgaganctgcaacagcactgaattctgcctgacaaattacagctctaaccccanacccacacngtttngatgtangctagctttaccatacaagtgtnaggtgctgcactgtaatttcattgtcagaaatgtgatgccagaatgcccacggnataaaagtacatacangtcaccaagttagattatatngcttgttacctanctgtatgcatctcggaacggtaccgcgctcgcattcgt

SEQ ID NO: 611417 - DNA, 174 bp, Homo sapiens
tagtgactcagaatcaacggaaacagaacccagttggttctggcagagcctggagttcctacaaagaagactcggttagatcaaccaaattttaatagaacaaacagcccaggactttcagcaagaaggttcgattacggaaaatgaaaataccagagcttgaactatagaaaa

SEQ ID NO: 611418 - DNA, 220 bp, Homo sapiens
acacctggtaataatgtgtgtctatatataaatatgatgtatatatattatattatgtatagattttgtgtacatattaatatatatatatacatatttatgtatatatatatttatatattatgtgtatatatatttatgaatatttatgtatattatgtatatatgtatatatatttatattcttccatctatattcacttaagtgggtagtcacaga

SEQ ID NO: 611419 - DNA, 848 bp, Homo sapiens
ccgagctcatcatctacgacgcccatacacagcgtacggtgattgtttgtgctcccgcaacatgacaagctggactttcctgcctcttggaagacagaggaggaaatggcagcaggagccgcagctctgcgggtctactttcagcgacacagatcctgaattccagcaaaagagctatcgccaaccagtttgaagaccgccccaccgcctgtccccaagaggaactgagtcagccatgtaaatgcagtttcttgatatcaccgtcctgtatcgttcaaccagtgagcccccacctcggccactccgacgcccttgaactacctaggacctaagcggctcatactggcggattgtgaggatgccccccgccagctcatctagtagacgcaggatccacactagattaattgctggacaaagagcgggcgcgccatgcatctgttgggccaggggggggcagcgcataacgatcgctaccacctcacctgaggacatatcctccatctgtcattacgtggcccattgagtactgctctttctgctagaggggagcggacctactcttactcaagcgcgtcaataccggttgtcccacatgtgtgcgtacctgcggtcagtacagaatctgccacgttggagcgccataatgcacccgaagccaactctatagatcgtccgctcgcgtatatagaacatgaccccatcgtcaccgccccccgacccatttagaacagatgcctacggtctatcttagagtgtagaatgacgcccgtgtctgtgagcaccgctccaggataatctatcgtctgtgacggtcaagtcggattggaggttggcgtagcgaccac

SEQ ID NO: 611420 - DNA, 347 bp, Homo sapiens
caccactcctatagatcagtggatcctcaaactgattatttaagatcaataaaatggccaagcatggtggctgtaatcccagcactttggtggacaaggcaggaggatcatttgagcccaggagtttgagccagcctgggcaacatagcgagaccctatctctacaaaaaaattaaaatgctcacacacacctgtagtctcagctacttgagagattgaggtggaaggatcgcttgagcccagaaagttgaggttgcagtaagccatgatcatgccactgcactccagcctgggcaacagagtgagaccctgtctcaaaaagaaaaaactgatctataggagtggtg

SEQ ID NO: 611421 - DNA, 204 bp, Homo sapiens
ctgggtgcatgcatgtgggagagacagagtaaccgaacggtgcgcgtgaccaggaattcctggagtacacgtcaacggggatgtgaaacaggggcccatttccgataactacctgttcacaccgtggcaaggccgctggtgccttgcgtgggaaagctgtggaacatggacgattgtgcgcgggacacgcttgtgcactgcaga

SEQ ID NO: 611422 - DNA, 234 bp, Homo sapiens
agtggggtttttctatgttggccaggctggtcttgaactcctggcctcaagttatctgccctcctctgcctcccaaagtggattacaggtatgcaccaccatacctggcctttagtgaacatcgttatgcatatagctctcttctgctacagctttccttcagataaattctcagtaatgtagtgagcaggagtccaaggatttggtgactatagggatggccaggcctcgttg

SEQ ID NO: 611423 - DNA, 473 bp, Homo sapiens
tctggctctcctgctctaagagaagctgtgtgatgtgcatctgagcagagtagccctataaatatatgattagtagtcacagccagggcctgggttcctgggtcattggaagcttaaacctcataagttacaagtcttgactcctagcagcagagattagaaggggctaacctgctttaagtcagatagggactctccttgtcatgctgtccctgtggataacaaacagggattgaccatcttgctgttgtacaggaagttgttagtggtgtgttatcccattgatgctgggacagctgttctcttatagtgataagttgagtctgttgtcctcttaaacatgaaacatacacttcttaagctgaaccacgtaaacttgaattctgtgcactgggagaaaagtgtcctgtgtttcaagataaaactgttctaaaggcttccagggtattgatggaattttttaaaataatgca

SEQ ID NO: 611424 - DNA, 176 bp, Homo sapiens
gagaccggttgccgccatgatagaacagcagaagcgtaagggcccagagttgccgctggccccagccaagcggcagcgacacgtgaaagctggggggagcggcgcctggcccaggagccgggcagcagcaggcgacgccgggagcctagctgcaagcggcacctccaagatgcccc

SEQ ID NO: 611425 - DNA, 701 bp, Homo sapiens
  misc_feature (6)..(6): n is a, c, g, or t
  misc_feature (17)..(17): n is a, c, g, or t
  misc_feature (45)..(45): n is a, c, g, or t
  misc_feature (52)..(52): n is a, c, g, or t
  misc_feature (60)..(60): n is a, c, g, or t
  misc_feature (98)..(98): n is a, c, g, or t
  misc_feature (139)..(139): n is a, c, g, or t
  misc_feature (165)..(166): n is a, c, g, or t
  misc_feature (232)..(232): n is a, c, g, or t
  misc_feature (236)..(236): n is a, c, g, or t
  misc_feature (243)..(244): n is a, c, g, or t
  misc_feature (246)..(246): n is a, c, g, or t
  misc_feature (254)..(255): n is a, c, g, or t
  misc_feature (272)..(272): n is a, c, g, or t
  misc_feature (275)..(275): n is a, c, g, or t
  misc_feature (297)..(297): n is a, c, g, or t
  misc_feature (507)..(507): n is a, c, g, or t
tggaancccctgcaagntttgaagttgccaccctttttggtgggnatctttnttcccccncccccaagttttgcatttttcggccatttaaaattttnccttttttaattaaaaagtttttaaaattgggggaattttnaaaaaaaaacctattttccagccttnnttttttccttggagatgccatgaaaacttttccccacatacatgcttaggaaaaacagttcagaanacanagggganngnctcttccnnaaggagcagctgtctantcngcggcctgttccaagggccacngtgggaggaagcctgggctgcagcgttccgaggcagcagcagcagaggggaaggaaggaagcaggccttgccttgtgtggcattccagttccctctcccagcaggggccagattccccttccttagcttcaactacaatttggcgaaagcaattctagggtaatcgggggcagtgaggggtggggggcggtgagaggtttacttccctcngcttagataacagaggtagaagaaaccctttctgtcaattgcttggcctctaaatgccacaggcaggctacttttcatggctgttcgaagcatccaagcaatccaaagtggctttgaacaacagagtaaggccaagaagggcaaaaagggaccagaactggcccaaacacctcagctctgctcgtgccgaattc

SEQ ID NO: 611426 - DNA, 983 bp, Homo sapiens
agcggcagtgagccaagatcatgccattgcactccagcctgggcagcaaaacaagactctctctctctcaaaaaaaaaaaaaaaaaaaaaaaagatttaattttaaaccccaaaaccattaaaagttcctaaaaaagaaaaccctagcccaatcccatttcgagggacatagggcattggggcacaagatttcattgatggaaagattggccaaaagcaggtggcaacatcttgcaaaatttggccaaaggggggatctagtttaacactaaaaggagcttccggcacagcgaaagaggaaaagctatctcaatcagtccagagcagggcacccttagaaagaaccggggacgaaccctttgtttggcaatgtctatagccctttctttgcccaacaggtgtcttaatgtattcccagagacatttgtaccaacgggaaccttctaagaagtaatattttacttaaaacaacagacccaaaacggcccacatgtccaagaaacgtggtggacccaaacggggattttttgacaccagggaaacatcttttctttccaaaaaagtgacccggacccagtttatattagcggggccacaacaaagccgttttgaaaaacaagaaggcttcagcactaggtcacctgtgatctctattatagagacggaaaaagttggcagatactttcaagaaagcccacaaggggaggcgcccgtggttgccgcgtgtgggctccccacagacgctgtgtatatagccccccacggcaaacttctgtgaagaaagggcccaaagtgggcagacggtgaaatctcccccgtttgaaggggctcacgggcagtttttggcaagaaacaatagcctgtgggccacaatacagtgggacaaaaacaccccccagcatctgttctcagcttcacaaaaatgtacacagtaggtgaaacgaacaacactattttctagtcacgaaggttttttggtttaa

SEQ ID NO: 611427 - DNA, 430 bp, Homo sapiens
ctttccatatgacaggattgtgaaaaggaggatgtccaaagaaggtgttgaagaggccagagtcagatggaagccgtgttctggatgtgggatgaaatggaaagactcctgggaaccattaaatcacttttttgtaaaatacagtgggttaaaaaaaggaatgcttttaaaaaaagttgttctaccgctgttgtagctattttcggtgcaggtcttgtttttgtttgttgttttaaatctactttaactcagcacatgtttaaacccacattttgaaattgtattttgttttatttttattttttgaattgtattataatacatttttctgttaagctagagtaaagccttccacgcacaaagataaccacttacagtattttcatttatgtcatatttgcagccagtaaagacactaaatccctcgcca

SEQ ID NO: 611428 - DNA, 315 bp, Homo sapiens
  misc_feature (189)..(189): n is a, c, g, or t
  misc_feature (252)..(252): n is a, c, g, or t
gatcctgaccactgttcgtccggctcaatcaaatcctaagcaaggcctccaggttcctggaagtgctgctgcagcacggggttctcaaagctgtcacttctgtatgtgaagcgaagcttctcaacgatagccttcatcttggccacctgctctggagttgcatgatttttcagtaaagggcatcttccnttttatcatacacgcaaagggtaaaaaagacccagctgggaaagcctaggaggagtcacctgnaatgttcttggtcatcccaactcccttcttcgcttgtgggccacccaaaaagccaccaaaaaa

SEQ ID NO: 611429 - DNA, 852 bp, Homo sapiens
catctacagttcttttcaaatctctttgcaagcgatgtcctctctacaagaatattgtgctctctggggtcgaccatgttcattgtcactttagtgtgatccgtcgacttgggaacagtgatgaatttgaaggagagagaactgtagagtagtacctggtgtgaacatttatcgttgtagagaatagtgggatgtgggtggaacgattgaagccagattaagaccaatattgggtgatacagaggtcatgttagagcactcgaggaatgcggggcgaatagtgcagctattgcgctttgggggaggtttagatccattggcctggggttttcccttgggatgccgtggaagtgtgctgaatccaatagggtaattgatcgaaggaaactccatacacatagggagtgtcacttgaacagggaaactacttctgggggaacccatgtgagtacacaattatttggttgcgaattttcaatcaagagttcgcaagtggtggcttctccggggggagagttccgattgattgcggatcaaaaaaaacttcgggggggatattccaagtttgggatataactacggggcgcaggctataccgtgccgaaacggggctgggaaggcgcagatggcacgaccgttaccacgtcggaataatctccgtggcaggtaccatagccccttgggtgttgtttgtgggctgacttggagcaacttggggcgcacatggggaccgttgagatgaaagtcagttatctagaaggcaacacctggtggtgcccccctgttggacacagcgttaggattacggacgtaggtcccatctatacgccaggtggcacctcttaattcccc

SEQ ID NO: 611430 - DNA, 682 bp, Homo sapiens
agcgggtggccccggagccgccggcgccgcgcggggaatagctgtgcagcacgccgagcccggactcgtgctggctcggctcggcgcgggcgggcgagaggatgctggctgggcttcccctgggctcggcccgcgctcccgcctggggagggccccgcgcgctgcccctagcagccgccgccgcctgcgggtgcaggggaggggtccggagagcctgcgctcgcctgccgcccgcgcctgccggcccccgcacggccctgcccctgatgcctcagccccagggcgggcgcgctgggcctggtgcccactggatctcccagccctcgtcgccagcctcctccttccccctgtcggccgggcgcccggcggatgctgaggggcaagccctgcgcctcatcccggtacggatccccgggcctgaccggcggggaagatacggagctaccggcccggagcccacagaggcagctgcacaggaggcaggccgcaggcaaccttgcagcggggaagcaagaccccttcagagggcgacgacacgaaagcgtactcccaccgcccccgaggcacccgcagccggggggacacgagacccagggaaggcaccggcagcgagggccggagagatccccaggaacaagggtctcacgcttgatcacgtgcttaccaggtggtactggaaaag

SEQ ID NO: 611431 - DNA, 684 bp, Homo sapiens
  misc_feature (4)..(4): n is a, c, g, or t
  misc_feature (22)..(22): n is a, c, g, or t
  misc_feature (27)..(27): n is a, c, g, or t
  misc_feature (225)..(225): n is a, c, g, or t
  misc_feature (410)..(410): n is a, c, g, or t
  misc_feature (414)..(414): n is a, c, g, or t
  misc_feature (420)..(421): n is a, c, g, or t
  misc_feature (442)..(442): n is a, c, g, or t
  misc_feature (469)..(469): n is a, c, g, or t
  misc_feature (531)..(532): n is a, c, g, or t
  misc_feature (556)..(557): n is a, c, g, or t
  misc_feature (560)..(560): n is a, c, g, or t
  misc_feature (589)..(589): n is a, c, g, or t
  misc_feature (666)..(666): n is a, c, g, or t
attngtgccgttgccaggttgnagtgnaatggcgagatctcagctcaccacaacctctgcctccctggttcaagcgttctcccgcctcagcctcccgtgtagctgggactacaggcatgcatcaccatgcccggccaattctgtatttttagtagagacggggtttctccgcgttggtcaggctggtctcgaactcccgaactcaggtgatccgcccgcctcggnctcccaaagtgctgggattacaggcgtgagccaccgcacccggccctaaattgtctttatactatcattacactgtatgattatgtaaatgttaacaagactagactgaaactgaaatgtagaaaaactaaaggcattaatcaagttatgggtgagaagctagcttgaatttgtttgcctatttngggnttcttnnaatattactgctgtatgtctngtgcgtgtaatagaagaatttttccangtcagtggagttaggaaaatttcccaccaacaagttgggtatgggacattggaagggagtcnnggttcagctaaatatttggctganntgnggggatccatggaccattgagagtggggngacctagataatccttcactctgatacaaaaggggattgcccttacccagagattggatacatctgccaagaactgntctttgcaggagaaatca

SEQ ID NO: 611432 - DNA, 467 bp, Homo sapiens
acccgtagcactgcctgcattatacaacctccttaccttatgaaacaaggctcactctgactctgctggcctggcctatctcaaaggcagtatttgtggttacaaaaaccactggattaggacacattacactagatcctgttccctgctctgctgatactattacagctatccacccgagaaaagtcacgtgctaggaccatctcggtcacggagaccttaacacagcagcactcagaggaattacagcacacacacagaaatatagtgtggagtgggaaatcaggggtctcacggccttcagagctcgagagcctcaaacagactattcacccactatatttactgacagcaagccagtgataagcattctttctatagataatagattaactaaaagtattccttacgggaaacaaagggatggtgccgaaataaagggatgggtctggctagttatcagcagc

SEQ ID NO: 611433 - DNA, 275 bp, Homo sapiens
tgtttaattaaaagtttatttttcccctttaaatctttgaaggaaagaaggtttttttgcttttttgtttgcttctgtcagaatagctcatggtgaactttgcaattacagatgatagtgacaaaaaaccccagcgtcgcaatcgtagccggaggcgtcgcttcaggggtcacgccgaaaataacacagccaggttacttgagtggacctgctgacaccatcatgtcacaagcatgaaaaaaatgcctatgtctgctttctcaatatattatact

SEQ ID NO: 611434 - DNA, 188 bp, Homo sapiens
tgcagagctcggtacccgtatcattttcttcttcctgtaggtggttcggcgggtcaacttgcacagacgagaggagctgatctcaattgcaggggcggtgcatgatggacactctctttgggagaactcagagctgcaccactagccagcaccactggtttgtaacagagattggactggcaaaagcg

SEQ ID NO: 611435 - DNA, 1013 bp, Homo sapiens
  misc_feature (6)..(6): n is a, c, g, or t
  misc_feature (61)..(62): n is a, c, g, or t
  misc_feature (66)..(66): n is a, c, g, or t
  misc_feature (69)..(70): n is a, c, g, or t
  misc_feature (74)..(74): n is a, c, g, or t
  misc_feature (93)..(93): n is a, c, g, or t
  misc_feature (99)..(99): n is a, c, g, or t
  misc_feature (106)..(106): n is a, c, g, or t
  misc_feature (117)..(117): n is a, c, g, or t
  misc_feature (123)..(123): n is a, c, g, or t
  misc_feature (129)..(129): n is a, c, g, or t
  misc_feature (139)..(139): n is a, c, g, or t
  misc_feature (144)..(145): n is a, c, g, or t
  misc_feature (147)..(147): n is a, c, g, or t
  misc_feature (153)..(153): n is a, c, g, or t
  misc_feature (168)..(168): n is a, c, g, or t
  misc_feature (174)..(174): n is a, c, g, or t
  misc_feature (178)..(178): n is a, c, g, or t
  misc_feature (186)..(186): n is a, c, g, or t
  misc_feature (196)..(197): n is a, c, g, or t
  misc_feature (199)..(199): n is a, c, g, or t
  misc_feature (204)..(204): n is a, c, g, or t
  misc_feature (215)..(215): n is a, c, g, or t
  misc_feature (219)..(219): n is a, c, g, or t
  misc_feature (223)..(223): n is a, c, g, or t
  misc_feature (230)..(232): n is a, c, g, or t
  misc_feature (235)..(236): n is a, c, g, or t
  misc_feature (245)..(245): n is a, c, g, or t
  misc_feature (247)..(247): n is a, c, g, or t
  misc_feature (252)..(252): n is a, c, g, or t
  misc_feature (263)..(263): n is a, c, g, or t
  misc_feature (265)..(265): n is a, c, g, or t
  misc_feature (273)..(273): n is a, c, g, or t
  misc_feature (277)..(277): n is a, c, g, or t
  misc_feature (279)..(279): n is a, c, g, or t
  misc_feature (284)..(284): n is a, c, g, or t
  misc_feature (286)..(288): n is a, c, g, or t
  misc_feature (293)..(293): n is a, c, g, or t
  misc_feature (299)..(300): n is a, c, g, or t
  misc_feature (306)..(306): n is a, c, g, or t
  misc_feature (311)..(311): n is a, c, g, or t
  misc_feature (313)..(313): n is a, c, g, or t
  misc_feature (321)..(321): n is a, c, g, or t
  misc_feature (327)..(327): n is a, c, g, or t
  misc_feature (330)..(330): n is a, c, g, or t
  misc_feature (340)..(340): n is a, c, g, or t
  misc_feature (357)..(358): n is a, c, g, or t
  misc_feature (370)..(370): n is a, c, g, or t
  misc_feature (377)..(377): n is a, c, g, or t
  misc_feature (394)..(394): n is a, c, g, or t
  misc_feature (397)..(397): n is a, c, g, or t
  misc_feature (403)..(403): n is a, c, g, or t
  misc_feature (405)..(405): n is a, c, g, or t
  misc_feature (411)..(411): n is a, c, g, or t
  misc_feature (414)..(414): n is a, c, g, or t
  misc_feature (417)..(418): n is a, c, g, or t
  misc_feature (423)..(425): n is a, c, g, or t
  misc_feature (433)..(433): n is a, c, g, or t
  misc_feature (453)..(453): n is a, c, g, or t
  misc_feature (468)..(468): n is a, c, g, or t
  misc_feature (947)..(947): n is a, c, g, or t
  misc_feature (994)..(994): n is a, c, g, or t
ccacangcctttggcacaatgaagtgggtaacctttaatacccttctttttctctttaacnnggcntannccangggtgtgtttcgtcgaaangcacanaaaaatnaagttgctcancggttnaaaaanttgggaaaanaaaanntnaaaacnttggtgttgattgcntttgcncagnatcttcancagtgtccanntnaagancatgtaaaaanagtnaatnaagaaannnaanntgcaaaaanangtgtngctgatgagtnanctgaaaanagtnanaaaanannncaaancctttnnggaganaaaanangcacaatngcaacnctncgtgaaaccnatggtgaaaaggctganngctgtgcaaaanaaaaacntgaaaaaaaaaaatgcntcntgcaananaaaaanaanaanncaaannncccccgantggtgagaccagaggttgangtgatgtgcactgcntttcatgacaatgaagagacatttttgaaaaaatacttatatgaaattgccagaagacatccttacttttatgccccggaactccttttctttgctaaaaggtataaagctgcttttacagaatgttgccaagctgctgataaagctgcctgcctgttgccaaagctcgatgaacttcgggatgaagggaaggcttcgtctgccaaacagagactcaagtgtgccagtctccaaaaatttggagaaagagctttcaaagcatgggcagtagctcgcctgagccagagatttcccaaagctgagtttgcagaagtttccaagttagtgacagatcttaccaaagtccacacggaatgctgccatggagatctgcttgaatgtgctgatgacagggcggaccttgccaagtatatctgtgaaaatcaagattcgatctccagtaaactgaaggaatgctgtgaaaaactctgttggaaaantccactgcattgccgagtggaaaatgatgagatgctgctgacttgcntcattagctgtgatttggt

SEQ ID NO: 611436 - DNA, 540 bp, Homo sapiens
agaaaaaaccctctttgttgtcacccagtcttaaagcgcgtgggcatgatcaaagctcttggaaccctcggccttcggggttcaacatttctcgtgccaaaccctccaagtacctggaaatcagggtgtgcccccccatgcccagtaattttggatttttaggaaagcccaaagtttcaccatgtaacccagcttgttcttaatctcttgccctcagccagtccactcgcttaagcttccaaaagtgctgggattccaggtgtaagccaccaggcccggcttgaccatcttttttgatcttcaaaccagttaagggaaagagaggcctgattagcaccccaagtccaagctaccagagaagaggagcttggccagttactcacagatagaggagcaccaggctgacagccaggagaagccaggtttccatggccaagtctgggatgagagccatcactactttccttacttatctctctcctctgagtcttcctttcagctctgtgttgctctttgctgggctatgtgcatggagctttc

SEQ ID NO: 611437 - DNA, 726 bp, Homo sapiens
gtccccctgttaatcgagccgttcaactgcctcatagggtgtttgtgggcagcgcccatgcgcttttgtggtccccttcttgcggccgaacacacaaggggaatatcatcatgcacgacccctttgccacagcggcccttttttgctacaacttcgggcactaccttggaaccctggctgatgcactggaagggcgcacagggggccccgctgccccgtatcttcccatgtcaactggttccggcgtgacgaggccgggcccttcctgtggcccaggctttggggagaatgctcgggtgctagactggatctgccgcccggttagagggggaggaccgtgcccgagagaccaccccttgggctggtgcccaaggaaggagcccttggatctcagcggcctcagagctatagacacccctcagctgttctccctcccccaggacttctgggaacccggaggttcgtgaccttcggagctacctgaaccgagccggtcaacccggatctgccccaagaggtgttggctgagcttgaggccctggagagacgtgtgccccaaatgtgacctgaggccctagtctagcacagaggacatagcaccctcatctgggaatagggaaggccccttgcagaaatatgagccatttgatattaactaacatcttccatgtgccatagaccttccccccaagactgtcccataataagagatgcttatctatttta

SEQ ID NO: 611438 - DNA, 183 bp, Homo sapiens
tacagagatgaggtctccctattttgcccaggcgggtcttgaagttctggactcaagcgatccacctgcctcagcctcccaaactgctcgatttataagcttgagccatggtgctcagccctaaatggttatatcttaattttcctttttataggcttttattgattttccaccatagaggat

SEQ ID NO: 611439 - DNA, 385 bp, Homo sapiens
  misc_feature (17)..(17): n is a, c, g, or t
  misc_feature (47)..(47): n is a, c, g, or t
  misc_feature (53)..(53): n is a, c, g, or t
  misc_feature (75)..(75): n is a, c, g, or t
  misc_feature (101)..(101): n is a, c, g, or t
  misc_feature (264)..(264): n is a, c, g, or t
  misc_feature (276)..(276): n is a, c, g, or t
  misc_feature (280)..(280): n is a, c, g, or t
  misc_feature (295)..(295): n is a, c, g, or t
cttcagccgcttaccanccttccttaaggcaaaggtgatccagtganaagcgnacaggcaagaccaagggctacnggcttcgtcagcttcaaggaccccancgactacgtgcgcgccatgcgtgagatgaatgggaagtattgtgtcgcgccccattcaaacttcgcaagagcatgtggaaggaccggaatctgacgtggtccgcaagaagcagaaggaaaagaagaagctgggcctgagatagggtctgtgccaggtacccgntcccacctggcngggngctggctcctccctnagttctctttggaaaacccccagctgtccacccatccccatgccccaaaaccagtttcaataaatttacggttcatttccaaaaaaaaaa

SEQ ID NO: 611440 - DNA, 187 bp, Homo sapiens
ctggacacggtaacgagggctcatcagcttcgaggaggagcgggcccagctgtccttcaacactggacacgctctgctgaccacccagagctgggccagtgaaggacacgctccactagaccacccagaagctgggccagaggactcaacaagttgggacagcaatgtccccctgtgcctagccagg

SEQ ID NO: 611441 - DNA, 317 bp, Homo sapiens
  misc_feature (58)..(58): n is a, c, g, or t
gggggggggctggttaccgttggggcgaagaacaccaccttcatggggacggacctanggtctagtctggaacctctctgctgactcagaagtcagacagggagaattcggctcacgtggtgagtgctggacacccggaactacaggtaccagatgtcacaggcactgacgattggaggggagaaacaggctgtgatacactaacacctaatgttcgactgaaatgaaaagatcacaccaaccttttaactgcttcctgatggttttgcttgctgggagccatctctgttggacaagaaaacataaaacataaaagc

SEQ ID NO: 611442 - DNA, 324 bp, Homo sapiens
acctgccaaagcgtagtacccaagcaaaaaactcaaaaaactaaaaaactctccaaacctccatcttctaactctactacttccacacactgattgaccaaatccaggagtcagcgagtccactgcaaatgggaagccaactaaagtgggagggaaatgatccaggggttctcctgtgcttttgagaatacgacaaaatacagtgtaactcatacatataccttacattttttttctttttctttttttgacgcccaggctggagtgcggtgacgcgatcttgactcactgcaaactccgcctcttgggtactacgctttggca

SEQ ID NO: 611443 - DNA, 147 bp, Homo sapiens
tgcaggtctggacagaggaagtaaaacgtggctttgaaaaatcaacagtaatgtctgaaaaaaatatatattcttttcactgaccgaagtgttttttcaaataaataatcagaaatgttatgctacacaatgctgcatggatcctaa

SEQ ID NO: 611444 - DNA, 256 bp, Homo sapiens
tggccttcttctccttaataaaccgggaaaaacagaagggaaagggggagaaattttaaaaccaattttgattgattgaggggggtgaaaccaaaaatttttgtttttgggattgaaaatttttcctgtgccaaataataatacccgggtttattatggagttagggtttgtgtgaaccattttaaaaccggctttggatatcttccttttgggggatttttaaatataaattttctccttggaaattttcttgga

SEQ ID NO: 611445 - DNA, 858 bp, Homo sapiens
ggaatgtgctgctgccatggtgcctggggcgcagcgaggagctgggatgcgcggtgggagcctgtgccgccctggccctgttacttctgcggtatcattcgcggcggacgcgatgacaggacgctgtacgagctggatctgtgtctcgggctgcggcggattcggttgactagtgtctcaccgtatgcactgtggctgtgccgtctgagctgggcagcgcgcggttgaagaggctgctgggggtgacaggctcttccatgagcatggacctggagtggcttgctgtatgcggacgtggtcgtggcataagtgacaacagccatccttgggtgtaggctatgatgctgggccgggccgtggcctttaacaatgcggatcctgtgcctgttccgcccgcagtctgtgccgcgtgctttcggccatgatccggtggagcaagcagatggctctcggttccaggtgtgggactatgaggagggagaggtgtaggccctgtggaatcgatacttcgagttgctgatcctccagcgaagggtggctggctcccctgacccaccacttgatttaatctcactttcttataattgttctacttcttcaagcaccaacttggttctcaaggtacctcagttacccttttagtttcgttaagaccccccatgggatgcagtaattaaaataagggtaccgaggattaatattcccttaaagaataaaaccatgcagtaagaaataaaacaaatgactagagaaggataaatgacgcagttagtcgtagaaaaaaagcaaaaagaaaaggagaaaaccggtaatgggaccaagaaagggaattgttgagggaaggtaaaacgaggagaa

SEQ ID NO: 611446 - DNA, 377 bp, Homo sapiens
gtcgacgtaaagcccaaggaggttatcccgggatccaaaggtgtcagccgaactcgatgacttgctacattgccacccaacttggaacgtgctcgtgccgtattgccaagggctcagctgtgcgccaaagcaaggcaaggcaaggcaaggcaaggataaacaaggccagctgcacccagctcagtccactcagctccaacgtaccaggccctacaaagcttcaagtgatactctgcacatgaggacagaggactgtgcgaccccaccccgccctgggtaccatctgcatggctggggtctctgtgctattgtcaaataacctgaggcagaagaaaaaagaagaaaagtgacgcggcgggagtttagtctagtagtcg

SEQ ID NO: 611447 - DNA, 340 bp, Homo sapiens
  misc_feature (70)..(70): n is a, c, g, or t
  misc_feature (170)..(170): n is a, c, g, or t
  misc_feature (175)..(175): n is a, c, g, or t
  misc_feature (212)..(212): n is a, c, g, or t
  misc_feature (240)..(240): n is a, c, g, or t
  misc_feature (271)..(271): n is a, c, g, or t
  misc_feature (286)..(286): n is a, c, g, or t
  misc_feature (288)..(288): n is a, c, g, or t
  misc_feature (290)..(290): n is a, c, g, or t
  misc_feature (294)..(294): n is a, c, g, or t
  misc_feature (302)..(302): n is a, c, g, or t
  misc_feature (336)..(336): n is a, c, g, or t
tctgccgccgccggcccccgggagcgcaacactgcaggtggttcaaactttgaaggtttgagaccaaaanggaagggagtgcctatggaccaaagccccaggggccaagataaaccagaaagcctgcaaccaagacagaataaatccaagtccgaaataaccgacatggntcgcncccccaccatcacagtgtcggacaaggctcaaatttnatccatgcagaagtttggactgcgaganacaattgtgaaatcacatctactacagaaanaagaggattacaccnananccanaacttcangttttttgcgggaacatacaatttaaatgggcantccc

SEQ ID NO: 611448 - DNA, 160 bp, Homo sapiens
tgctctagcaggatccttatcccccttcgtcatgtcagacgcagccgggtaacaccagctccgaaatcaccaccaaggacttaaaggagaagaaggaagttgtggaagaggcagaaaatggaagagacgcccttgctaacgggaatgctaatagaggaaa

SEQ ID NO: 611449 - DNA, 355 bp, Homo sapiens
  misc_feature (67)..(67): n is a, c, g, or t
  misc_feature (190)..(190): n is a, c, g, or t
  misc_feature (240)..(240): n is a, c, g, or t
  misc_feature (283)..(283): n is a, c, g, or t
  misc_feature (301)..(301): n is a, c, g, or t
  misc_feature (343)..(343): n is a, c, g, or t
  misc_feature (352)..(352): n is a, c, g, or t
tgactcagccaggcccactttcaccctgaagtcaaactcaccccttcaggaggcttagaaatgatgncttctttcccctgaaaactggtgtcagcttcgcttagctaatggcctgggcaggcaccatttcatctgccctgagagcctgggcttggcttagtgcgtggtgtgagggccccttgtcccatgnccctatggctgtttgcctcttcctagtcccagggactactcttcccttcnctgtggtacagcctctctttcctcctgggaacccccactctgntcctctcttggtacctgncctgctttctcctgtcctctgggcatccccagggagcccccnagccctggnctt

SEQ ID NO: 611450 - DNA, 124 bp, Homo sapiens
gtatcctgctggttcagaggctggtgcgtccaaaccgttccgttatccaggcttatggagcacgctatgttccaagcccatcgcgcgcaccagtggccattgacacctaccaggaggaggagga

SEQ ID NO: 611451 - DNA, 886 bp, Homo sapiens
catccattcccgattccttctggtatcctgctctgtcactttacagtggttcctttcactcgatcccagtacttccatggtgttccgggaccttcattcctcggctttagcttcgtatggcgcatgttgtgtgattgccgcagacatgcttgggatcctacggctcctttggctcgtttccgcaatcatctctcgcattatgcgatgtcaaacaacagtacctatgctgggatgtctctttggcgactatcgctgatgttccagtatctgaagcaagttctcggcccagatggtgattgatgaggagacttctgggagtatggacactagctatagtcctatgatgctacttcattcatggcttgaccatgggccatgtacagccaggcgctcgatagatgaaccctttgtggaacaccatggtcatcggtaggctatgctgatggagagagtcttcctcggttatgttggacattgtcttggtgtagtcctactgtaagccccttcgtgctggccaagtggcttagtcggtgcatacttggctcagcctctgctgcgagaagttctggagaagcagccagtgctaagctcagaaccgaggcccgcgatcttagtagaacgctgcatagcgagtgctgtactaccgagatgcccgttcttatcaaccggtttcacaatcgccactgtcaccgaaaaaggtgttgaaatagagggaccattgtctatcagagaccaatctgggatattgcccacatgatcagtggctttgtaatgagaatacagatgcattatccaagacagctgaagttgccctacgttctcaactttgcacttggctagttcaaattaccgctcttcttatgtaacaatatatctgcgttttttg

SEQ ID NO: 611452 - DNA, 331 bp, Homo sapiens
  misc_feature (153)..(153): n is a, c, g, or t
agcaacttgcaaggggggcctttccccctggtccatttggttttctttccagggtcttgcaaaattcctgacgaaataagcagttttgtgccctcccgtgcaaagccccccccagcccctcaaaaaagacgccccagcccaaaagtgcaaaantgccagtcccggcgggtttttatttttaggggccagaaccaaaccccccctttttacttccaaaactttttttcccatgtgggggggttaatttaggaatgactcgtttaaggcctattttcatgatttttttgtagcatttggggcttgacgtattattgtcctttttttcccaata

SEQ ID NO: 611453 - DNA, 455 bp, Homo sapiens
  misc_feature (151)..(151): n is a, c, g, or t
  misc_feature (201)..(201): n is a, c, g, or t
  misc_feature (361)..(361): n is a, c, g, or t
  misc_feature (453)..(453): n is a, c, g, or t
atgaccccaatacgcaaaattaaccccctaatctaattaaccactcattcatcgacctccccaccccatccaacatctccgcatgatgaaacttcgggctcactcctcggcggcctggcctggatcctccaaatcaccacagggactattnccttagccatggcacttacttcaccaggacggccttcaaccggccttttncatccaattcggcccacattcacttcgagacgttaaatttatgggctggaattcatccggcttacctttcacgccaatgggggccttcaattattctttatctggccttctttcctacacatcgggacggagggcctatatttacgggatcatttctctnacttcaggaaacctggcatcgggcatttatcctcctggcttggcaacttataggccagcctttcatagggctatgttccttcccgtggggcntc

SEQ ID NO: 611454 - DNA, 356 bp, Homo sapiens
  misc_feature (1)..(1): n is a, c, g, or t
  misc_feature (11)..(11): n is a, c, g, or t
  misc_feature (16)..(17): n is a, c, g, or t
  misc_feature (19)..(19): n is a, c, g, or t
  misc_feature (23)..(23): n is a, c, g, or t
  misc_feature (25)..(25): n is a, c, g, or t
  misc_feature (27)..(28): n is a, c, g, or t
  misc_feature (33)..(33): n is a, c, g, or t
  misc_feature (40)..(40): n is a, c, g, or t
  misc_feature (43)..(43): n is a, c, g, or t
  misc_feature (310)..(310): n is a, c, g, or t
natcttcgggnagacnnangccnangnnaaacntacaaanagngtgtccagcttctcacatcacgggatcaaacacatcaaacaagcttctatcacctctaaaggaaccctgtgtctgtctaccttgtgaatgagccgaagctagtcagctgaaggataagagaccacatggaagagaattaagtcaccctgaccaatggccagccaaaagccagatctgtggctcagccacaagccctactggccacagatgcacgtgagcccaaaaggtttgctgaaccagtccagagcagaaaaactgcccggatgncccacagaattgtaagccaaataaatggttgttgttttatgccatt

SEQ ID NO: 611455 - DNA, 1090 bp, Homo sapiens
agcggagggacagcgccgaggcaagtgagagtcggacgggcacgtgggcgaatctgtgcctcgctgaggaaaacatatgtaaacatgggccataggacatcctaatgaagccgagaggcaacatgtgtcagtcatatgcattgttctcgtgcaaagctttgtcggggaggagcataacgtaagaaagcagccacgagtgcttcatttcaaaccttctcagaggtttcacctagggaagtgctcatgagacggtgagaagaccggtgtgatgcatagagagacgaaacgtgacacattttgagacgatataggcaatgagctggacaatgggcccgtctacttgaaaggacgactcttgaaagacccctatattgcctacctagagagggagacgagcgacccatgacgaaggttacaagcggatccccaattgccaccgcaagtgacggtctcctatccgagcctttcttcctgcttctgtctcgtgagatatcggccaaagagatcaacacggagaacatcacttggacctgttcatatggtgatggttgggaaagaaaactgggaacagaatgatggaataagactgattgggggaattgacaagggaggcgtcttgatgacgaagtaaaggcgttgcgaaggctggaaggtgaacgacactacagaggacaacggcacttaattcgcgtagtctaataatccggaagacttaaaaggcggaaagaaggacctggaagtggccatgtcacacaagagacaggctggaagctccggtccaccgggccttgtagaccaacgagaggcaaccgccaacaacaagcaacggggacacgaaggggaagggcaacggcagtgaacgggaaaggcactgcacaagaagagacatgtgaaggcacctgaagcggacacggacaacgaagtgcgggcaacgcattgcacgccaggtgacacgcacagacaaacaacgactgagtgcaagagacaacaaaggagggatagtacacgccagcacgctcatgcaggcgcgacataaacgacaataaaaaccccagacaacaacacagaaagccacagcacaaaacagaaa

SEQ ID NO: 611456 - DNA, 395 bp, Homo sapiens
  misc_feature (349)..(349): n is a, c, g, or t
atcatgatgtagaatctatgtcttcactcattgaatctgagctgaccatgtgacttgctttggacaatgggccattagcaaacataatgcaagcagaggcttgaaaagaggcttaggaactgggactctgttgttgctcttaggaaccctgtgtctgtctaccttgtgaatgagccgaagctagtcagctgaaggataagagaccacatggaagagaattaagtcaccctgaccaatggccagccaaaagccagatctgtggctcagccacaagccctactggccacagatgcacgtgagcccaaaaggtttgctgaaccagtccagagcagaaaaactgcccggatgncccacagaattgtaagccaaataaatggttgttgttttatgccatt

SEQ ID NO: 611457 - DNA, 393 bp, Homo sapiens
ctgtacatctatgaactggagaatagaacaactaaatgtgggccaggcgtggtagggtcacacctgtaatcccagcactttgggaggcaaagacgggtggttcacctgcggtcaggacttcgagaacagcctgaccaacatggcaaaaccgcacatctaccaaaaatacaaaattagccaggtgtggtggcacatgcttgtaatcccagttacttgggaggctgaggcaggagaatcgcttgaacccaggaggcagaggttgtggtgagccaagtttacgccattgcactccagcctgggcgacaagagcaaaacaccacctctaaaaaaaaaagggcaagatggagtcaattaagttaaatgtctctcaccgtctcagtcaaagagacaatg

SEQ ID NO: 611458 - DNA, 139 bp, Homo sapiens
  misc_feature (76)..(76): n is a, c, g, or t
caggcccagctgaagagcatcagatctgtgggcatggtgaaacataattactgcaggaacccagacaaccggagcngaccctggtgctatgtgcaggtgggctaaagcgcttgtccaagagtgcatggtgcatgactgc

SEQ ID NO: 611459 - DNA, 950 bp, Homo sapiens
ctgcgagcacacgggcggggcgctagcgttcgccttcagccaccatggggaatgggatgaacaagatcctgcccggcctgtacatcggcgaacttcaattgatgccagagacgcggaacaattgagcaataactaggtgactacatattactagtctgtccacgatagatgccaggtcctatgttggacgggagttaagatacctgtgcatcccagcagcggattcaccgatctcgaaaaccttgacaagacatttcaaacgaaagtattaaattcattcacgagtgccggctccgcgatgagagctgccttgtacactgcctggccggggtctccaggagcgtgacactggtgatcagcatacatcatgaccgtcatctgactttggcctggaggatgccctgaacaccagtgcgtgctgggagatcctgtgccaagcccaacgtgggcttccagagacagttccaggagtttgagaagcatgaggtccatcagtatcggcagtggctgaccggaagcactatggagagagccctttgcatggatgcagaagaagccaaaaatcatgctggccgttccgggacattctgaagtgctgggccttgctcagaagactgtaactgtacctgaagtttctgaccatatgcaaagccacagagtttaggctggtgctgccaaagtagaaaagcaacatagagttaagtatccagtagcgatttgtaacacttgtttccatttgaagctgaatatatacgtagtcatcgtcatgtcgagaactagggatagtctgaaggcaagagaacaatatttgccccttaatacccaatagtgtggaggttactagtacctcgcttggatgcctgtagggatcccgggagccttgcggcactgccttgtgggtggattggggctcgtgaatgcttcctgtgaaagcctccaaggacaaggca

SEQ ID NO: 611460 - DNA, 287 bp, Homo sapiens
tacaggacccgtgaatgtgtggtgttatggtggagcttctttccttgtggatcctgtggagcttctttttcctcaatgacggcggctatcatgtaaacctattggcatttatctaaaaaagcttgattgacagcaatcagtgctgagatgaaagaagccacatacaatcatacagaaatgacatcagggcaaaaaataataggcacaaataattcaaagaacaaaaagtttataaaccgcccaacgataattaattgccagtcatttctccataacaccacacaatt

SEQ ID NO: 611461 - DNA, 393 bp, Homo sapiens
  misc_feature (59)..(59): n is a, c, g, or t
  misc_feature (157)..(157): n is a, c, g, or t
  misc_feature (163)..(163): n is a, c, g, or t
  misc_feature (197)..(197): n is a, c, g, or t
  misc_feature (355)..(355): n is a, c, g, or t
cttcccgggttcaagcgattctctcagcctcctgaatagctggggttataggtgcctgncaccacgcccagctaattttggtatttttagtagagacggggtttccccatgttggccaggcgggtcttgaactcccgacatcaggtgatccacccgnctgggnctcccaaagggttgggattacaggcgtaagccancacactcaggcgaatttctattaatttattttaggtggtttccaggagataatctatttaacaactccttttagtatggaccaaaaaagtgttgatccaaatatgtgcacatcagtcagtaataacctattccatccagttcttcagctttcctctcnttgagggatagaaagaaactcctaagggcttcaaaatg

SEQ ID NO: 611462 - DNA, 102 bp, Homo sapiens
cagaggcgcggaacttttcttcccacacctggcgggaggcctgacacacctgctggtactcgtcctcagacagacgtgccagctgcactaacgcgtcagatg

SEQ ID NO: 611463 - DNA, 322 bp, Homo sapiens
ctgggccgccaccaggaccccgccgtgggcaggccggctcggccatcggcgccagggccagtaaccatgacgacggccgttgccaagccgagagcaatagaggcgtcgccggggctgtttcaaaacctaaagcaaacaacgaaaaacgcacatcgttggggaggggaaagactagaggacggggcccctcctgaggtcagacagcctgcggccccggcggcgtgagccgacaaaatctacgtcacttggggtagaaaacaaaaacccgaaaagcccacgccgccgttgaccgcgacacgtcacttgcggcccttgggcactt

SEQ ID NO: 611464 - DNA, 208 bp, Homo sapiens
ctcttccccgtgacacgttagtcattttctccacagagcagcagaatgagctttcttatagtccccagatgtttctcccttaatcatggaataaagagaggtggcgaaattcttcctataactccttcctgtatgttaatacagatcaatctcactcctgggaaaccatgactctgctttagaggtatgactcatctgtcccagtctc

SEQ ID NO: 611465 - DNA, 165 bp, Homo sapiens
agaatatctgaagattatgaacagctccctatataatatctttcaggaggcacttagagagatgttcttgaactcacgggggtcaagtggacctccaagttacgaatttttgataaggactattgcaattgtgggcccacacatcccataaaagcaaacaaatta

SEQ ID NO: 611466 - DNA, 436 bp, Homo sapiens
acgatctgcagatcatcaatctctttttcgatccacgagacagtatattccgggaagatcggcgcggcgcgaacttcgcttgcctggttgccaatgatcaactcatcgtgtttgatccagatggtgcgattcgccaggtgatgcgccagtgccagcgcgcgacgtaccgggatcggcttatcgagatgttgttgatacatctcggtatagtgctgcgcgcgctcggtacagactggcggtttcacaatatgcaccagcgcattttgtgcgctttaatgcggtcgctgagcgtgtccagtttcagtgtggtcatggttgttatcctcgtaaggtcgggttaaccctttctggcaggcatactgctgggcaaagtcgagcagttctggcgcatcaagcggttttccggggcgcatagggcagattaggtagtgatatt

SEQ ID NO: 611467 - DNA, 754 bp, Homo sapiens
  misc_feature (487)..(488): n is a, c, g, or t
  misc_feature (490)..(491): n is a, c, g, or t
  misc_feature (494)..(494): n is a, c, g, or t
  misc_feature (501)..(502): n is a, c, g, or t
  misc_feature (504)..(505): n is a, c, g, or t
  misc_feature (509)..(509): n is a, c, g, or t
  misc_feature (511)..(511): n is a, c, g, or t
  misc_feature (514)..(514): n is a, c, g, or t
  misc_feature (518)..(518): n is a, c, g, or t
  misc_feature (546)..(546): n is a, c, g, or t
aaattaggctaggtagatgctcggtgttattctggacgaggggggcacaaacccttacataccccccacaggctgctgccaccgctgctgctgctgctagctctgctgctctgctgccagcccagtgagtgcgccttgtgctgcggtgcccagtgctgctgggcaaggtggtgcagtgcgttggttgtccagtgtggctgcgtggaggaggaggatgggggtgtcgccagccgagtgtgctgcgctgtgaagctgagtgtgcttgtctcagtgagtggagtgtgtgcagtgagttgcgtgtggtctacacccctaacttgctgccccagtgacttgcatgtgccatcctgcccaaggactgactgaggcggccttttgcgtggcgcttgcttgctcgtgcctgagtgcccgctgccttcctggccctgccgcgcctgctgtttgcagaggagaatcctaaggagagtaaaccccaagcaggcactgnncnncanaggattnnanncgcngnganccancagaggaatccaggcactctaccacgcnctcccagcccaattctgcgggtgtcaagacactgagatgggcccatgccgtagacatctggactcagtgctgcagcaactccagactgattgtctaccgaggggctcaaacactctacgtgccaattgtgaccatcgaagcttctaccggaagcggaagtgccgtcctcccaggggcagcccagagggtccctgatggtgtgtggatc

SEQ ID NO: 611468 - DNA, 487 bp, Homo sapiens
tggcgtttaagcgtttactggtttctgcttcgtttctgttgggaatcgagcttgttcccctgagagcgcgaccttgagcaggtatgaccgatgattcgtctgggtctcacaatgtgcgttagccgagggcatatggctaccggctattccgtgcacatgaacgcgtgacaattagggctgtctgctccttagtagctattcacgtagcaatcttcatcacagcaggtaagggtcacaaactcctccatgggttcccattcagagttctttattggcactgactgaatgaactacttgagggaatatcccgtgtgatgcagacatgccccagatggattctactttctttataactagggactttcaagcactaaagataaagattgtcactactaatgtagacgcctaacttcagaagcgttcacgtgtcatacatgtgaacttttcctaggaaaactgtgcaataccgcgcttttcctctagggga

SEQ ID NO: 611469 - DNA, 855 bp, Homo sapiens
  misc_feature (34)..(34): n is a, c, g, or t
  misc_feature (111)..(111): n is a, c, g, or t
  misc_feature (120)..(120): n is a, c, g, or t
  misc_feature (140)..(140): n is a, c, g, or t
  misc_feature (172)..(172): n is a, c, g, or t
  misc_feature (175)..(175): n is a, c, g, or t
  misc_feature (177)..(177): n is a, c, g, or t
  misc_feature (179)..(179): n is a, c, g, or t
  misc_feature (205)..(205): n is a, c, g, or t
  misc_feature (208)..(208): n is a, c, g, or t
  misc_feature (215)..(215): n is a, c, g, or t
  misc_feature (217)..(217): n is a, c, g, or t
  misc_feature (220)..(220): n is a, c, g, or t
  misc_feature (234)..(235): n is a, c, g, or t
  misc_feature (248)..(249): n is a, c, g, or t
  misc_feature (264)..(264): n is a, c, g, or t
  misc_feature (280)..(280): n is a, c, g, or t
  misc_feature (284)..(284): n is a, c, g, or t
  misc_feature (308)..(308): n is a, c, g, or t
  misc_feature (313)..(313): n is a, c, g, or t
  misc_feature (319)..(319): n is a, c, g, or t
  misc_feature (328)..(328): n is a, c, g, or t
  misc_feature (334)..(334): n is a, c, g, or t
  misc_feature (338)..(339): n is a, c, g, or t
  misc_feature (361)..(361): n is a, c, g, or t
  misc_feature (370)..(370): n is a, c, g, or t
  misc_feature (373)..(373): n is a, c, g, or t
  misc_feature (379)..(379): n is a, c, g, or t
  misc_feature (382)..(383): n is a, c, g, or t
  misc_feature (387)..(387): n is a, c, g, or t
  misc_feature (395)..(395): n is a, c, g, or t
  misc_feature (403)..(403): n is a, c, g, or t
  misc_feature (408)..(410): n is a, c, g, or t
  misc_feature (412)..(412): n is a, c, g, or t
  misc_feature (418)..(418): n is a, c, g, or t
  misc_feature (420)..(420): n is a, c, g, or t
  misc_feature (433)..(433): n is a, c, g, or t
  misc_feature (436)..(436): n is a, c, g, or t
  misc_feature (460)..(460): n is a, c, g, or t
  misc_feature (462)..(462): n is a, c, g, or t
  misc_feature (466)..(466): n is a, c, g, or t
  misc_feature (468)..(469): n is a, c, g, or t
  misc_feature (494)..(494): n is a, c, g, or t
  misc_feature (521)..(521): n is a, c, g, or t
  misc_feature (841)..(841): n is a, c, g, or t
tatatttttaccccatttattaagcccaaaaaanttcaagcaacttcaggttctataaattaataaggaggtacagaagcccaaccaggatgggaaaaaatgtgtttcaanaaaaaaggngacagcatggatcctcaatnatgtattgaatgaaaaaattaaaatccaatgnaanananattttcttcctgaaaatctgaatgtnatnttttagntnctntggttgttggtttnntctcccgtttgtnntggtgtgctgatgtntggtggttgttttgtnggtnaatccaagctcctaggttcccctnttttnttggcntcatttttncacctntttnntttttttgggttgtttttcctnttggttggnttnttttgnttnnttgnggttttgntatttttncttannntnttcttnantttactgttgttnttnttttttttctggagttggtgtgtncnaggngnncatggccaagatgatgtgctaagtngcttcctctgagattttatgcccaagngggagccatctggccacttgcttcttcttacatttctaatagctgctccatttccttaagggctgttgttaaatcatttacttgattgttacataaggtttgctgttctaggaatcggactctttcctctttcatctccagctttacctttaaggcctgtaactcctccatctgctttttggctgtttcgttaaaaagcttcagctcctcttgcaaagtttctaacagcaacatagagtccatgtgatcagtagtggaatcttgtcgtgatgccagggtctcactgcctaaagctggatcaaggcccttgctctccaaanttgccaacaagttg

SEQ ID NO: 611470 - DNA, 753 bp, Homo sapiens
ctactataacgcgagcgtctgacatatagttttgatgtgtatgtatttatgagaggttgctagcatggtaggtaacagaagtagagttaatgtagtgtagattaatatgtaaatgcatgtacatatatctaagttcaatacataaagtatgtaagcagaatatggtgcagaagtaatcaggacagaatgtaggagatcattaggaatggctaggatgataaatgacttacctataagcgtgctggagtgcacgttggatttatctacaacttaatgcccctatgatgacagattcttaccttgctgaactaatcttgttgctgtctaaactagcctcttgtaaagagtgttaagaagccattccttctttgtagcgtcgtactcttttgaacgctaccaggtttgtatgtgatccctctgggaacgatttcctcagagtcagagacgctattcgccaggatccatagtgttgataatacattgcggtaattccttaaaggaaaaatatcaggtgcggtttgtacaggtctgggaagctgtggatgacattatactgaatctacgtattcataattctagctgcaaagaatgaggcgtgctctcctgtattagtcaagattcataaaataggtcctgtgaacgtatcatggattgcctccgcgcgagtgtcataactccctactggtctgatacgggctcaaccctggatggcgccctacgttcctccggtggccacaatataggcagcccctt

SEQ ID NO: 611471 - DNA, 432 bp, Homo sapiens
  misc_feature (21)..(21): n is a, c, g, or t
  misc_feature (37)..(37): n is a, c, g, or t
  misc_feature (97)..(97): n is a, c, g, or t
  misc_feature (118)..(118): n is a, c, g, or t
  misc_feature (134)..(134): n is a, c, g, or t
  misc_feature (216)..(216): n is a, c, g, or t
  misc_feature (226)..(226): n is a, c, g, or t
ctcaactactcatagatgccntgctcttgtttacacnggccagtttacactgtttttccaagccaatcacagctgatatctcctggtgctatccccnaaacttatcactcttaactcnttgaggtaaataaatnaatctttgctggcaggactatgctgaatctccttaggcactcatctaatcagatatcctgagtcgtcccaattcttagaccnttttataccntgtttttctccttctgttattccatttagtttctcaattcatccaaaactgtatccaggccatcaccaatcattctatacgacaaatgtttcttctaacatccccacaatatcaccccttaccacaagacctcccttcagcttaatctctcccactctaggttcccacgctgcccctaatcccgcttgaagcagccctgagaaaca

SEQ ID NO: 611472 - DNA, 141 bp, Homo sapiens
ttttccccccccggcccggccggtttggggaaatccaggggttggccccccccaacccccccccccgtttcccccccgctttcaaaatttccggctattttttttggtttttccccgtttttaaaaaggggtttgggggga

SEQ ID NO: 611473 - DNA, 128 bp, Homo sapiens
agcggttcagaggatccagatgatggtcacggtcagcggggttatagagcgagagccgtgcctaagaaaaataataagaagaaaaaatttttaaaaagaatggtaatgcatgggcagatagttggtga

SEQ ID NO: 611474 - DNA, 828 bp, Homo sapiens
cgtggccttcaggcttccctggttcttcctcgcgttccccgaccagccgctcgctttcgcgtaaatggccacgtagctggtgcttggtgcggtcgtccctggtctttggctcaggatctctaagtcgggtccctgcttgatacacggcccatcgcacgagtagagtcggtgcccaggtcgaggccccaccgtcgagctcccgtaggggccgtgcatggcctgaagtcttcttgtctggatgtctggaggccacgcgaggtctgctgcgctgctctctgccgtcgtagtgggcgctcatgcagtgacggctctcccgtcgcggtttcatgctgcagctcagcctcggctcggatctgctcaggtccgctgtccagccggcattgttgtatccttttgcgcctcaccgcgacgccaccgctcgccgcgaactgttcgtcgaaccttgtccgcacctgtccgcgcaaccttcccagcccacgttgaggagcctactcgccctgcccagggactagacatcagccagggatggcgctggcgcagagcggctgaccccggagagaagcgttctgggcagatctgggagcatagagccagcgaaggcatgggcggctacagccaggaccagcccgcactactgactcaaggcgtgctgaaagaaacgcggggaaggttatagctcctccgggctggctctgagacgtgcggttgtggcagaggctgcaaaagcagcaacctttagaggcaaggtcatccccggggctgtgggaggtcggatacctgaggcacacaggggcctgacgggctgacttggagggccgctgagagccc

SEQ ID NO: 611475 - DNA, 2097 bp, Homo sapiens
gttttttaggaagagtgtcccgcagagacccggcgggagctgccaggagctctgggattccagcggctggaagccacctgggaagcctggcctcagtgtggaagagaaggcagcaggattattacagaaccttgtgaagccaacgcgggcagccgccaggagctgcagaccgagaggatctcgtcctttcttgcggcccagggagaccaggcctttcattctgggctcgagaccaacaattcgaattccgaactccccctgcgtgtgggactcaaggttgcccagggctcacctctgatgggcgggcaggtgagcgcttccaacagcttctcgaggctgcactgcagaaatgccaacgaggactggatgtcggcactgtgtccccggctctgggatgtgcccctccaccacctctccatcccagggagccacgacacgatgacgtactgcctgaacaagaagtcccccatttcgcacgaggagtcccggctgctgcagctgctgaacaaggccttgccctgcatcacgcgccctgtcgtgctgaaatggtccgtcacccaggcactggacgtcacagagcagctggatgccggggtgcggtacctggacctgcggatagcccacatgctggagggctcggagaagaacctgcactttgtccatatggtgtacacaacggcgctggtggaggacacactcacggaaatctcggagtggctggagcggcatccacgcgaggtggtcatcctggcctgcagaaacttcgaggggctgagcgaggacctgcacgagtacctggtcgcctgtatcaagaacatcttcggggacatgctgtgtcctcgtggggaggtgccgacactgcggcagctgtggtcccggggccaacaggtcatcgtctcctatgaagacgagagctccttgcgccggcaccacgagctgtggccaggagtcccctactggtggggaaacagggtgaagaccgaggccctcatccgatacctggagaccatgaagagctgcggccgcccaggagggttgttcgtggccggcatcaacctcacggagaacctgcagtacgttctggcgcacccgtccgagtccctggagaagatgacgctgcccaaccttccgcggctgagcgcgtgggtccgagagcagtgcccggggccgggttcacggtgcaccaacatcatcgcgggggacttcatcggcgcagacggcttcgtcagtgacgtcatcgcgctcaatcagaagctgctgtggtgctgacgggacccttctgaagttcgggacgcggcggctgcagtttcacccccgaatttccaaatggagtttcgctctcgttgccgaggctggagtgtagtagtgtgatcctggctcactgcaacctccacctcccgggttccagcaaattctcctgcctcagcctcccaagtagctgggattgcaggcgcccgccaccacgcccggataatttttgtgtgtttagcagagacggggtttcaccatgttggccaggctggtctcgatctcctgacctcaggtgatccacccgcctcggcctcccaaagtgctgggatgacaggcgtgagccaccgcgcccggcctatacctcattttctacatgtcgcttgttggagctgctggttcaagttcccagccagccaatggatgccagcaccatttttactcccctttcccaagcaaatcgtgcatttttgtctaacgagagacatcagtttctcaggatgatcctcaagaacgttatggagtccatgttgcaataggttctctttgggacctaatgactcattttccaaaaatccgcttctacttttggtacccggttgctacggtgaaatgaaggtgccccgcatccagaaagacgcactcctggaccacaaccggcggctacctcagccccacggctctgcaggatcagggctcgggcaggccccgcggagatgaagaatttgcagggagcctccctgacttccgtcggctgtgaatccttgtctgtcaggggcgtatccacaaaatcaccgaattcatacagatcgtttaaataaatgaacatcattaaagtcaaaaaaaaaa

SEQ ID NO: 611476 - DNA, 2126 bp, Homo sapiens
gccttttccagctggctgcagagaaggggccagctccctcctggggacccggagccgcggtacaggtgtggttgcttctcttggagaaagaggctgagctgacatcccccgggctgataaagaatgggctcctcctcctgggcccagcaggctcccgggaccctccctccctccttccgggcagcagggaagatctgagttcatgtagctggtgttggcttagggtctgggaggaaggcttttgggaagatgtaaataagaacaaaatctgcagccacctgggaagcctggcctcagtgtggaagagaaggcagcaggattattacagaaccttgtgaagccaacgcgggcagccgccaggagctgcagaccgagaggatctcgtcctttcttgcggcccagggagaccaggcctttcattctgggctcgagaccaacaattcgaattccgaactccccctgcgtgtgggactcaaggttgcccagggctcacctctgatgggcgggcaggtgagcgcttccaacagcttctcgaggctgcactgcagaaatgccaacgaggactggatgtcggcactgtgtccccggctctgggatgtgcccctccaccacctctccatcccagggagccacgacacgatgacgtactgcctgaacaagaagtcccccatttcgcacgaggagtcccggctgctgcagctgctgaacaaggccttgccctgcatcacgcgccctgtcgtgctgaaatggtccgtcacccaggcactggacgtcacagagcagctggatgccggggtgcggtacctggacctgcggatagcccacatgctggagggctcggagaagaacctgcactttgtccatatggtgtacacaacggcgctggtggaggacacactcacggaaatctcggagtggctggagcggcatccacgcgaggtggtcatcctggcctgcagaaacttcgaggggctgagcgaggacctgcacgagtacctggtcgcctgtatcaagaacatcttcggggacatgctgtgtcctcgtggggaggtgccgacactgcggcagctgtggtcccggggccaacaggtcatcgtctcctatgaagacgagagctccttgcgccggcaccacgagctgtggccaggagtcccctactggtggggaaacagggtgaagaccgaggccctcatccgatacctggagaccatgaagagctgcggccgcccaggagggttgttcgtggccggcatcaacctcacggagaacctgcagtacgttctggcgcacccgtccgagtccctggagaagatgacgctgcccaaccttccgcggctgagcgcgtgggtccgagagcagtgcccggggccgggttcacggtgcaccaacatcatcgcgggggacttcatcggcgcagacggcttcgtcagtgacgtcatcgcgctcaatcagaagctgctgtggtgctgacgggacccttctgaagttcgggacgcggcggctgcagtttcacccccgaatttccaagtattgtgactttgtttgggccaaatgttggtgatcataggaccgatgataatacgttttcattttcccaaagtgctgggatgacaggcgtgagccaccgcgcccggcctatacctcattttctacatgtcgcttgttggagctgctggttcaagttcccagccagccaatggatgccagcaccatttttactcccctttcccaagcaaatcgtgcatttttgtctaacgagagacatcagtttctcaggatgatcctcaagaacgttatggagtccatgttgcaataggttctctttgggacctaatgactcattttccaaaaatccgcttctacttttggtacccggttgctacggtgaaatgaaggtgccccgcatccagaaagacgcactcctggaccacaaccggcggctacctcagccccacggctctgcaggatcagggctcgggcaggccccgcggagatgaagaatttgcagggagcctccctgacttccgtcggctgtgaatccttgtctgtcaggggcgtatccacaaaatcaccgaattcatacagatcgtttaaataaatgaacatcattaaagtcaaaaaaaaaa

SEQ ID NO: 611477 - DNA, 708 bp, Homo sapiens
  misc_feature (6)..(6): n is a, c, g, or t
  misc_feature (75)..(75): n is a, c, g, or t
  misc_feature (116)..(116): n is a, c, g, or t
  misc_feature (145)..(145): n is a, c, g, or t
  misc_feature (198)..(198): n is a, c, g, or t
  misc_feature (224)..(224): n is a, c, g, or t
  misc_feature (267)..(267): n is a, c, g, or t
  misc_feature (309)..(309): n is a, c, g, or t
  misc_feature (417)..(417): n is a, c, g, or t
  misc_feature (460)..(460): n is a, c, g, or t
  misc_feature (523)..(523): n is a, c, g, or t
  misc_feature (528)..(528): n is a, c, g, or t
  misc_feature (541)..(542): n is a, c, g, or t
  misc_feature (547)..(547): n is a, c, g, or t
  misc_feature (549)..(549): n is a, c, g, or t
  misc_feature (551)..(551): n is a, c, g, or t
  misc_feature (563)..(563): n is a, c, g, or t
  misc_feature (571)..(571): n is a, c, g, or t
  misc_feature (583)..(583): n is a, c, g, or t
  misc_feature (586)..(586): n is a, c, g, or t
  misc_feature (610)..(610): n is a, c, g, or t
  misc_feature (625)..(625): n is a, c, g, or t
  misc_feature (627)..(627): n is a, c, g, or t
  misc_feature (646)..(646): n is a, c, g, or t
  misc_feature (670)..(670): n is a, c, g, or t
ggggcngcgggggcatactacttggcctggactgtctcctccagcctgtacaagcgcttctcggcagctcctgcnccgtggcctggagcttccgcatctactcctccagccgaganacggcatcgcgggagcgagggagtgccantggcctctggtgctgccctcctgcgcccggtgtccaggccccggttgaccctnagctcccggctctttgggggtacgtngccatccttgagagagagaagaggaggggcccagcatcccgancccccaaccacatcctcagccgctgagggtcagggtgcgggncctgcggtgggtgggtacaggtcctcctggaacagtccgactttcgaggcactgtaatggcaatggagctcacacctccgctcagtgcagcttgttgaacctggcganctcacacttgttcaccatacaggccacgtttgggcatgttgcncatgccccgctgggactccttggaactgaacatgagagagatagtgacagagaaaggggcctngtttnttatctcaaagtnncggantnanctgtcacccttnttttttangtagacgatgtnggngccagggtcaaagaagggcagccngacaccgctgctggngnccagctcctgcagggacancggctcctccaggcgctttgtgtnccacagcgccacctgccgctcactcatgcggctgaagc

SEQ ID NO: 611478 - DNA, 654 bp, Homo sapiens
agagcacactctctcttctgaggagtagtatagagacgacgccgcggggtgttgagagacactactatagaggagagatggtgggacgaccacgacgcgggttagtactctctctccgacgataatactactgtcttctctctcgcgacgtcttctctctcgacgagagacgacgcccctcgtgtagagatataagaaatatcggcgcacacacacacctcccggcgcgccgcgcacatatatatatgatgatcccgtcccacacagagagatataaaaaagagaaaacccacactatatccttatataagagaacaccagccgctttctacacagagcgcgcgcattctttcgcacactgttttcctacagggagggcgcgcacacagagatatagagatttgtgagagatataggggagatatacagcttctatagagttcttaccacaccccgagcaccctctcctactcacacagagagttatagagaaaaaataggttatccaccacataaatcttataggttaccccggaaaaattcttgtgggtagaaaacctttttaaagggattttggaaaatttttaaaccgccttttttttttccccccaggaacccccccaccttgggtttgcttccaaaaatcctttggga

SEQ ID NO: 611479 - DNA, 2174 bp, Homo sapiens
gccttttccagctggctgcagagaaggggccagctccctcctggggacccggagccgcggtacaggtgtggttgcttctcttggagaaagaggctgagctgacatcccccgggctgataaagaatgggctcctcctcctgggcccagcaggctcccgggaccctccctccctccttccgggcagcagggaagatctgagttcatgtagctggtgttggcttagggtctgggaggaaggcttttgggaagatgtaaataagaacaaaatctgcagccacctgggaagcctggcctcagtgtggaagagaaggcagcaggattattacagaaccttgtgaagccaacgcgggcagccgccaggagctgcagaccgagaggatctcgtcctttcttgcggcccagggagaccaggcctttcattctgggctcgagaccaacaattcgaattccgaactccccctgcgtgtgggactcaaggttgcccagggctcacctctgatgggcgggcaggtgagcgcttccaacagcttctcgaggctgcactgcagaaatgccaacgaggactggatgtcggcactgtgtccccggctctgggatgtgcccctccaccacctctccatcccagggagccacgacacgatgacgtactgcctgaacaagaagtcccccatttcgcacgaggagtcccggctgctgcagctgctgaacaaggccttgccctgcatcacgcgccctgtcgtgctgaaatggtccgtcacccaggcactggacgtcacagagcagctggatgccggggtgcggtacctggacctgcggatagcccacatgctggagggctcggagaagaacctgcactttgtccatatggtgtacacaacggcgctggtggaggacacactcacggaaatctcggagtggctggagcggcatccacgcgaggtggtcatcctggcctgcagaaacttcgaggggctgagcgaggacctgcacgagtacctggtcgcctgtatcaagaacatcttcggggacatgctgtgtcctcgtggggaggtgccgacactgcggcagctgtggtcccggggccaacaggtcatcgtctcctatgaagacgagagctccttgcgccggcaccacgagctgtggccaggagtcccctactggtggggaaacagggtgaagaccgaggccctcatccgatacctggagaccatgaagagctgcggccgcccaggagggttgttcgtggccggcatcaacctcacggagaacctgcagtacgttctggcgcacccgtccgagtccctggagaagatgacgctgcccaaccttccgcggctgagcgcgtgggtccgagagcagtgcccggggccgggttcacggtgcaccaacatcatcgcgggggacttcatcggcgcagacggcttcgtcagtgacgtcatcgcgctcaatcagaagctgctgtggtgctgacgggacccttctgaagttcgggacgcggcggctgcagtttcacccccgaatttccaagtattgtgactttgtttgggccaaatgttggtgatcataggaccgatgataatacgttttcattttctttaaaatagagatggggtggctgggcgtggtgacttcgcctgtcttcccaaagtgctgggatgacaggcgtgagccaccgcgcccggcctatacctcattttctacatgtcgcttgttggagctgctggttcaagttcccagccagccaatggatgccagcaccatttttactcccctttcccaagcaaatcgtgcatttttgtctaacgagagacatcagtttctcaggatgatcctcaagaacgttatggagtccatgttgcaataggttctctttgggacctaatgactcattttccaaaaatccgcttctacttttggtacccggttgctacggtgaaatgaaggtgccccgcatccagaaagacgcactcctggaccacaaccggcggctacctcagccccacggctctgcaggatcagggctcgggcaggccccgcggagatgaagaatttgcagggagcctccctgacttccgtcggctgtgaatccttgtctgtcaggggcgtatccacaaaatcaccgaattcatacagatcgtttaaataaatgaacatcattaaagtcaaaaaaaaaa

SEQ ID NO: 611480 - DNA, 153 bp, Homo sapiens
tctagaggatcacccaagcagttattacatgaccacacacacacacacacacacacacacacacacacaaactgaaactaatagcaagtgtgatatatttatatgcttcttgtgcaccctgctatagttaatttaaagagagctacaacccca

SEQ ID NO: 611481 - DNA, 271 bp, Homo sapiens
aaatgaaagcaccttggtgcctgaccccctcaatcatgctggtgactttgagcactcacaggtgtgtgcagctaaccagcccagggcaggtgggttagcctggggttataccttggccctgggaataagaccaccattgggcctttggttttgttgggcttccttttgtctttaccatccacacaggtgggtaagaaatctggagttctaaaagcacttttggttgaaatacaaagctaaagtggagaagtctaaatgaaaatggctttgg

SEQ ID NO: 611482 - DNA, 1920 bp, Homo sapiens
gccttttccagctggctgcagagaaggggccagctccctcctggggacccggagccgcggtacaggtgtggttgcttctcttggagaaagaggctgagctgacatcccccgggctgataaagaatgggctcctcctcctgggcccagcaggctcccgggaccctccctccctccttccgggcagcagggaagatctgagttcatgtagctggtgttggcttagggtctgggaggaaggcttttgggaagatgtaaataagaacaaaatctgcagccacctgggaagcctggcctcagtgtggaagagaaggcagcaggattattacagaaccttgtgaagccaacgcgggcagccgccaggagctgcagaccgagaggatctcgtcctttcttgcggcccagggagaccaggcctttcattctgggctcgagaccaacaattcgaattccgaactccccctgcgtgtgggactcaaggttgcccagggctcacctctgatgggcgggcaggtgagcgcttccaacagcttctcgaggctgcactgcagaaatgccaacgaggactggatgtcggcactgtgtccccggctctgggatgtgcccctccaccacctctccatcccagggagccacgacacgatgacgtactgcctgaacaagaagtcccccatttcgcacgaggagtcccggctgctgcagctgctgaacaaggccttgccctgcatcacgcgccctgtcgtgctgaaatggtccgtcacccaggcactggacgtcacagagcagctggatgccggggtgcggtacctggacctgcggatagcccacatgctggagggctcggagaagaacctgcactttgtccatatggtgtacacaacggcgctggtggaggacacactcacggaaatctcggagtggctggagcggcatccacgcgaggtggtcatcctggcctgcagaaacttcgaggggctgagcgaggacctgcacgagtacctggtcgcctgtatcaagaacatcttcggggacatgctgtgtcctcgtggggaggtgccgacactgcggcagctgtggtcccggggccaacaggtcatcgtctcctatgaagacgagagctccttgcgccggcaccacgagctgtggccaggagtcccctactggtggggaaacagggtgaagaccgaggccctcatccgatacctggagaccatgaagagctgcggccgcccaggagggttgttcgtggccggcatcaacctcacggagaacctgcagtacgttctggcgcacccgtccgagtccctggagaagatgacgctgcccaaccttccgcggctgagcgcgtgggtccgagagcagtgcccggggccgggttcacggtgcaccaacatcatcgcgggggacttcatcggcgcagacggcttcgtcagtgacgtcatcgcgctcaatcagaagctgctgagctgctggttcaagttcccagccagccaatggatgccagcaccatttttactcccctttcccaagcaaatcgtgcatttttgtctaacgagagacatcagtttctcaggatgatcctcaagaacgttatggagtccatgttgcaataggttctctttgggacctaatgactcattttccaaaaatccgcttctacttttggtacccggttgctacggtgaaatgaaggtgccccgcatccagaaagacgcactcctggaccacaaccggcggctacctcagccccacggctctgcaggatcagggctcgggcaggccccgcggagatgaagaatttgcagggagcctccctgacttccgtcggctgtgaatccttgtctgtcaggggcgtatccacaaaatcaccgaattcatacagatcgtttaaataaatgaacatcattaaagtcaaaaaaaaaa

SEQ ID NO: 611483 - DNA, 419 bp, Homo sapiens
aaacgcctatatgtctcggatagaatctagttggcaccacttctcaaaaatcacttggacatatctacttcatctagttttatgcatgtatctactacgattatcatatgatctgtgtatgtcccccaggtgataatatattgtctggaatactatagctatataataagctttgaaactcaggtacacgtgatggtagccccatttattttcttaatcaagaatagtttctggttattctagttccttcgtctttctcagataaatattagcatacacttttctgtatctagcaaaaaatcttgctgtgattttgataggaattgcatcaaatctttggaagaattgccatctttactgtgtcgagtcttccaatctatgaacatggtatgtctcaccatttgtttaccacaaatagt

SEQ ID NO: 611484 - DNA, 1688 bp, Homo sapiens
gtggctcacgcctgtaatcccagcaccgcggaggttgcggttgcccggggctcacctctgatgggcgggcaggtgagcgcttccaacagcttctcgaggctgcactgcagaaatgccaacgaggactggatgtcggcactgtgtccccggctctgggatgtgcccctccaccacctctccatcccagggagccacgacacgatgacgtactgcctgaacaagaagtcccccatttcgcacgaggagtcccggctgctgcagctgctgaacaaggccttgccctgcatcacgcgccctgtcgtgctgaaatggtccgtcacccaggcactggacgtcacagagcagctggatgccggggtgcggtacctggacctgcggatagcccacatgctggagggctcggagaagaacctgcactttgtccatatggtgtacacaacggcgctggtggaggacacactcacggaaatctcggagtggctggagcggcatccacgcgaggtggtcatcctggcctgcagaaacttcgaggggctgagcgaggacctgcacgagtacctggtcgcctgtatcaagaacatcttcggggacatgctgtgtcctcgtggggaggtgccgacactgcggcagctgtggtcccggggccaacaggtcatcgtctcctatgaagacgagagctccttgcgccggcaccacgagctgtggccaggagtcccctactggtggggaaacagggtgaagaccgaggccctcatccgatacctggagaccatgaagagctgcggccgcccaggagggttgttcgtggccggcatcaacctcacggagaacctgcagtacgttctggcgcacccgtccgagtccctggagaagatgacgctgcccaaccttccgcggctgagcgcgtgggtccgagagcagtgcccggggccgggttcacggtgcaccaacatcatcgcgggggacttcatcggcgcagacggcttcgtcagtgacgtcatcgcgctcaatcagaagctgctgtggtgctgacgggacccttctgaagttcgggacgcggcggctgcagtttcacccccgaatttccaagtattgtgactttgtttgggccaaatgttggtgatcataggaccgatgataatacgttttcattttcccaaagtgctgggatgacaggcgtgagccaccgcgcccggcctatacctcattttctacatgtcgcttgttggagctgctggttcaagttcccagccagccaatggatgccagcaccatttttactcccctttcccaagcaaatcgtgcatttttgtctaacgagagacatcagtttctcaggatgatcctcaagaacgttatggagtccatgttgcaataggttctctttgggacctaatgactcattttccaaaaatccgcttctacttttggtacccggttgctacggtgaaatgaaggtgccccgcatccagaaagacgcactcctggaccacaaccggcggctacctcagccccacggctctgcaggatcagggctcgggcaggccccgcggagatgaagaatttgcagggagcctccctgacttccgtcggctgtgaatccttgtctgtcaggggcgtatccacaaaatcaccgaattcatacagatcgtttaaataaatgaacatcattaaagtcaaaaaaaaaa

SEQ ID NO: 611485 - DNA, 1772 bp, Homo sapiens
ccacgcccagctaatttctgtatttttagtagagatgggttcttgtcaagttgccgagcctggtctcgaactcctgacctgaagtcaccgtaaaaaacctcttttcctcttctccttcctcaggttgcccagggctcacctctgatgggcgggcaggtgagcgcttccaacagcttctcgaggctgcactgcagaaatgccaacgaggactggatgtcggcactgtgtccccggctctgggatgtgcccctccaccacctctccatcccagggagccacgacacgatgacgtactgcctgaacaagaagtcccccatttcgcacgaggagtcccggctgctgcagctgctgaacaaggccttgccctgcatcacgcgccctgtcgtgctgaaatggtccgtcacccaggcactggacgtcacagagcagctggatgccggggtgcggtacctggacctgcggatagcccacatgctggagggctcggagaagaacctgcactttgtccatatggtgtacacaacggcgctggtggaggacacactcacggaaatctcggagtggctggagcggcatccacgcgaggtggtcatcctggcctgcagaaacttcgaggggctgagcgaggacctgcacgagtacctggtcgcctgtatcaagaacatcttcggggacatgctgtgtcctcgtggggaggtgccgacactgcggcagctgtggtcccggggccaacaggtcatcgtctcctatgaagacgagagctccttgcgccggcaccacgagctgtggccaggagtcccctactggtggggaaacagggtgaagaccgaggccctcatccgatacctggagaccatgaagagctgcggccgcccaggagggttgttcgtggccggcatcaacctcacggagaacctgcagtacgttctggcgcacccgtccgagtccctggagaagatgacgctgcccaaccttccgcggctgagcgcgtgggtccgagagcagtgcccggggccgggttcacggtgcaccaacatcatcgcgggggacttcatcggcgcagacggcttcgtcagtgacgtcatcgcgctcaatcagaagctgctgtggtgctgacgggacccttctgaagttcgggacgcggcggctgcagtttcacccccgaatttccaagtattgtgactttgtttgggccaaatgttggtgatcataggaccgatgataatacgttttcattttcccaaagtgctgggatgacaggcgtgagccaccgcgcccggcctatacctcattttctacatgtcgcttgttggagctgctggttcaagttcccagccagccaatggatgccagcaccatttttactcccctttcccaagcaaatcgtgcatttttgtctaacgagagacatcagtttctcaggatgatcctcaagaacgttatggagtccatgttgcaataggttctctttgggacctaatgactcattttccaaaaatccgcttctacttttggtacccggttgctacggtgaaatgaaggtgccccgcatccagaaagacgcactcctggaccacaaccggcggctacctcagccccacggctctgcaggatcagggctcgggcaggccccgcggagatgaagaatttgcagggagcctccctgacttccgtcggctgtgaatccttgtctgtcaggggcgtatccacaaaatcaccgaattcatacagatcgtttaaataaatgaacatcattaaagtcaaaaaaaaaa

SEQ ID NO: 611486 - DNA, 878 bp, Homo sapiens
atctctctatccagtccatttatgcagtttcttcaaagggagtctcaagtgtactctgggaaacgtgccaaacctcctttactaaaatacatcactctctctaaattcagacctggtctgtgttaggctttgacaactaattacactgtgatgaaaccaccatgcaaaattataactgagacagtgaaagagatctgacctagccaaaaaaagatggagccaggcatgatggttcacgtctataatcctagcacttgggaggctgaggcgggcaaatcacttggggccaggagttgagaccaggctggccaacatggcaaaaccccatctatactaaaaatacaaaaaaaataacccaggcttggtggtagcacttgtaatcccagcgtagtaaggaaaagcggacaagaagtgacaaaatcaactgcaaaagccgaagaacgtcgcaggggaccaaagaaccgagaatgagcccctaggcaatgcaggcatggacaccaagaactgaatatccatatcatgacaaaacaagcagggcacgacaaacagacatagcccacgacggccccactactcagaggaccacaagacggacaacgcagggacacagaacagccagtataaaaaccagggccaccagcagaaaaacacccgtaacgcaacacggcccatagaagacgaaaaagaagctagaacagggcgagaccccgggacaccccaacgaaataaacaaacagaacgcaccgcaacgaacggcagcaggccagcagcagcagcactgcaaagataacaaaaccaaccgacaacacaccccatactacccagcacacgcaccaaccaacacacgcccaccccccacgacacacccaccgccccac

SEQ ID NO: 611487 - DNA, 1746 bp, Homo sapiens
  misc_feature (1670)..(1670): n is a, c, g, or t
  misc_feature (1677)..(1677): n is a, c, g, or t
  misc_feature (1711)..(1711): n is a, c, g, or t
  misc_feature (1729)..(1729): n is a, c, g, or t
gccttttccagctggctgcagagaaggggccagctccctcctggggacccggagccgcggtacaggtgtggttgcttctcttggagaaagaggctgagctgacatcccccgggctgataaagaatgggctcctcctcctgggcccagcaggctcccgggaccctccctccctccttccgggcagcagggaagatctgagttcatgtagctggtgttggcttagggtctgggaggaaggcttttgggaagatgtaaataagaacaaaatctgcagccacctgggaagcctggcctcagtgtggaagagaaggcagcaggattattacagaaccttgtgaagccaacgcgggcagccgccaggagctgcagaccgagaggatctcgtcctttcttgcggcccagggagaccaggcctttcattctgggctcgagaccaacaattcgaattccgaactccccctgcgtgtgggactcaaggttgcccagggctcacctctgatgggcgggcaggtgagcgcttccaacagcttctcgaggctgcactgcagaaatgccaacgaggactggatgtcggcactgtgtccccggctctgggatgtgcccctccaccacctctccatcccagggagccacgacacgatgacgtactgcctgaacaagaagtcccccatttcgcacgaggagtcccggctgctgcagctgctgaacaaggccttgccctgcatcacgcgccctgtcgtgctgaaatggtccgtcacccaggcactggacgtcacagagcagctggatgccggggtgcggtacctggacctgcggatagcccacatgctggagggctcggagaagaacctgcactttgtccatatggtgtacacaacggcgctggtggaggacacactcacggaaatctcggagtggctggagcggcatccacgcgaggtggtcatcctggcctgcagaaacttcgaggggctgagcgaggacctgcacgagtacctggtcgcctgtatcaagaacatcttcggggacatgctgtgtcctcgtggggaggtgccgacactgcggcagctgtggtcccggggccaacaggtcatcgtctcctatgaagacgagagctccttgcgccggcaccacgagctgtggccaggagtcccctactggtggggaaacagggtgaagaccgaggccctcatccgatacctggagaccatgaagagctgcggccgcccaggagggttgttcgtggccggcatcaacctcacggagaacctgcagtacgttctggcgcacccgtccgagtccctggagaagatgacgctgcccaaccttccgcggctgagcgcgtgggtccgagagcagtgcccggggccgggttcacggtgcaccaacatcatcgcgggggacttcatcggcgcagacggcttcgtcagtgacgtcatcgcgctcaatcagaagctgctgtggtgctgacgggacccttctgaagttcgggacgcggcggctgcagtttcacccccgaatttccaagtattgtgactttgtttgggccaaatgttggtgatcataggaccgatgataatacgttttcattttctttaaaatagagatggggtggctgggcgtggtgacttcgcctgtcttcccagcacttttggaggccgaggttggtngatcatnaggtcaggagctttagagcagccttaccaacatngtaaatccatctctactnaaaatacaaaacttgct

SEQ ID NO: 611488 - DNA, 146 bp, Homo sapiens
gcatagaccccagatattttgagcggggggcatatatatgtctaccgatattaggataaaactgtgtttacttagaaggttactaggacgagagtactagttctacttgctggtagagaggaacgagacggatatgtagaaaatat

SEQ ID NO: 611489 - DNA, 841 bp, Homo sapiens
agctgagattacaggcgcgtgccaccgtgcctggttaattttgtatttgtatttttatttatgttttgagatggagtttcgctctcgttgccgaggctggagtgtagtagtgtgatcctggctcactgcaacctccacctcccgggttccagcaaattctcctgcctcagcctcccaagtagctgggattgcaggcgcccgccaccacgcccggataatttttgtgtgtttagcagagacggggtttcaccatgttggccaggctggtctcgatctcctgacctcaggtgatccacccgcctcggcctcccaaagtgctgggatgacaggcgtgagccaccgcgcccggcctatacctcattttctacatgtcgcttgttggagctgctggttcaagttcccagccagccaatggatgccagcaccatttttactcccctttcccaagcaaatcgtgcatttttgtctaacgagagacatcagtttctcaggatgatcctcaagaacgttatggagtccatgttgcaataggttctctttgggacctaatgactcattttccaaaaatccgcttctacttttggtacccggttgctacggtgaaatgaaggtgccccgcatccagaaagacgcactcctggaccacaaccggcggctacctcagccccacggctctgcaggatcagggctcgggcaggccccgcggagatgaagaatttgcagggagcctccctgacttccgtcggctgtgaatccttgtctgtcaggggcgtatccacaaaatcaccgaattcatacagatcgtttaaataaatgaacatcattaaagtcaaaaaaaaaa

SEQ ID NO: 611490 - DNA, 1246 bp, Homo sapiens
atgaacacgtcactgctgggaagcatcggcatgctgaactcggcacctcagctgcgctgcatataaaacctaccaggtgccccactgctgcagcccgtcgtcccccggtctcccacaatgcccgtcaagctggcccggctcatctggacttacaaacgcaacgtcatcctcatggaccatgacgggaaggagcaccgccttcatggtctaatagcgtagctagcctagccgccgtgactagcgttctgagtatctactaaaattatccaagccgattgttgctactgtccttcctcagcaccagattgttcccaggggcctgacccaacccagtagccatccagtcggccacggccgggctcttgtacactctgtagcatgcttctcagtgggatagaacccgcatacgtagccaatctcgtcgattacagaggcacgcgacacatgctctgacaggatggtggccactcctgtcaaccaggtacgtatattccctgaccagaagcatggccagggcgaacaacgccacgcggcttcctgggaaaccgctcttgcttgcttgcgtgaaacagaagtcgacaagaatcaactaaacagtgtgatagcactcccagcccagatcagcatttgtcagccatctcaatcgaacctctgaagtgctgcttgaaatctggccgttctgaccactggggtgttgaggtcctgtggcagttcctccaccgactggaacactacttggccccttgcgcactcccttacaaataactggtcaacaccaaaaacgacacatggcgatcgcacacagacatcctaaacatctggactaaatgaccacggagaattcactcaacccgattcccaagcgtccaacatacaccccgttctaaacacccagtaacccacacctccaaactcactcaacaactacgtccccccacaccaaatataccctcccaaaacacactcctcccaacctctaatgcacactcgtcaattgaaccacgatcatggcaaccctccacacctcactagccatctaacactaacacaacccccatcaacaacccgaacaatcactaccaaggaacacactcagagcaacgcgcatcaaccaccaatacaaccccgacactaaacctacacacccactaaaaaaaacacatacaaaacaccacctgccaacaatactctacaacaagcacaaatcacacttccccttaaattcctctcactctcattcctaaac

SEQ ID NO: 611491 - DNA, 713 bp, Homo sapiens
  misc_feature (24)..(24): n is a, c, g, or t
  misc_feature (126)..(126): n is a, c, g, or t
  misc_feature (207)..(207): n is a, c, g, or t
  misc_feature (209)..(209): n is a, c, g, or t
  misc_feature (214)..(214): n is a, c, g, or t
  misc_feature (217)..(217): n is a, c, g, or t
  misc_feature (226)..(226): n is a, c, g, or t
  misc_feature (235)..(235): n is a, c, g, or t
  misc_feature (252)..(253): n is a, c, g, or t
  misc_feature (257)..(257): n is a, c, g, or t
  misc_feature (263)..(264): n is a, c, g, or t
  misc_feature (266)..(266): n is a, c, g, or t
  misc_feature (268)..(268): n is a, c, g, or t
  misc_feature (275)..(275): n is a, c, g, or t
  misc_feature (286)..(286): n is a, c, g, or t
  misc_feature (301)..(301): n is a, c, g, or t
  misc_feature (305)..(305): n is a, c, g, or t
  misc_feature (312)..(312): n is a, c, g, or t
  misc_feature (319)..(319): n is a, c, g, or t
  misc_feature (321)..(322): n is a, c, g, or t
  misc_feature (328)..(329): n is a, c, g, or t
  misc_feature (336)..(337): n is a, c, g, or t
  misc_feature (341)..(342): n is a, c, g, or t
  misc_feature (346)..(346): n is a, c, g, or t
  misc_feature (350)..(350): n is a, c, g, or t
  misc_feature (362)..(362): n is a, c, g, or t
  misc_feature (370)..(370): n is a, c, g, or t
  misc_feature (374)..(374): n is a, c, g, or t
  misc_feature (377)..(377): n is a, c, g, or t
  misc_feature (381)..(381): n is a, c, g, or t
  misc_feature (384)..(384): n is a, c, g, or t
  misc_feature (387)..(387): n is a, c, g, or t
  misc_feature (389)..(389): n is a, c, g, or t
  misc_feature (424)..(425): n is a, c, g, or t
  misc_feature (433)..(433): n is a, c, g, or t
  misc_feature (438)..(438): n is a, c, g, or t
  misc_feature (444)..(444): n is a, c, g, or t
  misc_feature (456)..(456): n is a, c, g, or t
  misc_feature (470)..(470): n is a, c, g, or t
  misc_feature (474)..(474): n is a, c, g, or t
  misc_feature (486)..(486): n is a, c, g, or t
  misc_feature (494)..(494): n is a, c, g, or t
  misc_feature (517)..(517): n is a, c, g, or t
  misc_feature (532)..(532): n is a, c, g, or t
  misc_feature (550)..(550): n is a, c, g, or t
gctgaaggatggtatcatcatganccagacgctgctgatcatcctcttcatcatcgtgcctatcttcctgctgctggacaaggatgacagcaaggctggcatggaggaagatcacacctacgaggncctggacattgaccagacagccacctatgaggacatagtgacgctgcggacaggggaagtgaagtggtctgtaggtgagcncncaggncangagtgaganccaggtcgncccatgacctgggtgcnngctncctgcnntnantgactgnttcggagctgnctggctcatggcccnaccnctttccnggacccncnntctggnntctgaanntggnncacnaganctgccatttgtntccagccnctgntcnccanttnttncnaaagggcctggagtagaaggacaacagggcagctnnttggaggnagttntctggngatggacgggtnccagccttctgggngtgntatgaggtgatncgtccccncacatgggatgggggaggcaganactggtccagagccngcaaatggactcggagcngagggcctcccagcagagcttgggaagggccatggacccaactgggccccagaagagccacaggaacatcattcctctcccgcaaccactcccaccccaggaggccctggcctccagtgccttcccccgtggaataaaacggtgtgtcctgagaaaccacaat

SEQ ID NO: 611492 - DNA, 109 bp, Homo sapiens
ttccttcgattgtgggctcagaggtactaacgagaaagtatttcactgtagagatgtatcattagttcatttgtacatttgattaactttttttttagacggagtctcg

SEQ ID NO: 611493 - DNA, 944 bp, Homo sapiens
  misc_feature (387)..(387): n is a, c, g, or t
ggcacccgtgaacaacaaagcaaggaagacggagctccgagcctccgggggctcctagtcaatgggccggggcgcgcagttcccatggaagactgaggagcgcgcccgtctcatcctcatccttgtcccgtccagtcttctgccttcgctattcctgacgcgaatccgtgcaggacgagccgctgcccgtgaccgtcgctcctcaagctcaccgttctcgtccttgccgcacgggattgtgctcctccgggtggtgggcacgctaacatttttgatggcctcccccccgatgttgtgccggacggtgtggtccgctttggcctttctagtttacctgatgtcgtcggtggtcttgagcagccactggtgtgttcccttttcaacgcntttaagggaaagaattgctttagggatcggggtggctcgaatgttcactggtactaacccggctgagtgttcggctccgaacatgtcttgaatttgtgaaggggttatggaaataaccctgtagaaaatactgcgttaccatatttgtgggtcctcacgtgtacccagacgttaatgtcgctcgtgggtaggcacccggagtgggaccgcaacggatagcggaaatttttgccttgccaagtaacgcctttagccccgatggatctggcaggacgccttagcgttccccagggtcagtctttgtgccacgtattttgcagggtctgtttacccggtttcctgggcatgttgttgttgccattggcccattgtggaagattcccgttttgcccggaatttcaccaaggtcacggattaggactcctctggcccagtgttcgaaccttgaacttccatcctggtgggtgcgtatcccggtaaatctgttaggagctacatttgcaggttttttccgcacgcgggtttcccagccccaggggccacatgtaagcgggttc

SEQ ID NO: 611494 - DNA, 281 bp, Homo sapiens
gcgttcacaatggtcacggatcaacaaagatacatcaataggtgtagtccgtctcattattagtagatgctattatataagctacttaacgctggataccttctttcaaatacagccattcacgttgtaaagtagggaagaagtttcttgacaagactctgcaattaaatgcttaaaatttggaggggatccttccttgattacatcaagtatgttggtacatgggtttatacaagttcctcttgagaaggcaaaaagaccaccatgtgtgagcgcgttgg

SEQ ID NO: 611495 - DNA, 949 bp, Homo sapiens
  misc_feature (948)..(948): n is a, c, g, or t
gtagcaaggactaacccctataccttcggcatagtgaatgaactagaaataacttggcaaggagagccaaagctaagacccgcgaagccagaggagcgtacctagagaacagctatagaagagcacacccgtctatgtagcaaaatagtgggaagatttatagggtagaggcgaaaaacctaccgagcctggtgatagctggtgtccaagatagaatcttaggttcaactttaaattggccgacagaagcctctaagatccccttgtaaatgtaacggttagtccatggaggagaagaggtcttggacactaggaaaaaacctgtagagagagtaaagaaatggtaacagccagtagtaggcctaagaagcagcaccaattaagaaagcgttcaagctcaagaccactactaaaagaatcccaaaatataagctgaactcctcacacgccaatgtggaccaatctatccaccctatgagaagaactaatgttgagtataagtaacatgaaaacattctcctccgcataagcctggtcagattaaaacgactgaactgacaattaaggagccaatatctacaatcaacaagaagtcattattaccctcactgtcaaccaaacaggggatgctcataaggaaggttcacaaaaagtaaaggactcggaatcttacccgctgtaacaaaaatcactctagcatcacagtataagggacgctggcagtgaacatggttaccggcggggtacctaccgggagtgcttacattgtcctaataggacgatgaaggccgagtcgcggcctattaccaggaagaccgcgcgaaggggcgtaccacaaaacctggcttttaggcagcacaccggctacacgcggcatctgggcgagccccggaggccagaaatgccagacgggccacacagagaggattgcgtaacaacaatccaaang

SEQ ID NO: 611496 - DNA, 261 bp, Homo sapiens
gggagggggtggtgccctcttcccccaaaggtttttttccggggggtgtttttgggggggggcccccctttcccttagaccaaaggggggggttggggggggaaccccggggggggccccttttgaccccggttcccccccccctttcggggggggggggttttttgggttttttcccccccccccccccccccctggttttccccccttttttttgtttttccccccccaaaattttttggtgtttttttttcccgggga

SEQ ID NO: 611497 - DNA, 542 bp, Homo sapiens
  misc_feature (438)..(438): n is a, c, g, or t
  misc_feature (448)..(448): n is a, c, g, or t
  misc_feature (454)..(455): n is a, c, g, or t
  misc_feature (470)..(470): n is a, c, g, or t
  misc_feature (509)..(509): n is a, c, g, or t
attcccgttttggtgaaaagtgggagagggcccccattctttaagtggggggaagggcccccctgtttaatttgtcccggccaggccccgtgtggtgagaagttttccaaccatccccccttgggggggttttttgttttttttattaacccaccctttcggggggggttttccaaaccggtggccaaaagggtgggtggggtggggagggtcccccattttcccccaaaggcccaaagggttaatttattttttcccctaaaccccccccccccccttttttccggggggggggggcgggttccaaaccgttttttttccttggccccttttgttttttgggtaaaagcggggttttttttaccccgccccggtaaccccccccaagggaaggggaaatttttttgggcccccctgggttttttttttggggggggncggttttaantttttnntttttaaaaccgggnctttttttggggacccccttgccccaaattttttccccnattttttggccccctttaaaaggttttttggga

SEQ ID NO: 611498 - DNA, 135 bp, Homo sapiens
tgaaggcgacctagaggatcccccccactctcctcttccgccactctcctctttccgaaaactttgcagctatagcatgaagttaatttctgtcttattttctggagtagtgtactatactggaacatagtacag

SEQ ID NO: 611499 - DNA, 4755 bp, Homo sapiens
  misc_feature (18)..(18): n is a, c, g, or t
tcataggttcgcaggganagaggtgtctgaagagctctggtagcaaaaagtgctccttccttgcttaggaacagagagggtatgggctctcttgctgtcagtctgggaggagggttcaaggaggtttggcctcctagggactggagacgccctgtcctcttcattgccttatactaactgtctgtccataggcggagctggtcaccacccacaagtgcctgcaccatgaggtaaagcggttgaatgaggaaaaccaagggctccgggccgagcagctgccatcctcagccccccagggctcgcagcaggagcagggcgaggaggaatcactgcccagctctgtgccagagctgcagcagctgctgtgctgcacgcggcaagaggcgagggcccggctgcaggcccaggagcacggggccgagcgcctgcggatcgagatcgtgacgctgcgggaggctctggaggaggagacagtggccagggccagcctggaggggcagctgagggtgcagcgggaggagacagaggtgctggaggcctccctgtgcagcctgaggacagagatggagcgggtgcagcaggaacagagcaaggcccagctcccagacctcctctcagaacagagggccaaggtgctgcggctgcaggcagagctggagaccagtgagcaggtgcagagggatttcgtgcgactgtcccaggccctgcaggtgcgcctagagcggatccgccaggctgagaccctggagcaagtgcgcagcatcatggatgaggcgccactcacggacgtcagggacatcaaggacacctgaggggtcaggatatccccacccccaccctgggaaagacgcctttccccactcctgaaccatgaggcctcgctctggggtcttggatggcttttccaccgtccctgagactggggttgaggggactgacgggggccaccaccgccccgccctccagcgcctcctcccagggtggctgggcctcctgttctcagggatcacacctgggtgaggggcccaagcccctcccggaaccaaaggtgcaggctcaggcctgcggctttctggctgctgtgctgcctcctgggctccagccctcccctgcccccagcccgtcccctgcccagggcacagcggagccatgggggctgggagtccccatcagaggcagtgaggtgggccccggccctgggacaggcagctgccttctggtctgcatgacactaagacgcttgtccacagcggcgacccaggcctccaagcttgcacagaggcaaggccagacttttccgtcgtttattttcaataaataagcagctcagcgcagtcggtcgccttgtccctgcaagcccctcggggttgggaaggggaatttacaaggttgagagggaggcgggtggccgagggggaaggaaagggaaggggacatgtttataaacagacacatgacacgggtgtgggggacaggacgggggtctgtgccacagctctgcctgaagatgtgtcactatcggggtggggaggacagagcaaaaggatgctcacttccttctttcatcttctggatctgtgacacgggctcagagatggaggagggggaacagttatccctctaggtagttccgagcaacgaacttgaggatttcgtcgagcccaatgactggcagtgagatcttgaggaccatgagccactgggtgaggtccagggcccggagcttgaagatcatcggcagggggtcaacatagaggatgaggaagtgcagggacatggagaggcagatggagcccagcagccagatgttcacccagggtggcatccgcagcagggactggttctcggacaggctgttcagtgcattgcacatctcgatggtcaccagcacggacagggccatggtcatgggctcgggggcctcgaagacctcacagtctatgccctcaaagtgggtgttgtcctcggtgcactgcatgaagtgagtcagctggctgtagttgacatgaggcccatcctcagcgtacaggaaccaccaggcagctgctcccacggtggctgcacccacatagcccccgattgccatgtagcggaagaagagccagccactgatgaggggctccttggggctccggggggggcggtccatgatgtccaggtctggtgggttgaagcccagggctgtggctgggagcccgtcggtcaccaagttcacccatagcagctgcaccgggatcagggcctcaggcagccccagggcagcggtcaggaagatacagaccacctcgcccacgttggaggaaatgaggtagcggatgaactgcttcatgttgttgtagatggcgcggccctcctccacagcagctacgatggtggagaagttgtcgtcagccagcaccatctcagaggcagtcttggccacggcagtgccagatcccatggcaatgccaatctcagccttcttcagggcaggggcgtcattgacgccatcacctgtcatggctgtgatctcatcgtaggactgcaggtactccacaatcttggacttgtgcgagggctccacacgggcgaagcagcaggcacgtcggcaggcttcccgctgttcagccaggggcaggtcgtcgaactctcggcccgtgtaggcgcgatcggccacctcctcgttctccccaaagatgccaattcgccggcagatggcaatggctgtgcccttgttgtccccagtgatcatgatcacccggatcccggcgtcacggcacagctggatggagcccgtgacctccttgcgcggagggtccagcatgcccactacacccacgaatgtcaggtccgtctcatactccaggaacctggcagagtcatccaggaccatttcctctcgcttcgggggggtgtcccgggtggccagggccaagcagcgcagggtgtcccggccagtgccccactccttgatcaccgccatgatcttttccttcaccggccccgtcagtggcacccgggtggtgccaactcgcacatagttacagcggtcgatgacgccctcaggggcacccttgacaaacatcttgttgcccacagcagcccgggaagatttggctggggagcaatagacagacatggactttctgtctcgggagaactccagggtgaattccttcttcattagctggcggatcaccgagttgcaggcgttggctctctccaccttcgagaggcttctcacatccgtgttgaacacattcatcttctccaccagggtggtgagtgctgtctcggtggcctcgccgaccttctcatagacacctttggcctcgttgaagtccaaggaggagtcattgcagagggcacagatggtggccagctccaccagcccgtcatactgccctggccggactggcttatcattcttcaagacctctccctctggagcgtaagtggagccggtgatggagaactcattcaggaggcagatgtccccatccaccttgtcaatgataaacatcttgcagacagacatctggttggtggtgagggtgcctgtcttgtcggaacagatgacagaggtgcagcccagggtctctacggagggcaagcttcttacaatggcattcttctttgccatccgacgggtacccagggccaggcaggtggtgatgactgcaggaagaccttcggggatggcagccacagccaaggccacggcaatcttaaagtagtagatggccccgcggaaccaggagcccccatggacggggtcgttgaagtggccaatgttgataagccagacagccacacagatgagggagatgaccttggagagctgctccccaaactcatccagcttctgctgcaagggggtcttgtcctgttctgtggcagccatttggtctcggatcttcccaatctcggtgcccacaccagtggtggccacgatgcccaaggccttgccggctgcaatgttggtgcccgagaaaagcatgttcttcttgtcctggttgacagctcgggggtcaggaacgggctccgtgtgtttgatgacagatacagactcgcctgtcaggatggactggtcaacccgcagcgtggtggatttgatggcgaggattcggatgtctgcagggactttgtcccccacagccacctccacgatgtccccagggacgatgtcccgagccttgatcctttgcactgacttgcggtcagcccggtagaccttccccatctctggctcatactccttcagggcctcgatggcgttctctgcgttccgctcctgccaaacccccacgatggcattggcaatgaggatcaagaggatgacaaagggttcaacaaaggcagtgatggtctcttcaccttcctcaaaccaggccagcacgaaggaaatgcatgcggccaggaggagaatccgcaccaggaggtcttcaaactgctctatcaccagctcccacagggtcttcccttcctcagcagggagctcattgaggccgtatttctccagattccgcttaacttggtccggggtgaggcccgtggtctcactcaccccaaaataggccaaacattcctccgtggttttagcatgagcggcctccattgtgctcccttcctgggggccggggccggtgtgttccttccagggggttcccactcgtggggggtcttcctcagtgtgtccaactgcctgtctgcctgggtttcttctttttactctcctgccccctccaggtttttcttccctccacaaagctctga

SEQ ID NO: 611500 - DNA, 1479 bp, Homo sapiens
  misc_feature (1185)..(1185): n is a, c, g, or t
  misc_feature (1479)..(1479): n is a, c, g, or t
gcccagattctggaactcagactcttagagcctttaaaatctccatccctgagagccgttctccgttggaggatccttccctccccgcgttctgaagcctctcagcagcgtcctggtaggacgcccgaaagatgagcttctccatgctctcctcccctaagaaccgagccaattgtctcctccaaaaaccgcctgtagcccaagccagcagcattccatctccatcgtctatggcccaagtccccgtgggacttgttgcaggcttgaacgcatcgcgcctaccccttggacgtcgagctagacgcccctgtgaacctcccgaccgactcaccagctagcgcatcgctacgcagcacgcgtcttggccaacgaggggtcctggtctttctgccacactgcaatgggtactgtcgagcccatggtgagggacagctaggcccgacggcttcccctagcagacgcgaacgggcccctcattccgccctgacacagtgccctgggggccccttgggctcccaccaacacgggggataccgaaagaaaaagacatggcttggacaaagaacgggggccgctcctcggaggcaagcctaagagagcgaaagtgagaccccggggggtatccccaagacagggatacgaacccccttgctccgtggttggtgtcactccccctttgctactgccttgtcttgccgccaagttaagcccgtcgcctcccggcacccgcgcttgttcccatttcgccgagaaggtactggcggtggtcaccctttcccaattaagtggccccgacggcgtcagcgtcgtcggacttgtcgccctgccattgtggatgggggcccatgtgtcgcgcccagtggggtgcaccctccctgtgcccctgtgtgttagcctccaacatcactcccccaaggacttgtgtgcccggattacacctcgtccaccgactggttgggaagcggcatgcaaccatttcgcgaatttaacctggcagcggcaatcggtgctcccccatcgggggcgtaaaaggaacggaacggaagcaccttaactcgaaccatgagcgtcgtctccccaatggcggggccaacagcacacgcgcaatggggtcatactctatccgcaagcgcttccgtcagtccacccggaactctttaattgccgcagcctcaatcggctgcntatcgcgcgacagcttccgcatttcgcggccattggcgctcttcggcccttcggcgcgctgctgatttggcacgccacaatagttgggccccccaccattggctccttggcggtggtcccttccgtatgggggccttagggtggcccagctcgagggcgtcacgcgttgattcggcgccagagcacccaaggcgtatgggcgacctcccctgtctcgagggtacggccgcttgtgcccaagcggccaaccgccccggatgaggctggcttcactgagcatcggggtgacacaan

SEQ ID NO: 611501 - DNA, 362 bp, Homo sapiens
ggacactagtgcccaggcgaacaagcaggcatctctggttatccccctcaaatagttttttgtttgtttgttttagacagagtgttgctcttgtttcccaggctaggagagcagtggcgcagtctcggctcactgcagcctccgcctcctggattcgggcgattctcctgccgcagcctcccaggtagccatcacgcccagctgattttttgtatttttggtggagatggggtttcatcgtgttggccgggctgatctcgagctcctgatctcgggtgatccgcccaccttggcctcccaaagtgttgggattgcaggcgtgagccaccatgcccggcccccctcaaatggttttatctgcc

SEQ ID NO: 611502 - DNA, 6091 bp, Homo sapiens
tttcagactccgactaactacgcggggactccgaggcgctcagaaaaatgaagccgacccggccctgccccgagggacgctccaagagggcggaggtgcagggagggccccgccacaattcgcggtaacgcaagccaggctcgggcggaagggcggccggagccgatcaaaggctggctccgggcaggggcagcgagggagcgagggggagctctccgcaggccggtgtcccggaggaggcataattggagcagggcttccaaggtcacggagagacgccgggcaagacctcttaaggatcctcttccgggcttgaaaggcaggcgtcctcccgaaccgcgcgacccagccaagaagagccggggcggggccggggccggggccgggggccgactcgggaatcttcggccgaggctcggcaatccccccatcctccgtccggggcctccagcccggggccgatccggaaacagccgagcggatccggaaacagccgagaggacccggaagcggtgcgctccgtcaccagggagtgcgggaatccgccgtttgcgctgaggcaatggcggcagctgcgccggtggccgcggacgacgatgagcggcggcggcggccgggggctgcactggaggactcccggtcccaggaaggggcaaatggtgaggccgagtcaggtgagctcagccggcttcgggctgagctggcaggcgccctggcagaaatggaaaccatgaaggctgtggcagaggtgagcgagagcacgaaggccgaggctgtggctgcggtgcagcggcagtgccaagaggaggtggcctcgctgcaggccatcctgaaagactccatcagcagctatgaagcccagatcaccgccctgaagcaggagcgacagcagcagcagcaggactgtgaggagaaggagcgggagctgggccgcctgaagcagctgctgtcccgggcctaccccctggactccctggagaagcagatggaaaaggcccacgaggactcggagaagctgcgggagatcgtactgcccatggaaaaggagatcgaggagctgaaggcgaagctgctgagggccgaggagctgattcaggagatccagagacgtccccggcatgccccttccctgcacggctccacggagttgctgcccctgtcccgggatccatcgcccccgctggagcctctggaggagctgagcggagatgggggtccagccgctgaggccttcgctcacaactgcgatgacagcgcctccatctcctccttctcccttggcggtggggtcggcagcagctcctccctgccccaaagccgccagggcctgagccctgaacaggaagagacggcctcgctggtgtctacgggcaccctggttcccgagggcatctacctgccccctcctggctaccagctcgtcccagacactcagtgggagcagctgcagacagagggccgacagctgcagaaggacctggagagcgtcagtcgcgagcgggacgagctccaagagggcctgagacggagcaatgaggactgtgccaagcagatgcaggtgctcctggcccaggtccagaactcagagcagctgctgcggaccctgcaagggaccgtgagccaggcccaggagcgggtgcagctgcagatggcggagctggtcaccacccacaagtgcctgcaccatgaggtaaagcggttgaatgaggaaaaccaagggctccgggccgagcagctgccatcctcagccccccagggctcgcagcaggagcagggcgaggaggaatcactgcccagctctgtgccagagctgcagcagctgctgtgctgcacgcggcaagaggcgagggcccggctgcaggcccaggagcacggggccgagcgcctgcggatcgagatcgtgacgctgcgggaggctctggaggaggagacagtggccagggccagcctggaggggcagctgagggtgcagcgggaggagacagaggtgctggaggcctccctgtgcagcctgaggacagagatggagcgggtgcagcaggaacagagcaaggcccagctcccagacctcctctcagaacagagggccaaggtgctgcggctgcaggcagagctggagaccagtgagcaggtgcagagggatttcgtgcgactgtcccaggccctgcaggtgcgcctagagcggatccgccaggctgagaccctggagcaagtgcgcagcatcatggatgaggcgccactcacggacgtcagggacatcaaggacacctgaggggtcaggatatccccacccccaccctgggaaagacgcctttccccactcctgaaccatgaggcctcgctctggggtcttggatggcttttccaccgtccctgagactggggttgaggggactgacgggggccaccaccgccccgccctccagcgcctcctcccagggtggctgggcctcctgttctcagggatcacacctgggtgaggggcccaagcccctcccggaaccaaaggtgcaggctcaggcctgcggctttctggctgctgtgctgcctcctgggctccagccctcccctgcccccagcccgtcccctgcccagggcacagcggagccatgggggctgggagtccccatcagaggcagtgaggtgggccccggccctgggacaggcagctgccttctggtctgcatgacactaagacgcttgtccacagcggcgacccaggcctccaagcttgcacagaggcaaggccagacttttccgtcgtttattttcaataaataagcagctcagcgcagtcggtcgccttgtccctgcaagcccctcggggttgggaaggggaatttacaaggttgagagggaggcgggtggccgagggggaaggaaagggaaggggacatgtttataaacagacacatgacacgggtgtgggggacaggacgggggtctgtgccacagctctgcctgaagatgtgtcactatcggggtggggaggacagagcaaaaggatgctcacttccttctttcatcttctggatctgtgacacgggctcagagatggaggagggggaacagttatccctctaggtagttccgagcaacgaacttgaggatttcgtcgagcccaatgactggcagtgagatcttgaggaccatgagccactgggtgaggtccagggcccggagcttgaagatcatcggcagggggtcaacatagaggatgaggaagtgcagggacatggagaggcagatggagcccagcagccagatgttcacccagggtggcatccgcagcagggactggttctcggacaggctgttcagtgcattgcacatctcgatggtcaccagcacggacagggccatggtcatgggctcgggggcctcgaagacctcacagtctatgccctcaaagtgggtgttgtcctcggtgcactgcatgaagtgagtcagctggctgtagttgacatgaggcccatcctcagcgtacaggaaccaccaggcagctgctcccacggtggctgcacccacatagcccccgattgccatgtagcggaagaagagccagccactgatgaggggctccttggggctccggggggggcggtccatgatgtccaggtctggtgggttgaagcccagggctgtggctgggagcccgtcggtcaccaagttcacccatagcagctgcaccgggatcagggcctcaggcagccccagggcagcggtcaggaagatacagaccacctcgcccacgttggaggaaatgaggtagcggatgaactgcttcatgttgttgtagatggcgcggccctcctccacagcagctacgatggtggagaagttgtcgtcagccagcaccatctcagaggcagtcttggccacggcagtgccagatcccatggcaatgccaatctcagccttcttcagggcaggggcgtcattgacgccatcacctgtcatggctgtgatctcatcgtaggactgcaggtactccacaatcttggacttgtgcgagggctccacacgggcgaagcagcaggcacgtcggcaggcttcccgctgttcagccaggggcaggtcgtcgaactctcggcccgtgtaggcgcgatcggccacctcctcgttctccccaaagatgccaattcgccggcagatggcaatggctgtgcccttgttgtccccagtgatcatgatcacccggatcccggcgtcacggcacagctggatggagcccgtgacctccttgcgcggagggtccagcatgcccactacacccacgaatgtcaggtccgtctcatactccaggaacctggcagagtcatccaggaccatttcctctcgcttcgggggggtgtcccgggtggccagggccaagcagcgcagggtgtcccggccagtgccccactccttgatcaccgccatgatcttttccttcaccggccccgtcagtggcacccgggtggtgccaactcgcacatagttacagcggtcgatgacgccctcaggggcacccttgacaaacatcttgttgcccacagcagcccgggaagatttggctggggagcaatagacagacatggactttctgtctcgggagaactccagggtgaattccttcttcattagctggcggatcaccgagttgcaggcgttggctctctccaccttcgagaggcttctcacatccgtgttgaacacattcatcttctccaccagggtggtgagtgctgtctcggtggcctcgccgaccttctcatagacacctttggcctcgttgaagtccaaggaggagtcattgcagagggcacagatggtggccagctccaccagcccgtcatactgccctggccggactggcttatcattcttcaagacctctccctctggagcgtaagtggagccggtgatggagaactcattcaggaggcagatgtccccatccaccttgtcaatgataaacatcttgcagacagacatctggttggtggtgagggtgcctgtcttgtcggaacagatgacagaggtgcagcccagggtctctacggagggcaagcttcttacaatggcattcttctttgccatccgacgggtacccagggccaggcaggtggtgatgactgcaggaagaccttcggggatggcagccacagccaaggccacggcaatcttaaagtagtagatggccccgcggaaccaggagcccccatggacggggtcgttgaagtggccaatgttgataagccagacagccacacagatgagggagatgaccttggagagctgctccccaaactcatccagcttctgctgcaagggggtcttgtcctgttctgtggcagccatttggtctcggatcttcccaatctcggtgcccacaccagtggtggccacgatgcccaaggccttgccggctgcaatgttggtgcccgagaaaagcatgttcttcttgtcctggttgacagctcgggggtcaggaacgggctccgtgtgtttgatgacagatacagactcgcctgtcaggatggactggtcaacccgcagcgtggtggatttgatggcgaggattcggatgtctgcagggactttgtcccccacagccacctccacgatgtccccagggacgatgtcccgagccttgatcctttgcactgacttgcggtcagcccggtagaccttccccatctctggctcatactccttcagggcctcgatggcgttctctgcgttccgctcctgccaaacccccacgatggcattggcaatgaggatcaagaggatgacaaagggttcaacaaaggcagtgatggtctcttcaccttcctcaaaccaggccagcacgaaggaaatgcatgcggccaggaggagaatccgcaccaggaggtcttcaaactgctctatcaccagctcccacagggtcttcccttcctcagcagggagctctacccaggaaaaagaagaaaaggacagattcatttggggttcagcctcatgccccccacacccaagactttgtggctaagagaatcaggccaccttgaggttcatcaagttcatcccattaaaacctcccaaaactctggaaaaaaaaaaa

SEQ ID NO: 611503 - DNA, 4354 bp, Homo sapiens
  misc_feature (103)..(103): n is a, c, g, or t
agtcagctgaggagacagaggtgctggagggtgagtgtgtgctggaggtatcttggggatcgcccaccctggctgggctaggtggggaaagggagagggcatngccctgacgtctccccctgccctgacttcccagcctccctgtgcagcctgaggacagagatggagcgggtgcagcaggaacagagcaaggcccagctcccagacctcctctcagaacagagggccaaggtgctgcggctgcaggcagagctggagaccagtgagcaggtgcagagggatttcgtgcgactgtcccaggccctgcaggtgcgcctagagcggatccgccaggctgagaccctggagcaagtgcgcagcatcatggatgaggcgccactcacggacgtcagggacatcaaggacacctgaggggtcaggatatccccacccccaccctgggaaagacgcctttccccactcctgaaccatgaggcctcgctctggggtcttggatggcttttccaccgtccctgagactggggttgaggggactgacgggggccaccaccgccccgccctccagcgcctcctcccagggtggctgggcctcctgttctcagggatcacacctgggtgaggggcccaagcccctcccggaaccaaaggtgcaggctcaggcctgcggctttctggctgctgtgctgcctcctgggctccagccctcccctgcccccagcccgtcccctgcccagggcacagcggagccatgggggctgggagtccccatcagaggcagtgaggtgggccccggccctgggacaggcagctgccttctggtctgcatgacactaagacgcttgtccacagcggcgacccaggcctccaagcttgcacagaggcaaggccagacttttccgtcgtttattttcaataaataagcagctcagcgcagtcggtcgccttgtccctgcaagcccctcggggttgggaaggggaatttacaaggttgagagggaggcgggtggccgagggggaaggaaagggaaggggacatgtttataaacagacacatgacacgggtgtgggggacaggacgggggtctgtgccacagctctgcctgaagatgtgtcactatcggggtggggaggacagagcaaaaggatgctcacttccttctttcatcttctggatctgtgacacgggctcagagatggaggagggggaacagttatccctctaggtagttccgagcaacgaacttgaggatttcgtcgagcccaatgactggcagtgagatcttgaggaccatgagccactgggtgaggtccagggcccggagcttgaagatcatcggcagggggtcaacatagaggatgaggaagtgcagggacatggagaggcagatggagcccagcagccagatgttcacccagggtggcatccgcagcagggactggttctcggacaggctgttcagtgcattgcacatctcgatggtcaccagcacggacagggccatggtcatgggctcgggggcctcgaagacctcacagtctatgccctcaaagtgggtgttgtcctcggtgcactgcatgaagtgagtcagctggctgtagttgacatgaggcccatcctcagcgtacaggaaccaccaggcagctgctcccacggtggctgcacccacatagcccccgattgccatgtagcggaagaagagccagccactgatgaggggctccttggggctccggggggggcggtccatgatgtccaggtctggtgggttgaagcccagggctgtggctgggagcccgtcggtcaccaagttcacccatagcagctgcaccgggatcagggcctcaggcagccccagggcagcggtcaggaagatacagaccacctcgcccacgttggaggaaatgaggtagcggatgaactgcttcatgttgttgtagatggcgcggccctcctccacagcagctacgatggtggagaagttgtcgtcagccagcaccatctcagaggcagtcttggccacggcagtgccagatcccatggcaatgccaatctcagccttcttcagggcaggggcgtcattgacgccatcacctgtcatggctgtgatctcatcgtaggactgcaggtactccacaatcttggacttgtgcgagggctccacacgggcgaagcagcaggcacgtcggcaggcttcccgctgttcagccaggggcaggtcgtcgaactctcggcccgtgtaggcgcgatcggccacctcctcgttctccccaaagatgccaattcgccggcagatggcaatggctgtgcccttgttgtccccagtgatcatgatcacccggatcccggcgtcacggcacagctggatggagcccgtgacctccttgcgcggagggtccagcatgcccactacacccacgaatgtcaggtccgtctcatactccaggaacctggcagagtcatccaggaccatttcctctcgcttcgggggggtgtcccgggtggccagggccaagcagcgcagggtgtcccggccagtgccccactccttgatcaccgccatgatcttttccttcaccggccccgtcagtggcacccgggtggtgccaactcgcacatagttacagcggtcgatgacgccctcaggggcacccttgacaaacatcttgttgcccacagcagcccgggaagatttggctggggagcaatagacagacatggactttctgtctcgggagaactccagggtgaattccttcttcattagctggcggatcaccgagttgcaggcgttggctctctccaccttcgagaggcttctcacatccgtgttgaacacattcatcttctccaccagggtggtgagtgctgtctcggtggcctcgccgaccttctcatagacacctttggcctcgttgaagtccaaggaggagtcattgcagagggcacagatggtggccagctccaccagcccgtcatactgccctggccggactggcttatcattcttcaagacctctccctctggagcgtaagtggagccggtgatggagaactcattcaggaggcagatgtccccatccaccttgtcaatgataaacatcttgcagacagacatctggttggtggtgagggtgcctgtcttgtcggaacagatgacagaggtgcagcccagggtctctacggagggcaagcttcttacaatggcattcttctttgccatccgacgggtacccagggccaggcaggtggtgatgactgcaggaagaccttcggggatggcagccacagccaaggccacggcaatcttaaagtagtagatggccccgcggaaccaggagcccccatggacggggtcgttgaagtggccaatgttgataagccagacagccacacagatgagggagatgaccttggagagctgctccccaaactcatccagcttctgctgcaagggggtcttgtcctgttctgtggcagccatttggtctcggatcttcccaatctcggtgcccacaccagtggtggccacgatgcccaaggccttgccggctgcaatgttggtgcccgagaaaagcatgttcttcttgtcctggttgacagctcgggggtcaggaacgggctccgtgtgtttgatgacagatacagactcgcctgtcaggatggactggtcaacccgcagcgtggtggatttgatggcgaggattcggatgtctgcagggactttgtcccccacagccacctccacgatgtccccagggacgatgtcccgagccttgatcctttgcactgacttgcggtcagcccggtagaccttccccatctctggctcatactccttcagggcctcgatggcgttctctgcgttccgctcctgccaaacccccacgatggcattggcaatgaggatcaagaggatgacaaagggttcaacaaaggcagtgatggtctcttcaccttcctcaaaccaggccagcacgaaggaaatgcatgcggccaggaggagaatccgcaccaggaggtcttcaaactgctctatcaccagctcccacagggtcttcccttcctcagcagggagctcattgaggccgtatttctccagattccgcttaacttggtccggggtgaggcccgtggtctcactcaccccaaaataggccaaacattcctccgtggttttagcatgagcggcctccattgtgctcccttcctgggggccggggccggtgtgttccttccagggggttcccactcgtggggggtcttcctcagtgtgtccaactgcctgtctgcctgggtttcttctttttactctcctgccccctccaggtttttcttccctccacaaagctctga

SEQ ID NO: 611504 - DNA, 6664 bp, Homo sapiens
tttcagactccgactaactacgcggggactccgaggcgctcagaaaaatgaagccgacccggccctgccccgagggacgctccaagagggcggaggtgcagggagggccccgccacaattcgcggtaacgcaagccaggctcgggcggaagggcggccggagccgatcaaaggctggctccgggcaggggcagcgagggagcgagggggagctctccgcaggccggtgtcccggaggaggcataattggagcagggcttccaaggtcacggagagacgccgggcaagacctcttaaggatcctcttccgggcttgaaaggcaggcgtcctcccgaaccgcgcgacccagccaagaagagccggggcggggccggggccggggccgggggccgactcgggaatcttcggccgaggctcggcaatccccccatcctccgtccggggcctccagcccggggccgatccggaaacagccgagcggatccggaaacagccgagaggacccggaagcggtgcgctccgtcaccagggagtgcgggaatccgccgtttgcgctgaggcaatggcggcagctgcgccggtggccgcggacgacgatgagcggcggcggcggccgggggctgcactggaggactcccggtcccaggaaggggcaaatggtgaggccgagtcaggtgagctcagccggcttcgggctgagctggcaggcgccctggcagaaatggaaaccatgaaggctgtggcagaggtgagcgagagcacgaaggccgaggctgtggctgcggtgcagcggcagtgccaagaggaggtggcctcgctgcaggccatcctgaaagactccatcagcagctatgaagcccagatcaccgccctgaagcaggagcgacagcagcagcagcaggactgtgaggagaaggagcgggagctgggccgcctgaagcagctgctgtcccgggcctaccccctggactccctggagaagcagatggaaaaggcccacgaggactcggagaagctgcgggagatcgtactgcccatggaaaaggagatcgaggagctgaaggcgaagctgctgagggccgaggagctgattcaggagatccagagacgtccccggcatgccccttccctgcacggctccacggagttgctgcccctgtcccgggatccatcgcccccgctggagcctctggaggagctgagcggagatgggggtccagccgctgaggccttcgctcacaactgcgatgacagcgcctccatctcctccttctcccttggcggtggggtcggcagcagctcctccctgccccaaagccgccagggcctgagccctgaacaggaagagacggcctcgctggtgtctacgggcaccctggttcccgagggcatctacctgccccctcctggctaccagctcgtcccagacactcagtgggagcagctgcagacagagggccgacagctgcagaaggacctggagagcgtcagtcgcgagcgggacgagctccaagagggcctgagacggagcaatgaggactgtgccaagcagatgcaggtgctcctggcccaggtccagaactcagagcagctgctgcggaccctgcaagggaccgtgagccaggcccaggagcgggtgcagctgcagatggcggagctggtcaccacccacaagtgcctgcaccatgaggtaaagcggttgaatgaggaaaaccaagggctccgggccgagcagctgccatcctcagccccccagggctcgcagcaggagcagggcgaggaggaatcactgcccagctctgtgccagagctgcagcagctgctgtgctgcacgcggcaagaggcgagggcccggctgcaggcccaggagcacggggccgagcgcctgcggatcgagatcgtgacgctgcgggaggctctggaggaggagacagtggccagggccagcctggaggggcagctgagggtgcagcgggaggagacagaggtgctggaggcctccctgtgcagcctgaggacagagatggagcgggtgcagcaggaacagagcaaggcccagctcccagacctcctctcagaacagagggccaaggtgctgcggctgcaggcagagctggagaccagtgagcaggtgcagagggatttcgtgcgactgtcccaggccctgcaggtgcgcctagagcggatccgccaggctgagaccctggagcaagtgcgcagcatcatggatgaggcgccactcacggacgtcagggacatcaaggacacctgaggggtcaggatatccccacccccaccctgggaaagacgcctttccccactcctgaaccatgaggcctcgctctggggtcttggatggcttttccaccgtccctgagactggggttgaggggactgacgggggccaccaccgccccgccctccagcgcctcctcccagggtggctgggcctcctgttctcagggatcacacctgggtgaggggcccaagcccctcccggaaccaaaggtgcaggctcaggcctgcggctttctggctgctgtgctgcctcctgggctccagccctcccctgcccccagcccgtcccctgcccagggcacagcggagccatgggggctgggagtccccatcagaggcagtgaggtgggccccggccctgggacaggcagctgccttctggtctgcatgacactaagacgcttgtccacagcggcgacccaggcctccaagcttgcacagaggcaaggccagacttttccgtcgtttattttcaataaataagcagctcagcgcagtcggtcgccttgtccctgcaagcccctcggggttgggaaggggaatttacaaggttgagagggaggcgggtggccgagggggaaggaaagggaaggggacatgtttataaacagacacatgacacgggtgtgggggacaggacgggggtctgtgccacagctctgcctgaagatgtgtcactatcggggtggggaggacagagcaaaaggatgctcacttccttctttcatcttctggatctggaaggggaaagagaagggatgaggcaggcggcaggagggcagcgaggtccctcccaggtgcatctcccaggcacgcacttacctggaggctcagaagcttaccaccctgccagtttctcccctactcacctgcgtccccagacaccccgcccccccccactgcagccccacagcaaagacagcccagcacacagccacgcaacgcagcgcagcagacgggcccagaggctgcactgcccagggcctgggagccaaactgacgcccagtgggagccagcggcccaccctgactggaagcgcagcagcagcagtggcaacggctccaggtggagctgcgagcacaagtgaccttggatgcgacgcgcaaggggctgagggggcgcgggtggcaggggcacagcagctgggctgagggcaagaagggggtgatacctgtgacacgggctctgtgacacgggctcagagatggaggagggggaacagttatccctctaggtagttccgagcaacgaacttgaggatttcgtcgagcccaatgactggcagtgagatcttgaggaccatgagccactgggtgaggtccagggcccggagcttgaagatcatcggcagggggtcaacatagaggatgaggaagtgcagggacatggagaggcagatggagcccagcagccagatgttcacccagggtggcatccgcagcagggactggttctcggacaggctgttcagtgcattgcacatctcgatggtcaccagcacggacagggccatggtcatgggctcgggggcctcgaagacctcacagtctatgccctcaaagtgggtgttgtcctcggtgcactgcatgaagtgagtcagctggctgtagttgacatgaggcccatcctcagcgtacaggaaccaccaggcagctgctcccacggtggctgcacccacatagcccccgattgccatgtagcggaagaagagccagccactgatgaggggctccttggggctccggggggggcggtccatgatgtccaggtctggtgggttgaagcccagggctgtggctgggagcccgtcggtcaccaagttcacccatagcagctgcaccgggatcagggcctcaggcagccccagggcagcggtcaggaagatacagaccacctcgcccacgttggaggaaatgaggtagcggatgaactgcttcatgttgttgtagatggcgcggccctcctccacagcagctacgatggtggagaagttgtcgtcagccagcaccatctcagaggcagtcttggccacggcagtgccagatcccatggcaatgccaatctcagccttcttcagggcaggggcgtcattgacgccatcacctgtcatggctgtgatctcatcgtaggactgcaggtactccacaatcttggacttgtgcgagggctccacacgggcgaagcagcaggcacgtcggcaggcttcccgctgttcagccaggggcaggtcgtcgaactctcggcccgtgtaggcgcgatcggccacctcctcgttctccccaaagatgccaattcgccggcagatggcaatggctgtgcccttgttgtccccagtgatcatgatcacccggatcccggcgtcacggcacagctggatggagcccgtgacctccttgcgcggagggtccagcatgcccactacacccacgaatgtcaggtccgtctcatactccaggaacctggcagagtcatccaggaccatttcctctcgcttcgggggggtgtcccgggtggccagggccaagcagcgcagggtgtcccggccagtgccccactccttgatcaccgccatgatcttttccttcaccggccccgtcagtggcacccgggtggtgccaactcgcacatagttacagcggtcgatgacgccctcaggggcacccttgacaaacatcttgttgcccacagcagcccgggaagatttggctggggagcaatagacagacatggactttctgtctcgggagaactccagggtgaattccttcttcattagctggcggatcaccgagttgcaggcgttggctctctccaccttcgagaggcttctcacatccgtgttgaacacattcatcttctccaccagggtggtgagtgctgtctcggtggcctcgccgaccttctcatagacacctttggcctcgttgaagtccaaggaggagtcattgcagagggcacagatggtggccagctccaccagcccgtcatactgccctggccggactggcttatcattcttcaagacctctccctctggagcgtaagtggagccggtgatggagaactcattcaggaggcagatgtccccatccaccttgtcaatgataaacatcttgcagacagacatctggttggtggtgagggtgcctgtcttgtcggaacagatgacagaggtgcagcccagggtctctacggagggcaagcttcttacaatggcattcttctttgccatccgacgggtacccagggccaggcaggtggtgatgactgcaggaagaccttcggggatggcagccacagccaaggccacggcaatcttaaagtagtagatggccccgcggaaccaggagcccccatggacggggtcgttgaagtggccaatgttgataagccagacagccacacagatgagggagatgaccttggagagctgctccccaaactcatccagcttctgctgcaagggggtcttgtcctgttctgtggcagccatttggtctcggatcttcccaatctcggtgcccacaccagtggtggccacgatgcccaaggccttgccggctgcaatgttggtgcccgagaaaagcatgttcttcttgtcctggttgacagctcgggggtcaggaacgggctccgtgtgtttgatgacagatacagactcgcctgtcaggatggactggtcaacccgcagcgtggtggatttgatggcgaggattcggatgtctgcagggactttgtcccccacagccacctccacgatgtccccagggacgatgtcccgagccttgatcctttgcactgacttgcggtcagcccggtagaccttccccatctctggctcatactccttcagggcctcgatggcgttctctgcgttccgctcctgccaaacccccacgatggcattggcaatgaggatcaagaggatgacaaagggttcaacaaaggcagtgatggtctcttcaccttcctcaaaccaggccagcacgaaggaaatgcatgcggccaggaggagaatccgcaccaggaggtcttcaaactgctctatcaccagctcccacagggtcttcccttcctcagcagggagctcattgaggccgtatttctccagattccgcttaacttggtccggggtgaggcccgtggtctcactcaccccaaaataggccaaacattcctccgtggttttagcatgagcggcctccattgtgctcccttcctgggggccggggccggtgtgttccttccagggggttcccactcgtggggggtcttcctcagtgtgtccaactgcctgtctgcctgggtttcttctttttactctcctgccccctccaggtttttcttccctccacaaagctctga

SEQ ID NO: 611505 - DNA, 6173 bp, Homo sapiens
tttcagactccgactaactacgcggggactccgaggcgctcagaaaaatgaagccgacccggccctgccccgagggacgctccaagagggcggaggtgcagggagggccccgccacaattcgcggtaacgcaagccaggctcgggcggaagggcggccggagccgatcaaaggctggctccgggcaggggcagcgagggagcgagggggagctctccgcaggccggtgtcccggaggaggcataattggagcagggcttccaaggtcacggagagacgccgggcaagacctcttaaggatcctcttccgggcttgaaaggcaggcgtcctcccgaaccgcgcgacccagccaagaagagccggggcggggccggggccggggccgggggccgactcgggaatcttcggccgaggctcggcaatccccccatcctccgtccggggcctccagcccggggccgatccggaaacagccgagcggatccggaaacagccgagaggacccggaagcggtgcgctccgtcaccagggagtgcgggaatccgccgtttgcgctgaggcaatggcggcagctgcgccggtggccgcggacgacgatgagcggcggcggcggccgggggctgcactggaggactcccggtcccaggaaggggcaaatggtgaggccgagtcaggtgagctcagccggcttcgggctgagctggcaggcgccctggcagaaatggaaaccatgaaggctgtggcagaggtgagcgagagcacgaaggccgaggctgtggctgcggtgcagcggcagtgccaagaggaggtggcctcgctgcaggccatcctgaaagactccatcagcagctatgaagcccagatcaccgccctgaagcaggagcgacagcagcagcagcaggactgtgaggagaaggagcgggagctgggccgcctgaagcagctgctgtcccgggcctaccccctggactccctggagaagcagatggaaaaggcccacgaggactcggagaagctgcgggagatcgtactgcccatggaaaaggagatcgaggagctgaaggcgaagctgctgagggccgaggagctgattcaggagatccagagacgtccccggcatgccccttccctgcacggctccacggagttgctgcccctgtcccgggatccatcgcccccgctggagcctctggaggagctgagcggagatgggggtccagccgctgaggccttcgctcacaactgcgatgacagcgcctccatctcctccttctcccttggcggtggggtcggcagcagctcctccctgccccaaagccgccagggcctgagccctgaacaggaagagacggcctcgctggtgtctacgggcaccctggttcccgagggcatctacctgccccctcctggctaccagctcgtcccagacactcagtgggagcagctgcagacagagggccgacagctgcagaaggacctggagagcgtcagtcgcgagcgggacgagctccaagagggcctgagacggagcaatgaggactgtgccaagcagatgcaggtgctcctggcccaggtccagaactcagagcagctgctgcggaccctgcaagggaccgtgagccaggcccaggagcgggtgcagctgcagatggcggagctggtcaccacccacaagtgcctgcaccatgaggtaaagcggttgaatgaggaaaaccaagggctccgggccgagcagctgccatcctcagccccccagggctcgcagcaggagcagggcgaggaggaatcactgcccagctctgtgccagagctgcagcagctgctgtgctgcacgcggcaagaggcgagggcccggctgcaggcccaggagcacggggccgagcgcctgcggatcgagatcgtgacgctgcgggaggctctggaggaggagacagtggccagggccagcctggaggggcagctgagggtgcagcgggaggagacagaggtgctggaggcctccctgtgcagcctgaggacagagatggagcgggtgcagcaggaacagagcaaggcccagctcccagacctcctctcagaacagagggccaaggtgctgcggctgcaggcagagctggagaccagtgagcaggtgcagagggatttcgtgcgactgtcccaggccctgcaggtgcgcctagagcggatccgccaggctgagaccctggagcaagtgcgcagcatcatggatgaggcgccactcacggacgtcagggacatcaaggacacctgaggggtcaggatatccccacccccaccctgggaaagacgcctttccccactcctgaaccatgaggcctcgctctggggtcttggatggcttttccaccgtccctgagactggggttgaggggactgacgggggccaccaccgccccgccctccagcgcctcctcccagggtggctgggcctcctgttctcagggatcacacctgggtgaggggcccaagcccctcccggaaccaaaggtgcaggctcaggcctgcggctttctggctgctgtgctgcctcctgggctccagccctcccctgcccccagcccgtcccctgcccagggcacagcggagccatgggggctgggagtccccatcagaggcagtgaggtgggccccggccctgggacaggcagctgccttctggtctgcatgacactaagacgcttgtccacagcggcgacccaggcctccaagcttgcacagaggcaaggccagacttttccgtcgtttattttcaataaataagcagctcagcgcagtcggtcgccttgtccctgcaagcccctcggggttgggaaggggaatttacaaggttgagagggaggcgggtggccgagggggaaggaaagggaaggggacatgtttataaacagacacatgacacgggtgtgggggacaggacgggggtctgtgccacagctctgcctgaagatgtgtcactatcggggtggggaggacagagcaaaaggatgctcacttccttctttcatcttctggatcctctaggtagttccgagcaacgaacttgaggatttcgtcgagcccaatgactggcagtgagatcttgaggaccatgagccactgggtgaggtccagggcccggagcttgaagatcatcggcagggggtcaacatagaggatgaggaagtgcagggacatggagaggcagatggagcccagcagccagatgttcacccagggtggcatccgcagcagggactggttctcggacaggctgttcagtgcattgcacatctcgatggtcaccagcacggacagggccatggtcatgggctcgggggcctcgaagacctcacagtctatgccctcaaagtgggtgttgtcctcggtgcactgcatgaagtgagtcagctggctgtagttgacatgaggcccatcctcagcgtacaggaaccaccaggcagctgctcccacggtggctgcacccacatagcccccgattgccatgtagcggaagaagagccagccactgatgaggggctccttggggctccggggggggcggtccatgatgtccaggtctggtgggttgaagcccagggctgtggctgggagcccgtcggtcaccaagttcacccatagcagctgcaccgggatcagggcctcaggcagccccagggcagcggtcaggaagatacagaccacctcgcccacgttggaggaaatgaggtagcggatgaactgcttcatgttgttgtagatggcgcggccctcctccacagcagctacgatggtggagaagttgtcgtcagccagcaccatctcagaggcagtcttggccacggcagtgccagatcccatggcaatgccaatctcagccttcttcagggcaggggcgtcattgacgccatcacctgtcatggctgtgatctcatcgtaggactgcaggtactccacaatcttggacttgtgcgagggctccacacgggcgaagcagcaggcacgtcggcaggcttcccgctgttcagccaggggcaggtcgtcgaactctcggcccgtgtaggcgcgatcggccacctcctcgttctccccaaagatgccaattcgccggcagatggcaatggctgtgcccttgttgtccccagtgatcatgatcacccggatcccggcgtcacggcacagctggatggagcccgtgacctccttgcgcggagggtccagcatgcccactacacccacgaatgtcaggtccgtctcatactccaggaacctggcagagtcatccaggaccatttcctctcgcttcgggggggtgtcccgggtggccagggccaagcagcgcagggtgtcccggccagtgccccactccttgatcaccgccatgatcttttccttcaccggccccgtcagtggcacccgggtggtgccaactcgcacatagttacagcggtcgatgacgccctcaggggcacccttgacaaacatcttgttgcccacagcagcccgggaagatttggctggggagcaatagacagacatggactttctgtctcgggagaactccagggtgaattccttcttcattagctggcggatcaccgagttgcaggcgttggctctctccaccttcgagaggcttctcacatccgtgttgaacacattcatcttctccaccagggtggtgagtgctgtctcggtggcctcgccgaccttctcatagacacctttggcctcgttgaagtccaaggaggagtcattgcagagggcacagatggtggccagctccaccagcccgtcatactgccctggccggactggcttatcattcttcaagacctctccctctggagcgtaagtggagccggtgatggagaactcattcaggaggcagatgtccccatccaccttgtcaatgataaacatcttgcagacagacatctggttggtggtgagggtgcctgtcttgtcggaacagatgacagaggtgcagcccagggtctctacggagggcaagcttcttacaatggcattcttctttgccatccgacgggtacccagggccaggcaggtggtgatgactgcaggaagaccttcggggatggcagccacagccaaggccacggcaatcttaaagtagtagatggccccgcggaaccaggagcccccatggacggggtcgttgaagtggccaatgttgataagccagacagccacacagatgagggagatgaccttggagagctgctccccaaactcatccagcttctgctgcaagggggtcttgtcctgttctgtggcagccatttggtctcggatcttcccaatctcggtgcccacaccagtggtggccacgatgcccaaggccttgccggctgcaatgttggtgcccgagaaaagcatgttcttcttgtcctggttgacagctcgggggtcaggaacgggctccgtgtgtttgatgacagatacagactcgcctgtcaggatggactggtcaacccgcagcgtggtggatttgatggcgaggattcggatgtctgcagggactttgtcccccacagccacctccacgatgtccccagggacgatgtcccgagccttgatcctttgcactgacttgcggtcagcccggtagaccttccccatctctggctcatactccttcagggcctcgatggcgttctctgcgttccgctcctgccaaacccccacgatggcattggcaatgaggatcaagaggatgacaaagggttcaacaaaggcagtgatggtctcttcaccttcctcaaaccaggccagcacgaaggaaatgcatgcggccaggaggagaatccgcaccaggaggtcttcaaactgctctatcaccagctcccacagggtcttcccttcctcagcagggagctcattgaggccgtatttctccagattccgcttaacttggtccggggtgaggcccgtggtctcactcaccccaaaataggccaaacattcctccgtggttttagcatgagcggcctccattgtgctcccttcctgggggccggggccggtgtgttccttccagggggttcccactcgtggggggtcttcctcagtgtgtccaactgcctgtctgcctgggtttcttctttttactctcctgccccctccaggtttttcttccctccacaaagctctga

SEQ ID NO: 611506 - DNA, 95 bp, Homo sapiens
gggggctctcgggcccccggatccggggtcaacacgagccaccaccgcgggggtgccgctacccgccatcgcgtgggaagccgcacccgtctctt

SEQ ID NO: 611507 - DNA, 137 bp, Homo sapiens
ccaagtactactactccgatgccaaatgggacataaaatggaaaggcaaaactccggaactcttggtactgtatgcttagtattttaaacggagccccaaacttaagcaggttggtttttagaaacgttgggacgag

SEQ ID NO: 611508 - DNA, 1742 bp, Homo sapiens
tttcagactccgactaactacgcggggactccgaggcgctcagaaaaatgaagccgacccggccctgccccgagggacgctccaagagggcggaggtgcagggagggccccgccacaattcgcggtaacgcaagccaggctcgggcggaagggcggccggagccgatcaaaggctggctccgggcaggggcagcgagggagcgagggggagctctccgcaggccggtgtcccggaggaggcataattggagcagggcttccaaggtcacggagagacgccgggcaagacctcttaaggatcctcttccgggcttgaaaggcaggcgtcctcccgaaccgcgcgacccagccaagaagagccggggcggggccggggccggggccgggggccgactcgggaatcttcggccgaggctcggcaatccccccatcctccgtccggggcctccagcccggggccgatccggaaacagccgagcggatccggaaacagccgagaggacccggaagcggtgcgctccgtcaccagggagtgcgggaatccgccgtttgcgctgaggcaatggcggcagctgcgccggtggccgcggacgacgatgagcggcggcggcggccgggggctgcactggaggactcccggtcccaggaaggggcaaatggtgaggccgagtcaggtgagctcagccggcttcgggctgagctggcaggcgccctggcagaaatggaaaccatgaaggctgtggcagaggtgagcgagagcacgaaggccgaggctgtggctgcggtgcagcggcagtgccaagaggaggtggcctcgctgcaggccatcctgaaagactccatcagcagctatgaagcccagatcaccgccctgaagcaggagcgacagcagcagcagcaggactgtgaggagaaggagcgggagctgggccgcctgaagcagctgctgtcccgggcctaccccctggactccctggagaagcagatggaaaaggcccacgaggactcggagaagctgcgggagatcgtactgcccatggaaaaggagatcgaggagctgaaggcgaagctgctgagggccgaggagctgattcaggagatccagagacgtccccggcatgccccttccctgcacggctccacggagttgctgcccctgtcccgggatccatcgcccccgctggagcctctggaggagctgagcggagatgggggtccagccgctgaggccttcgctcacaactgcgatgacagcgcctccatctcctccttctcccttggcggtggggtcggcagcagctcctccctgccccaaagccgccagggcctgagccctgaacaggaagagacggcctcgctggtgtctacgggcaccctggttcccgagggcatctacctgccccctcctggctaccagctcgtcccagacactcagtgggagcagctgcagacagagggccgacagctgcagaaggacctggagagcgtcagtcgcgagcgggacgagctccaagagggcctgagacggagcaatgaggactgtgccaagcagatgcaggtgctcctggcccaggtccagaactcaggtgaggtgggccccggccctgggacaggcagctgccttctggtctgcatgacactaagacgcttgtccacagcggcgacccaggcctccaagcttgcacagaggcaaggccagacttttccgtcgtttattttcaataaataagcagctcagcgca

SEQ ID NO: 611509 - DNA, 280 bp, Homo sapiens
ctgttttcacatattcttcttttgggccagcgtttgaaatgtgacgcctaatttttaatttattgatgtgtataagttatttaattaaagattccctatcaagatactacagtgttatctatgcaggcatatggcttatttcctactactggtagatttgcaagactttaaaaaatactagaattttaattacttacaacagatgcttgtgaaagcttaaatagttctgaattaagagctgggtgcaatggctcacaattgtaatcccaatgctttggga

SEQ ID NO: 611510 - DNA, 264 bp, Homo sapiens
actgagccccggagtctccttttaggtcgtggtttggactcagatgtcacagtgggaagcagtgtgtcctgttgaggtgcaccgttcagacgaggatcaaaacagctccttgatgttcaaacagttgttagcataaaaaaatacatgtatttgtcaaactccttggtaagagccatgtgctgttcaaaatttaatggaatgtaacaattgtaaattataaaatagtacaaactgcttgtaaattaaatgaaggagtgtgtgtta

SEQ ID NO: 611511 - DNA, 3241 bp, Homo sapiens
agcaggtctaacggtgaacacagtataagggtgtgtacgtttcttatttcaaattctggatctgtgacacgggctcagagatggaggagggggaacagttatccctctaggtagttccgagcaacgaacttgaggatttcgtcgagcccaatgactggcagtgagatcttgaggaccatgagccactgggtgaggtccagggcccggagcttgaagatcatcggcagggggtcaacatagaggatgaggaagtgcagggacatggagaggcagatggagcccagcagccagatgttcacccagggtggcatccgcagcagggactggttctcggacaggctgttcagtgcattgcacatctcgatggtcaccagcacggacagggccatggtcatgggctcgggggcctcgaagacctcacagtctatgccctcaaagtgggtgttgtcctcggtgcactgcatgaagtgagtcagctggctgtagttgacatgaggcccatcctcagcgtacaggaaccaccaggcagctgctcccacggtggctgcacccacatagcccccgattgccatgtagcggaagaagagccagccactgatgaggggctccttggggctccggggggggcggtccatgatgtccaggtctggtgggttgaagcccagggctgtggctgggagcccgtcggtcaccaagttcacccatagcagctgcaccgggatcagggcctcaggcagccccagggcagcggtcaggaagatacagaccacctcgcccacgttggaggaaatgaggtagcggatgaactgcttcatgttgttgtagatggcgcggccctcctccacagcagctacgatggtggagaagttgtcgtcagccagcaccatctcagaggcagtcttggccacggcagtgccagatcccatggcaatgccaatctcagccttcttcagggcaggggcgtcattgacgccatcacctgtcatggctgtgatctcatcgtaggactgcaggtactccacaatcttggacttgtgcgagggctccacacgggcgaagcagcaggcacgtcggcaggcttcccgctgttcagccaggggcaggtcgtcgaactctcggcccgtgtaggcgcgatcggccacctcctcgttctccccaaagatgccaattcgccggcagatggcaatggctgtgcccttgttgtccccagtgatcatgatcacccggatcccggcgtcacggcacagctggatggagcccgtgacctccttgcgcggagggtccagcatgcccactacacccacgaatgtcaggtccgtctcatactccaggaacctggcagagtcatccaggaccatttcctctcgcttcgggggggtgtcccgggtggccagggccaagcagcgcagggtgtcccggccagtgccccactccttgatcaccgccatgatcttttccttcaccggccccgtcagtggcacccgggtggtgccaactcgcacatagttacagcggtcgatgacgccctcaggggcacccttgacaaacatcttgttgcccacagcagcccgggaagatttggctggggagcaatagacagacatggactttctgtctcgggagaactccagggtgaattccttcttcattagctggcggatcaccgagttgcaggcgttggctctctccaccttcgagaggcttctcacatccgtgttgaacacattcatcttctccaccagggtggtgagtgctgtctcggtggcctcgccgaccttctcatagacacctttggcctcgttgaagtccaaggaggagtcattgcagagggcacagatggtggccagctccaccagcccgtcatactgccctggccggactggcttatcattcttcaagacctctccctctggagcgtaagtggagccggtgatggagaactcattcaggaggcagatgtccccatccaccttgtcaatgataaacatcttgcagacagacatctggttggtggtgagggtgcctgtcttgtcggaacagatgacagaggtgcagcccagggtctctacggagggcaagcttcttacaatggcattcttctttgccatccgacgggtacccagggccaggcaggtggtgatgactgcaggaagaccttcggggatggcagccacagccaaggccacggcaatcttaaagtagtagatggccccgcggaaccaggagcccccatggacggggtcgttgaagtggccaatgttgataagccagacagccacacagatgagggagatgaccttggagagctgctccccaaactcatccagcttctgctgcaagggggtcttgtcctgttctgtggcagccatttggtctcggatcttcccaatctcggtgcccacaccagtggtggccacgatgcccaaggccttgccggctgcaatgttggtgcccgagaaaagcatgttcttcttgtcctggttgacagctcgggggtcaggaacgggctccgtgtgtttgatgacagatacagactcgcctgtcaggatggactggtcaacccgcagcgtggtggatttgatggcgaggattcggatgtctgcagggactttgtcccccacagccacctccacgatgtccccagggacgatgtcccgagccttgatcctttgcactgacttgcggtcagcccggtagaccttccccatctctggctcatactccttcagggcctcgatggcgttctctgcgttccgctcctgccaaacccccacgatggcattggcaatgaggatcaagaggatgacaaagggttcaacaaaggcagtgatggtctcttcaccttcctcaaaccaggccagcacgaaggaaatgcatgcggccaggaggagaatccgcaccaggaggtcttcaaactgctctatcaccagctcccacagggtcttcccttcctcagcagggagctcattgaggccgtatttctccagattccgcttaacttggtccggggtgaggcccgtggtctcactcaccccaaaataggccaaacattcctccgtggttttagcatgagcggcctccattgtgctcccttcctgggggccggggccggtgtgttccttccagggggttcccactcgtggggggtcttcctcagtgtgtccaactgcctgtctgcctgggtttcttctttttactctcctgccccctccaggtttttcttccctccacaaagctctga

SEQ ID NO: 611512 - DNA, 1374 bp, Homo sapiens
cgtgggccaacgaatgccatctgataaaaaagaatagaaatggaaagtgggactagacgcagggagtcagcaggcatgctgcggtggcggtcactccctactgccactatccccagggcaaggaaaggctccgccatttgggaacagtggtttctacgtcactggacaccggtatctgagcattagttatgagaactcgtatcccgaatgtgctttcctccctactcccctgcccacctacaagtttaataacctaaggttagctacttatctcttactatacaaataacatgtctgtaactgctgctgcactgctgctaaaccttgtacagcagcaacaacacacctaacctgccatgctgggctccctcagctcactcgcagcttcaccgtgactcctactcctcagctctgggggcggaacaatacctcaagagcgctgaacactacacgacaagccctattaatatctctctgcactcctcaatccccgagcacttcaacactcctccgcacttccacactctcgcgggcgcaacgctctctctctccccttacacccttttcacacttatgcacgcaaattccagcaggaaacttgcaaacggaacacactctatcctggtgcacgttaccctatcaagcgacattcgtcaacctacacataagctcccattgactcccctttccacggaagcgcgcaactaatgcccaccatgcgtacgcaagcctaccacaaccgctcaccgcgcgcctactgcactaaataccagacatagccgaccccaacacagctcacccgcgccagccgctgccaaacagccacgctacgccggcgaaccggcgacaactcatcgcccctacgcccgctcccctgccccacaccactcacaccccaacagcaacatatccggcccggcggcaccaacaaggtaaacaccgttgtcccattaacgcattcaactcgataatatcaccgcaacagcgacccccccaatcaggaagacgggtatcacaaaccctgtgcacacacagtgggcacacaaagaacaagagaatcggactggcatcacgaaccaaacatcctaaacaactccacctgtaggcgccaactccagcgggacacgctcaaaccaagacgaaggcaccaacacgcagggcaggctctccacgcctcacgacacacacgcgaccaccctctcaacgacgagatgagcaaaacatgccgccccacctctcacacgcgcaccatcaacacactcaatccgggcaggagagatcgacgtaacaaacaagaaatcgcacagcgcaacactacgagacagcaaaaagaccgccccaaaccagcccacgcaaccacacccactcagtcag

SEQ ID NO: 611513 - DNA, 214 bp, Homo sapiens
ccccttggcccctggtttttgggggggaatttttgccccccctttgaacaaattttggatttttttccggggcccggggcccccggggcccctttattttttttttcccttggttttggccgggggaagggggggggttaaactttggttttttttgggcccccccgggtggggcccgccccctttttttttctttgggggaaaccccccccca

SEQ ID NO: 611514 - DNA, 1511 bp, Homo sapiens
tttcagactccgactaactacgcggggactccgaggcgctcagaaaaatgaagccgacccggccctgccccgagggacgctccaagagggcggaggtgcagggagggccccgccacaattcgcggtaacgcaagccaggctcgggcggaagggcggccggagccgatcaaaggctggctccgggcaggggcagcgagggagcgagggggagctctccgcaggccggtgtcccggaggaggcataattggagcagggcttccaaggtcacggagagacgccgggcaagacctcttaaggatcctcttccgggcttgaaaggcaggcgtcctcccgaaccgcgcgacccagccaagaagagccggggcggggccggggccggggccgggggccgactcgggaatcttcggccgaggctcggcaatccccccatcctccgtccggggcctccagcccggggccgatccggaaacagccgagcggatccggaaacagccgagaggacccggaagcggtgcgctccgtcaccagggagtgcgggaatccgccgtttgcgctgaggcaatggcggcagctgcgccggtggccgcggacgacgatgagcggcggcggcggccgggggctgcactggaggactcccggtcccaggaaggggcaaatggtgaggccgagtcaggtgagctcagccggcttcgggctgagctggcaggcgccctggcagaaatggaaaccatgaaggctgtggcagaggtgagcgagagcacgaaggccgaggctgtggctgcggtgcagcggcagtgccaagaggaggtggcctcgctgcaggccatcctgaaagactccatcagcagctatgaagcccagatcaccgccctgaagcaggagcgacagcagcagcagcaggactgtgaggagaaggagcgggagctgggccgcctgaagcagctgctgtcccgggcctaccccctggactccctggagaagcagatggaaaaggttgggattgggatggcttccctgctgccctgggatttggaagaatgttgaggactgtggatgtcccattccctggtcatggggtgcggggcacccagcagtgattctaggaatagcacagagttaccaggtgttgttgagagcttggctctgtgctccgtagggtcctggcttgccccttattagtgggtgaccaagttcgcttagctccaaaattaacttaagttatgtagagggaagggaacttacacttaagggtaacaaaaaaaattcttactgttattaaatattgacttctggtgtacattacctcttggtaatatattgttagctcttggcttggtgcagtggctcacgcctataatcccaacactttgggaggccaaggcgggtggggcacttgaggtcaggggttcaaggccagcctggccaacatggcgaaaccctgtctctactcaaaatataaaaattagcctgcggcgcacacctgtaatcccagctactcgggaggttattg

SEQ ID NO: 611515 - DNA, 1084 bp, Homo sapiens
cggacgcgtgggtcgacccacgcgtccgcaaaaagaaaaaaaaaagaaagaaaagaaaaaaaaaaggattgaacacagaaagactagagtagacaagaatcacttctccattctagggttatattcaccttatctttatacactactgaaatcagttggtttcaagtattttacctggggattctggcatctacatgaaatgggcctgcagtctgcctttcttacacttttttgggtcagtttatggtgtcaagattataactccattaaatgaatgggaaagtgttgccttttttcctgtctccataagaatttgcaaaagatgggaatgatctgtcggttaaaagtttataaagctgtctggccctggtattaatgggggggaagactttaactactataattagactattcaggaattctatttattacttgagtcaatttggaaaaaaaatctaggcatttacccatttacaattgattagccataaagttagcttacggaattcgctaatttctaaacctctcctggatatgcatacttcctttaccgatactgtaggaatctgcctcacatttcttttcctggggcgtttgaccagaagtaggtcaaataatgtcgttcaaagaagcagtcttaagcttatggtcatatctcttcatccccttcatctattaaaagattcaagagatacagaatggtataggccagaagatacatcaattttacaacagatgcagaccttttacaccatacactgtatagcagcagattagccaaatttataacactaacatatcacagacatactaaaataacaccctatcacaaccacaccaaataaagaataaagaagttaccaacactattatatcagagtacgacagagggtgcagaagaagcattgtagaggaggagccatgaggcggaagtgacataacaggcggatgtactatgaagaaagagagggtactgtgtctgtaaagaagtagcggaggcactagtaagagaagataggacgagagtagagggagacgataggtgagttgaggatatacagctgagagcggtgcagatgagagg

SEQ ID NO: 611516 - DNA, 204 bp, Homo sapiens
agtggacgaggggtgaaggccgagggcccaggaggacgcagtggctggtgtggagaccctggaccccaaacccccaacagagtgggacccagcgtggtctgggtgaatgagccggcaccagctgcccccagtgtgacctccctctgggggccttgttccttctgagtgctgcatctcgcacaaatccacaggtgaattggggct

SEQ ID NO: 611517 - DNA, 1171 bp, Homo sapiens
gagcgctgctgcgcgcacggcctgaggatggaccccaagccctggaccttgccgatgcgtggcactgaggcagctggctgacgctactgtgagggaaacgaaggttgtgatgcagccccgcaggacccctggccagccctggccccagtcctctgccggagccctcgtgctggacggcagagtccagctggcatcccagctgatggcacgggctgccttgcgcacgccacctggcttgcaacctcagcgcaacccccttccagcaggccactggcacacggctgccccgcctgaccgccccaggcgtgaagccatcgtgacgcgagccgcccacggagaccaaggcaaggcagggaacgaggcttctcatacgattctagttcacgaaaaggaataaccacgcattttgcaaggaccatgacggccactgtgcgttgacatgctggtggctcggactgctggctgccaatggcgagcctgttgcatgggccaggaggacgcgcttccgcacgggccctgccggcacgggcctcgccacgagagctccatttcaccttacccaggtacaagcggggcggtgcgagtcccaggacaggtgcaccttacgccttccttgtgccccagccagcggggtcccggctgccctcctgccgtccactccacggaagccctgaggctgctcctggaggaacccgacgttgcattaagcagggacgctagcagctgctcaaccaactggagctgctcaaaccacaagcccgccagaatcgacgacgcctgcagcaccctggctgccagcgctcaccgccgccattgcacgccgagcgttaaaccttcttcccccacgtataaaccccaatcactccacactccctgcagttacacccacacttctctctgcacacccccctgccacacccattccgcccaccggcaacaccccctcttcaaccttcccccgccttcagaccacactcctctacccacagacagccccaactctttcactcgccccacccttaagcacctcgaaccaaatctccctccatcgccaactacaccaaccaccaccacaattcacccctatcacacccaagcccacaccccacaccaccccccaccccccctccacactatacacaacctatcatcacaacaccacctccaccct

SEQ ID NO: 611518 - DNA, 253 bp, Homo sapiens
gagtcacacaggaagacctttccctacaaaaaaaataaacagccaggcgtgatggcgcacagatgcagtcctagctacttgggagactaaggcagaaggaccacttgagcatgggaggtcgaggctgcagtaagccgtgataacaccactgaactccagcccgactgacagagtgagattcaaaatggcccagttccacaagaaaccaagtaatccagagctaaatttaaagagaaatgtaaaaagttcattc

SEQ ID NO: 611519 - DNA, 332 bp, Homo sapiens
gcacgagaaaaaaaaaaaaaaaaaaaaaaaaaaaaaaaaaaaaaaaaaaaaaaaaaaaaaaaaaaaaaaaaaaaaaaaaaaaaaaaaaaaaaaaaaaaaaaaaaaaaaaaaaaaaaacctggggggggggccgggccccaaatcccccttatggggggacttttaaaaattggggggccgtttttttacaccgcgggggggggaaaacccggggggccccccaattaaaccgcctggaaaaaaacccccttttcccgggggggggtaaaaggaaaggggcccccccggggggcctttccaaaatttggcccccccggagggggaaggggcaa

SEQ ID NO: 611520 - DNA, 318 bp, Homo sapiens
  misc_feature (41)..(41): n is a, c, g, or t
  misc_feature (127)..(127): n is a, c, g, or t
  misc_feature (132)..(132): n is a, c, g, or t
  misc_feature (181)..(181): n is a, c, g, or t
  misc_feature (247)..(247): n is a, c, g, or t
  misc_feature (292)..(292): n is a, c, g, or t
  misc_feature (300)..(300): n is a, c, g, or t
  misc_feature (310)..(310): n is a, c, g, or t
cctgcagtttggaaaatgaatagttggcatcagaacagcancaggaggctgggtgtgggtgctcacgcctgtaatcccagcactttgggaggctgaggtgggtggatcacgaggtcaggagttcaanaccancctggccagggtggcgaaaccctgtctctactaaaaatacaaaaattanctgggcgtgatggtgggtgcctgtggtctcagctactcgggaggctgaggcggataattgcttgancccaggagatgaaggttgcagtgagtttgtgccactgcactccancctgggcnacggagtganactgtctc

SEQ ID NO: 611521 - DNA, 380 bp, Homo sapiens
gtgaaagcacacccccatggtatagatggaccacattttctttagtgcactgtctttgtttacctaggttgattccatgtctttgctattgtgaatgctgctgcagtgaacacacaagtgatgtgttttttggtagaatgatttcttttcctttgggtagatgcccagtagtgggattgctgggttgaatggtggttctgtttttagttctttgagaaatctccatactgcttttcatagaggttgtactaacttacattccctccaaccatgtataagcattccctttcacagccctgccaacatctgttattttttagctttttaataacagccattctgacgggtggagatgtatctcatcggcttttatttgcatt

SEQ ID NO: 611522 - DNA, 120 bp, Homo sapiens
tatgaggaattgtcaaggctgggcagtgactcattgtgtacattcttcttcatgctctgtcagcttgcagtacatgatgcctactttctgctggtagttcagcccttgttcatccagttt

SEQ ID NO: 611523 - DNA, 169 bp, Homo sapiens
gctttatggtctccatcccctccttcggggtcttgaggactgtaaatgtcgagcccgtaaggcctcatcgatgaggatccatgggtcctgcattggtcatagtcactagtaacttcttgtccatggatctcactgtagaactctcgctcaaacagctgtggcttcggag

SEQ ID NO: 611524 - DNA, 179 bp, Homo sapiens
ctggcttggcaagtgcagagggattatgtaaagaaaggtaagtctctatccctggggaaaggaagaggctgatagaatacatgttcaattatgcaaaataggttcaggaatgagaggctcggaagacctctttttatggatgggcccaccgggagaaagcccctcttctttggtacact

SEQ ID NO: 611525 - DNA, 272 bp, Homo sapiens
gagttcggcagcgagggctgtgaggcagcgcaatgccaagacagagctgctggcgcggcgggcgaatctccctgcaccatgagcctcggccggcccgtacgataagcacagcgcgtgctgccctccatttgccccggggcctcggctgcgaagatagcggcggccggacacgaagctcgaggaaagcgctgggccgggtctctacgaacacgtgaaggaaaagcagctccgtccacaacgccgcttcggggctcctagggagtcgggcccgg

SEQ ID NO: 611526 - DNA, 260 bp, Homo sapiens
gtatctagagcgatcgctatgcggtgcctttccatatttagtgcttccttcagagctctatgtaaaggcagacatggtggtcacaaaatccctcagcatttgcttgtctgtaaaggaattttatttctctttcacttctgaagcttagctggactggatatgaaattctgggttgaaaattcttttctttaagaatgttgaatatttgggccccaactctcttttaagctgtcaggggttttctgcagaagagaattccc

SEQ ID NO: 611527 - DNA, 458 bp, Homo sapiens
agcctttggtgtctttcactcacagcagaaagaaataggtcataaattacagcactgatttgttccaatgatatcattagctcctggaaaacaaggatcatgaaaaacccatttcaaatgaacatatgagtcaataccaaccaagcatcttttggaaaagagcccttataaattcatactagaattctgactcctaagtgaatatctctggatcttcagaacatagaagacttagctccagcccatgcatcagtcccttcagaccatagagtcataaccaggcctattgaaagagctggttacatgagacagtcagagatttacctaggtgagaaaataaagattagatggtttgaagcagagttctagcccttccaaatcagacctccaacccctttcttaattctatagtttgtagttttcaaaggagaagttgtaataaagagtaagtaaactaa

SEQ ID NO: 611528 - DNA, 220 bp, Homo sapiens
  misc_feature (27)..(27): n is a, c, g, or t
  misc_feature (33)..(33): n is a, c, g, or t
  misc_feature (41)..(42): n is a, c, g, or t
  misc_feature (54)..(54): n is a, c, g, or t
  misc_feature (57)..(57): n is a, c, g, or t
tgctctagaggatctcactagccgacnggtgtntacgcatnnggacactggctnagntatctgtccaccatgtcgtccctccgcagcctctacctgcgatggtgctgccaggtgcaagacttcgggctgaagcacctcctggccctggggagtttgcgcctcctgtctctggcaggctgcccgctgctcactcaccaccgggctgtcgggctagtcgggg

SEQ ID NO: 611529 - DNA, 155 bp, Homo sapiens
  misc_feature (1)..(1): n is a, c, g, or t
ntcagaatgcctctccatcccagtatatatgaagtaatctcaatggcctggccaaactcaagtaccaattcaacctttacccagaaacatttgctctggctagcagtcttttggataggctctcactaccgcaaaggctcatccaaacaactccg

SEQ ID NO: 611530 - DNA, 957 bp, Homo sapiens
tttagcattattgatctcaggtccctgcacagtggagaatggagagaacgtctcctacttctggctcagatgttcggggtgtgcctaagtagtgggatggtggctcgatcatcatggcacgcacatatggaatcactggggagggggaagtgtaagtgccagtggaaagggaggctcgatggcacttccgttgacttagcattaagtctacgaggcatgatcgtacttctcgatgtagtaacctgcttcaaagattatccgagctgatgcgccccatgccttaatgaatcgtgctcttctctctccatctgcagcctgttctggaccgggcattcttcttcacacatggtcatcgtagggagggctgctcacttaatgacctatgcttgatccagaaagaatttgtcactgtgccacttcgtcttaaatcctggtggacaggagtatctgtcgaaagaaaattggtgaatgtacttactattcaactgacgtgtgcctccctttaatctgatccaaactgcttggcctggatgtggaccctgggatcatgtccaatgtttggttcaaagtatggtactccccctgtggtggcccattgtttctcgaggagtgattctaaagatagatgtaatggactactggaagttctggacctggctggacgggaaatggaagtcctttcttgaaagctggtcagatggtgttggttagaggaaggtgccaacgttagtgtgcaataatgaagaataatgtcgtgcaaaggtcttgaaacttgaaggtccatattgtgggcttgtcttagatgccccatgattattaaaggaggcttggtgctaagtggagatttggactgcgatgggagtttaggggaccgattgaaattgccaggcaatatgggttagtgggccctgttcttgagtaaaaaggaattggatgcggtatgggttagggttaatg

SEQ ID NO: 611531 - DNA, 296 bp, Homo sapiens
atatgatcttggctgggtacacgtatgcccatgccccattatccctctgtgtgtctaaatttcctcttcttaaagggacaccaggcggggcgcaggggctcacgccggtaatcccagcacttggggaggccgaggcgggcggatcatgaggtcaggagttcgagaccatccgggccaacatagtgaaacccggtctctactcaaaatacaaaaattagcggggcgtggtggcaggcgcctgtagttgcagctattggggaggctgaggcaggaggatcgtttgaacccaggaagtg

SEQ ID NO: 611532 - DNA, 350 bp, Homo sapiens
cttacacttaatggttcagcagagatacacacaggaagccccatgggcctcatcctaccccagttactgtcaattctagcactcactggtgatcagcaggaacacaaatcataatgattatttctcaatgagtccttctctccaagcggcccttgaactctgtgacggcaggaactgtgccccattcaccttcggctctaatccttgcctggagaacaagtgaacgctgcacgtgactggaagggggcgctctccacgccacgcaccctgctcgctttgccactaagctgacaatcctccagtctccaccgctctctactccttacctgactacgctccggaaaaatcct

SEQ ID NO: 611533 - DNA, 199 bp, Homo sapiens
aatactggtaaacatatgtctgatgacaggtataacttgcatattgcacagccaatccacagcagcataatagaagctaaagtgtgaccagcacctatgactgcacaggccagagtggccataacaaccataagtacagggaatgcagtcccatcaccgttggacagcatctatattgccatgggagtcagggtgccca

SEQ ID NO: 611534 - DNA, 418 bp, Homo sapiens
  misc_feature (13)..(13): n is a, c, g, or t
  misc_feature (29)..(29): n is a, c, g, or t
  misc_feature (47)..(47): n is a, c, g, or t
  misc_feature (94)..(94): n is a, c, g, or t
  misc_feature (333)..(334): n is a, c, g, or t
gggaggggggggnggggggggggaggggngtgggggggggggggggngcggggggaggggagggggggaggtgggggggggggggggggggggngggggggaggtggggggggggggagggggggaggggggggggtggggggggggggggggcgggagggggggggggggggggggggggagagaggggggggggagatgggggtgggggcaggatggggggggggggggcggggggggggggggggtgggagggggggggtaatgtggtgacgtgcagtggcggagcgcgcgatagaaggagaggtaagaagggaggggggggttgaaggnnggggacccaccccattcctccccacactcatggcccttaccagggtactcctacctatctccccttttatagtaataatgttat

SEQ ID NO: 611535 - DNA, 289 bp, Homo sapiens
agcatcagtgtgatgagtgacctcacagtggaatggagtgagaagcatatgacctcataaactgaaggctatcttcagatcatagtactcatatattctacgtgcattaatcctcatataaccccaagaggtacaattagtataacttatccttcgtcgtaggtgacacagttgagacacagacgagtcaaaaaactcttccaggatcaaccagtaaaaggcagaccttggattcgaaccaggcaacctggctcaaatatcagttttaattactacactctgtactttc

SEQ ID NO: 611536 - DNA, 475 bp, Homo sapiens
atagggttcctggaaggcccctgtgtggtggaggtttttcaaaccatcccccctggggtggctttgctgtttgttaatagaaccaacacgttcgggtgggggtcttccaacccgtggacaaaaaggctgttggggctggcagggtccccaagttggccccgaaaggtcagaggggtaaatgaattttttccctaaacccggccccccccttttttatcagggggggaagaagggtttcaaaactgtttgtttcaattggccctttaagtttggggggaaaaggcgggttaatgataacaagggtttgtaaacccttcagaaggaagggggaatgttttgggggcccctttggttttttttttggggggggggggttttagggttttggtttttaaaatcgggatttttttaggggaacaacttggcccaaaatttgttccagaattttggggccccttaaaaaggtttaatggga

SEQ ID NO: 611537 - DNA, 135 bp, Homo sapiens
cgggttgggttctagggatgtgatacgacctactcaggtaccgagcatgaattgatcatcatgatcttcagagtttgtggctaaacaccataatcttgaagattcggagtgcttcttttattaaagtcccaaata

SEQ ID NO: 611538 - DNA, 336 bp, Homo sapiens
aaaaggggggggccccccctttttaaacaggtggggtttttaaaaccccccccctttttaaaagtccagggttgggcccccccaaggttttttttttcctgggaaaatttcccccccccccccccgaatgtttgcccaaattgggggtttttttttttaatttttttgcccggccaatgaaagcttttttttaaaggccgggttttttttttttttttgggacccccccccccgtattttggtggccgcttttttttttaaaaaaaaaggtttttttccccttcctaaagggtttttttttcccccccccttaaaataaacccccccttggggtta

SEQ ID NO: 611539 - DNA, 862 bp, Homo sapiens
tgcggccgctgtcttccgcggggaccccgtgtgtcggcaatacctcgctcaagggggccaagtgttcatgccccccatattggcccctgttttataggggaaacttcttttggcacgctgtgcgcggttactccacaggggtactattagcaatagtgagttgccccccccataggcgaggaaccttgtgcgccccaccccagttaaccccgggcgtcattaaggggatattacctcgacgctgtgcgcacaagataatctgcggccctcctaggcaccttcgggaatatattgaggaagcagtgaagcacgcggcagatcggaagcgcagtgggacggttcccctcaacaaatgttttaggggaaacatgtttctgccagagcagctggccccacaacctaaccctctggggccccaccgcgtgtacgcacacctcgggttagaaattatcttggaaaggactttaaaagcgtcccacaaagtcccttttgtggcaaattaaatcatcaagcactccccccctccattttggcgttatgccccccactgaatgtcagttcttcttaaggcacaataaacaccaataccttcttacgagtcggtcatctaatcttcagtcctctttttcccaacaataccccccccggcaactatttcaagacaagaggagaacaaaaaaacccctgcagtttaacataaatcgaaccctctccctcaatcagaacggtgtctcgcatgagtaaaaaaaatgatccatacaataaggtaataccctctttcggcggaaaccccttcccttattttgggtggcgaggcaaattcaaaaaaaactggtattttcctgcccgacataaaaacaat

SEQ ID NO: 611540 - DNA, 360 bp, Homo sapiens
tgttataacccttcgattattgcgtcaataataacgatgagagacacatgcacatatctgacatccataagcaattcagagaggaacatatcagtgtgtgacttgatggtctagatacatctccatgcacctgtttccatccatatccatctcctaggtctctatccatatcatccatttcttcctctttactgtaccgagcataatcttttcttaatgttctcattaaaatcattgaaactaagcccaccaagaagatcaccatcatgaaggagttgaaaattgaaaaccaatgaatccgatgttgaaaaaaggacggatcaagatatttgtcaaatcgatcttcaaatttcacatctg

SEQ ID NO: 611541 - DNA, 677 bp, Homo sapiens
aagctttctacatcatcgatatgtagctgaagcatgtaagagaggggaacgtgccgctattgctgtgtccttggagatcgtgggcatgaatacgtgtttggatgctcgtgccataaaacgtggcgcggagtgaatgcgaggcgatctggacatatttgcagatggagttctgagagccaattactgaaatctgatcaatcaggttgttcaagtatggcagcgataaatctcgttacgacttcgagcatgaaatctaatgttgataaaaaaatcgaatgttgattaaatcactcaaggacaaaggatgtgtcaaaagagaggaattcatgaaggaacgtgtagaggatggataatggaaagcgagaaatctttagggaggaaaacgctacagtgattctacacagagggagaggagaatatttacccaagattaagactccacgaataaaatacttgtgggtaatgaggtgccattggaggaaatcgctaaagggagccattgagtgcaaaaggaaatacacgatgaaaaaacaaagaaaaagatttaaaggaaagtgaagaaaaaatcagagaagggatttcagattaaagaaaggactttgagaagatgaagataaagctttgataccgaaagatataacatgagctaatcagaaacaaattcgagtctaattgtg

SEQ ID NO: 611542 - DNA, 769 bp, Homo sapiens
  misc_feature (37)..(37): n is a, c, g, or t
  misc_feature (41)..(41): n is a, c, g, or t
  misc_feature (57)..(57): n is a, c, g, or t
  misc_feature (115)..(115): n is a, c, g, or t
  misc_feature (148)..(148): n is a, c, g, or t
  misc_feature (360)..(360): n is a, c, g, or t
  misc_feature (400)..(400): n is a, c, g, or t
  misc_feature (416)..(416): n is a, c, g, or t
  misc_feature (469)..(469): n is a, c, g, or t
  misc_feature (490)..(491): n is a, c, g, or t
  misc_feature (556)..(556): n is a, c, g, or t
  misc_feature (603)..(603): n is a, c, g, or t
  misc_feature (666)..(666): n is a, c, g, or t
  misc_feature (685)..(685): n is a, c, g, or t
  misc_feature (703)..(703): n is a, c, g, or t
  misc_feature (760)..(760): n is a, c, g, or t
ttacctatgtcaagggcgtgaaactctaatcaaactnatcnctctttgggcacattntactaagccttccatgcgcttcctgcccccacactttagacctatatgcgaggcctantcggtaatacaatctaccaatgaccttggtcanaagagaaatacaaagttttctttggggggggggccaccccaccctttcagcactccgaccccatataggctttggaaacaacaacagaccggatgacgaggaaaaaaaaaggccccaccatagaagaaaattcgataacgagccgaggtccctgggagtggaagaatcgcattattggccccttgacaacagaggtcaccacgcctcactancaggctatatttcccttttaagtcggtgttggctagaatncaatattccaacaagnagagaaatgcggcctttggaacaaaaaaacgtgctattatgtcgtgtggaaancactaggaggcgcccggcctnnctagctagacgctgggacctctccggctattccttgtctaatgttccagaaacgctcccgcaacntagagcccagccggagctacgctctaaaagacatctaaagagccggncagtctcaagacgcgctattaatcggcgtattatctctcatggggcgaggaatagcggatatnattcaagatgggtctttcntaggagagccgaggcagnaacgctttagtatttatagaggcgctttgatccctgtttcaaccccatctccacagntcatcagag

SEQ ID NO: 611543 - DNA, 153 bp, Homo sapiens
ccgaaaggaaagaagggccaggggaaaaaagggtggctccggcccagcctgtcgtaggaggcggaggcttagaagttggtgatccctctttgagaaggcctagattttgcattggcaggcatcagcccaaagagcctaccgcttggtgaatgg

SEQ ID NO: 611544 - DNA, 381 bp, Homo sapiens
actcgtgctggtgctctctgggagagacgggggtcaggcggcttctttgtccctcgggtgctccacatcgatatcaacttcaatgcccagagggctaagagcagctgccacactctccccaactgttcttcagtgaaattcacactcgtgatcctcctgatggaccagaatgctgattcttgcctgtgggtgccagtgtcgggcctccccgtgcactgaggaggactgtgggctccatgtttcctgtgtggaccccatttcccagtcctggccaccctgaatgtgtcctgtgtattcacccttcctggatgccatgcgtgcttgtgctgagaatgccctcatgacatggtgccctgaatgggtgccatgtggcaccccatg

SEQ ID NO: 611545 - DNA, 209 bp, Homo sapiens
  misc_feature (26)..(26): n is a, c, g, or t
  misc_feature (51)..(51): n is a, c, g, or t
  misc_feature (55)..(55): n is a, c, g, or t
  misc_feature (74)..(74): n is a, c, g, or t
  misc_feature (78)..(78): n is a, c, g, or t
  misc_feature (93)..(93): n is a, c, g, or t
  misc_feature (98)..(100): n is a, c, g, or t
  misc_feature (110)..(110): n is a, c, g, or t
  misc_feature (115)..(115): n is a, c, g, or t
  misc_feature (143)..(143): n is a, c, g, or t
  misc_feature (157)..(158): n is a, c, g, or t
  misc_feature (160)..(160): n is a, c, g, or t
  misc_feature (166)..(166): n is a, c, g, or t
  misc_feature (187)..(187): n is a, c, g, or t
ataatccatgctgttggtcataagtnaactgtattaagaacagtaaaatanatanccaccaatagtactaattntgcnttaaaaaaatttctnatttnnntcacataaanacaanttatcctaaaggttaatagttgatcganacagaataatagannancttctntctcttaatttccattaaaanagcaaatagcattgacacattt

SEQ ID NO: 611546 - DNA, 624 bp, Homo sapiens
ccttaatgacacgacagcgagatcgaccggaaatctgggccctgcgtgctgtcgacaagcgctacagaccagcttccgctacggccagatgaactcgccgttcgaatatgaaaaggtgcgctacgtgtacaccgaggcgcgcaagttgcagatcgccgagtaataccccctgtaggcgctggcttgccagcgcctacatcccccgccgacaccacttccgccacgtaaaccgcaattgcagcacggccgccctggccatatcccggtcctgaccagccggcaccgaaggctgctcaagggcttcaagcatcgcaacgctggccgcatccatcagtgactcattcgccacgctcggtccactctcctccagcgccgtctccaacccccgcaaatagcgaacgcgttcaatcgccaacgcgccccggctgcccgccaggcaggcacgcaattccagcaactcatcccccaggtccagcccgagcaatccatagtcccaatgggcacggcgatcagcaggcaaggttacgctgtagcgcgacaagcgaatcagccggtccgacatgcacccgccaaaccagctttcagccagctccaagggaggggacgtccatagcgccaggtcgc

SEQ ID NO: 611547 - DNA, 339 bp, Homo sapiens
  misc_feature (149)..(149): n is a, c, g, or t
  misc_feature (184)..(184): n is a, c, g, or t
  misc_feature (290)..(290): n is a, c, g, or t
aaaaaacattagaatgcaaagtaaaattgagttaaatccccagatattctgaatattgccattattccaacatcatctcatataatagtaaaaaatagcatatactttcattttacattaaaattgactttaatttaattatatatttnatattctgataggtgagcaatagaatacacatgtncaagtcattgttttggtttagtcattcagactaattctaatttccgcagtaaatcttacacaaggaaagaaaatgtttctcagaagtcaggcctaagaagttgggnaaaaaattgtttaggggtggccgggttgcgggtggctcacacctgtaat

SEQ ID NO: 611548 - DNA, 157 bp, Homo sapiens
tccctcggtctactgtctgcagaccatggtggagaggacagcttatgggagcacgaagaaagagcgaagtgcaaaggaagaaggagcttaatgcaggaacagattctgcagtagggggggtctcaataacaagttattttccactgaacaaaaaaat

SEQ ID NO: 611549 - DNA, 528 bp, Homo sapiens
  misc_feature (199)..(199): n is a, c, g, or t
  misc_feature (201)..(201): n is a, c, g, or t
  misc_feature (203)..(203): n is a, c, g, or t
  misc_feature (205)..(205): n is a, c, g, or t
  misc_feature (207)..(207): n is a, c, g, or t
  misc_feature (213)..(214): n is a, c, g, or t
  misc_feature (216)..(217): n is a, c, g, or t
  misc_feature (228)..(228): n is a, c, g, or t
tcatcgagctcggtaccgcacgagttcggagtttgggggtgtttgggaggaggagagagagagagagattgattttaagaggctatttggcatcaagagaagttcatgtggcagaagtatttcaacccggacatcaaatgaaaaacaaatgcaagagtacataattaacttttaggaaaagaaaaagtatgtatgtatncntngngngtgtgnntnngtgtgcacgtntgtgtatagacaggtgtagatacacagatctgtgtgtgtgtgtgtgtgtgtgcacgtgtacatatggaaaaggccaaggctccaccaggagctctggacaacgacgtgaaggggagcaatgctgagacaggactggaggctggaagactagtttttacacctccactttgccactcaactgcctcatctggaacaagtcatttcaacttggttttctatttctaagaatggagacctcacgggactggtgtgaggtttgagcaacaaacgagatctgaaagtgttttggaaatgtgtgta

SEQ ID NO: 611550 - DNA, 155 bp, Homo sapiens
aagctggagctcgcgcggaggtgcttcagcaaggccactttgaggatgatgacccgatggcttcttaggctgagcgcccagcatcaccattgcccagccaattccggccgaatttcaccaagatccaccagagtccaggagttggacggggacac

SEQ ID NO: 611551 - DNA, 335 bp, Homo sapiens
gagcaacagttgacccagacaactccagagggctgtcgaacatagacggtaacaggtatgaaagtggggactatattattggaacgtacactcaacaaaatgtgtgaatcgattagaaacaatggatattacgagatggggaggaaagataaaggagggataaagtttgtatgcggcattttggtgtgagcaacaacgtggaaggtggtgtcctttacttgagaaggagtaggcatcacttaaccaaggtttgacgtaacaacaaaactgactcacttatactgtttgtgtgggactttctactcagactcactactaccctataagtcaggaac

SEQ ID NO: 611552 - DNA, 212 bp, Homo sapiens
acgatctacaggatccccttaaatctatttgtagagactgagtctgtttgtgcctaggtttgtatccagactcctggcctcaagtgatcatcctgtcttggcctcccaaagtgctcgattataggtgtgagccgtggatgcccagcacgacaaccagtaactttccgcaggaccttgtgccctttgtcgtctgctgaggtaccgacgctcga

SEQ ID NO: 611553 - DNA, 347 bp, Homo sapiens
ttttaaaaaaaccaaaaggaccaaaaaatcttccggagggaaaatgtgtaattttggtccaggtttccggttggatattccccttccacgtggtcccacggttccttttttccccggagttttccatggtgggccagccttccccctccctttttggagttttggccggccccggggcttgaagtttgttcttacttaactctctttggggatgtttgtctcctccccttttgcgtcctgcttggggttttacttctcccggggccgggtttggctgtgtcttaactgcctttccgcgttgttaaattttgctgttccaattttaggattaaatgttggaaagtcca

SEQ ID NO: 611554 - DNA, 139 bp, Homo sapiens
ctgcgttaccctaagccaaggcctcgttgcggtccttcttactcacaacaaaatgtaccagaattctaggtcgtgccctattttacaatttgtcaaactgaggcactgagcaactgtgacgacaaggtagagccgagga

SEQ ID NO: 611555 - DNA, 223 bp, Homo sapiens
gtcttgtgatatcgtgacattcttaagatgaagctggatgctgcaacagctgccctctgggtttaggtgttgtaccttcacggtaatccatgcctgaatctgcgagtatacaaatttttaggtgcctcatatcgaccagttccggatggttatttcgtacttatagccttgtgaactccatgttatactattctcttgcagcttggcagaggttagccacgga

SEQ ID NO: 611556 - DNA, 166 bp, Homo sapiens
caagatcagatcacaaatcacttggaagggttgattgtaaataggccacatccttgagggtcttcttattaccttcatatgagctgattaaaaacccagcgtaaaagttctgggaaccatgaatttggcacactggtgccccagaaaatcgaacaagtaataccag

SEQ ID NO: 611557 - DNA, 154 bp, Homo sapiens
caccggcccaggtcggaacggagcattgtcaaaactcccgtgtctgatcagtagtgggatactaagttcggacatcaatatggtgacctcccgtggagcgtgggtgaccacctaggttgccctaatggtgggttgagaacataagagggtacca

SEQ ID NO: 611558 - DNA, 356 bp, Homo sapiens
  misc_feature (36)..(36): n is a, c, g, or t
  misc_feature (58)..(58): n is a, c, g, or t
aatattattcatcaaaagaaatgaagtgatacatgntataacataattgaccttgaanaacatgaagagtgaaagaagccagtcacaaagaaccatatattctatgattccatttataggaaatgcctagcataggtagacctatagagacagaaagtagattagtggttgccttgggctggatgcagacagtgactactaaagggtatgttcctacttcttagggtgataaaaatatttgaaattgattattttgatagttgtacaactctgaatatccataaaaccattgaattgtacactttaaatgagtgatttgtatggtatatgaattatatctcaataaagctgttacc

SEQ ID NO: 611559 - DNA, 502 bp, Homo sapiens
  misc_feature (345)..(345): n is a, c, g, or t
tatttcggatttaaacggcttcattaaaagaattggccctctagggcaagaatttgggacgagggtcaccccctttcgtccccacactcaggacaaggatgccctggccggaacaacccaagcagcgcctagatggctttggtcacggttcagcggtcaccctacccccagcaccacctccagcccctgcgcctcgagagcaagactgggattcttggttcagggagccagatttccagtgattgtaaggaagaatttgtaacagtggagtgcactgccttgcaaaatagtgagtgcacattgctggaaatattcaagcaaaggctggagaacattttgcctggnaggtggtataagaatttcctgcagtgggggacttctaagactatttctaatctaagattttgtgatttgagaatacttgtacttcaaagctggtaaaacattttagggtcatctgaagacaagtatcataggaataaatcttccatataatttaaaa

SEQ ID NO: 611560 - DNA, 297 bp, Homo sapiens
ggagccaggagcagtccccgctgccactgctactgccgtactgctgccggcgcgtctgccctctcggtctgccagtgtacctgccggcgcctcggtcgaccgccgcgtccactctaccgctgcgtccagcgactcctgtttcctgtgtacctgacggacgccccatgccgcacccgctaaaacgccttgctactagcgctaacttagccactatccaacccgagtgcccaccccattgtggcacaccctggcagcccataccaaactaactccttccccacttctttcacccctcct

SEQ ID NO: 611561 - DNA, 583 bp, Homo sapiens
  misc_feature (333)..(333): n is a, c, g, or t
agaaggcgcccattcattcccctgagcttggatgccgttggagaatccgcaattcattccaaacatcgggacccaggtacaatcgcacttcgacttgaacggtgagcaagcaagggccgctcaatcgcgcggtcctgtctgggaggctgcattgacagaacccttatccaaagtatcgccgggaagctctgaaggacaggttggcttgggcttgtccgtggagtgaaagacccgcgacacggagacagaaggtgcatcagccaagggccctgttcaatgtcgcaagttgcagtgcagcattccttcacgcacctgtccacaaccccacactancttctcaatggcgcatcagtgcgcttctactgacctgctaccactggcctccatgcatgctgcctgcgtctaactaccgcgtggacgtgtcacacttctaccctacgccagtacgcgcgctgacacgcaccgaggcacctcctctggatgaaccagctctgcaccggctgcatgaagacccccttccttggtgacatggccacatccgctgaggcaccgattatttactgccagagccctcagcccgctt

SEQ ID NO: 611562 - DNA, 232 bp, Homo sapiens
ctctgtgatgcaaggtgtcgacgaagagggtgtcagtttaagttaccggacgatttcagtaatctttgttcacgaggccagatcagctacgcgtgaaagcagcagtgactcagaatgtagcttcatgtgtgatcttggcacacatccgtgttcaaaaatacactattgtttctcgttggtcttgtcagttgttcctgttcggaacacatgcgttaatgattcttgtgacatc

SEQ ID NO: 611563 - DNA, 157 bp, Homo sapiens
ccagtcgcgcgagcgaaggcttggtgcgttcaagattcaacttcacccgtaacccaccgccattgccgaaggaggcatttctgctgaggtgtaatggacgttgatacttctttacaagaggtctgagctgccttaccagatggcctagcagtggaat

SEQ ID NO: 611564 - DNA, 137 bp, Homo sapiens
ggttgtacaacagataccttctattttacaacatgggtagtaattgactataactggagatttattatattctaatactacccatgtgtacaacagataccttctattttagttgctaataaagggctacacaactc

SEQ ID NO: 611565 - DNA, 173 bp, Homo sapiens
gagataaccatagacattatcaatcacctggacgactcacctgccttaccctgcctccttgtcttgtatgcaataaatatcagcacacccagctatttggggccactaccggtctccacgtcttggtggtagtggtcccccgggcccagctgttttctctttaaaaaaaaaaa

SEQ ID NO: 611566 - DNA, 343 bp, Homo sapiens
ttcacctcctttcctaataatttcctccacattctttgccagacaccacaggaatattgcaactgccagtgcatggggtgccacaatattccaggattgaccgaagcacacaaaggttagttggaatattgctattcacagtctcatctatatataatgggtgcttttccagttctgagaagtactcattgactacatttccatatatctttcactggcttgtgcttcttttgccacaggtctttcagcaaacacatgtactaaaaggaaaaagaggagtgtctgggacacagcttacacagtgatatttatctcatccactctatctgtgagtggcctttcc

SEQ ID NO: 611567 - DNA, 98 bp, Homo sapiens
  misc_feature (26)..(26): n is a, c, g, or t
  misc_feature (47)..(47): n is a, c, g, or t
  misc_feature (97)..(97): n is a, c, g, or t
cctggggcggttttgtgccccaggcntattacttggcagcatggcantacctgcagtaccccttacaatattaaagcaaagtttttattctaaaacng

SEQ ID NO: 611568 - DNA, 1076 bp, Homo sapiens
  misc_feature (423)..(423): n is a, c, g, or t
gcccgggcgcgcccgggacctcattgcggactcggtttccctttgcgtggaggctcgcagctgccaccgcttcccacgcggagcatggggctgcctcgaccagggcaggggacgcgtgggagctagtgcaagagcctgaacgcctgtgctggaagaatgcgccgtgtcgacgcgacgcatcaatcagagtcctgaggccagcttagtggggctcatcctgccgcgggctgtggccgaggtatgaatctccaaggtgctcgaaagctagagtaaggcagatcgtccgtggcaaatgaaccagatgcggctttccatggcaagtgtaggcatgacacttgacgttccaatcatggtcccctacgtgtgcaggcgtccaccgtgtcctatgcgaagcaggcgtaccggctgtagggggcatacagnagacctctgctgatgggcagcgtcctgtgaccggcgattgacgttgcccctgctcgtagcctgttggttccattggggaggactccggctctgcttgatgccagctgactgtcgcattgcctgtgggaaggctacgcatgggttggggcagcaggaatcaagccggtccgagcggactcgaccccgccttggggtaccggggctgagtggctgcagccttgagggtggagtttccaacgctagggtccgctggttccttggccccacacgtgggcctcccaatgtacagacacgcatgacaggatctttggcgcgcccaaagatgcgctcgggcgagttcctggcgtccccgtgttggcccccttcaggcgcgggcccgttcggcccatcccgctttggccgggtcccttgggccctccttgggccggggccccgggtgcggtaaggccccccttctggtgcccggacgtccccatcgatgacccccctttgccctggaccttgcgtttgggggacccatttggtgtgggccaacgttggaaccacgtggttcgcagggcgctcctttggggttgggcctgggcattgggttggttccccccattccaatttaacggggggcccaagcccccagttaccacaagaaccccaag

SEQ ID NO: 611569 - DNA, 307 bp, Homo sapiens
cccacgttggggacgaggccccaagttgagaactaagtaagtgaacaattgttgtactgaacactagttcgatgactcgcttgatcataaacaacctgtggtgtaatattgtttttcccaaaaaacgtagcacccttcagcaggactctataaaactttcctccagcccttgcctctttgcaggtagccccttctctgctgagctgcccactgcaacatattttcacaatttctctaataaatctgcccttctttacctacaactatcttggtaaatggctttaccacctgcaaaactgaccctagg

SEQ ID NO: 611570 - DNA, 242 bp, Homo sapiens
ggatttgctggtgcagtacaactaggcttaatagggacatgaggttaggagctcaagaccagccggctaagatggtgaaaccctgtctctactaaaaatacaaagattagctgggtatggtggcaggcacctgtaatcccagctactcaggaggcagagaactgcttgaacctgggaggcagatgttgcggtaccacactgaagcctgttgacagaaccacgctctgtctcaaaacaaaaaa

SEQ ID NO: 611571 - DNA, 882 bp, Homo sapiens
actccagctacttgggaagctgaggcaggagactccctttaaccccagagggggaggttgcagtgagctgagatggggccactgcactccagactggtcaacaggagcgaaactctgtctaaaaaaaaaaaaaaagttaaatttaaaaaagggaaaaattaatagaatatcgtgcaataaatttcccatttctaatttaagttgtgacaacaataattgttgctgagccaattcagattattgaaagggcttctttcaggcactcaggtgtggaggggtccttaaggccaaacggttaagaagttcccctttccagccaggcgcggttggttcacgccacccagcacttgggaattacaatcccagcactttagaaaggctgaagtgggggggactcatctgaggtcagaggttcaagaccagccggggcacactggtgaaaccccgtttcctactacaaatcacaaaatttagctgggcgtgttgtttgcgtgcctgtagtcacagttacacggcaggctgaggtgggaaggatcatttgaaccccagaggtcaacgactgccgctgagctgaggatcacaccatgtactcccaggcctgggtgaccaacgtgggactctatctcaaaagacatagggcccagttgcacgttctactacagcacgaaaaacccctgttgggacctggatggatggcgtggcattatataaactgtggcggaatgccacctacaaaatggggctcgggcaataacagtcgttccagcataaggaggcacaacccggaaccttgactgcaggcaggaccgcgatctattcagcaagcttaaagtcatcacgggtgaaaccagtgcgccaccgcacggtagggcaacaaagtga

SEQ ID NO: 611572 - DNA, 388 bp, Homo sapiens
cggcggcgagaattcggtcacagatactactcctctcggccagatagtgactcctctccgccagatactactcctcctctccacgagatgctcctcgtctccgcgaggatgctcctccgctcggagagatgctccatcgtctccgccagatgctcctccggtcctcgagatgctcctcctatccaccggatgctcctcatctccgccggatgctcctcgtcaccgccggatgctcctcgtctccgccgatgctcctcctctccgccggatgctcctcctctccaccagatactactcctcctctccaccagatactactcctctctgcagatactactcctctccgccagatactactcctcctctccgccagatgctcctcgctcgc

SEQ ID NO: 611573 - DNA, 1350 bp, Homo sapiens
tactctctctacaaggtttttctcctagtgtccaaaaagcgtcccctctttgggacataaagggaaaaagttctatgaggggagtagataagagaagtgaacaacgtacaagagcacggcgggataacggatgagctagccagtcgagatgagaaatcgattagcatgacaaaatacagagtatgagccctaagagagagcgcgtagtacagtcacacacggtgcagaatcatacacaagcgcacaagtgcggggacacgaaacggcataacagcgaccgcgagtggcgacaacgcagagcgaaaagggaggcacggcagtgtgacgaacaaaacagacggcgaaagacaacagtaataacagcagcggaaacaatgaagcagagcagaaaaaaacagagcaacaaggcacggtcaaacaagaacgaagagaaacgagggggcaagcgactgccaaagaaggagcaggagccgaagaaaagaggccagaaaaaagaaaaaacggacgcggagggggcgacaagcacaaacaagagaggacgacagagcacaagaagagaaaagaaaaaagaaggcgaaaaacaaagagaacacaagaaaacacagccagaacaaagggccacagagaaagagacaacacaaggaaagagcacaaccgtcaaacaagagagaggtgacgagagacgagggagagaaggggggcgcgaaaggagagaagaagaggggaaaagaagaagaaagagagagaaaacagaaagagcgcgaggaaggagaaaaacagaagcggagctacaggacaagaagggagagaggggacaggaggacacgcatataaaagagaaaaaaaaagagagagaacgcaacgaaggcagcacagccaagagagcaaagaaaacaaaccaagacacgaacaagaacgagagagcgaagaacatgacggaaggaaacgagagcagcaagagaagcacagcgaagaagaggcaggcgacagagcacgcgcaacgaaggagggcgagacaaacgagcggaggagatcgcagtgagcagacagcagacaagcgacgagaagaggagacgcacgaaaaacgacagcaggtaagagacagccgtagagtagcagaagaaaaccaaaggagaacgaataaagaagaacagaaaaaccagacaaccaacaagaagaagagacaagatagacacaacacaaagaacgagaggacaggcaagacgcgcaacacggaacgagaacgagaaagaacgcacgagcgagaaccaccgaaaagcagcaaacaagcacgcactagccaggaaaccacagagcatccagcaacccaaacgcgagagccagaccaca

SEQ ID NO: 611574 - DNA, 137 bp, Homo sapiens
agacatccccgcgcgttgttgtttcgagatttgtgcgactgtggcaggttatggttggtttcgatggggcctttcagggccacgcggtcccggcggatggccatgatggcattgcgaatgtcctcttcaccggccat

SEQ ID NO: 611575 - DNA, 120 bp, Homo sapiens
  misc_feature (119)..(119): n is a, c, g, or t
agacacaggctcaagatggtcccaggacaacaagagaaagacatgcagcctctttcttgcttttatgatatagtattagcactcactattaacacagcccagtgttaacacagcccaang

SEQ ID NO: 611576 - DNA, 736 bp, Homo sapiens
tccattttatggcgtttttttttccgcctcttatatggagattagagccattcgctgctgccctttctatagcgtcctcagtgcgcatgtggctgattgtcttgcgggcgtcgcacataccgactcggaggttctctgcgacgacgagagtagtgttagcgttcttgttgataaaagaaacatcgaatctccaggtacgctatcacgatttggaaggtggccactgcctctgggagcgacgctctccgataatgcagaaggacaacgcgctttaacatctggtaagtatactcgtacactctatatgtagctgagccacatcctagacacgctctgacgcgggagatatgagcacactgaagtagcggcccgtgtcttgcgagtgctcgccctctcagcgagaaagagtctatgcgcagacacacctgtctgagatatgaggatctcgcccagctgcgagacaccttccacgcactgtagaaccagcgccctcgtccctccggatggaagtataaagcgccgcttctctccaccctctgtgggccacacggcacttgcacccaccacacacacacacacacacacacacacacagacacacagacacatacgcatacacgtgcacacatgacacacggatacacacacacacacacacacacaccactgcatatctgagcgcgcccctcgcactggtctcacctgcaccttactcaggagtatatgtgataccgga

SEQ ID NO: 611577 - DNA, 259 bp, Homo sapiens
ggcgtgatgtctcacagaaagttctccgctccccaggacatgggtccctcggctttcctgccctcggaaggcgccagcagccaggccatcgttgggaaggttgaaagagccttccctaaggaatgaaccccctaccacgcccggtttccaccctcaaagaccttccctggggataaaaaggcctggcaatgaactaaaaatcgtgccggggaagtcgaaaaggccgggaatccaagggtgaaacacagaaggagggtgg

SEQ ID NO: 611578 - DNA, 525 bp, Homo sapiens
  misc_feature (213)..(213): n is a, c, g, or t
  misc_feature (217)..(217): n is a, c, g, or t
cggcgcgtgctgcgaagataacttgccacgaacgcgatatctcgtgtcatagggagacgacaggaagaatgatgagacacgtgcatatccctgtgtgagtatgtatagagagcgcagacgtcgtgatatgtgcaccacgcgttgcgacagcgctcgtgctcgtgagtttgtgctctcgagagcgcacgagctctgtagagaatagtcgacaanaaanagaagagggagcacactaatagtagagtggtgtgtgtgtcttatacacagagagtgtatacttgtggcggcgacacgagatattatactcgtagagctcgtgtcgtgtgttgtagaaggggaatatcatctgagagagacacagagaaacacgcgaagaggcgccgagatcgcgcgcatattgtgcacaggtctacacgtgctgtgtggctcaagagaatatagtgtttgtgaagtgtaagagttccacacacacctctctgcgttaagacactgtgttaataggaggtgctacacactacacttgtg

SEQ ID NO: 611579 - DNA, 785 bp, Homo sapiens
ttttcgtttttgtttctgtgggagaggagcgaggaggagaggtaaggagctagtaaacagagacgaaaactcaccagctcagtggggtaatggggtggtaccattcccgcattgtttctctaaaagaggcctttgttgttccaggcttggtgataagtgccctcttttttgccagcaatgttcagatgttgagtgcccctcgtggtggtgtcgagcgccggttccggtcctgttgcgccaaaattattttggggccgcctggtttaaaactaaagcggcttgggttaaagaaaaaggccacgtttgaatttatatggtgcccccgcctcggaatgggatcacccggttaaccccctgtaagaaagatgtgttgacctccgtttgttaaggtccgaaactttcaccaaaatgggggggccccatcttaaaaaccttccggagaatgggtttaaaattagaattatataacccgggtaatttggaaaaaatttaaaatctcggggggaaatgcggtcacccgtctttatggacgccgcccgaggtcaccccgtgttttggggtcaatgggtcactgttgcgctccttttaagcgcccaggggtgtaagaataaaataaagggacgccacattctaataattttgtgcccctaactattgcccactctttagtaataaatttcccgtattttataaatggtttttttaaccttttgtaaagcacttttatgtgtggtttatatttgttaatatattaaaagatttttccaccacccctctccaaaaaa

SEQ ID NO: 611580 - DNA, 378 bp, Homo sapiens
  misc_feature (252)..(252): n is a, c, g, or t
  misc_feature (254)..(254): n is a, c, g, or t
  misc_feature (257)..(257): n is a, c, g, or t
  misc_feature (259)..(259): n is a, c, g, or t
  misc_feature (273)..(274): n is a, c, g, or t
  misc_feature (293)..(293): n is a, c, g, or t
  misc_feature (298)..(298): n is a, c, g, or t
  misc_feature (317)..(317): n is a, c, g, or t
  misc_feature (329)..(329): n is a, c, g, or t
  misc_feature (333)..(333): n is a, c, g, or t
  misc_feature (338)..(338): n is a, c, g, or t
  misc_feature (341)..(341): n is a, c, g, or t
  misc_feature (352)..(352): n is a, c, g, or t
  misc_feature (359)..(359): n is a, c, g, or t
  misc_feature (365)..(365): n is a, c, g, or t
  misc_feature (376)..(377): n is a, c, g, or t
cactaaacaaaacaaccaataaagtcaccagcagtattactatcacaccaacagccacacctcttcctcgacaatcacaaattacagtaagtaatatatataactgaccacggtcaccctcatccagtccatactgatattttttgcaaggaactcaatccttttttaatcatccctccatatcccccaagacttgactgaacttgttactttgggaaggtttgtgcatgaactatacaagggtatctgaancnaantnttgcctgcataggnnatatcgggggtgcacttcnctgtntatactttgcatttcacanacttgtatgggnaaanatttnggntggcacttgtntaaatanaacttnatgtatttcannt

SEQ ID NO: 611581 - DNA, 548 bp, Homo sapiens
  misc_feature (26)..(26): n is a, c, g, or t
  misc_feature (80)..(82): n is a, c, g, or t
  misc_feature (86)..(86): n is a, c, g, or t
  misc_feature (95)..(95): n is a, c, g, or t
  misc_feature (100)..(100): n is a, c, g, or t
  misc_feature (102)..(102): n is a, c, g, or t
  misc_feature (105)..(105): n is a, c, g, or t
  misc_feature (114)..(114): n is a, c, g, or t
  misc_feature (134)..(134): n is a, c, g, or t
  misc_feature (137)..(137): n is a, c, g, or t
  misc_feature (142)..(142): n is a, c, g, or t
  misc_feature (148)..(148): n is a, c, g, or t
  misc_feature (151)..(151): n is a, c, g, or t
  misc_feature (158)..(158): n is a, c, g, or t
  misc_feature (161)..(166): n is a, c, g, or t
  misc_feature (168)..(168): n is a, c, g, or t
  misc_feature (170)..(171): n is a, c, g, or t
  misc_feature (181)..(181): n is a, c, g, or t
  misc_feature (241)..(241): n is a, c, g, or t
  misc_feature (255)..(255): n is a, c, g, or t
  misc_feature (268)..(268): n is a, c, g, or t
  misc_feature (289)..(289): n is a, c, g, or t
  misc_feature (292)..(292): n is a, c, g, or t
  misc_feature (299)..(299): n is a, c, g, or t
  misc_feature (315)..(316): n is a, c, g, or t
  misc_feature (425)..(425): n is a, c, g, or t
  misc_feature (453)..(453): n is a, c, g, or t
  misc_feature (546)..(546): n is a, c, g, or t
tttttatctaaataagattctaatangaatggaggctatggacgccaccttccacctgggctgaggacgttctcttctcnnncttnagctccccngagtncntcntggctcggncttgggtcaagctcttggcnccnatgtnctggcntgngtgtggnctnnnnnncntnntttcctttcnccctttttttctttcggggcgtggggtgcgctgcggctcgcggggggtttggcgggttcnggtttgctggggcngtccccccgctgnggttgttggtgttttgggtgnggntttgctnttttgccgggcgcggnngcgcgggggggctggttcggggccgttcccctccttcgggcggcttttggggctttttttgctggcttctctctgggccgcgtcggttttcttggggcctttggccttntttgtgcctcttcgggcgcttttttctngggggccgctgccctcggttccgcggccctgtggtttgcccggggtcgcggctttcgcgctgcttttgttttttggtgggcgcttggctgcgntg

SEQ ID NO: 611582 - DNA, 946 bp, Homo sapiens
aaggaggatttgattaaacgatcagtgaagacctgagagactcggggatgagtaacgacgctctggtgagagtgattcgttgtggagagcaactatttgtaaactggcggtcgcaaaatttgtcggcgtccgggcaatcattgcaccgctggcgcccctcgctcgtcggggaaaagattgctcattgttggggcaggccgcgttagagataggaggtgtcacccgagggatgtaaaaaaggaatgtgcgccggtgtcccgtctgggagcgccacgcgcgccagtgttctgtggggaagaccgggaagcgttcctaacttagtcggagataggggacaaaattgtccccctttggattttcgacccctgttgggttgttcgtaaaaaaaactacagcgtgtttaggggaaccaccaagaacaaagtggggccacacaccgaaacacaccggggccggtgggattagtgccaatgtgaaacccgctcgcccgattaacatagggagaatcataagtacctcggcgacactcatggcgtcgagcagcgcgcactgtgccccaaaataacccctggttccccgctggtttgttgggccccctgactgccctctaagacctattcggggggatattcgccgatgacggagatgtttgggccctagacaaaatgactggttatgcccgcgaggacctctcccccctatatgtccacacattttaagaagagcgatcttgagaagaagaacaagtggggatagtactcacggatacaaaatataaaaaaaatatctgtgggagaatgccaaaacacataaaaggtttgccagcgatgagtcgtttgttaggatggctctgctgaattcgagtccggggaggtttagtgttacaaacatatgtattttacaccagggaaaaaaaattttcaaaaaaagttcggaccacaaaaca

SEQ ID NO: 611583 - DNA, 468 bp, Homo sapiens
tgagagccattagcaggaagaaggatttgtgctgagtggtcatacctgcagaaggtccatgagtggttagcacgtgtcccccaaagttcatgtgctggaaatataatccccagtgcagcagtgttgagaggtggagcccttaagaggtgatggggtccagaggactctactctcatgaatggattagtgtcattatcaggagagtgggtttgtaataaaaacaagctcagacttctacttaagtgaaacggtgacccttccaccctttgccctgggatgaacacagcgatgaaggccgttgtcacatgccggcccctcaagcttggacttttccagcctccagaactttaaaaaataaatttctgcttattatacatcatccagtctcaggtactctgttatagcagcacaatagcgctgaagacaatccatgtacctcaaagcctgttcctggaattatcaaaagcc

SEQ ID NO: 611584 - DNA, 444 bp, Homo sapiens
cctggctgggttaaaccggagccagttctccaatcaacaggggctgtaggaacatgcacacaaaattgagatcctgatggaagccacggaaggcaaccgtggcgtcttcagcgccatagtgtccgatgaggcgcttaccccatgggtaccgctgtgcccagcgactgatgtcgtagacgcgccgcgcgatgaccatccaattgtcaccgggctggtcgtgcgcgcggatttgctcccagcagaaggtgggcagcggcgcccccgaatgcgcggatccctcccgcggtcccggctccccgacgccgcccatgctgcacgcacgagtcatggggatcccaggcggtggccgaggtccgagcaagaccccgagggaagcgaagagcgctcccgggcaccgcctccgccgccgcccgctgcaccggccccgccctaccgccgcggccg

SEQ ID NO: 611585 - DNA, 190 bp, Homo sapiens
gtgcagagagaatggccagcaggaggcggggaccggggcaaggtggcagccaccaagcaggcccaacgtgttcttccaacgtcttttccatattgacaagccagatacaagagttcaaagaagccttcaactctatcgaccagaatcttgatgcatcatctgcaagcaaacctcaggagactactccact

SEQ ID NO: 611586 - DNA, 138 bp, Homo sapiens
ccgcgtacgggcatagctgtcctgagtacctcgtgatcctgaatagtcaagaataagctcctcggaatcctggctcactcatttacaccaagccacccaactatctataaacctagccatggacatccccttatagag

SEQ ID NO: 611587 - DNA, 248 bp, Homo sapiens
  misc_feature (37)..(37): n is a, c, g, or t
  misc_feature (76)..(76): n is a, c, g, or t
  misc_feature (133)..(133): n is a, c, g, or t
  misc_feature (163)..(163): n is a, c, g, or t
  misc_feature (212)..(212): n is a, c, g, or t
  misc_feature (232)..(232): n is a, c, g, or t
ccaggaagcccagggaaggctgtgcagggacgtgctncatctacccatgtgtgatgctgacaccagcgggcctggnagttcgtggaaaggaggggagccttaccaagactcctgcaaaaacccttgggacctnctccacgtggttgccgtctactggcccctncttcaggctgtgcttacctgtgacagcagctcgtccccaccccatgggncctcatgaataaatggcttncttgccggcctttcca

SEQ ID NO: 611588 - DNA, 447 bp, Homo sapiens
cctctgtatactggaagcttcatctctctcaaataatgggcttctgagatcgcatagagtgaaatggaagtcataggacgaagtggtggcatttagttgctatataatgataatgttgttgtgacttttctaaggaagaacaaataattctcccatgtactactagaatatggaaatgattcctttctattcacggcaatttatgtcgaatgtattgataaggaattttttgagagagatgaaggcttccagtattacagttctttgactactctactagctgatgactttaatgctattttgtcgcccaacgaaagggtgctcagctaatttcaattacatctacctgaactcgaaggtagagctcaattatatcgacccttacggagagattaattagattacgtgttgtgtgcgactccccattgtaaaccataacaccacaca

SEQ ID NO: 611589 - DNA, 345 bp, Homo sapiens
  misc_feature (101)..(101): n is a, c, g, or t
  misc_feature (241)..(241): n is a, c, g, or t
  misc_feature (293)..(293): n is a, c, g, or t
  misc_feature (325)..(325): n is a, c, g, or t
actcaggggacacaaaggttctctgaaaactaaggaaaataggtagggtgtggtggctcatgcctgtaatccttgtattttgggatgccaaggcgggcggntcacctgaggtcaggagtttgaaccatcctaggcaacaccgtgagaccccgtctctaccaaaataacaaatattagccagggacagtggcgcacgtctgtggtgccagctactcaggaggctgtggcaggaggatttttnagcctgggaggcagaggttgcagtgagctgagatcgttgcccctgaactttnagcctgggtgacacagtgagacaactcctggnctcaagcaatcttccaactt

SEQ ID NO: 611590 - DNA, 159 bp, Homo sapiens
aggattgtcaatgatgggtgaagcatattgcgtttaaacaaatccccgaaaaatacattggtatatggacatcactgagatccaagagtgaccacatccctgctcatctcacctatgggaagctgctagctctaacagatgagtaaccgacttccttgg

SEQ ID NO: 611591 - DNA, 743 bp, Homo sapiens
cgccccggcgcgcggacctgcagccatggcagtcacgctgcccaggcagcccgcaggaagggagcgcgtctctgtcctgtttgactgtggagcgggagcctacactgccgagctcgccaggtcttagcctcctctacttatggtcccagaatgcccctccccatcctctgctgtgtgaagttgccctggcttgtggaacccttggaggtcgcttcctgcgaggggtggatccgggaggaagatagcaggactggagcagagaaaattgacccatgaggtggccgccttcctgtcagaagctacgtagagtagcagctgcgagatcgggctgctggtgggcggatctgattactgtgaagatcgctgagcagctgggtgacgggtgatgaagtcattgagaagtttgattatgtgtttgccgagaacgggacggggcagtcatctgcatcggacggacgtgctctccgaatgcgagaaccatccaggaaccacactggggggatgtgagctgtcgtgcagcgacattgaattcacactttctgccattcagctaacaatgcgtgcctgactacaggactggcccaacgaaggcagctggaaacccttcatcgaagttcctggcaattggcatggcttgaacaatctcggcccaagtcgaggccgagattcgtgtcaccctgggcaggaacagggatccgagttccgtccgaaactgggacacgagatgagaacatcggggccaa

SEQ ID NO: 611592 - DNA, 351 bp, Homo sapiens
  misc_feature (42)..(42): n is a, c, g, or t
  misc_feature (186)..(186): n is a, c, g, or t
  misc_feature (288)..(288): n is a, c, g, or t
gctcgacgcccgagcacggtcgtacttgcccggatgtgcgtngtaggccgtcttgatgtcttcgccgaccagcttcttgatcgaggcgacgacgtcgaatgatcttcgccctggaagtcgaagggctccttggcggcgtgttcggccaggtcgatgatggcgtcgatcaccggctgcatgcgacgntgggcgaacatcagcgccttcagcatggtctcttccgacagctccttggcttcggattcgaccatcatcagggcgtcctgggtgccggcgaccaccaggtcnaggtccgaggtcgggatcaggtcgatggccgggttcaggaccatttcaccgtcgatcatgtcg

SEQ ID NO: 611593 - DNA, 321 bp, Homo sapiens
ccagtgaatcgagctcggtacctatgtatagcacattcatcagggtaactattgtttcacaacaataaatgcgctgggtttatcgaatgtgacatagcctttttcgtcgtatccattcagggtaacggcattccggccggaccattcccggtcactcaacagacggtagttccagcacatatccttcgctgtttccagagcatgggtcaaccggaacaagtcgttctgctcggacaactctccggtacaggaatgccagaggtaattcaggttactggccagcctcgcgttgacgcctcgctggcgggcctgtttcagcag

SEQ ID NO: 611594 - DNA, 886 bp, Homo sapiens
agtacatggagctccatagagacagcgccggggcagagtgaagagcgcggtacgggcacatggtggcgactctgtgcctggctgaggaaaaataagcgtaacacatgggcaagaggagatcctaaggaagccgaggaggcagaagtgtcatcatatgcattgtttgtgcaaacttgtcgggaggagcataagaagaagcggccagtatgctatcagtgcaagcttctcagtagtttttctaagtagagtgctcagagaggtgggaaggatgtatgtctgatatgagagaagaggaaaatatgaagatatggcgaaaggcggacaagggtccgttatcgaaagagaagagtgaatagacctatatccgctcccaacaggggagacaacaagagagaagttcaaggatcccaatgcagccatagaggcctccttcaggccttctgtccgtcttctgctctgagtatcggcccgaaatagatcgaaaggagagacatcctggaccggtccataggtgatgtggcgaagaaacgtgggagagatgtggaataactagtgttgtagatgacaagcagacttatgaatagagggtggcgaagctgaaggagaagatcacgaaagaggatattgctgcatatcgagctgagaggaagagccgtgactgcagctagaacaagggaggtgtccaaggcgtgaaacagggccatgacaagccgctgaaagaccacgaggcaacaatcgcagaaccgggccagatgcacgggaatcaacaggggacagtggggcgacccggatgccggagcctgccaagcgcgtccacagaggggacgactcagcgggccgacacatctgcgcagcatgaaacagagggaaccaaggtaccgagaac

SEQ ID NO: 611595 - DNA, 1396 bp, Homo sapiens
  misc_feature (675)..(675): n is a, c, g, or t
gcgcactctttgtctggcgataatttagagagacactctttaatcatgtgggggcgaccattagtgttgttgtgaacacgtggaaccccacatgtggggagaagagattatttttcccactggttgttagttcgtggggttgaatacagacacgaacacacagacagtgccaaaacgggttttgtgggacaccagatagaccgttctccgtgttgtgatagagacgggaaacaacgtgggccacacggtgttttctcgggttatttccaggggttcaagatgaccaccaaagagcttgtgattttgtggccccctatcgaaaacaaccgttaaagtttttccagtgagccccccactttggtgtttgccaagatcacaacgagccgatgggcaataatacacccgggaattatttgggggggaacaccccaccattggagggcggaatatgttgtgtttcccccgcccccctttgcctttggtcggcctcgtataaaaggccacgcacgagaaactgataggccggcgaattgcccccctgggagaaagcaacccccccaagcaattcatcaaaccccacgggctcttgttgccgggggggcacacaggcactgggggagagcccacaaattgcacagataaaggcgccacagaaaaggggccaacccggaaagngcacacagagatctttgttcccccgggctctgggagagggaacacagccgttttccacaccgcacattgtcctcgccctctggggcgttccacaggccccctctcaccttgaagcgccctctcacaggggggagggcccccccccacaagagtgtgctctgttctctgtgtctcaagagacacagagctctgtgtccccacacccccacagggtgggcttatactggcccactattgtcacgggaatattgtgtgccttctgtggccttgtggcacacgccacactggagatcacccccacggtctccacagccaagaacacatggccccccccataagctcacgcaaagcctccctcttgtgctaatgtggaggctcaccacgccttcacacacagtggacacacccgctggttcttgggttgcctcggggttgaatcctcccctccctggcgctggtgggctcgttcttctggagaaagcactccctctgtccgcctgccacacgggcacagccccacgcccgccgtccgttccacggcgtcacacccaccacagctaagtgagatgcacagaacagtgaacgctgggggaaagggggcctgagagcccccgtggctgggttttgagacacactgtatacggttttttcgagcttaggcccctttggagggagaatccaataaataacccaaccccccactacccaaaaaaaataaaaa

SEQ ID NO: 611596 - DNA, 3502 bp, Homo sapiens
cgggggcctggccgcgcgctcccctcccgcaggcgccacctcggacatccccgggattgctacttctctgccaacttcgccaactcgccagcacttggagaggcccggctcccctcccggcgccctctgaccgcccccgccccgcggcgctctccgaccaccgcctctcggatgaccaggttccaggggagctgagcgagtcgcctcccccgcccagcttcagccctggctgcagctgcagcgcgagccatgcgcccccagtgcaccccggcccaccgccccggggccattctgctgaccgcccagccccgagccccgacagtggcaagttgcggctactgcagttgcaagctccggccaacccggaggagccccacggggaaggcagtcgtgcgccccccgcccccgggcgccccgcagcagccgggcgttcactcatcctccctcccccaccgtccctcccttttctcctcaagtcctgaagttgagtttgagaggcgacacggcggcggcgccgcgctgctcccgctcctctgcctccccatggatatgcactgcaaagcagaccccttctccgcgatgcaccggcacgggggtgtgaaccagctcgggggggtgtttgtgaacggccggcccctacccgacgtggtgaggcagcgcatcgtggagctggcccaccagggtgtgcggccctgtgacatctcccggcagctgcgggtcagccacggctgtgtcagcaaaatcctgggcaggtactacgagaccggcagcatcaagccgggtgtgatcggtggctccaagcccaaagtggcgacgcccaaagtggtggacaagattgctgaatacaaacgacagaacccgactatgttcgcctgggagattcgagaccggctcctggccgagggcatctgtgacaatgacacagtgcccagcgtctcttccatcaacagaatcatccggaccaaagttcagcagcctttccacccaacgccggatggggctgggacaggagtgaccgcccctggccacaccattgttcccagcacggcctcccctcctgtttccagcgcctccaatgacccagtgggatcctactccatcaatgggatcctggggattcctcgctccaatggtgagaagaggaaacgtgatgaagatgtgtctgagggctcagtccccaatggagattcccagagtggtgtggacagtttgcggaagcacttgcgagctgacaccttcacccagcagcagctggaagctttggatcgggtctttgagcgtccttcctaccctgacgtcttccaggcatcagagcacatcaaatcagaacaggggaacgagtactccctcccagccctgacccctgggcttgatgaagtcaagtcgagtctatctgcatccaccaaccctgagctgggcagcaacgtgtcaggcacacagacataccccgttgtgactggtcgtgacatggcgagcaccactctgcctggttacccccctcacgtgccccccactggccagggaagctaccccacctccaccctggcaggaatggtgcctgggagcgagttctccggcaacccgtacagccacccccagtacacggcctacaacgaggcttggagattcagcaaccccgccttactaagtgaggctgcagttggtccctcatcctccctcatgagcaagccggggaggaagcttgcagaagtgcccccttgtgtgcaacccacttccccttattattatagtgccgccccccggtccgcccctgccgctcgtgccgctgcctatgaccgccactagttaccgcggggaccacatcaagcttcaggccgacagcttcggcctccacatcgtccccgtctgaccccaccccggaggagggaggaccgacgcgacgcatgcctcccggccaccgccccagcctcaccccatcccacgacccccgcaacccttcacatcacccccctcgaaggtcggacaggacgggtggagccgcggggcgggaccctcaggcccgggcccaccgcccccagccccgcctgccgcccctccccgcctgcctggactgcgcggcgccgtgagggggattcggcccagctcgtcccggcctccaccaagccagccccgaagcccgccagccaccctgccgtactcgggcgcgacctgctggtgcgcgccggatgtttctgtgacacacaatcagcgcggaccgcagcgcggcccagccccgggcacccgcctcggacgctcgggcgccaggagcttcgctggaggggctgggccaaggagattaagaagaaaacgactttctgcaggaggaagagcccgctgccgaatccctgggaaaaattcttttcccccagtgccagccggactgccctcgccttccgggtgtgccctgtcccagaagatggaatgggggtgtgggggtccggctctaggaacgggctttgggggcgtcaggtctttccaaggttgggacccaaggatcggggggcccagcagcccgcaccgatcgagccggactctcggctcttcactgctcctcctggcctgcctagttccccagggcccggcacctcctgctgcgagacccggctctcagccctgccttgcccctacctcagcgtctcttccacctgctggcctcccagtttcccctcctgccagtccttcgcctgtcccttgacgccctgcatcctcctccctgactcgcagccccatcggacgctctcccgggaccgccgcaggaccagtttccatagactgcggactggggtcttcctccagcagttacttgatgccccctcccccgacacagactctcaatctgccggtggtaagaaccggttctgagctggcgtctgagctgctgcggggtggaagtggggggctgcccactccactcctcccatcccctcccagcctcctcctccggcaggaactgaacagaaccacaaaaagtctacatttatttaatatgatggtctttgcaaaaaggaacaaaacaacacaaaagcccaccaggctgctgctttgtggaaagacggtgtgtgtcgtgtgaaggcgaaacccggtgtacataacccctccccctccgccccgccccgcccggccccgtagagtccctgtcgcccgccggccctgcctgtagatacgccccgctgtctgtgctgtgagagtcgccgctcgctgggggggaagggggggacacagctacacgcccattaaagcacagcacgtcctgggggaggggggcattttttatgttacaaaaaaaaattacgaagaaagaatctcatttgcaaaatagcgaacatggtctgtgactcctctggcctgtttgttggctctttctctgtaattccgtgttttcgctttttcctccctgcccctctctccctctgcccctctctcctctccgcttctctccccctctgtctctgtctctctccgtctctgtcgctcttgtctgtctgtctctgctctttctcgc

SEQ ID NO: 611597 - DNA, 984 bp, Homo sapiens
  misc_feature (801)..(801): n is a, c, g, or t
cgggggcctggccgcgcgctcccctcccgcaggcgccacctcggacatccccgggattgctacttctctgccaacttcgccaactcgccagcacttggagaggcccggctcccctcccggcgccctctgaccgcccccgccccgcggcgctctccgaccaccgcctctcggatgaccaggttccaggggagctgagcgagtcgcctcccccgcccagcttcagccctggctgcagctgcagcgcgagccatgcgcccccagtgcaccccggcccaccgccccggggccattctgctgaccgcccagccccgagccccgacagtggcaagttgcggctactgcagttgcaagctccggccaacccggaggagccccacggggaaggcagtcgtgcgccccccgcccccgggcgccccgcagcagccgggcgttcactcatcctccctcccccaccgtccctcccttttctcctcaagtcctgaagttgagtttgagaggcgacacggcggcggcgccgcgctgctcccgctcctctgcctccccatggatatgcactgcaaagcagaccccttctccgcgatgcaccgttgtcaagacacgatggtcatctttccctgcctctgcctgggggatgctctaaaaacaaagaggggctccgagaagaaatcgaagtcagggagagagccagcagcgcagccttccaggtgggcccccggcagagtgcagctctgctctcagctctggaggctccttgcctagactgccgactccccattgaggatcacgcagccagcaacctgnccagggggtcagcaaagagcaaaaaatgagggggaaagaacaaaaggaaagcaaatgccaaagctgaggagaaaggaaaagagaaatccaaacacgggaaaggaaattaaagaaagaaagttgacatgatgttacagaagaaaagggagaagggagaaaaaaatagagaaaagaaggaattat

SEQ ID NO: 611598 - DNA, 174 bp, Homo sapiens
ctcaaaagaatgaaaagaaaatagatgagaataagccagacgggtctcacccagctgcgttattcctacttcttttagccagcagagtgggataaagccgtctaagcttcaggaaagcctagtacactgcacatcttttttttggagatggagtctcactcggtcgcccaagct

SEQ ID NO: 611599 - DNA, 1193 bp, Homo sapiens
agaactgcaagtggagcaccaccaggccccttccttggactatcccgtcctgggcaacccaagcgccgcatcctgatcgtggtccctgagatcttcctgcccatagaggacgactgtggggactatctggtgatgcggaaaacctcttcatccaattctgtgacaacatatgaaacctgccagacctacgaacgccccatcgccttcacctccaggtcaaagaagctgtggattcagttcaagtccaatgaagggaacagcgctagagggttccaggtcccatacgtgacatatgatgaggactaccaggaactcattgaagacatagttcgagatggcaggctctatgcatctgagaaccatcaggaaatacttaaggataagaaacttatcaaggctctgtttgatgtcctggcccatccccagaactatttcaagtacacagcccaggagtcccgagagatgtttccaagatcgttcatccgattgctacgttccaaagtgtccaggtttttgagaccttacaaatgactcagcccacgtgccactcaatacaaatgttctgctatagggttggtgggacagagctgtcttccttctgcatgtcagcacagtcgggtattgctgcctcccgtatcagtgactcattagagttcaatttttatagataatacagatattttggtaaattgaacttggtttttctttcccagcatcgtggatgtagactgagaatggctttgagtggcatcagcttctcactgctgtgggcggatgtcttggatagatcaagggctggctgagctggactttggtcagcctaggtgagactcacctgtccttctggggtcttactcctcctcaaggagtctgtagtggaaaggaggccacagaataagctgcttattctgaaacttcagcttcctctagcccggccctctctaagggagccctctgcactcgtgtgcaggctctgaccaggcagaacaggcaagaggggagggaaggagacccctgcaggctccctccacccaccttgagacctgggaggactcagtttctccacagccttctccagcctgtgtgatacaagtttgatcccaggaacttgagttctaagcagtgctcgtgaaaaaaaaaagcagaaagaattagaaataaataaaaactaagcacttctggagacataaaaa

SEQ ID NO: 611600 - DNA, 969 bp, Homo sapiens
tatcaaaaagtgaaagagtgagtttggaagcaactaattcataagaatgcaaaacatgttctttattccaacagaggactaccaggaactcattgaagacatagttcgagatggcaggctctatgcatctgagaaccatcaggaaatacttaaggataagaaacttatcaaggctctgtttgatgtcctggcccatccccagaactatttcaagtacacagcccaggagtcccgagagatgtttccaagatcgttcatccgattgctacgttccaaagtgtccaggtttttgagaccttacaaatgactcagcccacgtgccactcaatacaaatgttctgctatagggttggtgggacagagctgtcttccttctgcatgtcagcacagtcgggtattgctgcctcccgtatcagtgactcattagagttcaatttttatagataatacagatattttggtaaattgaacttggtttttctttcccagcatcgtggatgtagactgagaatggctttgagtggcatcagcttctcactgctgtgggcggatgtcttggatagatcaagggctggctgagctggactttggtcagcctaggtgagactcacctgtccttctggggtcttactcctcctcaaggagtctgtagtggaaaggaggccacagaataagctgcttattctgaaacttcagcttcctctagcccggccctctctaagggagccctctgcactcgtgtgcaggctctgaccaggcagaacaggcaagaggggagggaaggagacccctgcaggctccctccacccaccttgagacctgggaggactcagtttctccacagccttctccagcctgtgtgatacaagtttgatcccaggaacttgagttctaagcagtgctcgtgaaaaaaaaaagcagaaagaattagaaataaataaaaactaagcacttctggagacataaaaa

SEQ ID NO: 611601 - DNA, 396 bp, Homo sapiens
gtttctttctgaagatgtcaccacgatcaggacaagtgtaacctttaagctaaatgaaggcaagtgtagtttgaaaaatgctgagctgtttcccgagggtctgcgaccagcactactaggtatggaatcagatggttggtgtagggagcttgcctgcatgtgggaaggggcctgcagccagccgagctggaggtccatgggggccaggggctgtccagccgatccaagcacactgcagatggaactgaaccatccccaacttacagggactcagtcccaagaggaagaagagcataacctagcatgctgtatagttctggggtcacacttgcggggcttgcatatgcatggtatagttggcgagctatagggatcctctagttcgactggaacacc

SEQ ID NO: 611602 - DNA, 224 bp, Homo sapiens
aggctcaccgccgtgcggggactccacataaagtcgggacagatattcacaccagtgtgccctctgaatgtatgcacctgaaatgtgaatctgttcatagttttggaatttgctcgtatactttcagacttgctctactcacacctgatgtcaacttaaagccaaagtgtaggcccctggctgccgttggctctcccggatgaggtagctcccctcagccacaa

SEQ ID NO: 611603 - DNA, 201 bp, Homo sapiens
tttttttttttccccaaatggaaaaaaaaaccctggtggggtcccgaaggcttcccaaaccaactgttgggttttttatgtccctgtgggccagtcccccccccggggggaaactgtttgcggggcccatatgtatccctttaaagctaaaggaaacaggggccccccccccttatcctaataaaacccgtgttttcggga

SEQ ID NO: 611604 - DNA, 2229 bp, Homo sapiens
gtttctttctgaagatgtcaccacgatcaggacaagtgtaacctttaagctaaatgaaggcaagtgtagtttgaaaaatgctgagctgtttcccgagggtctgcgaccagcactaccagagaagcacagctcagtaaaagagagcttccgctacgtaaaccttacatgcagctctggcaagcaagtcccaggagcccctggccgaccaagcacccctaaggaaatgtttatcactgttgagtttgagcttgaaactaaccaaaaggaggtgacagcttcttgtgacctgagctgcatcgtaaagcgaaccgagaagcggctccgtaaagccatccgcatgctcagaaaggccgtccacagggagcagtttcacctccagctctcaggcatgaacctcgacgtggctaaaaagcctcccagaacatctgaacgccaggcagagtcctgtggagtgggccagggtcatgcagaaaaccaatgtgtcagttgcagggctgggacctattatgatggagcacgagaacgctgcattttatgtccaaatggaaccttccaaaatgaggaaggacaaatgacttgtgaaccatgcccaagaccaggaaattctggggccctgaagaccccagaagcttggaatatgtctgaatgtggaggtctgtgtcaacctggtgaatattctgcagatggctttgcaccttgccagctctgtgccctgggcacgttccagcctgaagctggtcgaacttcctgcttcccctgtggaggaggccttgccaccaaacatcagggagctacttcctttcaggactgtgaaaccagagttcaatgttcacctggacatttctacaacaccaccactcaccgatgtattcgttgcccagtgggaacataccagcctgaatttggaaaaaataattgtgtttcttgcccaggaaatactacgactgactttgatggctccacaaacataacccagtgtaaaaacagaagatgtggaggggagctgggagatttcactgggtacattgaatccccaaactacccaggcaattacccagccaacaccgagtgtacgtggaccatcaacccaccccccaagcgccgcatcctgatcgtggtccctgagatcttcctgcccatagaggacgactgtggggactatctggtgatgcggaaaacctcttcatccaattctgtgacaacatatgaaacctgccagacctacgaacgccccatcgccttcacctccaggtcaaagaagctgtggattcagttcaagtccaatgaagggaacagcgctagagggttccaggtcccatacgtgacatatgatgaggactaccaggaactcattgaagacatagttcgagatggcaggctctatgcatctgagaaccatcaggaaatacttaaggataagaaacttatcaaggctctgtttgatgtcctggcccatccccagaactatttcaagtacacagcccaggagtcccgagagatgtttccaagatcgttcatccgattgctacgttccaaagtgtccaggtttttgagaccttacaaatgactcagcccacgtgccactcaatacaaatgttctgctatagggttggtgggacagagctgtcttccttctgcatgtcagcacagtcgggtattgctgcctcccgtatcagtgactcattagagttcaatttttatagataatacagatattttggtaaattgaacttggtttttctttcccagcatcgtggatgtagactgagaatggctttgagtggcatcagcttctcactgctgtgggcggatgtcttggatagatcaagggctggctgagctggactttggtcagcctaggtgagactcacctgtccttctggggtcttactcctcctcaaggagtctgtagtggaaaggaggccacagaataagctgcttattctgaaacttcagcttcctctagcccggccctctctaagggagccctctgcactcgtgtgcaggctctgaccaggcagaacaggcaagaggggagggaaggagacccctgcaggctccctccacccaccttgagacctgggaggactcagtttctccacagccttctccagcctgtgtgatacaagtttgatcccaggaacttgagttctaagcagtgctcgtgaaaaaaaaaagcagaaagaattagaaataaataaaaactaagcacttctggagacataaaaa

SEQ ID NO: 611605 - DNA, 1314 bp, Homo sapiens
gtttctttctgaagatgtcaccacgatcaggacaagtgtaacctttaagctaaatgaaggcaagtgtagtttgaaaaatgctgagctgtttcccgagggtctgcgaccagcactaccagagaagcacagctcagtaaaagagagcttccgctacgtaaaccttacatgcagctctggcaagcaagtcccaggagcccctggccgaccaagcacccctaaggaaatgtttatcactgttgagtttgagcttgaaactaaccaaaaggaggtgacagcttcttgtgacctgagctgcatcgtaaagcgaaccgagaagcggctccgtaaagccatccgcatgctcagaaaggccgtccacagggagcagtttcacctccagctctcaggcatgaacctcgacgtggctaaaaagcctcccagaacatctgaacgccaggcagagtcctgtggagtgggccagggtcatgcagaaaaccaatgtgtcagttgcagggctgggacctattatgatggagcacgagaacgctgcattttatgtccaaatggaaccttccaaaatgaggaaggacaaatgacttgtgaaccatgcccaagatcgttcatccgattgctacgttccaaagtgtccaggtttttgagaccttacaaatgactcagcccacgtgccactcaatacaaatgttctgctatagggttggtgggacagagctgtcttccttctgcatgtcagcacagtcgggtattgctgcctcccgtatcagtgactcattagagttcaatttttatagataatacagatattttggtaaattgaacttggtttttctttcccagcatcgtggatgtagactgagaatggctttgagtggcatcagcttctcactgctgtgggcggatgtcttggatagatcaagggctggctgagctggactttggtcagcctaggtgagactcacctgtccttctggggtcttactcctcctcaaggagtctgtagtggaaaggaggccacagaataagctgcttattctgaaacttcagcttcctctagcccggccctctctaagggagccctctgcactcgtgtgcaggctctgaccaggcagaacaggcaagaggggagggaaggagacccctgcaggctccctccacccaccttgagacctgggaggactcagtttctccacagccttctccagcctgtgtgatacaagtttgatcccaggaacttgagttctaagcagtgctcgtgaaaaaaaaaagcagaaagaattagaaataaataaaaactaagcacttctggagacataaaaa

SEQ ID NO: 611606 - DNA, 272 bp, Homo sapiens
ggaatctgcactcaactgcccacctgtctgtcagctatctttgactaggtatcttgagcttggttctgtgctctttccttgtgtactgacgaccagggccagctgatctagagcgctaattagaggctagagcgactgaaatggctgacaggagatgacactggggtccttccatctctgttgcccactctcttctgtcttcccatgggacgcgccactgggatccctctgccctgacctcctgaatacaagctgactgtcattgactgtga

SEQ ID NO: 611607 - DNA, 325 bp, Homo sapiens
ggggggggggggggggggggccccccccccgggtgggaaaaaaaaaaaaaagggggccccctttttttccttttaaagggggggttttttttttttgcccccaaacctttttgtccccccccggtttttttgggtttttttttgcccccccccccgttttgggccgggggggttggggggtttttttttaaaggggccctttttttaaccccgttttaaaaaaggcccccctttgggggttttccccccccttgggggggggcgggattggggggtttttttttttttttcccctttttttttttttacccccggttttgtgtga

SEQ ID NO: 611608 - DNA, 1559 bp, Homo sapiens
  misc_feature (1368)..(1369): n is a, c, g, or t
  misc_feature (1375)..(1375): n is a, c, g, or t
  misc_feature (1408)..(1408): n is a, c, g, or t
  misc_feature (1451)..(1451): n is a, c, g, or t
  misc_feature (1460)..(1460): n is a, c, g, or t
  misc_feature (1472)..(1472): n is a, c, g, or t
  misc_feature (1479)..(1480): n is a, c, g, or t
  misc_feature (1495)..(1495): n is a, c, g, or t
  misc_feature (1498)..(1498): n is a, c, g, or t
  misc_feature (1508)..(1508): n is a, c, g, or t
  misc_feature (1518)..(1518): n is a, c, g, or t
  misc_feature (1525)..(1525): n is a, c, g, or t
  misc_feature (1529)..(1529): n is a, c, g, or t
  misc_feature (1534)..(1534): n is a, c, g, or t
  misc_feature (1539)..(1539): n is a, c, g, or t
  misc_feature (1543)..(1543): n is a, c, g, or t
  misc_feature (1550)..(1550): n is a, c, g, or t
gtttctttctgaagatgtcaccacgatcaggacaagtgtaacctttaagctaaatgaaggcaagtgtagtttgaaaaatgctgagctgtttcccgagggtctgcgaccagcactaccagagaagcacagctcagtaaaagagagcttccgctacgtaaaccttacatgcagctctggcaagcaagtcccaggagcccctggccgaccaagcacccctaaggaaatgtttatcactgttgagtttgagcttgaaactaaccaaaaggaggtgacagcttcttgtgacctgagctgcatcgtaaagcgaaccgagaagcggctccgtaaagccatccgcatgctcagaaaggccgtccacagggagcagtttcacctccagctctcaggcatgaacctcgacgtggctaaaaagcctcccagaacatctgaacgccaggcagagtcctgtggagtgggccagggtcatgcagaaaaccaatgtgtcagttgcagggctgggacctattatgatggagcacgagaacgctgcattttatgtccaaatggaaccttccaaaatgaggaaggacaaatgacttgtgaaccatgcccaagaccaggaaattctggggccctgaagaccccagaagcttggaatatgtctgaatgtggaggtctgtgtcaacctggtgaatattctgcagatggctttgcaccttgccagctctgtgccctgggcacgttccagcctgaagctggtcgaacttcctgcttcccctgtggaggaggccttgccaccaaacatcagggagctacttcctttcaggactgtgaaaccagagttcaatgttcacctggacatttctacaacaccaccactcaccgatgtattcgttgcccagtgggaacataccagcctgaatttggaaaaaataattgtgtttcttgcccaggaaatactacgactgactttgatggctccacaaacataacccagtgtaaaaacagaagatgtggaggggagctgggagatttcactgggtacattgaatccccaaactacccaggcaattacccagccaacaccgagtgtacgtggaccatcaacccaccccccaagcgccgcatcctgatcgtggtccctgagatcttcctgcccatagaggacgactgtggggactatctggtgatgcggaaaacctcttcatccaattctgtgacaacatatgaaacctgccagacctacgaacgccccatcgccttcacctccaggtcaaagaagctgtggattcagttcaagtccaatgaagggaacagcgctagagggttccaggtcccatacgtgacatatgatgatgcctgaaataatgtcaaacaaacacccaagannaggagntagtatctctggggtggacccaaatgcctccanatggtctgtgagagagacagagagctcattaacccaaagcacnacgggaacntctctatcggantcaggannaagcaaagacactgngantccaataaanaggggggccnactccgnaaanaacanaacanaagnggggcgncaaaaaccc

SEQ ID NO: 611609 - DNA, 1561 bp, Homo sapiens
gtttctttctgaagatgtcaccacgatcaggacaagtgtaacctttaagctaaatgaaggcaagtgtagtttgaaaaatgctgagctgtttcccgagggtctgcgaccagcactaccagagaagcacagctcagtaaaagagagcttccgctacgtaaaccttacatgcagctctggcaagcaagtcccaggagcccctggccgaccaagcacccctaaggaaatgtttatcactgttgagtttgagcttgaaactaaccaaaaggaggtgacagcttcttgtgacctgagctgcatcgtaaagcgaaccgagaagcggctccgtaaagccatccgcatgctcagaaaggccgtccacagggagcagtttcacctccagctctcaggcatgaacctcgacgtggctaaaaagcctcccagaacatctgaacgccaggcagagtcctgtggagtgggccagggtcatgcagaaaaccaatgtgtcagttgcagggctgggacctattatgatggagcacgagaacgctgcattttatgtccaaatggaaccttccaaaatgaggaaggacaaatgacttgtgaaccatgcccaagaccaggaaattctggggccctgaagaccccagaagcttggaatatgtctgaatgtggaggtctgtgtcaacctggtgaatattctgcagatggctttgcaccttgccagctctgtgccctgggcacgttccagcctgaagctggtcgaacttcctgcttcccctgtggaggaggccttgccaccaaacatcagggagctacttcctttcaggactgtgaaaccagagttcaatgttcacctggacatttctacaacaccaccactcaccgatgtattcgttgcccagtgggaacataccagcctgaatttggaaaaaataattgtgtttcttgcccaggaaatactacgactgactttgatggctccacaaacataacccagtgtaaaaacagaagatgtggaggggagctgggagatttcactgggtacattgaatccccaaactacccaggcaattacccagccaacaccgagtgtacgtggaccatcaacccaccccccaagcgccgcatcctgatcgtggtccctgagatcttcctgcccatagaggacgactgtggggactatctggtgatgcggaaaacctcttcatccaattctgtgacaacatatgaaacctgccagacctacgaacgccccatcgccttcacctccaggtcaaagaagctgtggattcagttcaagtccaatgaagggaacagcgctagagggttccaggtcccatacgtgacatatgatgataagcacagcctgcagcacatggaaagagcgtctctgctttgaacagagccaacttcggagccagctggcaaactgctgacaagcacacatgctcagaaaggcaggcaagatgaggggaaaagacattgctgactcacaagtgccaaattttaacaggcatttggggacactgacaataggaggaaaagatgttttataaaatatattaaaagtgagcataaaaaa

SEQ ID NO: 611610 - DNA, 365 bp, Homo sapiens
cttgtccccccccccaaaaaaaaaagagagagactgcattcaaaagaggaccaagactacagtgaaattaaaactgtttgctggctgggcatggtggctcacacctgtaatcccagcactttgggaggccgaggcggttggatcacctgaggtcagaagttcgagatcagcctgaccgacatagtggaaccctgtctttactaaaaatacaaaaattagctgggcatggtggcggcacctgtaatgccagctcctccagaggctgaggcaggagaattgcttgaacccagtaggtggaggttgcagtgagccacagttgcgccattgcactccagcctgggcaatgagtgaaactctgtctcaaa

SEQ ID NO: 611611 - DNA, 1535 bp, Homo sapiens
gtttctttctgaagatgtcaccacgatcaggacaagtgtaacctttaagctaaatgaaggcaagtgtagtttgaaaaatgctgagctgtttcccgagggtctgcgaccagcactaccagagaagcacagctcagtaaaagagagcttccgctacgtaaaccttacatgcagctctggcaagcaagtcccaggagcccctggccgaccaagcacccctaaggaaatgtttatcactgttgagtttgagcttgaaactaaccaaaaggaggtgacagcttcttgtgacctgagctgcatcgtaaagcgaaccgagaagcggctccgtaaagccatccgcatgctcagaaaggccgtccacagggagcagtttcacctccagctctcaggcatgaacctcgacgtggctaaaaagcctcccagaacatctgaacgccaggcagagtcctgtggagtgggccagggtcatgcagaaaaccaatgtgtcagttgcagggctgggacctattatgatggagcacgagaacgctgcattttatgtccaaatggaaccttccaaaatgaggaaggacaaatgacttgtgaaccatgcccaagaccaggaaattctggggccctgaagaccccagaagcttggaatatgtctgaatgtggaggtctgtgtcaacctggtgaatattctgcagatggctttgcaccttgccagctctgtgccctgggcacgttccagcctgaagctggtcgaacttcctgcttcccctgtggaggaggccttgccaccaaacatcagggagctacttcctttcaggactgtgaaaccagagttcaatgttcacctggacatttctacaacaccaccactcaccgatgtattcgttgcccagtgggaacataccagcctgaatttggaaaaaataattgtgtttcttgcccaggaaatactacgactgactttgatggctccacaaacataacccagtgtaaaaacagaagatgtggaggggagctgggagatttcactgggtacattgaatccccaaactacccaggcaattacccagccaacaccgagtgtacgtggaccatcaacccaccccccaagcgccgcatcctgatcgtggtccctgagatcttcctgcccatagaggacgactgtggggactatctggtgatgcggaaaacctcttcatccaattctgtgacaacatatgaaacctgccagacctacgaacgccccatcgccttcacctccaggtcaaagaagctgtggattcagttcaagtccaatgaagggaacagcgctagagggttccaggtcccatacgtgacatatgatgatcagagagaagaagaaaagcaaagaagcctcagagaagtaaccggtaaggtaggaggaaaaccaaagagcatggtgtcctggaagctcagtgaagaactggatcaaggaggaggagtgaccagccaggtcaaagctactgatgcatcaaggaggatgaagaccaagaactggccgttgggatttaacacatgagtcattg

SEQ ID NO: 611612 - DNA, 419 bp, Homo sapiens
gggtaatgagcagttagtcgagcaaactgcatatcgtcatttggcagtcagtaatggaaacaaagccatcctcattcagtgaaatatactcctgaccaattgaacgatttacgtccgcaagaaacactggctgctttaaacactttaggtatttcagctttttctgaacggatgggtttaaatctaatggatggtcaaattcatttacagacggatcaattgaatcaggcgcttagccaaatagttcagcccgaagatattttaatttgtagctatgcacttgatggccatccagatcatgaggctgtcgggaaaacagtacaagcttttgccgaagctcggaacttactatgtttgcatgtattgatctgggcatggcattgggcagagccttttgacacgcgaattaactagtccaa

SEQ ID NO: 611613 - DNA, 834 bp, Homo sapiens
ggcaggactggaagttcctggccagccacttccctaaccgcactgaccagcaatgccagtacaggtggctgagagtttgaatccagaccttgtcaaggggccatggaccaaagaggaagaccaaaaagtcatcgagctggttaagaagtatggcacaaagcagtggacactgatgccaagcacctgaagggccggctggggaagcagtgccgtgaacgctggcacaaccacctcaaccctgaggtgaagaagtcttgctggaccgaggaggaggaccgcatcatctgcgaggcccacaaggtgctgggcaaccgctgggccgagatcgccaagatggtggccgggagggccgagaccaggtcgtggagagaagatctcatcgtgagaaaatctcatacacatcaaagggaagggtggacacaggaggcttctttgaggcgagtccaaagactgcaagcccccagtgtacttgctgctggagctcgaggacaaggacggcctccagagtgcccagcccacggaaggccagggaagtcttctgaccaactggccctccgtccctcctaccataaaggaggaggaaaaccagtgaagggaggaacttgcagcaggcaccacatcgaaggaacaggagcccatcggtacagatcttggacgcagggcgaacaccagagcctggaggaattcccgaagcgtgagggacaggaaagctccccaccagaaaagaggctgcttaaaagtgggtggtggggcagtaacctcctcatcccgtgggggttctagctctcggaagcctgggattgacgagcggacctgaagtggggtgaccgagca

SEQ ID NO: 611614 - DNA, 396 bp, Homo sapiens
tatacagtgatagtgagagggcccagcatggacagcagcgatagtgagagggacagcatggacagcagtgatagtgagagggaacagtatggtcagcagtgatagtgagagggcacagcatggacagcagtgatagtgagagggcccagcatgggcagcagtgatagtgagagggcccagcatgggcagcagtgatagtgagagggcccagcataggcagcagtgatagtgagagggcccaacatgggcagcagtgatagtgagagggcccagcatgggcagcagtgatagtgagagggcacagcatggacagcagtgatagtgagagggcccagcatgggcagcagtgatagtgagagggctcagcatggacagcagtgatagtgaggtcgacgc

SEQ ID NO: 611615 - DNA, 287 bp, Homo sapiens
ttaggcggggagcatagcctgctgaggaagagggccagtctatgtggtgcacaacagctatgtggaggacagagtccacaaatgaccctagacaggcagcagggtcccgggccatccgctcctcctgagtcgcgtggtcatgggaagaagggaggtaggtcccgagtcggcgaccccgttaccttccaccgctcttacctgaagagctccccagatttgttctttaagtgggtacaggaggtgtacagagcatacagataagcaaggatacagcgctctggaaggaa

SEQ ID NO: 611616 - DNA, 268 bp, Homo sapiens
attacgcggtgggtaacaaccagtagcaattagatatctcataccaatagatgatatagcgtctacgtgaacctaatacatctattatatttatatctatatacgatctatatacataatcagacagactatatattcgactgaacagtaaatgatacaccttagtcatccacctctctcctaggaggctgccccgtaactggttttgccaatggcatatcgagatcacaaaaacatagctggtaaagtgggtacgagctcgatcgta

SEQ ID NO: 611617 - DNA, 374 bp, Homo sapiens
cgtacactttaaatccaaaagctaggaaggcttcacgcttagtgcaggaaggccatttctaacagccaagacaggctgaaagcacaggcctcttacaccatacagccaagatgttaatgcaaaggaacagttcttgccggaaattacaagtgctactccagtgaacacatgaacgataagaaagcacgacagccttattgctgatccggagaacgtttcaattatctggatagaagatcaaaccagccacaacattccccttaagccaaagactaaccaaggcaagaccctagctctcttcaattctatgagggctgagaagtgcagaagaaaaactggaagcagcaaagtaggaacatccactctgcgaaagg

SEQ ID NO: 611618 - DNA, 588 bp, Homo sapiens
  misc_feature (12)..(12): n is a, c, g, or t
  misc_feature (15)..(15): n is a, c, g, or t
  misc_feature (49)..(49): n is a, c, g, or t
  misc_feature (54)..(54): n is a, c, g, or t
  misc_feature (60)..(60): n is a, c, g, or t
  misc_feature (100)..(100): n is a, c, g, or t
  misc_feature (102)..(102): n is a, c, g, or t
agaatttttttnaanccttgggaaggtcaaaggttcaaattaacccaantattngtcccnttggcattcaaacttgggtaaaaaaaaccgggcccctttntnccaaataaaaaaagtttttcagccatgccacagagctccggcagtcatgggcccgctatagcagcagttcatagcagccatcatcacccaacagcggtgcagccccacggaggccaggtggtccagagtcatgctcatccagccccaccagttgcaccagtgcagggacagcagcaatttcagaggctgaaggtggtattcagctctttttcttgggtcaaaaaatttatctttagcaggaaatactggttgcagcttgttggttgtggtggtacaacttctaacctgagatactagctgtcgaatcacaagttttaccgtttttgttttgtgaaatttgcttatgtttcctatcttggcatcagtgcctgatccagagaagaatatactcaaatgtttgtggactgtatgaatgcatgtcggtcaaatgttatcaggattgtggggccattttaatacaaaataaaccttaaaattcaaaaaaaa

SEQ ID NO: 611619 - DNA, 1043 bp, Homo sapiens
  misc_feature (322)..(322): n is a, c, g, or t
tatttactatcagcatccgtcaggcactatttacttcattcagtccttagaacgataggtctcttagcaagtcccccttaaggcaagatcactggcgctccaattacctcacgcttgcctctgcgcatttcttcaaacgcgtataaccataatatacgtcactagttctggtgttagccctgaagactgttactcgtaacaaaaatgaaagaattgagtagtatcttgagcgtcagccattgtatcgtatcacatctgaggcgtggcatgcccgtacacctcgattcattcccgtgtatcgctcccgaggctgtcaagtacnttcaattcccttttttttgttttttttgggaaacgtgggttcctcgccctctgtgttgcgcccgaggcctgtggagctgtgcagttgtgggcggggttctcccggaatctcagctgtggcgaaaccctctcgcgaacctctcacgcggggtttttcaaagccactttctctgcgtgtgcacttcaggccctttcccgccagtatagggcgtggggatgtatacaccagggcgcgcgtatgtggacacaacacaaaacacccgcgggacatataaatattgcggtggataatttttcacagtcttagcaagacacgcggcgggttttcccaccccaagttgtttggtggccataagcgcccgggtcttctctcagagaaactctctctgttgagacccctccagaagtgttgatctccccgcccgttgcacttttggcgccctccccaaagacaagtgtcggctgttgggcagcaaataccaacgtaggggggccattgtggaacgtccacaagcgccggaacacccaatgttgggagcgcacttccatcatgggcggaacttattaaacaacgtggccccaaaacacttaaacatttgtcgtccggtgggtctccataagctcgggcacatttcaaaacgatggtatggaggaaaattttttcccgaagaggctccctctcccctctatttattttaaaaaccaaatttggggagaactca

SEQ ID NO: 611620 - DNA, 590 bp, Homo sapiens
ttaagcgatgtcagaaatctagattgtaatgtgaaggaaactttcacacatttgccactataaattttgttctttaacaaaatgctctgtggggaaatgaaacttgtcagtgagccagcttctacctgtttatgacttctcataaccttagcacctcagaaacttagcagtattgctggctaacagaatttttaatccgtgttccaatacctactaacaatcatgtctttatagaaagggacttttttgatcttgaaatttatgaattcggggcattgtaatcatagaatttactagagtgcccaatgcattaggagctgtttttgtgatttccttccacctgtattttgtgtttgccatcttagcgctggtcagactacgtggagcgatacatgaattcagatactacctcgcctgagcttcgtgaacatctagcacagaaaccagtatttctccccaggaatctacggcggatccggaagtgtcaacgtggtcgagagcagcaggaaaaggaagggaaggaaggaaacagcaagaagaccatggagaatgtggatagtctggataagctggagtgtagattcaagctg

SEQ ID NO: 611621 - DNA, 416 bp, Homo sapiens
acgacccagtcgcggaagcgagcgaccttgcgggcatgcctgcggttttccgcataggcgagccaataggcagtgccctcatcggccacatgggtgaagggacgcacgaggcgaccgctcgcgagctcggaactccagagcatccgggtcatcagcgcaagtccatgccccgccattgccgcctggccttcgcttgcctgcgagtccatgcgaatcccgccgcgcctggcatcgtccatgtcctccaccccggcactccggaaccatatcggccaccatcgatcctgcgggctgatcctccgcatgtcccgcgcctcgcggacgtccagcggcaaggggcgcccctcgagtagcgccgggctgcacatcggcgtgaaggacaccatggccagatgctcggccttcaggcccggcca

SEQ ID NO: 611622 - DNA, 517 bp, Homo sapiens
ttaagcgatgtcagaaatctagattgtaatgtgaaggaaactttcacacatttgccactataaattttgttctttaacaaaatgctctgtggggaaatgaaacttgtcagtgagccagcttctacctgtttatgacttctcataaccttagcacctcagaaacttagcagtattgctggctaacagaatttttaatccgtgttccaatacctactaacaatcatgtctttatagaaagggacttttttgatcttgaaatttatgaattcggggcattgtaatcatagaatttactagagtgcccaatgcattaggagctgtttttgtgatttccttccacctgtattttgtgtttgccatcttagcgctggtcagactacgtggagcgatacatgaattcagatactacctcgcctgagcttcgtgaacatctagcacagaaaccagtatttctccccaggtgagtgagccatgtcatctgtcagcagtccatactgtgcatgattgaggaatggag

SEQ ID NO: 611623 - DNA, 176 bp, Homo sapiens
  misc_feature (40)..(40): n is a, c, g, or t
ctgattagaggatcccgtgcagatacaacagtcagaggcnagaaagctgttgctgaaaaggtggtctatgttgggtctgatccctgccgtcctgctgactattcctgactttcatctttggccacgtcaggaggcagatgaagattatatttgtgaccgttctacccaattgactt

SEQ ID NO: 611624 - DNA, 581 bp, Homo sapiens
gcggcggagtcggtttctccatcttcccccctccccttcccccctcggagtttccctccctccctccctccctccttcccagtctgggcaccggagcctgtgaccgcttcgttagtggagaggtagctggcagtccgcttcggcgggcctgtgccccgcgccgttctcggggcctccctgctgagctcgcggctcacgctgagagggacacgcagtgacgagcggccgaagcagctttgcggttttgtagtgcatccctgagcatgagcacagaatgaagcggcgtttggatgaccaggagtcaccggtgtatgcagcccagcagcgtcggatccctggcagcacagaggcttttcctcaccagcaccgggtgcttgcccctgcccctcctgtgtatgaagcagtgtctgagaccatgcagtcagctacgggaattcagtactctgtaacacccagctaccaggtaagctggagccaaccaagggactagaatgagggaagagaaatagtggttttaggcaattataaaactttttttaatactgtgttagatattaaaaattgttgagtatgtgtaaggt

SEQ ID NO: 611625 - DNA, 3853 bp, Homo sapiens
gcggcggagtcggtttctccatcttcccccctccccttcccccctcggagtttccctccctccctccctccctccttcccagtctgggcaccggagcctgtgaccgcttcgttagtggagaggtagctggcagtccgcttcggcgggcctgtgccccgcgccgttctcggggcctccctgctgagctcgcggctcacgctgagagggacacgcagtgacgagcggccgaagcagctttgcggttttgtagcacgctgggccgggggccgggcgggagcctggtggcgggtaacgccggactcgagggttttgtagtgcatccctgagcatgagcacagaatgaagcggcgtttggatgaccaggagtcaccggtgtatgcagcccagcagcgtcggatccctggcagcacagaggcttttcctcaccagcaccgggtgcttgcccctgcccctcctgtgtatgaagcagtgtctgagaccatgcagtcagctacgggaattcagtactctgtaacacccagctaccaggtttcagccatgccacagagctccggcagtcatgggcccgctatagcagcagttcatagcagccatcatcacccaacagcggtgcagccccacggaggccaggtggtccagagtcatgctcatccagccccaccagttgcaccagtgcagggacagcagcaatttcagaggctgaaggtggaggatgcgctatcttatcttgaccaggtgaagctgcagtttggtagtcagcctcaggtctacaatgatttccttgacatcatgaaggaatttaaatctcagagcatcgacaccccaggagtgattagtcgtgtgtcccagctattcaaaggccaccccgatctgataatgggattcaacaccttcttgccccctggctacaaaattgaggtgcaaaccaatgacatggtgaatgtgacaactcctggccaggttcatcagattcccacccatggcatccagccacagcctcaaccaccaccccaacatccttcccagccttcagcccagtcagccccagctcctgcccagccagctcctcagcccccacctgccaaagtcagcaagccctcccaactgcaagcacatactccggccagtcagcagactcccccacttccaccgtatgcatccccacgttctccgccggtccagcctcacacaccagtgacaatctcgttgggaacggccccatccttgcagaacaatcaacctgtggagtttaatcatgccatcaactatgttaataagatcaagaacagatttcagggccaaccagacatctacaaagcattcctggagattttgcacacatatcagaaagagcagagaaatgccaaggaagctggaggaaactacactccagcattgacagagcaggaggtgtatgcccaggttgctcgtctctttaaaaaccaggaagatttgttgtcagagtttggacaattcctaccagatgccaacagctccgtgcttttaagcaaaacaactgctgagaaggttgattctgtgagaaatgatcatggaggcactgtcaagaagccccaactgaacaacaagccgcagaggcccagccagaatggctgccagatccgcagacatcctacaggaaccacccctccagttaagaagaaacccaaactgctcaatctgaaggattcttctatggcagatgccagcaaacatggtggtggaacagaatcgttattttttgataaggtccgaaaggctcttcggagtgcagaagcctacgaaaatttcctacgctgtcttgttatttttaaccaggaggtgatctctcgtgctgagcttgtgcaactagtctctcctttcctggggaaattccctgagttgtttaattggtttaaaaactttctgggctataaggagtctgtacatctggaaacttatccaaaggagcgagccacagagggcattgctatggagatagattatgcttcttgtaaacgattgggctccagctatcgagccttaccaaagagttaccagcagcccaagtgtacaggacggactcctctctgtaaagaggttttaaatgatacctgggtttccttcccttcgtggtctgaggactctacctttgtgagttccaagaagactcaatatgaagaacatatttatcgttgtgaagatgaacgctttgagcttgatgtagttttagagaccaatctggcaacaatccgggttctggaagcaatacagaagaagctttcccgcttgtctgctgaagaacaagccaaatttcgcttggacaacacccttgggggcacatcagaagtcatccatagaaaagcactccagaggatatatgctgataaagcagctgacatcattgatggtctgagaaagaatccctccattgctgttccaattgtccttaaaaggttgaagatgaaagaggaagaatggcgagaagctcagagaggctttaacaaagtatggcgagaacaaaatgagaaatactacttgaagtctctggaccaccaggggatcaactttaaacagaatgacaccaaggtcctgaggtctaagagcttactcaatgagattgagagtatctatgatgagaggcaagagcaggctacggaggagaatgctggtgtacctgttggcccacacctctcacttgcgtatgaagacaaacaaatactggaagatgctgctgctctgattatccaccatgtgaagaggcagacaggcattcagaaggaggacaaatataagataaaacaaatcatgcatcattttattccagatttgctctttgcccaaagaggtgatctctcagatgtggaggaagaggaagaagaagagatggatgtagatgaagccacaggggcagttaagaagcacaatggtgttgggggcagtccccctaagtccaagttactgtttagtaacacagcagctcaaaaattaagaggaatggatgaagtatacaacctcttctatgtcaacaacaactggtatatttttatgcgactgcaccagattctctgcctgaggctgctacggatttgttcccaagccgaacggcaaattgaagaagaaaaccgagagagagaatgggaacgggaagtgctgggcataaagcgagacaagagtgacagccctgccattcagctacgtctcaaagaacctatggatgttgatgtagaagattattacccagctttcctggacatggtgcggagcctgctggatggcaacatagactcatcacagtatgaagattcactgagagagatgttcaccattcatgcctacattgcctttaccatggacaaactgatccagagcattgtcagacagctgcagcatatcgtgagtgatgagatctgtgtgcaggtgactgacctttacctggcagaaaataataatggggccaccggaggccagctgaacacacagaactcaaggagccctcctggagtcaacgtatcagcggaaagctgagcagctaatgtcagatgagaattgctttaagcttatgtttattcagagccaaggccaggtccagctgactattgagcttctggacacagaagaggagaattcggatgaccctgtggaagcagagcgctggtcagactacgtggagcgatacatgaattcagatactacctcgcctgagcttcgtgaacatctagcacagaaaccagtatttctccccaggaatctacggcggatccggaagtgtcaacgtggtcgagagcagcaggaaaaggaagggaaggaaggaaacagcaagaagaccatggagaatgtggatagtctggataagctggagtgtagattcaagctg

SEQ ID NO: 611626 - DNA, 667 bp, Homo sapiens
  misc_feature (1)..(1): n is a, c, g, or t
  misc_feature (23)..(23): n is a, c, g, or t
  misc_feature (86)..(86): n is a, c, g, or t
  misc_feature (165)..(165): n is a, c, g, or t
  misc_feature (182)..(182): n is a, c, g, or t
  misc_feature (202)..(202): n is a, c, g, or t
  misc_feature (208)..(208): n is a, c, g, or t
  misc_feature (211)..(211): n is a, c, g, or t
  misc_feature (518)..(518): n is a, c, g, or t
ntgctcctctggactccccaagncaggtggcctccacccacgttctcccgtcctggggtgaggcttcctgtggcccagcccgcccnattcacctgtggatttgtgcgagatgcagcctcagaaggaacaaggccccagagggaggtcacctgggggcagctggtnccgggtcttcacccagnccacgctgggtcccctctgnaagggnaangccttttcgggtctcccaccagccactgcttcctccttggcctcggccttccacccctcgtcttccctccctcggggccctgatgcgtgcgcccccgcccggcctcggctctttactccattcacagccgtgcacgcgctcaatgccaccagggtgcgagatgccagctctggagttctcggttgttgtaggaggttgggtgttttcaaatggtaaagatgttttgagcaaataaatttgcttgatacagagatagggaggctgaggcgggtggattgtgaggtcaggagtttaagaccagcctggncaagatggtgaaaccccgtctctactaaaaatacaaaaattagcctggcatggtgacgggcacctgtaatcccagctactcaggctgaggcagagaattgcttgaacccaggtggcggatgttgcaataagccgaaatcgtgcaactac

SEQ ID NO: 611627 - DNA, 176 bp, Homo sapiens
tgtcaggtattctgcaggtgctaagcctggaccctaaccagctcttcatgctgcagccgcggagccaagaggtgtcctcccccacgaggctgccccagccctgttccatgcggcacctcgtgtcccactacctggacatcgccagcgtgcatcgccgcttccattcttcgagactc

SEQ ID NO: 611628 - DNA, 507 bp, Homo sapiens
ggccacatcattaaaaagtccaggaagtaaagtgacttcaggcatggctgcatccaggtgctcacatgaacacattaagaatctgctctgctttcccttgggttagcttccttctcaggcactctccccacatggttatacaccttctgcagtccatatttgcatctcactaccttatcatccctagcacaaagagcactgttttcctaatagttccaataagtgttcaaggcatgactcctgacctgccttaggttatctgccaactcctgagccagggagtggaaacattctcacccagaccacaggaaatgaaggtaagggaatgaggggtttcccacaaagagatgccagaaagacaaaaaaagtatgtccactatagtcttattacaagagtcatcagtagtcatcaccctcttccttcagctaaatcacatgaaaggtacagtttctgaagtggaacttaaagtttgaaagtgtaaaagatatctgtaatgttggtcagtg

SEQ ID NO: 611629 - DNA, 3564 bp, Homo sapiens
tctagaggatcgaattcgcggccgcgtgcatccctgagcatgagcacagaatgaagcggcgtttggatgaccaggagtcaccggtgtatgcagcccagcagcgtcggatccctggcagcacagaggcttttcctcaccagcaccgggtgcttgcccctgcccctcctgtgtatgaagcagtgtctgagaccatgcagtcagctacgggaattcagtactctgtaacacccagctaccaggtttcagccatgccacagagctccggcagtcatgggcccgctatagcagcagttcatagcagccatcatcacccaacagcggtgcagccccacggaggccaggtggtccagagtcatgctcatccagccccaccagttgcaccagtgcagggacagcagcaatttcagaggctgaaggtggaggatgcgctatcttatcttgaccaggtgaagctgcagtttggtagtcagcctcaggtctacaatgatttccttgacatcatgaaggaatttaaatctcagagcatcgacaccccaggagtgattagtcgtgtgtcccagctattcaaaggccaccccgatctgataatgggattcaacaccttcttgccccctggctacaaaattgaggtgcaaaccaatgacatggtgaatgtgacaactcctggccaggttcatcagattcccacccatggcatccagccacagcctcaaccaccaccccaacatccttcccagccttcagcccagtcagccccagctcctgcccagccagctcctcagcccccacctgccaaagtcagcaagccctcccaactgcaagcacatactccggccagtcagcagactcccccacttccaccgtatgcatccccacgttctccgccggtccagcctcacacaccagtgacaatctcgttgggaacggccccatccttgcagaacaatcaacctgtggagtttaatcatgccatcaactatgttaataagatcaagaacagatttcagggccaaccagacatctacaaagcattcctggagattttgcacacatatcagaaagagcagagaaatgccaaggaagctggaggaaactacactccagcattgacagagcaggaggtgtatgcccaggttgctcgtctctttaaaaaccaggaagatttgttgtcagagtttggacaattcctaccagatgccaacagctccgtgcttttaagcaaaacaactgctgagaaggttgattctgtgagaaatgatcatggaggcactgtcaagaagccccaactgaacaacaagccgcagaggcccagccagaatggctgccagatccgcagacatcctacaggaaccacccctccagttaagaagaaacccaaactgctcaatctgaaggattcttctatggcagatgccagcaaacatggtggtggaacagaatcgttattttttgataaggtccgaaaggctcttcggagtgcagaagcctacgaaaatttcctacgctgtcttgttatttttaaccaggaggtgatctctcgtgctgagcttgtgcaactagtctctcctttcctggggaaattccctgagttgtttaattggtttaaaaactttctgggctataaggagtctgtacatctggaaacttatccaaaggagcgagccacagagggcattgctatggagatagattatgcttcttgtaaacgattgggctccagctatcgagccttaccaaagagttaccagcagcccaagtgtacaggacggactcctctctgtaaagaggttttaaatgatacctgggtttccttcccttcgtggtctgaggactctacctttgtgagttccaagaagactcaatatgaagaacatatttatcgttgtgaagatgaacgctttgagcttgatgtagttttagagaccaatctggcaacaatccgggttctggaagcaatacagaagaagctttcccgcttgtctgctgaagaacaagccaaatttcgcttggacaacacccttgggggcacatcagaagtcatccatagaaaagcactccagaggatatatgctgataaagcagctgacatcattgatggtctgagaaagaatccctccattgctgttccaattgtccttaaaaggttgaagatgaaagaggaagaatggcgagaagctcagagaggctttaacaaagtatggcgagaacaaaatgagaaatactacttgaagtctctggaccaccaggggatcaactttaaacagaatgacaccaaggtcctgaggtctaagagcttactcaatgagattgagagtatctatgatgagaggcaagagcaggctacggaggagaatgctggtgtacctgttggcccacacctctcacttgcgtatgaagacaaacaaatactggaagatgctgctgctctgattatccaccatgtgaagaggcagacaggcattcagaaggaggacaaatataagataaaacaaatcatgcatcattttattccagatttgctctttgcccaaagaggtgatctctcagatgtggaggaagaggaagaagaagagatggatgtagatgaagccacaggggcagttaagaagcacaatggtgttgggggcagtccccctaagtccaagttactgtttagtaacacagcagctcaaaaattaagaggaatggatgaagtatacaacctcttctatgtcaacaacaactggtatatttttatgcgactgcaccagattctctgcctgaggctgctacggatttgttcccaagccgaacggcaaattgaagaagaaaaccgagagagagaatgggaacgggaagtgctgggcataaagcgagacaagagtgacagccctgccattcagctacgtctcaaagaacctatggatgttgatgtagaagattattacccagctttcctggacatggtgcggagcctgctggatggcaacatagactcatcacagtatgaagattcactgagagagatgttcaccattcatgcctacattgcctttaccatggacaaactgatccagagcattgtcagacagctgcagcatatcgtgagtgatgagatctgtgtgcaggtgactgacctttacctggcagaaaataataatggggccaccggaggccagctgaacacacagaactcaaggagccctcctggagtcaacgtatcagcggaaagctgagcagctaatgtcagatgagaattgctttaagcttatgtttattcagagccaaggccaggtccagctgactattgagcttctggacacagaagaggagaattcggatgaccctgtggaagcagagcgctggtcagactacgtggagcgatacatgaattcagatactacctcgcctgagcttcgtgaacatctagcacagaaaccagtatttctccccaggaatctacggcggatccggaagtgtcaacgtggtcgagagcagcaggaaaaggaagggaaggaaggaaacagcaagaagaccatggagaatgtggatagtctggataagctggagtgtagattcaagctg

SEQ ID NO: 611630 - DNA, 326 bp, Homo sapiens
  misc_feature (177)..(177): n is a, c, g, or t
caatttcaaaactcattattggtttactcagggattcaatttattcctggttcagtcttaggaggttgggtgttttcaaatggtaaagatgttttgagcaaataaatttgcttgatacagagatagggaggctgaggcgggtggattgtgaggtcaggagtttaagaccagcctggncaagatggtgaaaccccgtctctactaaaaatacaaaaattagcctggcatggtgacgggcacctgtaatcccagctactcaggctgaggcagagaattgcttgaacccaggtggcggatgttgcaataagccgaaatcgtgcaactac

SEQ ID NO: 611631 - DNA, 682 bp, Homo sapiens
gatttagatgctctacccaaaggtttggtcctgtaagagttccttgggaatgagaaaggattcgccaagatgttctggaaaagggttgtagacgaagcaagagtctttcggtttcgtgtggtctgtaaactcgtcagatcgctaagttttgcatcttagttgtgaaggattccaagaggacgaagagaagccaaattagcagagttgtaaaactcacagaggcaggttagcatgggaactaatcacctttcttttctagaaagattgtaaacactggccgggcgctgagaaatcctgtcctgtaatcccagggttattcgggaggctaggtgcgtgggctggactcacgctgagtatcaccatggccaatgtggtgaaaccccgtctctactaaaatacaaaaattagccaggtgtggtggtgggcacttgtaattccagctactcgggaggctgaggcaggagaatcgcttgaacccgggaggcagaggttgcagtgagctgagatcgtgccactgcatctccagcctgggcaacaagagtgagactccatcacaaaaaaacagaatcttataggacgaaaacacgttgtgggggacatgggcccttagaaaagtttttataaaaaccatttcgttggggccgcgcggggcccacataagggtatggagaacaatggggca

SEQ ID NO: 611632 - DNA, 2399 bp, Homo sapiens
tctagaggatcgaattcgcggccgcgtgcatccctgagcatgagcacagaatgaagcggcgtttggatgaccaggagtcaccggtgtatgcagcccagcagcgtcggatccctggcagcacagaggcttttcctcaccagcaccgggtgcttgcccctgcccctcctgtgtatgaagcagtgtctgagaccatgcagtcagctacgggaattcagtactctgtaacacccagctaccaggtttcagccatgccacagagctccggcagtcatgggcccgctatagcagcagttcatagcagccatcatcacccaacagcggtgcagccccacggaggccaggtggtccagagtcatgctcatccagccccaccagttgcaccagtgcagggacagcagcaatttcagaggctgaaggtggaggatgcgctatcttatcttgaccaggtgaagctgcagtttggtagtcagcctcaggtctacaatgatttccttgacatcatgaaggaatttaaatctcagagcatcgacaccccaggagtgattagtcgtgtgtcccagctattcaaaggccaccccgatctgataatgggattcaacaccttcttgccccctggctacaaaattgaggtgcaaaccaatgacatggtgaatgtgacaactcctggccaggttcatcagattcccacccatggcatccagccacagcctcaaccaccaccccaacatccttcccagccttcagcccagtcagccccagctcctgcccagccagctcctcagcccccacctgccaaagtcagcaagccctcccaactgcaagcacatactccggccagtcagcagactcccccacttccaccgtatgcatccccacgttctccgccggtccagcctcacacaccagtgacaatctcgttgggaacggccccatccttgcagaacaatcaacctgtggagtttaatcatgccatcaactatgttaataagatcaagaacagatttcagggccaaccagacatctacaaagcattcctggagattttgcacacatatcagaaagagcagagaaatgccaaggaagctggaggaaactacactccagcattgacagagcaggaggtgtatgcccaggttgctcgtctctttaaaaaccaggaagatttgttgtcagagtttggacaattcctaccagatgccaacagctccgtgcttttaagcaaaacaactgctgagaaggttgattctgtgagaaatgatcatggaggcactgtcaagaagccccaactgaacaacaagccgcagaggcccagccagaatggctgccagatccgcagacatcctacaggaaccacccctccagttaagaagaaacccaaactgctcaatctgaaggattcttctatggcagatgccagcaaacatggtggtggaacagaatcgttattttttgataaggtccgaaaggctcttcggagtgcagaagcctacgaaaatttcctacgctgtcttgttatttttaaccaggaggtgatctctcgtgctgagcttgtgcaactagtctctcctttcctggggaaattccctgagttgtttaattggtttaaaaactttctgggctataaggagtctgtacatctggaaacttatccaaaggagcgagccacagagggcattgctatggagatagattatgcttcttgtaaacgattgggctccagctatcgagccttaccaaagagttaccagcagcccaagtgtacaggacggactcctctctgtaaagaggttttaaatgatacctgggtttccttcccttcgtggtctgaggactctacctttgtgagttccaagaagactcaatatgaagaacatatttatcgttgtgaagatgaacgctttgagcttgatgtagttttagagaccaatctggcaacaatccgggttctggaagcaatacagaagaagctttcccgcttgtctgctgaagaacaagccaaatttcgcttggacaacacccttgggggcacatcagaagtcatccatagaaaagcactccagaggatatatgctgataaagcagctgacatcattgatggtctgagaaagaatccctccattgctgttccaattgtccttaaaaggtacatgagcaaatgtgcccttagtgctttagtgtacttcactaccggttcagtgtctcattaaataaggctctcattttcaacctggttgtcccatgagacctctctttctccccaaccctggttgttggaattcaggtgcagaatggaacttcttttgggggtcctgtgtaaccaacattagagaacaaatcttgtaagttcatggtggaaggctctgtgtgtatgtttgggggagtattttaaaatacaaaaa

SEQ ID NO: 611633 - DNA, 3788 bp, Homo sapiens
gcggcggagtcggtttctccatcttcccccctccccttcccccctcggagtttccctccctccctccctccctccttcccagtctgggcaccggagcctgtgaccgcttcgttagtggagaggtagctggcagtccgcttcggcgggcctgtgccccgcgccgttctcggggcctccctgctgagctcgcggctcacgctgagagggacacgcagtgacgagcggccgaagcagctttgcggttttgtagtgcatccctgagcatgagcacagaatgaagcggcgtttggatgaccaggagtcaccggtgtatgcagcccagcagcgtcggatccctggcagcacagaggcttttcctcaccagcaccgggtgcttgcccctgcccctcctgtgtatgaagcagtgtctgagaccatgcagtcagctacgggaattcagtactctgtaacacccagctaccaggtttcagccatgccacagagctccggcagtcatgggcccgctatagcagcagttcatagcagccatcatcacccaacagcggtgcagccccacggaggccaggtggtccagagtcatgctcatccagccccaccagttgcaccagtgcagggacagcagcaatttcagaggctgaaggtggaggatgcgctatcttatcttgaccaggtgaagctgcagtttggtagtcagcctcaggtctacaatgatttccttgacatcatgaaggaatttaaatctcagagcatcgacaccccaggagtgattagtcgtgtgtcccagctattcaaaggccaccccgatctgataatgggattcaacaccttcttgccccctggctacaaaattgaggtgcaaaccaatgacatggtgaatgtgacaactcctggccaggttcatcagattcccacccatggcatccagccacagcctcaaccaccaccccaacatccttcccagccttcagcccagtcagccccagctcctgcccagccagctcctcagcccccacctgccaaagtcagcaagccctcccaactgcaagcacatactccggccagtcagcagactcccccacttccaccgtatgcatccccacgttctccgccggtccagcctcacacaccagtgacaatctcgttgggaacggccccatccttgcagaacaatcaacctgtggagtttaatcatgccatcaactatgttaataagatcaagaacagatttcagggccaaccagacatctacaaagcattcctggagattttgcacacatatcagaaagagcagagaaatgccaaggaagctggaggaaactacactccagcattgacagagcaggaggtgtatgcccaggttgctcgtctctttaaaaaccaggaagatttgttgtcagagtttggacaattcctaccagatgccaacagctccgtgcttttaagcaaaacaactgctgagaaggttgattctgtgagaaatgatcatggaggcactgtcaagaagccccaactgaacaacaagccgcagaggcccagccagaatggctgccagatccgcagacatcctacaggaaccacccctccagttaagaagaaacccaaactgctcaatctgaaggattcttctatggcagatgccagcaaacatggtggtggaacagaatcgttattttttgataaggtccgaaaggctcttcggagtgcagaagcctacgaaaatttcctacgctgtcttgttatttttaaccaggaggtgatctctcgtgctgagcttgtgcaactagtctctcctttcctggggaaattccctgagttgtttaattggtttaaaaactttctgggctataaggagtctgtacatctggaaacttatccaaaggagcgagccacagagggcattgctatggagatagattatgcttcttgtaaacgattgggctccagctatcgagccttaccaaagagttaccagcagcccaagtgtacaggacggactcctctctgtaaagaggttttaaatgatacctgggtttccttcccttcgtggtctgaggactctacctttgtgagttccaagaagactcaatatgaagaacatatttatcgttgtgaagatgaacgctttgagcttgatgtagttttagagaccaatctggcaacaatccgggttctggaagcaatacagaagaagctttcccgcttgtctgctgaagaacaagccaaatttcgcttggacaacacccttgggggcacatcagaagtcatccatagaaaagcactccagaggatatatgctgataaagcagctgacatcattgatggtctgagaaagaatccctccattgctgttccaattgtccttaaaaggttgaagatgaaagaggaagaatggcgagaagctcagagaggctttaacaaagtatggcgagaacaaaatgagaaatactacttgaagtctctggaccaccaggggatcaactttaaacagaatgacaccaaggtcctgaggtctaagagcttactcaatgagattgagagtatctatgatgagaggcaagagcaggctacggaggagaatgctggtgtacctgttggcccacacctctcacttgcgtatgaagacaaacaaatactggaagatgctgctgctctgattatccaccatgtgaagaggcagacaggcattcagaaggaggacaaatataagataaaacaaatcatgcatcattttattccagatttgctctttgcccaaagaggtgatctctcagatgtggaggaagaggaagaagaagagatggatgtagatgaagccacaggggcagttaagaagcacaatggtgttgggggcagtccccctaagtccaagttactgtttagtaacacagcagctcaaaaattaagaggaatggatgaagtatacaacctcttctatgtcaacaacaactggtatatttttatgcgactgcaccagattctctgcctgaggctgctacggatttgttcccaagccgaacggcaaattgaagaagaaaaccgagagagagaatgggaacgggaagtgctgggcataaagcgagacaagagtgacagccctgccattcagctacgtctcaaagaacctatggatgttgatgtagaagattattacccagctttcctggacatggtgcggagcctgctggatggcaacatagactcatcacagtatgaagattcactgagagagatgttcaccattcatgcctacattgcctttaccatggacaaactgatccagagcattgtcagacagctgcagcatatcgtgagtgatgagatctgtgtgcaggtgactgacctttacctggcagaaaataataatggggccaccggaggccagctgaacacacagaactcaaggagccctcctggagtcaacgtatcagcggaaagctgagcagctaatgtcagatgagaattgctttaagcttatgtttattcagagccaaggccaggtccagctgactattgagcttctggacacagaagaggagaattcggatgaccctgtggaagcagagcgctggtcagactacgtggagcgatacatgaattcagatactacctcgcctgagcttcgtgaacatctagcacagaaaccagtatttctccccaggaatctacggcggatccggaagtgtcaacgtggtcgagagcagcaggaaaaggaagggaaggaaggaaacagcaagaagaccatggagaatgtggatagtctggataagctggagtgtagattcaagctg

SEQ ID NO: 611634 - DNA, 227 bp, Homo sapiens
tagacatcagatagaaagtgagacatggtgtcctacggcattggactttccaaccctgacagacccgcaagacaaaacaacatggattctatgaccagacctctagtagaaatcccagtaacactcagccctgtacactgtgaataccactgcacagcatcagcaggctgctgtgccacacagtcctcaccaagaccacagactctgtcttccacaagacacgattc

SEQ ID NO: 611635 - DNA, 3040 bp, Homo sapiens
tgtactggacgaggtgcggcgcaagctctacgggatgcccactgacttcggttctgtgtcaaggtgaagacctggccaggcctggcccctggctacaaaattgaggtgcaaaccaatgacatggtgaatgtgacaactcctggccaggttcatcagattcccacccatggcatccagccacagcctcaaccaccaccccaacatccttcccagccttcagcccagtcagccccagctcctgcccagccagctcctcagcccccacctgccaaagtcagcaagccctcccaactgcaagcacatactccggccagtcagcagactcccccacttccaccgtatgcatccccacgttctccgccggtccagcctcacacaccagtgacaatctcgttgggaacggccccatccttgcagaacaatcaacctgtggagtttaatcatgccatcaactatgttaataagatcaagaacagatttcagggccaaccagacatctacaaagcattcctggagattttgcacacatatcagaaagagcagagaaatgccaaggaagctggaggaaactacactccagcattgacagagcaggaggtgtatgcccaggttgctcgtctctttaaaaaccaggaagatttgttgtcagagtttggacaattcctaccagatgccaacagctccgtgcttttaagcaaaacaactgctgagaaggttgattctgtgagaaatgatcatggaggcactgtcaagaagccccaactgaacaacaagccgcagaggcccagccagaatggctgccagatccgcagacatcctacaggaaccacccctccagttaagaagaaacccaaactgctcaatctgaaggattcttctatggcagatgccagcaaacatggtggtggaacagaatcgttattttttgataaggtccgaaaggctcttcggagtgcagaagcctacgaaaatttcctacgctgtcttgttatttttaaccaggaggtgatctctcgtgctgagcttgtgcaactagtctctcctttcctggggaaattccctgagttgtttaattggtttaaaaactttctgggctataaggagtctgtacatctggaaacttatccaaaggagcgagccacagagggcattgctatggagatagattatgcttcttgtaaacgattgggctccagctatcgagccttaccaaagagttaccagcagcccaagtgtacaggacggactcctctctgtaaagaggttttaaatgatacctgggtttccttcccttcgtggtctgaggactctacctttgtgagttccaagaagactcaatatgaagaacatatttatcgttgtgaagatgaacgctttgagcttgatgtagttttagagaccaatctggcaacaatccgggttctggaagcaatacagaagaagctttcccgcttgtctgctgaagaacaagccaaatttcgcttggacaacacccttgggggcacatcagaagtcatccatagaaaagcactccagaggatatatgctgataaagcagctgacatcattgatggtctgagaaagaatccctccattgctgttccaattgtccttaaaaggttgaagatgaaagaggaagaatggcgagaagctcagagaggctttaacaaagtatggcgagaacaaaatgagaaatactacttgaagtctctggaccaccaggggatcaactttaaacagaatgacaccaaggtcctgaggtctaagagcttactcaatgagattgagagtatctatgatgagaggcaagagcaggctacggaggagaatgctggtgtacctgttggcccacacctctcacttgcgtatgaagacaaacaaatactggaagatgctgctgctctgattatccaccatgtgaagaggcagacaggcattcagaaggaggacaaatataagataaaacaaatcatgcatcattttattccagatttgctctttgcccaaagaggtgatctctcagatgtggaggaagaggaagaagaagagatggatgtagatgaagccacaggggcagttaagaagcacaatggtgttgggggcagtccccctaagtccaagttactgtttagtaacacagcagctcaaaaattaagaggaatggatgaagtatacaacctcttctatgtcaacaacaactggtatatttttatgcgactgcaccagattctctgcctgaggctgctacggatttgttcccaagccgaacggcaaattgaagaagaaaaccgagagagagaatgggaacgggaagtgctgggcataaagcgagacaagagtgacagccctgccattcagctacgtctcaaagaacctatggatgttgatgtagaagattattacccagctttcctggacatggtgcggagcctgctggatggcaacatagactcatcacagtatgaagattcactgagagagatgttcaccattcatgcctacattgcctttaccatggacaaactgatccagagcattgtcagacagctgcagcatatcgtgagtgatgagatctgtgtgcaggtgactgacctttacctggcagaaaataataatggggccaccggaggccagctgaacacacagaactcaaggagccctcctggagtcaacgtatcagcggaaagctgagcagctaatgtcagatgagaattgctttaagcttatgtttattcagagccaaggccaggtccagctgactattgagcttctggacacagaagaggagaattcggatgaccctgtggaagcagagcgctggtcagactacgtggagcgatacatgaattcagatactacctcgcctgagcttcgtgaacatctagcacagaaaccagtatttctccccaggaatctacggcggatccggaagtgtcaacgtggtcgagagcagcaggaaaaggaagggaaggaaggaaacagcaagaagaccatggagaatgtggatagtctggataagctggagtgtagattcaagctg

SEQ ID NO: 611636 - DNA, 103 bp, Homo sapiens
tcaagcttctaacgatgtacggggacatgtaaggagctgagttcttaaagactgaagacaggctattctctggagaaaaataaaatggaaattgtacttaaaa

SEQ ID NO: 611637 - DNA, 161 bp, Homo sapiens
  misc_feature (40)..(40): n is a, c, g, or t
  misc_feature (43)..(43): n is a, c, g, or t
gtgtgtttgggggtcccaggcctgtgtaatgtttttcccnggnggggggggccccccaccccattcttttccccaaaaggggtgggatgggcccccatgaactgcaacagcatgttgaggtgtccatgttgtttgcctttgtaaaaaaaaacagcctttga

SEQ ID NO: 611638 - DNA, 1375 bp, Homo sapiens
cagtcccaggtcctaagtttttgattagaaaaatatagacactgtggttgataatgggatgtatggctgatgtggtcttgtagacatgttgtcgctgtagacatctcacagaatacttttgtgtctctgtcccatcagaggcaagagcaggctacggaggagaatgctggtgtacctgttggcccacacctctcacttgcgtatgaagacaaacaaatactggaagatgctgctgctctgattatccaccatgtgaagaggcagacaggcattcagaaggaggacaaatataagataaaacaaatcatgcatcattttattccagatttgctctttgcccaaagaggtgatctctcagatgtggaggaagaggaagaagaagagatggatgtagatgaagccacaggggcagttaagaagcacaatggtgttgggggcagtccccctaagtccaagttactgtttagtaacacagcagctcaaaaattaagaggaatggatgaagtatacaacctcttctatgtcaacaacaactggtatatttttatgcgactgcaccagattctctgcctgaggctgctacggatttgttcccaagccgaacggcaaattgaagaagaaaaccgagagagagaatgggaacgggaagtgctgggcataaagcgagacaagagtgacagccctgccattcagctacgtctcaaagaacctatggatgttgatgtagaagattattacccagctttcctggacatggtgcggagcctgctggatggcaacatagactcatcacagtatgaagattcactgagagagatgttcaccattcatgcctacattgcctttaccatggacaaactgatccagagcattgtcagacagctgcagcatatcgtgagtgatgagatctgtgtgcaggtgactgacctttacctggcagaaaataataatggggccaccggaggccagctgaacacacagaactcaaggagccctcctggagtcaacgtatcagcggaaagctgagcagctaatgtcagatgagaattgctttaagcttatgtttattcagagccaaggccaggtccagctgactattgagcttctggacacagaagaggagaattcggatgaccctgtggaagcagagcgctggtcagactacgtggagcgatacatgaattcagatactacctcgcctgagcttcgtgaacatctagcacagaaaccagtatttctccccaggaatctacggcggatccggaagtgtcaacgtggtcgagagcagcaggaaaaggaagggaaggaaggaaacagcaagaagaccatggagaatgtggatagtctggataagctggagtgtagattcaagctg

SEQ ID NO: 611639 - DNA, 236 bp, Homo sapiens
cacatgatagaagtctgtaaatacatatggtgacaacgcccactacccctcctgagatcaccatcagatggctagcagaccactgagaacgtgggcagtgtccaaatatcctgtactgtaaaggactaaaaggcgtaagctctgacgacatgacaaggacggaaacattccatgatgtctccatgccaggcatctgatccccactacgaccatcccagacacagtccccagttccc

SEQ ID NO: 611640 - DNA, 273 bp, Homo sapiens
agctcgccggcgggcccgtccatgaatgaataggacccaccttccaccctgactggaacctgtcctctccggtcctctcctacgtgttcacaaacaccgagtcactgaccctcaaaaaaaaaaaaaaaaaaaaaactctgtcggagtgagacagtgggtccgacctcacaacaccacactagtgtcgagtgacgtcggaacttgaggacccgagttcgataggagggtggagtcggaggacacatcgaccctgatatctgcggattaatacct

SEQ ID NO: 611641 - DNA, 108 bp, Homo sapiens
actctacccaagagtgatataacaggtccgatctcacgtcaccgataagtgtctacgcttgtatcatgtgacgtcagaggttgaggatcggagttcatcaggaggaca

SEQ ID NO: 611642 - DNA, 937 bp, Homo sapiens
  misc_feature (398)..(398): n is a, c, g, or t
cctagaagccaatagatgggaacggcacaataagatctcatatcctgattgtcctcatagcacacgtatattcgggcaagtccaccactactggccatctgatctataatagtgcgtgtgtgcatcgacaaaagaagccatgtgaaacaatttgagaaggacgctgtgtgagcatggcgaaagggctccttcaagtatgcctggctcttggataaactgtaaagactgacgcgtaaacggtggtatcagccatctgcaatatcctccgttggtgggaagagtatcttggagatcgcagcaaggtagcatagtgtagagcatatcgatttggagtggccgccaggcacgagcacgagacgtattatcaataacaccatgagttacaaggcacatctcangagttgaactgttgactgctcaactgtagttgtacgtcgtgctgagtggttgcgctgacattttggcatagtctgggtatcctcgcaatagcaatgaggtctagcacgccgagaaggctatgacccagttcgtggtcgttacacgacatgggcctgtgaaaccatacataactcgtcggggtgtgtaactattaatggcaattcccacctgtgaagccagcctgtacagtgccagtaatgagcatagtgtaggcaaagttgcgttcaaggtaagctcaggacgaacgttagcattaacgaacaattgggctacaaaccccagacaacagtacgcactttggtgcgcaatattcctaggtatggaactggttgaacaacattgctaggatgccatagtgtctaactatgcctatggattcaacgcggatggcgaaagtcgaccccgtaaggatggcaaatgccaggtgtgaaccacagctgcttgatggctctggacttgcatactaacaacaattcgttcaattgacaagcacttgtgc

SEQ ID NO: 611643 - DNA, 583 bp, Homo sapiens
  misc_feature (141)..(141): n is a, c, g, or t
  misc_feature (185)..(185): n is a, c, g, or t
tccgattacaaaacaggcccctctaaagggatttaaagcaccgccaggcccttgtgattttaaacctggggctcgtagtgtctcgtggcagaccagttttggtgtgtgattatataactgtgtgtgtgaaggttattaggnggctatagagccatatatgtgtggggtatatctctatatatctncccgagtgtgtgtggcgtctccttatagcctatatgtgtggtgtgtgttctcagaattattgttatacaacgccccctttctcgatagctcatttttggtgctcacacgggatttttttacaactcaggtgagtttaagcttaatgggggagggggtgactctaaaacactctttacgccggctctctatggactggggtaaactcgtgtgcaccgcggtggctggcacgaatttgcaccacaccctggggttagttatagcttaagtttaaacttccgttatatggctaaagaggttaacccactgctgttccccgtgggggtgtggctaaggctaaagcgtttggagctgctattgctgcgtgcttgaatgcttgcccctttggaccggggggatt

SEQ ID NO: 611644 - DNA, 118 bp, Homo sapiens
cccgcggccgacgagaggccacgccgggccggggttggacgacaccaagatgacccccaagctggacttaccaacttgaccagaaacctccttcctctggttcaccaacccatgcaag

SEQ ID NO: 611645 - DNA, 238 bp, Homo sapiens
ggtgcgacggggcatgcctgtaatcccagcacttcgggaggctgaggtgggcgggtcatgaggtcaggagatgaagactgtgttggcccacagagtagagaccactcacacaatgggagaaaatatttgcaaactacgcatctgacaaaggactagtatccagaatctacaaggactcaacaaatcagcaataaaaaccccaaataatcccattaaaaagtgggcaaagggtcgacgc

SEQ ID NO: 611646 - DNA, 941 bp, Homo sapiens
gctctgctccctgccagaccggccagctgtgtgcaacccagcggggcttgcagcagagctggatggggccacccgttcttcctcatttcccacccctggtgtgggatttggggggctcctgggcagagtgcgaagctccggaccgagtacagtggatccccagtgactgctcgggggggtccgctgcgttggaggatgccgacaggcacagtcagtgttccctgtgccttggagctctccttccctctccatgggccaagactggggcgacgccgtggtacactaaggcgtggggacggctgtgcagacatgctagccagagggatggggcaccaggcgtgtgctgcttggatgctgctgtccggagcgtgcaaggctggaaaacaagtaacttccattgctgggatcccgagaatgaccttccaatgtcaccccggctgtccccacttattgagtacggtcaggaagtgacggaccctgtgacgaacgatcggcatggggttcggcctggcccgcgggaggctgtgtggacgtgctgttgacagacgggacggagtggccctggtgacaaacgacaagttcgttggaattgagttaaggtggttccggtggaaaagcggagtggaaggctgagttcccccttcatcactctcagagcgcgcttaccggaagaacatcgccccggcccctgggggggccaggactgcgtgatggggcccccttgaaagacttcactggcctcattggaggagaaggacctggcttcctggagaagctgtgtgatggtcctttgacgtggtgcgcaagggagagtggacgcggcctcaggaagacagtggatgtgatgtgactgctgaacgcgatgtctaagcggcagaacattgaataatatgccggaggacatgccataccctatagacacagaactatcggataggggg

SEQ ID NO: 611647 - DNA, 924 bp, Homo sapiens
  misc_feature (77)..(77): n is a, c, g, or t
  misc_feature (95)..(95): n is a, c, g, or t
  misc_feature (149)..(149): n is a, c, g, or t
  misc_feature (160)..(160): n is a, c, g, or t
  misc_feature (210)..(210): n is a, c, g, or t
  misc_feature (217)..(217): n is a, c, g, or t
  misc_feature (244)..(244): n is a, c, g, or t
  misc_feature (312)..(312): n is a, c, g, or t
  misc_feature (315)..(315): n is a, c, g, or t
  misc_feature (334)..(334): n is a, c, g, or t
  misc_feature (340)..(341): n is a, c, g, or t
  misc_feature (357)..(357): n is a, c, g, or t
  misc_feature (359)..(360): n is a, c, g, or t
gaaagttattaagaggagaaggggagacttacaatgatgattcaaatgaaggaaactaaaaagtaactgaagcaagncagaggaaaaagcagtantcacttgagcacatcccaaaagaataacatttcaaatgtaactagaaaaaagtntgctgaagttngcaatacagaaataattattaagatagctttaaagccctgctcagctttngaatgtngggaattgacccagaggtggctgtaanctaagatggttccttcagtaatgaccattttttctttttcaagatgatgattattccccaccttctanganacaaagaccaacgagccancacagnnaccagtcccagaaccngnnaatgctggggaaacggaaaatgagggagtacaactctggacctcacaatccagtggaggagacgcaattcatctgcctctgtacctctgggcacgcctcatgccaagtgcatctgtggaaagagggccatgcacctgggactacaaatagtaggagaaagcttgacaggctcaggtctgacaggacagaacatctacagtaagtcatactgagtacaaggtgggagacaaggacagaaactaccgaaggctcctcaagagaaagaagaccgaaacatgacacagaaaaggtgaacacagacaacaacgaaaaaaagaatgcccgacacaaaatactagaaataacatactacagcaacataaactattaacccatacaaaaaaggctcctagacattacaaggaatatagaaacgaataaatatgagccagaaatccaagaataaactttgaaaacacgatatattggaacaaacctcataggtaaaatcaggaaatgcttaccagtataccgaggacatagcatacggccaatgatagaaaaagagcgaggaaatctaaaaac

SEQ ID NO: 611648 - DNA, 873 bp, Homo sapiens
  misc_feature (348)..(348): n is a, c, g, or t
  misc_feature (361)..(361): n is a, c, g, or t
  misc_feature (403)..(403): n is a, c, g, or t
  misc_feature (431)..(431): n is a, c, g, or t
  misc_feature (435)..(435): n is a, c, g, or t
  misc_feature (439)..(439): n is a, c, g, or t
  misc_feature (446)..(446): n is a, c, g, or t
  misc_feature (484)..(484): n is a, c, g, or t
  misc_feature (500)..(500): n is a, c, g, or t
  misc_feature (503)..(503): n is a, c, g, or t
  misc_feature (508)..(508): n is a, c, g, or t
gctggccaagtgtcgttcgccaagtacagacttctggaggactgtggactgagtgcatagcacagctcagtcctgagcagcaggccgccattcaggagctcctgaactctgcgtgaagggccttaagtgtcacccaccagaaaactaattccaaataaagcgcttaccctttccttgaggtttcttgggtgtgtgtttgtgagcaaaagagatcggtagtgtggtgtgtaggccatccttctggagagccacaagcaggaagagcagcgctgtgttgcagaatggagtttccatggatttctaccagaccactgaaggagttcctggaagccctgcggtagctagcantgaagactatttnctatggtataacccgcccacctgaaggggaaagggaaatcanattatttttctcgtagacataaggaaanttangganaaacagntttaagaacagttactcagcgtagatgtgtgtcacacnaaattgtctgattccngtntcatngtgaactcgcgcagtgtcgagtctttctgtagggtacgaacagaagcctcctacccagcaaaccagtagacccacaaacgttgaccacacaccactgatgacagacaacaagcatgaagatggcctactttgactgtcactttggttctttttcccagaaggcttaatacagtgactcagtccgggaagctttccagccttccagccccttgaatgtgaacgtgtcattggcatgtctggcagctagtcctctcattcactcctcaaataaacaacattgaataccaaacagcaggcttgtgtcacaaactcagtactgtctggccttggattccatcccatgtccccaatatcacgcactgatc

SEQ ID NO: 611649 - DNA, 194 bp, Homo sapiens
taggcagatcacctgaggtcaggagtttaggaccagcctggccaatatggtgaaacccggtctctactaaaaatacaaagattggctgggtgtggtggcgggcgcctgtaatcccagctgctcgggaggctgagtgtggcaggagccagggggcacatgcaagcctgcgcagcccacccagacaaagggaaaca

SEQ ID NO: 611650 - DNA, 644 bp, Homo sapiens
  misc_feature (485)..(485): n is a, c, g, or t
  misc_feature (644)..(644): n is a, c, g, or t
gtactaggaaactgatgggcacttaagtaaattgacttgaagatggccaaccggatcaagacaatgacttgctgaaagcactgtgcgactgacgtatgataggaacagccgttactgttctgatattgcatctatatatactatatctgagcctgattgctatatgcacagtgatggtctcgtatgatgtgcattatccagccaatctttctattatctggctacacaatgcggatgaggatcaatcactctctaggttcactagactctccagctacatgtgcccttcctgacactgcggtgaagccactgcctcgattcaatgtgagcagcagagatgactgccgcatcgcattattgaatatatctggggaatagcctagctttccatagaataacctgtaattacagattggctatggtctaagtggtcaagaggtactgtggaatatgtatgatggttatgatgcgcatgtgctctgtantaggctacatggactgctatatcggagtaattggagcaattcagcctacacaggcgacatggatatgacagttcctatgagaggaccttgagacttgagagtcattaatggatatactatgagataggacgaaggatgtgactgtcttttgggcccctn

SEQ ID NO: 611651 - DNA, 211 bp, Homo sapiens
caagcagggcattttcaggtctgttggtcgtcaggccagcatggcagctggttatacattcatgcctcatcagggcatcagtcacaaggcacggggtcaggctcatggtgttttggtccagggagagttgcagcacatgcagtgtgcaggcggtcattcatcacccatcagccggccttcagatatttcaagcagtcactggcggccacag

SEQ ID NO: 611652 - DNA, 110 bp, Homo sapiens
ggcggcccagccccggggtgggaagctgcgccgctgccccggaggccagctcagaacggacgtgccgtcttccaacgcctcctgccccttgcccattaataatcggattt

SEQ ID NO: 611653 - DNA, 500 bp, Homo sapiens
cgtgcgccaaactctcgtactactgcgtctttatcagtgtgggctactccccaaacaccacacacgcacgagatacccttatcgccgcgcggctgcgcttgaatggtgttgtagtcgggaacgcacgttaggcgcgcggtgccgagtagtggtgcgtctcgcatcgtcctaccactcgcccacacgatcaaataacataaccgcagtgtctcgtcgcttacctcgtattcagatcgtagcgctgcctgtgtagtataattaatatgaagagtggttttgtaatagtatgtcaagcggtattctctcatactgggtattgcggtcgaatgcatggagataaagggtagagcctcgcttcctactcaccacactccaacagctcggcccgcaccactgagcgtctttgtcatccccacctctttctttctcttcaccactcccctgttctaactagttacctcccacaaccgtgactctcacgaaatttatcgccgaccggc

SEQ ID NO: 611654 - DNA, 423 bp, Homo sapiens
atgaaggattactcaaaaggacacctagataattaagcagtaattcgcccattgctccctcccccagccctggcaaccacccatctgctttctgtctctacggatcttcctattccagatatttcatatgctgtaaatggaatcatataatgtgtgccctttcgtgactggcttctctcatttattcaaggttcgtccaagttgtagcatatagcaatacttcattcctttttatggctgaatcatatttcattatacagacacatcacattttatcccttcatcagctgataagacatttgggatatttccactttttagctattgtaaaaagtgttgctatgaacacatgtgtataagttgcttaataattttttttgagacggagtctctgtccccccggcttgaggtaatccgtgaggg

SEQ ID NO: 611655 - DNA, 363 bp, Homo sapiens
aggccagcgagttcccaattttgatctgcacgggttccaagggcatactggcccgtccttagaaaaccagaatcaagatccgccccgtgcgtatccacgtcagcttcatcgaccgcgtcggcatcacccaggaagtcctggccttgctcggtgggcgcaatctcaatctggatgcggtggagatggtgccgcccaatgtctatatcgatgcgccgaccctcagcgccgaagtgctcgaagaactgcgcgacgcgtagttcagcgtgcacggcgtgcaagcggtaaaggtcgtcgacatccttccgggccagcgtcgccacttgcaactcgacgccctgctggcggccatggcgtccgtagcgg

SEQ ID NO: 611656 - DNA, 178 bp, Homo sapiens
  misc_feature (36)..(36): n is a, c, g, or t
  misc_feature (45)..(45): n is a, c, g, or t
  misc_feature (57)..(57): n is a, c, g, or t
  misc_feature (79)..(79): n is a, c, g, or t
cattgggcttttttccaagccatcatctttctcttntccttcttntgatggattatntgaatgcttaggagatgaaagntcaattccatgctcctctttcaggttgggctctttgttttctttctttacccgaggcttccgcttctttaatttggcctcttccccacctgtctcagcc

SEQ ID NO: 611657 - DNA, 693 bp, Homo sapiens
  misc_feature (509)..(509): n is a, c, g, or t
gctcgacattcagaaaatgacgctttgatgttagctttgaagcagggtattcccagcatcacatttagtcagaaatatggaaggtatatgttaacatgatttacatatcctactctggtggagtctaaaggtaaataacagaaataagcaaggagccatgcagcaaggcaaattcacctttgtttgttgacacaaacagtgaagcttattttgggaataatgactgcatatgttcaggaaaattgggctcatgagtctactgtcagaacatttttcagaaaagagaaaaatgaatgtactgctgggagacagcagggaggggttcttttattatatacacaatctcttcttatgagaacaaataccaacaatctattattgttcccttaattaataaatcattactgtgggctgggcagagtggttcatgccaggaatcccaccactttgggaggcccaggcaggaggatcgcttgagtccaggaggagtttgagatcagcctggggancagagagagatcccatctcaacaaaaataaataaaaattaggtaggcatggtggcgtgtgcctgtagtcctagctgcttggaaagctgaggcaggaggattgcttgagccaaggaatttgagcttatggtgaggtatgatctcactgctgtattccagcctgcatgataaagtgaaacaatctc

SEQ ID NO: 611658 - DNA, 271 bp, Homo sapiens
acatactggccaggtcgtgggtctccaactcctgaccttgtgatctacccaccttgggctcccgaagtgctaggattacaggcatgagccattgcgccagcaaagggtagcttctttagaaaacagaggcgagtgggtctttgtgtgacttcaagacagattcggtgtggtgtggaaaccacagaaatctgggccgtgccttctccctggctttggaggaagccccataacacaggggctctacggcctgagggcacagatttggcagtcg

SEQ ID NO: 611659 - DNA, 151 bp, Homo sapiens
ctagtcgtgcatgattgtaggctccccaaagtccaataaagctctttctttgttaaatgccccgtcttgggtatatctttatcagcagcgtgaaaacggactaatacactgggcatggtggtgcacgcctgtaattccagcgacagcgagg

SEQ ID NO: 611660 - DNA, 227 bp, Homo sapiens
tttttcaaaaaaaaaaaaaaaaaaaaaggaataatggcctttggaagtcagcctggtgccctacagtggcaaagccttatgcagggtgggccctgtaccccagcatcaacaacatttcctaaatggtacctgtaattctcccctcccccattttggtagtcagcataaaaaacctggattttaaaaaatccctcctttggctgcatccttcccccattactttttca

SEQ ID NO: 611661 - DNA, 446 bp, Homo sapiens
ttactcttcccctgcagggacggagatctcacaggcttaccctgggacagtcctcgtgatctccaaacactctgggccttacatagagaaggagaggtagacgcagtcaatatagctttatggaaatacatactaatttgtctgtttggctttttcagctctctaaaaatgttttggtacagtaccatttcttccactgttggctttagttttagtatctgtgttataataggggtccatgtcagaagaagtcacagcagtcttgaataactggaagacttctgccagattgcctaatgtcagtttgttttctggcactgcttcttctacttctttctcatcatctggcacttgtttggaagcattcatctcctgctaagctttgtttcctaattaaaatcttctgccactgccatagctactgctgttgcatgaacacagggtac

SEQ ID NO: 611662 - DNA, 1154 bp, Homo sapiens
  misc_feature (1154)..(1154): n is a, c, g, or t
ccgctctcacccgggacccccagttccagaagctgcaggagtggtaccgcgagcaccggtccgagactgaacctgcgccgactcttcgatgccaacaaggaccgcttcaaccgacgttcagaccttgtacacctcgaatcacctaactcttgggcatatcctggtggattactccgaagaacctggtgacggaggacgtgatgcggatgctggtggactttggccaagtccaggggcgtggaggccgcccgggagcgggatgttcaatggtgagaagatcaactgacaccgagggtcgagccgtgctgcgacgtggctctgcggaaccggtcaaacacacccatcctggtagacggcaaggatgtgatgccagaggtcaacaaggttctggactaagatgacagtctttgctgccagcgtgtccggaggcggtgactggacaggggtacacaggcaagagcatcacggacgtcatcaacattggcgattggcggctccgacctgggaccccatcatggtgactgaagcccgttaagccatactcgttcaggaggtccccgggtctggtatgtctccaagattgatggaactcacattggcaaaacccgtggcccagcgtggaaccccggagtctcccgtgtgcatcatgcctccaagaactgtactacccagggagaccatcacgagtgctgagacggggaaggaggggtttgtccaagacgggcaaggatccttactggcagggcgcaagccctttgtttgccccgtctactaacacaaccacagtgacggagctctggcggactatgacgctcaaaaaatgtcgcaataccggacaggagggggaggacgcaacaacaaagggggcaacgaatcataggacccggacacggaggtgaacacacaccgagacagggctccaggcggcacagagagtgccacagaacgtacaaccacgtgcttaaaacacccccacgaagctactcgcggcaagtacaaacacatggggtgagaccacggtgtaagcaagcaccacggaggaatacgagccggacggcaaacactacccacgacaagcatgcgatcgagtagccacaccaagacatccacggacgcccacgctaccgcccgcggtcgtgacgcgacagacgagn

SEQ ID NO: 611663 - DNA, 585 bp, Homo sapiens
cagctgtataacaaaaccaatttttttttcctcatgggctataataaaacaacattaatgtaacgtcatttcacttaaagttgcagtttccaggaacttatgacaacattaaatgaggacttgctgtatgctgaaattaagaacgcctttcatcgaaaggtactgcaaagagtgaaaagacacaccaccaactgggaaaatgtcactgcaacacagaactgaccaagaattcatgtccagaatatataaagaccatcaccaacaagtcaataaggaaagaaaacaccaaaataagccaaaatgaacaaaggaagaaacacgaaaagatgcttcacttcatcagttatcacaaaagtgcaaattaaagccacaaggagatactactttttacccccagagtggcagacaatatcaagagttcttgagatgtgttacagcaattaaagaatggcaataaaactaaagatatatatatgtaattgtcttcaaaaagagttccttcttaggctgcgcgcggtggctcaagcctgtaatcccagcacttcgggaggctgacgcgggtggatcatgaggacagccgacacc

SEQ ID NO: 611664 - DNA, 193 bp, Homo sapiens
  misc_feature (93)..(93): n is a, c, g, or t
  misc_feature (109)..(109): n is a, c, g, or t
  misc_feature (141)..(141): n is a, c, g, or t
  misc_feature (168)..(168): n is a, c, g, or t
tctgtgaggacctggaaaggaatgaccggctctcaggagcgaccctaccttcatgtcgcccgagctgagagacatccctgttgaaggggagtncggaggaggggaagcnggcagaagcgaggagtagagatggaggacctngagaggaattacggctcggccaagagnttagtttcatgttttccaccctcaa

SEQ ID NO: 611665 - DNA, 296 bp, Homo sapiens
atagtttatctcagtgctacagaagagggctaatttggctcagatgagataacagctgcaggagccaccacagcctggcttacaggccagataccagactcactagccgagtacctcaggcaggtatacaacctctttcaaacccaagtatctccactgtaaactagagactaaaataagacctaccacatagtgcagttataagaatacactttaataacacttagcctggcacccagcacataggaagtgttcagtaaatggaatctatagtagctacccacaggggatcctct

SEQ ID NO: 611666 - DNA, 691 bp, Homo sapiens
agcggctccgtgagccgctcgagtgtcgcgctgcaccaggcttcctcctcggcgttcccacgcctatatgggcggattcttggcgccggaggaagaggccagggtcacccttctcgtctcatcgtcgaggtaggacctagactgtaggaagatgtgcggctcagcaagataaactgaggcggctgtgatacagctcgcgcgaaagcagagataatgacctgagaaactgggcttcttttaaaaatggaagccagattgtgaacagtgccggttctagaatatggcaaaagcagctgtcgcttgtaagaaatgccaaagcagctcttgagcacaggcaagaacgatgcctgcctggagggaagctgtggcccatgaagaatagatagggctctttattgcgatgctgcacagagcttatgagcaagctggaatgatgttgaaggagatgcagaaactaccagaggccgttcagctaaattgagaagggccagcatggatgtatctacgaaaaacggtagccgcagaaagagataggcatggcgttaggagcgagctggaaagcttattgaaaaagtgagtccagagaaggcgtgtacagattatatcagaacgagagactatgtgtgttgtgaaaatgaagaacgcttactgatggggcatgttgaatgatctagtgaaaagcctgctagac

SEQ ID NO: 611667 - DNA, 398 bp, Homo sapiens
  misc_feature (21)..(21): n is a, c, g, or t
  misc_feature (50)..(50): n is a, c, g, or t
  misc_feature (61)..(61): n is a, c, g, or t
  misc_feature (88)..(88): n is a, c, g, or t
  misc_feature (105)..(105): n is a, c, g, or t
  misc_feature (114)..(115): n is a, c, g, or t
  misc_feature (118)..(118): n is a, c, g, or t
  misc_feature (128)..(128): n is a, c, g, or t
  misc_feature (139)..(139): n is a, c, g, or t
  misc_feature (144)..(145): n is a, c, g, or t
  misc_feature (148)..(148): n is a, c, g, or t
  misc_feature (155)..(155): n is a, c, g, or t
  misc_feature (157)..(157): n is a, c, g, or t
  misc_feature (174)..(174): n is a, c, g, or t
  misc_feature (191)..(191): n is a, c, g, or t
  misc_feature (225)..(225): n is a, c, g, or t
  misc_feature (229)..(229): n is a, c, g, or t
  misc_feature (234)..(234): n is a, c, g, or t
aggggctttgatcaacaaggnctaaatccaacaactttaaatgccatcgngcaagcacctncaaatcttaccatgaatccttccaatnatggtaccccacaaacncacaaatcnnatnctgtgggaanaaattatgaanagcannctnattatgnancaacaaaacgggcaaanccaagctacagtacaangtctagtcctgggcccagtaggaaaaccactccnagcnctganaggcaaaattcaaaagcccctaaacttactctggactctcagacacatgacagcctattgcagaatgtacagttgccgagaaatgtatagttcaggaccacatgtctgaccaatacccctgttcctgtgagctgtcctaacaacagtgggctgaatcctcagaa

SEQ ID NO: 611668 - DNA, 324 bp, Homo sapiens
atccatccatcctctatccatccatcctctatccatcttctatcctctttctctatatccatccatcctctatccattcatcctctatctatccatcctcttatccatcctctctatcctctctctctatccatccccgccaagacctttaccgtcttctctttctctatttatgttacccttattttaccaggtaagttaactgagaactcattctcatttactgcagcgacctgtggaacagttacaggggagatgaatgagacaattgtaaactggggataattaagggtcgacgcggccgcgaatttagtagtagtaggc

SEQ ID NO: 611669 - DNA, 233 bp, Homo sapiens
agtttgacgcagtggcctccggttcacagtgcaccatgtcactgtgctatcctacgaaatcattagttatctaagatgtgtatattccatggagtgacatgccaccccgaagtggctcactttcacatagaggatgcatgtcctcatgatttagcatgctgactccagcctactggcttgagcaacttactaaacggcacttcacttccagttacaacaccctgttacatact

SEQ ID NO: 611670 - DNA, 504 bp, Homo sapiens
cccggacgcatgggcagtgcaaggtgtactgggaggtgggcggaccccacaggctccgcagcccctccaccccagacctgcctgctgcctcggaactgtgacacccccatcttcgacttcagagtcttcttccaagagctggtggaattccgggcacggcagcgccgtgagctccccacgactataccaatctacctggtgacttcgggcaggacctgtcagctgggaggcccacggagaagagcctggtccatggtgaagctggaaccctggctgtgccagagatgcacactagagggcacgcagacgatgagggatgtgtctatccactgagatagcagacagaccatcagacctcatgccgtgtccagcgccaacagcgctctatgacgacatcagaaatgcatgtccttatggagctcgaagcagacccgccatagaacccaggtctaagtgagaagctccagcaagactggagacagaaccaccatagaagcatggccg

SEQ ID NO: 611671 - DNA, 87 bp, Homo sapiens
ctccgtgcagcggactcaggctccaatcgtgtggctacaacatagggtttttatacaatgacaaataaagtgaattaagcgtgaaca

SEQ ID NO: 611672 - DNA, 235 bp, Homo sapiens
gattatgaatagtgctgctatgaatatccatataaatgctttcagttctcttgggtctgtatacctaggagtggaattcctggatcatatagtaactccatgtggtacctttttgaggaactgccaaattgttttccgttgaggctgcatcattttagaaataccttaagattgggctgggtgctgtggctcacgcctgtagtcccagcactttgggaggccgaggcgggtggat

SEQ ID NO: 611673 - DNA, 145 bp, Homo sapiens
  misc_feature (69)..(69): n is a, c, g, or t
gaggagtggaggcccgcagagctccccaagcccagcagctcagactcacccagtgttgaccaccatgancggggatgctcagtgcgctggctgggttgcctgctggcagtgcgaaggaagccatactctagtagagtactccact

SEQ ID NO: 611674 - DNA, 82 bp, Homo sapiens
gcacgagaatgcaagtagtttcctcgcgtgacctcaccatgattcacatacgtgccactgtttgaaatctggtctgtttgca

SEQ ID NO: 611675 - DNA, 208 bp, Homo sapiens
tagcttggccacgaatagcctgccaggaaaagcgctccctctacctggtggggtgaaagaagcctcatctgctacatgtgccctgggacctgtggcgcttcgagagattcgtcgttatcagaagtcgacctgagctgctcatcctggaagctgcccttccagtaggttggttgagggagatctgcgcatggatttcaataacctgacc

SEQ ID NO: 611676 - DNA, 1085 bp, Homo sapiens
  misc_feature (1)..(1): n is a, c, g, or t
  misc_feature (529)..(529): n is a, c, g, or t
ngtctccctcttatctacacaactaacttggggggggaggaaagatggttcaatagtatagttggccgacaccaacccctttggggataacaaaccaattgactgctgtatcccctgcgacgaccgacaaactgtgccaggagttgccaggggacctagactggttgccgccgtatcatatttgactgaccacctctatagccggctctgtcatggagcgtgaacgctttgttgttccctttcataatgttggtaagaaaaattgtgtggcctgaatcgcaccccttgtacaccgcttgggtggttctcgagttgtcgaacaaaggcacttgaggtggcactgccgtgctctaccttgccgcgggtgccaccgtgggcgcatgctgggacacagtttgtctccgcggctttcccccgagtggcccccatcctccgattgtggagccggtgtcccgaggatcctcgtggttgctggggagccccatgttcggccccttgtacgtggcgcctcaacacccgatgttgtgangtgccgcccaggtgtctggcacttccggatagacattctccccagtgaagattatcccagagggcgtgcgccctcgtagtctgccctggattgggcacacaaccctggcgtctatcgaccacttgcgaggcctgttccctaaggggcccccaccacaggaactgagcgaggctttccgggctttggggagatcttgacagccccagacctttttacaggcgtgtgcagccagagataaccaaggtgttggacccacttaccatgctcttgcccatcagactctggccaggtgattcattctgggggcagcatttcccccccgtagagtacacgggctcctaatgaggtgggaaaaccaccggcaggcagcgtatcagccccaggccagctttttgcatggtatggtcagtcttttgccctccaacacgtacagcctaccagctacccctgcccgttctagacaacttgggtacatttggggacctaggcagttaggcttgactttgaggagaggctttgaagtttatgatcccctggattaagtactccctgggga

SEQ ID NO: 611677 - DNA, 201 bp, Homo sapiens
aaaaagcctaatttggtggttttttttttatatcaattagcgttaaaaatcgcatcaactatttaatacatgaggatcttacatataaaaatttaaccttgagattcaagcgctatgtgcttttataaaggaaacatttttgagagacgtctgagctcacttttacatgggggtgcctagggccgtaaagtgtgagagata

SEQ ID NO: 611678 - DNA, 1067 bp, Homo sapiens
  misc_feature (193)..(193): n is a, c, g, or t
tgggcccccctttcccctcacaaattccggggcccccaaaacggatttttttaaaaaattgcaaaaaacgggttctatttccatattttttaccgggctgggagaccacagggagggctctcaggtgctccagaacaagcaggggcgcacagcggggtgcctcaccttctctgtgtgagagaacgcttgagancttgtgcgtgtgaggcgatgtggggggttgccccacctgtgtaggagcgacacacacgcgagatgtctcccacgctgtgtgtagagggcggggtgtgctctctccatatatatactgctgtgcggggacacctctctgtgagagcagcgtgtgtctctcctctcacacacacaagcgtgtgctgcgttgtgtgttgttgaccaccacagagattctctccgtgtgtctgtgtgttgcgccccttctcacaagggatactctgtgtggccccgcagtactatttgagaaggcggagaatttgtcgcacgggcgacacactgtagagaagaggaggtctcgtccaaaatatgtggcgggcggagtagaaaaaccccggggtctcacaacctgtggagggcgaagacagagaaggagtgccccctctgatgaggaggcgcgcaacacaaaaagtgtagttcgccccccgcgggagagaaaaacatcctcacgccgcagcagaggggaaaacatctcctgccaagagggacgacgaagcacacacaccacgacgacgaggacaccacccacgaagaaagcacccgttgcgggtggcacagaaccacccggagagaagacaactgtgctcgccgccgcccgagtgggttcccctaagcagcacaccaagcggcggtggtcttctcaccctacacgcggcggaggggaagaaacacccgcccgaacagcaggtggggtgcagcctacaccaaccgacgcaggcgagttggcgggggaacgaccgagcacgggcccctgcacacacatcacccgcgtctgagaaagagcacggggcagacaacacctgaggaggagagacgaacaattgttctccccgccc

SEQ ID NO: 611679 - DNA, 453 bp, Homo sapiens
  misc_feature (30)..(30): n is a, c, g, or t
ataatgaatcgtttgcgaagtgcacatcantatcagacagataatggaattaacccagaagaccatctcccacacaaacaaggcaaatatcacgtaaccttaacagtaaatctcaccgtcgctggaaagtctgcatcagatgggattcaactcatggcaccctcttcaaccatccagaagctgtcgggtcattcctagttttcggtgtcggaggagtagttgttccaaatcaaaatgtatttgtcacatacacatggttagcagatgttaatgcgagtgtagcgaaatgcttgtgcttctagttctgacaatgcagtaataaccaacaagtaatctaacctaacaatttcacaacaactaccttatacacacaagtgtaaaggaatgaataagaacatgtacattaaaaatatatatatgaatgagtgatggtacagaatggcatgtcgacgc

SEQ ID NO: 611680 - DNA, 202 bp, Homo sapiens
gatcaggaacatttcccatcaacccaacaagcctggttcgcttagccagggtacacaggtatcaccctcaaagactggctccgtctgtccttccctgtgcgcaggccacagaccaggatgcagaggagcccaacaacctggtggactattccatcacccatgcagagccggccaacgtgttcgacatcgatgcacacacggg

SEQ ID NO: 611681 - DNA, 1127 bp, Homo sapiens
gcgcactcaagatcaagatgtctcgcctgcaccgaaggccctgtaagtaaggtgctggctctagtactacgggccggccacgtgctttctggatggtgcattatctgaccggcggtttgatcgagcccgaacacgccgggccgggttgtcttgtgacgatgtctcttgacgggcgtcgtgagggtggacggccgtgacgtcacagataggctgcgtgatccgtgggtcgtccctagcgtaccaagtaacttacacacctgtcctaagatgaagctcgagatctcctattagatggatcgctgctgtgaatgctgttacgactgtgtgatgcgaaggaggagcacagggggacatgccgcgcctgcatggtaggtgtgtctctgtgaatgttccactcaaatgggggctactaacaggcactccttatcaagtcggtcttctcgtgtcctgcatcgttctggcggcttcccgctccgtgaatcgatctctggggttccgggccggctcaaccgagggtggattgaattttgtgcgccatccagtattccgagacgttctgcaatgtatccttttgtctttcatcgctcggcatgggtcctccgtcgggagctaacgcgtacggctcgacgtccgaccggtcgtgggctcctcgggtctcctcttggtgtggcgggcactgtaggtctgcacgagggtcttagaggcattgcacatgggcacaactgcgggttctgtcattcaggtgacatttcctaggcctcgggagcgaatgacggcggtgggcctgtatattgcgacgactttcaagggctggtctaaccgtccggcaagtggatgacttaacagttttacttcgaaaaaaggaaggaggaactaatagttatttacagtgatcattatcgtagtatggttgcaagactagaccgtcgttaataattgggggggaacatcgcccttgggacagagtaccattgtttgggacgggtctacgagccctcaatcgggatcctcccgtcgggttccacttacatatcgttgcccattatcagaaatggtccaagatggccttctgaaggggttcacacaccctagggacgcgagacctagcactctcgtgatgatcccag

SEQ ID NO: 611682 - DNA, 820 bp, Homo sapiens
tcccaaatctgcccctcccaccagccctttatggaccggttggacaacattcccgcgccctcgggcccttccaatgtgcgcccaaatacccaactcctgcgcccatgggtcgccccagctggggtcatacactcgcaagagccgatcagacggtccccccgggagggcttccctcccccgcttcttagtcggtgccttcgaatagtatgcatcctcgccccccacggtctgcccctcggcggtggatcacgttcctttccacacgacgcctaacctccctcacgttcactgacaacccttctgaaagctcaggtgcaaacaccccaactgggaggcaaggattccccacgttgttttctaccccaccccttcctgcagcgggagaccccccccgctctttccttcgtggcgagacgtgtccccgcggtcggacccaccaccccctgtcgtgcgagtccgtggctggcaccccattctttcccgatacacttcttttcgtggcctccatctcgctgggtaccactctccagtggacccaccggcgcgcggcaaacggagtccacccccccgccgactcgaagggtcttctcttctcacccttctttccaactaacggcggcgcagtatcatgcttgtcttcttccaccacccacgccggggtgcaccaactccgggcaaccgatgagacatctctggggtaagaaaaacgagcgggctggtccggtacaggagcctaccccgcgggccccacagtcacattccttgccaccccccgctattgctcccctccttggttgtgcacaggcccacatagtcacga

SEQ ID NO: 611683 - DNA, 554 bp, Homo sapiens
atgattctttgatgaatcctgagtccataaattacactttttttatcaaactcacacaatccacagtggtgctgactgtaataaccactatggggaaacatcccgataaacctgcctgtagccatgccacggggagtgactgaactggtgacatctgtttgagcatgctttgtgtggctggtagaatgccaccgttgtgcatacacttggtacatcaggggtgacgggagggttttctaaattctggggggagggtaaaatggggatatttttggtagtacctttttggatggggtgtgggggtatagtcctcagcttaggccctaaaataacatgtataaaacccccggcaagtatagtgtgggtgtgtacgtgtgagtgtgtgtgggtatacgtcgggcaataaaggcttggtcttcgggaacttagtgacttcttacctcttttccctccagaagtatcggcccaagataggtacctaagcagtctacttagttggtccaccatgaccatgttgcagcaaaccttatgcatctacttcctacagggttaaa

SEQ ID NO: 611684 - DNA, 112 bp, Homo sapiens
attcagtgaccaaacagggattaatattagtggatttgagaacaaaatttcatacttgtgcaaaggttaaaggagtattaggggcagtggtttttttttgatgattctcaag

SEQ ID NO: 611685 - DNA, 1164 bp, Homo sapiens
  misc_feature (194)..(194): n is a, c, g, or t
  misc_feature (974)..(974): n is a, c, g, or t
  misc_feature (1007)..(1007): n is a, c, g, or t
cctcccaaagtgctgggattacaggtgtgagctaccgcaccctgccaatataaactattcttagctcatgggctatgcaaagccttaggctgacccctgatccagactgtcttctgagacaagcatttctgtgagctgccccatgtgataactgagttgtgcagtagctgatgtggtttattgccttcccatcnactgcatgtcagaccagactgactgcacaggagcaggtggaggggggctgcatatgccaaccattactcttcaatagagtgtccttcatgagctcttctctctctcattactgactacctcagtgtagaaaccctcatttttttccccagacctatccttgttacccaatgtgcctctgcttccctgggtttgggataaactggaaggagagaatttctgagttctcttacttattttgttccataacttctccctcatatctgtggttggagactcccacccttgtccaccctttcctgcctcatactagtatcatgagtttagggctgtcgctggaaagtctggcagcccaggccataggattccagttcagcctacgatttcctagggaaatcaccaagttccaaaggctggtttttaaacctagaatatccatgtatccatttcctaatgcagtttggacctgttctagacagagcactcagccttagcaagaaaaccaatgaggtgcagaagatattctgtgcccacagtttttccctgccttctggaccctcagcccctgggatgggctccttgggattgcccatgcaacaacacagccacaagacattcagcacaccacctcctcctgtgttttgaatctctaaatgaattctgttctaaagcttcttcacgtctctctccatcctgctcccatctccacctctaatgcttcttgggagtctgaagctcagattcacattttcacattttctcgtataaacgttgtgggatangaatggtgatatgtatgtgtctggtgagttggnttctcacctggactgtgagggctaattcacaaatcacaccatacatgcgcgtgtgcatgcgcacacgcacacacacacaacacacacacacagtccaagaccctcatcagttctctggtaaaggttaagtccagatctgatgggactggtccagaag

SEQ ID NO: 611686 - DNA, 1041 bp, Homo sapiens
  misc_feature (194)..(194): n is a, c, g, or t
  misc_feature (909)..(909): n is a, c, g, or t
  misc_feature (1020)..(1020): n is a, c, g, or t
cctcccaaagtgctgggattacaggtgtgagctaccgcaccctgccaatataaactattcttagctcatgggctatgcaaagccttaggctgacccctgatccagactgtcttctgagacaagcatttctgtgagctgccccatgtgataactgagttgtgcagtagctgatgtggtttattgccttcccatcnactgcatgtcagaccagactgactgcacaggagcaggtggaggggggctgcatatgccaaccattactcttcaatagagtgtccttcatgagctcttctctctctcattactgactacctcagtgtagaaaccctcatttttttccccagacctatccttgttacccaatgtgcctctgcttccctgggtttgggataaactggaaggagagaatttctgagttctcttacttattttgttccataacttctccctcatatctgtggttggagactcccacccttgtccaccctttcctgcctcatactagtatcatgagtttagggctgtcgctggaaagtctggcagcccaggccataggattccagttcagcctacgatttcctagggaaatcaccaagttccaaaggctggtttttaaacctagaatatccatgtatccatttcctaatgcagtttggacctgttctagacagagcactcagccttagcaagggaccctcagcccctgggatgggctccttgggattgcccatgcaacaacacagccacaagacattcagcacaccacctcctcctgtgttttgaatctctaaatgaattctgttctaaagcttcttcacgtctctctccatcctgctcccatctccacctctaatgcttcttgggagtctgaagctcagattcacattttcacattttctcgatcgttgngtgtgtgtggatgtgcattccagtgatgttactccttcaagcccctgaatcactatagccacgactcttcaactgattccaacctttaccattattctggctctcatatanggaccagtctctggcgggggt

SEQ ID NO: 611687 - DNA, 489 bp, Homo sapiens
gggtaatcatctctaccataaaataacttcatcggaaacgtcaatgcatcagcattctgcagtgcaatatggaaatgaactgttaggctgtgttggtgctggaactgtgggggcttactcaggctgtttttatgactccaagatgttttttaatatctggtcttttttttttaactggtgaccactgacggactggcattacgaaggactggggtctgagaggaaccataaatggtaaaaagaaaaaacctgttaaaaggcaaatacaagcttcttttatgactttcctttaaggtctgatgtggtggtcctcgtgtttatcgatggctaatcccaattccctacaatccatgtgaaaagcatgtggtatccagaagatcaagcactttgtgcctcgaacacccgttatccttgtggggtgccagtttgatctccgtaatgccgacctggaagctgtaaatcgaggccagggcccgttagcacaggtaa

SEQ ID NO: 611688 - DNA, 233 bp, Homo sapiens
taacgggtgtggaaggtggcagttctggtgtggaggaatgtaggagtgtctcattactgctcttcgatgggccagtgagattgttttccttattgctagagtgtggtcaaatgttaggctcacaattcacctctgggggtgtaagtgtggggttgcatagttattactatggtgtggacctgaagtagagcagtgactctttaagtgtcctgcctcacggggctgcccttgcc

SEQ ID NO: 611689 - DNA, 178 bp, Homo sapiens
atgtttccaaggcccgcaagaagtacaaaggtggaggtatcctatcatggtacaggcacgggaccctgaaaatggggcacatcttcaactgcattcagcgagcccaccagaccacgttggagtgtatcctcccttcttattttttctagctgttggaggtgtttaccaccagcgtata

SEQ ID NO: 611690 - DNA, 863 bp, Homo sapiens
agcggagtgtcagccggaacttgttggttcggaccgtgggtgggggtggggccggggccgggcctggaggcggtgctggggtgccgggggctggtgctgcctgcccttcccccgtcacttcctgccgtgcttgcggtgcgcctgagcggctcttcagcgtaatgcgccggcggttgccgcgtcatctctcggctccccgcttccttttgacctgacttccaccaccccacggcccggtaaggcagacacggcgaataccttcacaatggggcacactaccaggcgctcgtatcgcacgtccccgttatacgtacgcccattcatataaccatattcgccatttatatatgcgctattcgtaacaatttcaacacatacatataggcagggcaacaggggacactaggggacccttgcccgtgctcgggatgggatacacaaagcatcagtcgagacaaatggcatgccccaagaaaggttctagttttagtctcaggcttaaaacgccttcttcacggaaaccttgggcgcgcagaacagcgagcaagcaattttggtcccctaatggaagtagcagccacgctcttttttataaacgagacatgagaaaagacgagcattagcaccggcgccttaagtgtgggacggaaaccttgacgagtcggccgctctgtggtcgccagtagtaaacatcttggggtgagagaagatgagatccagcggtggtgttagcaacgaacctggttgtggaacccacttgtagattactgcgggacatgagacagtccagtggctgtaacttacacttgaaccaacaaccgatgtgtaggggagggcaagtgagtgagcttataatacacgcg

SEQ ID NO: 611691 - DNA, 344 bp, Homo sapiens
caccagagaatgcagtaagctataacgtgccacatggtaatgaagagggggttataatcaccgctcctttaagtcgattgagaagacttttgtcgcaatttttggagcatattgtgacgtagcgatttgacgcgagattccagcatgattcacatagatggttttctctcttcccagagttaactcagattcctctctgacgcagagttaaggtacatgcagacggtaagagctgaagcttggccaggggtatgagctacacgttcatgtatccccattatctgggtgcgtgattgaaggctcaacactggacatctacttgtacatggttgggtttctgcgag

SEQ ID NO: 611692 - DNA, 838 bp, Homo sapiens
gacaatggtggatgtggtggccaggcgtgccagtgatcaggtaggggcgtcaatgtatgtcacgatgaagacctgcctatgggcaagggtccaatcgatggtatctctatggatccagaagttcagtggcccatatggcaggaaactgtgtcccgtgtggcctcttcagtgccttcctacgtattacgaatgctctggggatatgtggaataagtattgccaggacagcaggatctcagtgaaatgggtatggcatcgagaactcctatgtgcctactgaaacaagtcaggcaagatccgcagtaaattgtcagatgttatcagtcctaactttggcaccgaaacgcttggaatattgcgagattaggtcagtatacttttcagggatcaatttttgacaccgtctcaccatgtggttgtcgcatggttgcgcaagggtaatatgctgtgacctcgcaggaatccaggagtataaatccaatcaaatggctcaacggaaagatagctcaggcgtcttgctactcgaagctggtgacggggagactaggggcgcgatgaattttgctttaagatgatccttggcacgaagaacggtttcctcagtatgaggaggttaaccagtggcaggggttatactagggatgagctaagtcgagattgtggtaacggcaggtgttgagcccgtgagcttttccggatactgtagaacaggtgggtttgaacgaccatcttggaagtggtgccctgaattcggccttgcttcttgtgttgggaagggttcactatggttttgaaggggtcgggacagatggtccacgggtgcgatgtggtaccttga

SEQ ID NO: 611693 - DNA, 115 bp, Homo sapiens
caccgcagctatggctcggcctacaggattgcctacggcttccggtattgcccgatgatggcgtgctggaccagccgattctcttcgcgcgtgccgcgcgcaatgttgtgcagca

SEQ ID NO: 611694 - DNA, 133 bp, Homo sapiens
ttttttgcggtgcctttcccagaaaattgatgaataatccacccttgttagcatatgatcaagaaataaccataaaaatagccaacagcgctttgggactgtctatggagtagtcattcctttcgttcttttt

SEQ ID NO: 611695 - DNA, 592 bp, Homo sapiens
cgcggtggctcacgcctgtaatcccagctctcagggaggctaagaggcgggaggatagcttgagcccaggagttcgagacctgcctgggcaatatagcgagaccccgttcttcaaaaaaaaaaaaaaaaaaaaaaaaaaaaatttttgggccggccttcgggcctctcggaaaaaacgtttctttaaaacaccaatctgcgtgtttggggcgcgcgggggcgcccaagtacgggtcatgtgtggacactggggccatataagtgtggtttcccttaggagaagaactccggggccaatggaactagagtggtcggggtattcttcacccatataaaaaacgcgccgggggggcaacaccggagggtgcctgtgagaacaaaccccaaggagggggaaggcccgagggggcaataccgggggactctactaaaacgagggaggccccaagggaggaaggtccgaaattttaaaattaaccgccccgacccgggggggggtaaaaaacaaggacaaggaagacaacacaccacaacaagaacaacaggaaacaaaaagcaaagaaaacatcacggcacagaggaaacaacacag

SEQ ID NO: 611696 - DNA, 318 bp, Homo sapiens
gatttagtaagacgagttactatgtgcgtgatctcgaactcctgacctcaagtgatctgcccacctcagcttcccaaagtgctgggattacaggtgtgagccactgcacctggcaaggcaaccttttttttttttttttttttgggtaaaaaatcttggacctccatttaaatggggtaaatgtgcggtaagtccagagcctggtgtaaggtcccgaggaggggagggctggcgggattctcctttatccctcaaccagaatcccagcccaagccatttcgcggttcctcttctcgggataaactctatcatccatct

SEQ ID NO: 611697 - DNA, 1351 bp, Homo sapiens
agtgggtgtgtcttgtgtgctgtgtcgcgagtggtgcttcttggtttgccttagcttctcggtgcaccactgtgtcttgtggtgggtggccgctgctctccgcttttgtcttctggtagtgtgggtgtccttttggcatccgtttgtgctgagtacgcttcccgttctgtgctttccgtttgactctctctcttttgtttctcttttggttattacatgtgaccgttgttctgcgttttttgccattttgtttttcaaggtcttttggtctgtgtttttgacatgcgcctgtgtatctcttgccggttctttctttttttatattaccccttggtttggggtttttgtgcccttgccctttgtgtgtgtacacaatggttttctgccattgcgtgggtaagcccttttgatgccctacgtgtgtgtgatctgcttttggccctattcccacgggttggttttcgctgtcacgggtgttgttcccctttgggttttctttgagaccattacctggcctttcaacgttctgtgcttccccgtgtcttgggttttctttccccgtgtcacaagttattttgccacaaagtgttagagggagtgccttttgaggttatgggtttcgcgtttctgataaaggggtgttggggcgcgacttagtatcttcttgagtgcccaacaccacaccttgggttctttttctatacccccgctggctgaggccacgtgaaacccgaaaacacggttttaagaaagagcccgcggtgtgtacatctgatacagcaaggaaaaaccggctgccaattatctctgttctccacactaaaaataagtgggcccaataatagtattattatgcgtttatagtaagggctctctaccacttttgggcactccgctgtgtaagattgtaatacatggttaatggtgtgttataggcaccacggctctttcttttgtccgtatgttgttgcagtacccggtcacagcacagcttccacaaatactttttaaaaatagaggttgtaacacatctgtaggttaatttgtcacaagtcttgtgcgcctgaataagagtacgttaagcaaactatttggaacttgtctcgccgtcaaattagaaagactctggttgaattttggtttccgctttggatttttgggggaagggagccactcgatgtttatagctggaataatgaagtctcgagacctttccggtgcatgggaacacacacagagttcggttgcaaagttgcaccagtccgactgtcgcatcttcttgtgatgctttgtatcatttttgggcacttgatcggtactcggggacaataaaccagtattatctaagaga

SEQ ID NO: 611698 - DNA, 499 bp, Homo sapiens
aatacataatcccattagtcatcagataaatgcaaatttaaactgctactggatactaatgcatactccttataatgactataagtaaataataaaaatatcaagagttgccaaggatgtggagcaaccaattttatatggctggtgggaaaaatatttcaactacgttgacaagcaatttggcaatttttaaaaatgaagttaatgcagctgggcgtggtggctcacgcctgtaatcccagcactttgggaggtcgaggtgggcagatccatgaggtcagcagatcgagaccatcctggctaacacagtgaaaccccgtttctactaaaaatacaaaaaatgagcctggcgaggtggcaggcgcctgtagtcccagctactcgggaggcggaggcaggagaatggcgtgaacctgcgaggcggagcttgcagtgagcctagatcacgccactgcactccagcctggtgacagagcgagactccatctcaaaaaaaaaa

SEQ ID NO: 611699 - DNA, 681 bp, Homo sapiens
gtgcccattacggccggggagggggaccaaaaaaaaaaaaaaaaaaaaaaaaaaaaaatttttgggccgcccgggccctgaaaattttttaaacaattcgttgggggcgggggcgccccaggtagggtaacgtagaccatggggccaaataggcgggttcccaataggcgaaactccgtggcacaggagactaagttgctggggattctttcaccaacattaaaaaacgcgcccgggggggcacccgggcgctgtcttagaacaacatctcacgaggggagctcaggagggcatacgggggctcttattcacagggcggcacagcggagagcccagaatattaagatttaccgcccggtcgcagtgtattaatcgaacaactagatgagtccaaccaaaccacaaagcatatcaggaccgaacaaagaacaacacatcaccaagacggagctagcgacagatcgaatcatcgcagcggacacagagacaccacggccccccccccggcctgccctacacatcggcgccccgcgaacacaacagtaggtccgaacacacctcgcccacgaatcgtgacccagcataacaagccacccagcggtagcaatcgaccgaggatccggtgtcgtcacacaatagtcccacgaccccctagcgaaaacaccaggcccaggagaccgc

SEQ ID NO: 611700 - DNA, 251 bp, Homo sapiens
agggggggtttccgaacccccccctcccccggggggccaatttttttttaaacccaccctttgggggggggggggttttttactttttcccccgggttttttaaaaaccccaaaaagggggggtttggggggggggggcccccctgggggggtttttttttggggcttggggaaaaatggtttccccttggggttttggccccccccttttttttttttttacccccccggaataaaaaggtttttcccca

SEQ ID NO: 611701 - DNA, 578 bp, Homo sapiens
tcttcaggatggagtgaatggcacaatcctcggctcaccacagcctccacctcccgggttcaggtgattctcctgcctcagcctcccgagtagctgggattacaggcatgtgccaccacgcccggctaattttttttttttttttttttaattaaaaacaaggtttctccatgttggtcagactggcctcaaactcccgacttcaggtagtccgcctgcctcggcctcccaaagtgctggggattacaggcatgagccactgcttccagccagttgtaaatatttttatattcccaccaaagtgctgggattacaggcctgagccacccgcctggcctagagcactgtttttgtaagagcccagatattgtgttcaccagaaagagaatggttcaataaatggtggtatatcagtatatggactgtgggacagcccttctttttaataaagaatgcaatatttttacataaattatatggtatatgtaagattatcacggttttaatccttgtgaaactttatgatacaagaaaataaaacaggccagccagtatgcttgagcccaggagtaccagac

SEQ ID NO: 611702 - DNA, 279 bp, Homo sapiens
atatgagacacatgtcatgaaatgtgtcgtgtcacaatgttcaatgacataatcaaccgcaaccattatctataccaactgatcatgctggggaggtaaatgccacatccttgcggagcgttatggagctcttgtatgtcatagcttttcctgtggttaaaggtaaatgcttttaatcaagcaggaaaaagttctcgtgattatgccaactataattttaataatgtgatatctattcgttatatgaatgtactacagtttacctagatgcttttattg

SEQ ID NO: 611703 - DNA, 129 bp, Homo sapiens
  misc_feature (94)..(94): n is a, c, g, or t
cctcccccccttttttgtccccaacttaaaatgtaaaaggcttttggtccccctgggagtgggtggaggcacccagggcttacctgtacccttnctttagacccgttgaataaaagggcccccccttta

SEQ ID NO: 611704 - DNA, 365 bp, Homo sapiens
  misc_feature (8)..(8): n is a, c, g, or t
  misc_feature (197)..(197): n is a, c, g, or t
  misc_feature (223)..(223): n is a, c, g, or t
  misc_feature (331)..(331): n is a, c, g, or t
  misc_feature (339)..(339): n is a, c, g, or t
  misc_feature (341)..(341): n is a, c, g, or t
  misc_feature (364)..(364): n is a, c, g, or t
aatggggnttcactgtgttacccaggattggtctttgatctcctgacctcgtgatcccaccaccctctgcctcccaaagtgctgggattaaaggtgtgagccactgcgcccaacagcattgccttttttatggtgtacccagacctcatgcacttgataagaaacgccttcatttttaccatggcaacctagagcgnacagtcaggtctgtgacaaaaaaagnacattgtactgtgcggtctacaagacagcattgtttgatcattgtaatttttttaaatttaaacaacataactcttccaaaagaggagatgcacttggatattaagtnaaaatagntnaaggacacgtctcttgatgcagnt

SEQ ID NO: 611705 - DNA, 80 bp, Homo sapiens
aaaacttattgaaattctagcaatttctccagtccagatgtaaaatgagaaagagcaaataaagccaaataccccaaaaa

SEQ ID NO: 611706 - DNA, 111 bp, Homo sapiens
aattgtgcctgactttaagattttgttctgctgagatactcgggaaatgtcaggagcagatcctcagagtcaaccacaccacggataaaattgagaatatctggtatcaac

SEQ ID NO: 611707 - DNA, 176 bp, Homo sapiens
ctgtggtgttaccgttccatatacataagattaaagttgaactctttacaccacatacaaaaatgaactcaaatttatgtaaatttaaacctaaacttaagtgctaagactataacactctttaaagaaaacataggggataatcttcatgatactccgtttagcagttattcttc

SEQ ID NO: 611708 - DNA, 389 bp, Homo sapiens
ataatgttataaagttggttagtttttccctgtctttggttcagaggagtctcttccaaataagaatgtaggacagttgatttttacaatgatttttcaggtggctcacacctgtaatcccagcactttgggaggctgggggaggggtgcagatcacgaggtcaagagttcgaaaccaggctgactaacatggtgaaaccctgtctctacaaaaaatacaattattagccaggcgtggtggcaagcacctgtagtcccagcaactcaggaggctgaggcaggagaattgctgaaacctgggaggcgaaggttgcagtgagctgagatcgcaccactgtactccagcctgggggacagagagtctgtctcacaaataacaaacaccacaa

SEQ ID NO: 611709 - DNA, 1510 bp, Homo sapiens
gtacccgatgcccgggccggagccgcgggccagccgacgagtccttcgggcgagtgctgggggctttccggtcggggccgcaggcgcttccggagccgacgggcgagtgtgcgttccccgagcctggttctgctctgcggcgtctgacgcgcaggcggaccgcagaatctcgcagcatcagtagactccggggcgctgaacactggcatgcgacgggagtgattgcgctgtgtgcacgcgtttcagacgcgagataagactaaccctgtctaggcaagtacccgtaggagttggcataactcgagagatcaagttccgatgttgtgattgcagcctgggtgctcttgcaactgctgtcatgaactgaacagccctttatattgcacagaaggcttggatggttccctacacgtaggctcggtggcttttgcacacgatgttcatgctcaagtgtactgggtctacgagtccgtctcgtgaatgcgtcgctgcaatcccgacccctagccgttctcgcccgtctaccatacggttcgcctgcgtggcagtctcactcaagtgcccacttggaagaacgacacatgcatgaacccagagacacccattatggacaaattatctctatagaaaaaccttttaggaacctatagtaagtacgaggacgcaagcaggataagccaaggccgaatccaagatttgtggccttcgcaaaacaaccttcttgtagagcgacgaaattggcactttggaacatcactggaatgccccaaccatatggcaaagactatctgtagggcccggcaacaacccttgggctcttagtagcaacaacacatgttagcgcagtaggcttggacccaccaaggcccgggtggaatccaattatacaggtcgcattggatatcacatatcccttctcccaaccttagcgagccctgatcgctttaaatgcatagagttctctttctccaaggggatacagtgcacacggaccgttttctatcttaggggcctaaaggcacagttccaacctgtaccgccacccaagtgctataaggcactatattctccttaggcaccaaaattccttaacgcggttcggcaccggaactttaccaactgcggcaaacacgattggcgccactatctactgtgacacccatgttccatttgcacatgcactcacttctatgggctataggaacaagccgggaagacatcacaagcgtgtgaacgcaaaccgatcgaacaataacttaagctcattggacgagctaaggaacaagaaaagggagactgcggcctctatcgcccacttgggcccttaacagatgtggtactcccccaccaaacccaaccatccactcatagatcaccctgtcggacaatttaaccacatcagtgctcctgcaggtacccgccacttaatagagaacatgtaacggaacaccgacaactgcgacatgatatttctgctattggcacttactacagcgatagtgaggtcacc

SEQ ID NO: 611710 - DNA, 162 bp, Homo sapiens
actgattacagcgacgtgatccgcgagctgaagaagacccagatcaccggttcggcgatcctgccgttctacaagaagcgcctggccgacatcgaggccatcatgcgccgcgagcacgagatcaccgtgccggagcgccacgccgtgatccgcctggccacc

SEQ ID NO: 611711 - DNA, 323 bp, Homo sapiens
gcgagcggctacaagtcatatgcccagagctaaaagagatgataaatgctacttcggggaactatgaaaatagtccagctaatatatcgtggttactctccccagtcgctcacgagtttaggacacacatctactaatatcctccaatgattctatgaagtgaaaatcataagatggctaaacaacactaaatagctaattacgggtcaccttcattgtgtaaccaactgcccacgttactcaaggctcaccttcggtgcaaatcacgtatgaaaattaattcgtccttctcaatctatcgcattttctctacataatcgccg

SEQ ID NO: 611712 - DNA, 463 bp, Homo sapiens
  misc_feature (349)..(349): n is a, c, g, or t
aaagcggcggtacggccggaataccgggatatcggtgtggactcggcaagaaccagcgcaagagggaagcggagttatagctaccccgggcgcggagccggctcactgcactacccccgcccccttctttccgtcccaggaacggccccgggaaaaagggtttccggacccggggtggtcggtcccttccatggcgggcctggaggtactgttcgcatcggcagcgccggccatcacctgcaggcaggacgcgctcgtctgcttcttgcattgggaagtggtgacacacggttactgcggcttgggtgtcggtgaccaagccgggtccccaatgattacagagagtccnatgggcaaaaaaaaagcccccttttttgtggggggcccccgttttttgggggggcccccccaaaaaaggggggccccgtttggggggggggggggttgggggggaaaacccaaa

SEQ ID NO: 611713 - DNA, 318 bp, Homo sapiens
cgccgtttcaaccataggatcactcttagggtccaatttccgccagcatagattcagcgcatacagtagcatgccaagtgctgaaactccagcccaggcagcgtggtaagccctatgcacagcaacatgagccactatattgacacatacaaatcaatatgtaaggtcccgatcaacttcgggcaagcgcgtctcctatgaacagctcacatgctagttaggcaacaaatgaaccatgccagaacactataggctctgtctcgatatccactcatcgtacacagagctatggcagactcaaccccctcaatatcagag

SEQ ID NO: 611714 - DNA, 274 bp, Homo sapiens
ctcaacatcgaagctatcagcaggcgtaaacccgcactgaactgccattgcgatgaccactcgctctgatcctgcagataaatcgctatagtcgtcaccgtaccgtgattattggcatccgttgctgcctgccgaacaatcaccggcgtactggcaccaggattggctaaagccgcattgatggaagtaagtcctccgccgccggtctgcaaatccgcagtatagcggaaattatccgcttcctgcctgccaagctcaacgccgcgcagagttt

SEQ ID NO: 611715 - DNA, 278 bp, Homo sapiens
  misc_feature (12)..(12): n is a, c, g, or t
  misc_feature (15)..(15): n is a, c, g, or t
  misc_feature (17)..(17): n is a, c, g, or t
  misc_feature (49)..(49): n is a, c, g, or t
  misc_feature (80)..(80): n is a, c, g, or t
  misc_feature (108)..(108): n is a, c, g, or t
tgccgattcggngtntncacctacactaaatatgggcattttaaaagangattccccccttcccccccagaattctgcanttactaaatttgtcttaagtccaattgngtttaaaggtcatgctggtcgggtgtggtggctcacgcctgtaatcccagcactttgggaggccaaggtgggcagtcacctgaggtcgggagtttgagaccagcctgaccagcatggtgaaacccgtctctactaaaaatacaaaaattagcttggcatggtggcgggta

SEQ ID NO: 611716 - DNA, 268 bp, Homo sapiens
gatcagggccggacacggtggctcaacgtctgtaatcccggcactgtgggaggccaaagcgggaggatcgcttgagcccaggagttcgagaccaacctggccaacatggtgagaccccatctttacaaaaaaatatatatatccaggcatagtggtgtgcacctgtggtcctgtggtcccagctactcaggaagctgaggcagttgaggctgcagtgagccacgttctggccactacactccagcctgggcatcaaagtgacaagacc

SEQ ID NO: 611717 - DNA, 419 bp, Homo sapiens
caacccccacctcccacttcaagcaattctcctgcttcagcctcccaagtagctgggactacaggtgcctgccaccacatccagctaatttttttgtatttttagtagggacggggtttcaccgtgttggccagcatggtctcaatctcttgacctcatgatccacccaccttggcctcccgaagtgctgggattacaggtgtgagcccctgcgtccagccttctatatttttagttttttaaaaaagcagtagaggcatagagaagttaactttcccaactcagcacaggcaataaatgagattcaaactcagaaatggctgacttcccagactgtgctaaactatctaaagcaaaatggaggccctttcctcagggtcagtgaagacacaagaccagagaagggtcttgagacgctt

SEQ ID NO: 611718 - DNA, 635 bp, Homo sapiens
ttaagccccctacaagaaacatgtgccccccgggcctaaggtccagttcccaaggattctgtaaaaaaggcataatgtccccgtaaacccaatgtaatctattcttgtatcaatggctttggttcggtaaacaggacgatatttgtacgattttggcagcaagaacacgaggtttcagacgtccttttccaaggaatttatgaacctctttgatagcagatgtatctctaacattctcagaatcctgccgatatgttccacaccccagttgatcattcgatttatgagcaccaaaactgtttgtcagggcatgtgtgatttctcacactgtacatgttgcctcagatgcatccctgcaacgagcaaggatatttccatgtcggcagcaagcacatgcggttagtgcagcaggacagcgtacagacaaagcttgatcccagatgcatttgatgatcagaggtttttcaatgtgcatgtttcgcactagagtattatcaacagccagaacttttacagcgtcttccttttccaaatggtacttatttagtccaacagttactagagaaccagaatatattgtagtttgtctagcgtcagtacattgtgctatagggagcttaggtattccgtcagct

SEQ ID NO: 611719 - DNA, 818 bp, Homo sapiens
  misc_feature (799)..(799): n is a, c, g, or t
gaggtttttcttgtcgcctagccccctcttcgaaatgctggatggggtgtattgtgtcgcgtcgtattcctacctaaccacataaggcggcgacctctcgttccatgaggacccctcaacggagaatagtgtggccccccacttttgcatcatgcgctgtattgcatagggtaggggacacaatgcctattggcggccatccgctacgctaggaatccttctggccaccgcctgttttgggtccccttacgctcgcaacacacacatgacaagtatggcgcgctcagctcctcgaggtaggcattcaggtaccctctcgtgagactcactcatatggtccagtagtgcgcaaggaccgccgccacgagattcattccatcgctctcttccccattgctccgcagtcatcctctgaccccgccatgaccccagaaccggactctaaccagtggaactatggccgtctgtacgtcacagcgcttctggaggtgacttggtctctgcaaagtcaaaggcctgacagctctgtggcctgggaatccattttctctgcggcagagccagtggtcctgagctgttggaaccctatggtagctgtgggtatagccacagcagaaatggaagaaaacaggtctcagcctcagggtcctcgctcactccctcactccccatctttgaagccatctctgttctgcacggtgagtaggactatctataagatccatgtcatcacaaggacgttgggaacaaaaggaattctcttcgcatagaatgcctctgctggtgctgtttgataacntcgagaggcagggtcattt

SEQ ID NO: 611720 - DNA, 141 bp, Homo sapiens
cgccgtccaagctattttctgtaaaaatcgtggctctcggcggactcttgggattagaggtgcaagtgcgctcacaccgcggccggggtcgcggccagagctgtggggatcttgagcgggcgggtcgcagaagaccttacg

SEQ ID NO: 611721 - DNA, 157 bp, Homo sapiens
accagcttcatgcagaatggactggggcccccagctcatcacacagaacttctctcacataaggtcccataactaaaaatagatacacagccatattaaatatttgcagaaccttctccccagagtattcgttctgaatagtacaggaaacaccatt

SEQ ID NO: 611722 - DNA, 150 bp, Homo sapiens
  misc_feature (58)..(58): n is a, c, g, or t
agcggcgagcgcgggcttttttctttcctggtgtcccgtcgcggcttgggacccggcntgatgggcatgaagggcatgaaggagaagaagggccgcggcgcggcgaagacggccgccaagatggagaagaaggtgtctaagcgctcgcgg

SEQ ID NO: 611723 - DNA, 794 bp, Homo sapiens
tcggagtcctgaggaggcagacatgcggtggcagctgctgagttctcggtgaaggtatttcatttctcctgatccctcccctccccacccatctattaatatattcttttgaagattcttcgtatgtcaagccgccaaagtggagagtgcgattgcagaaggggatgcttctcgtttcagtgcttcttcgggcggaggaggaagtaggggtgcacctcagtcactatcccaagactgctggcaacagcgagttcctggggaaaaccccaggcacaacgctcagaaactggattcctgcacgacgcactagacgagatgacaagctccgcagcaaacaactccgcacaacgaaacagaacgacatgatgcactcttcaggaaagtacgaggcatactaaataagcttactcctgaaaagtttgaccagctactgccttgcgctcctccatgtgggtgtagagtcataaacctacatccgttaccggggtcatactgcctgattgtggacaaagaccctagacgcagccacagtatagctcactgtctgctcagctatgtctgcgattggcagaaagactgcaaacgacacgtttgagtggaccaacagccagaggggtcaacacggaccagcaagcaacgcaacacattcagaagcctccttatttccaaatacgagatgccttcgacacgacctgaaactgtgaatgtcacgcaaccctgaatccctctccgggagagacaggcgcagcaaccagcgtggaaccccctgtctctctccccccctcattcccagg

SEQ ID NO: 611724 - DNA, 654 bp, Homo sapiens
  misc_feature (654)..(654): n is a, c, g, or t
aatgttttatatgaaagttttattattatttatagtatttacaatttaaatgtttgcatagtacagggcaaatgtttgttagtgttatctgctaccacattattttttggatattctttcatgtttacaacactaaaagagatgcttacttttaactgaggtcagtggacatacaagatttttgggtgatagcttatttttctgtaacttctttttcttttagttcttagtattttttaatgtcagatcatttagtgatggacattgttttatgtgattttgggttttcctccttatgaaattttgaggcaaggttgacattgttttaaattcatggtcatgagatgagatatattcttaaatagagaacttttcctgaaaaaccatggcttgaaatattttaagagtattttgtttaatgtcatgctcgtactccaaacacttctgtgtcagaattataatttcattattctgttctcttacaatttttatagaaaggatatattctccaaattatctgggtgatgtacactattagtaatttcatgtaagtctggttcattcgactattcttaacttttttattatataagtaagttttcacaatcattaatcgctatagcattctgagataatgcacaattatttctactn

SEQ ID NO: 611725 - DNA, 477 bp, Homo sapiens
tctcagcacagccgggggaggggtcatggttctcctcgtccatcagggatctcagaggctcagagactggaagcggctgggcccaagtcacacagctagtgaagaccagagcagtttcatcgtgggtggtgactctaagctcagggctctctccactaccccacaccagcctgggtgccaccaaaagtgctccccaaagggacggagaaggggatttttctttggaggcatgcacatcgggaattagggtcaaactaattctcacatccctctaaaagtaaactacggtaaggaacagcagggttctcacagggtggggcagccgtccttctaatgaagacaaggatatggacacggtccctcttgggcagtggcataagtaacttggaaaggtatatgacggagcgtagcatacaggttaaccggcagaaacagtacttaggtagagagcagggcaaggtagagagccgggcaagg

SEQ ID NO: 611726 - DNA, 206 bp, Homo sapiens
cttaacccaggctcctttagaggtatatgaagcaccgcccgggcctttgaggcttaagctgcctctcgctgcggtctgtcgagcagctttgttgatttaactgtagaggctttatactaagcatagaggggtatctaatcccagttggggtcttagctattgtgtgctcagatatcaggccatgtactagcctagctatagttaaa

SEQ ID NO: 611727 - DNA, 143 bp, Homo sapiens
tagtaagaagctaagaagcagaaagaggatgcccacaatgagagcagggaatcagagacaaagctgaatggagctcccaggagtgtgcaatgatgaccatgtatggcccatctgggaacgagtgtcagcccgtgcctgacaac

SEQ ID NO: 611728 - DNA, 192 bp, Homo sapiens
tcccccccccgggttttttttttggggcgggggggggtttctttttttccccggggccccttttttccttttggccttttttgggggcccttttttcccgtttttttccaaaaacggggggggggggggggggggttttccggggttttttttccccccggggccccccccggggccccccccggggtccga

SEQ ID NO: 611729 - DNA, 1209 bp, Homo sapiens
tatatggagaacaccaaaagagttttttggttgaaccaccagaaaaatgatgctccacagaggcgcttcgggtgtgaaaccccgcggttttcccccgcggagaatttgttttccccccgcgggggaagtttatttttcgtgtgtcagaagacacctcatcacggggcggtttccccgcgggggggacaacatcacaccaaataattttctttttgggggttgggagaaaccacccccctttattataaattttaaaacgttgtaacgtggtgatagaaacttttagaaaatattagacactccggtgtgtcctctgccaacaaaacactcttaatggggacgacttcttcttcttgaaaatagacgcactattttttctcttttgtagaaagagcactcttcggtgtaaaacagtgaataaaattctggtggaaaaaaagctccttgtgttgtgaaaacactcctgtgtgtaataaaataatagctcttcaaatagaggagatataaaaagcgtctttttacacacacggagtatatagggagtctttgagaaattttctcccggagaatattcccacacacattcgtggtgacacacaggcgcgtttgtgagcacaacacttctgcatatcacctataaaaaggggagtgttatacacgcgcccccttttagtagaaagatgtgtgtataaggcgtctataaagggacgcacatcttgttataaaatatatcgcgcataggagaatatttacgcccacaagatattatattaaatatgtgtaatacacaccccccacaaagatgtagaatatcgccacaatatgtttagagaaatatgttatatatttagcacattcttttgatatccacaacaatgcgctccacacaatggtaatggacacaataaaggtgttctctgtgtggcggttataaataaataatgtgtgtgtgttatatttgaaaccacatttttgtgtgggtgccaagagtaaattataatggttatatatattggattgttataacccataatagtgccccactttaaatatctcttttttaatattaaaaatatatattccaaataatagccagaaaaatataataaataataaaatagccccttgtaccccttcccacatactattttgccaaatttgcttttgatttttaaataaatataaatgttactcttttgtacttttcca

SEQ ID NO: 611730 - DNA, 256 bp, Homo sapiens
  misc_feature (1)..(1): n is a, c, g, or t
natttattttacaagatacacctttcgtcgctggtaggtatctgagttaccagatcactgtcatagtatcgcagtgcttgtgttcaagtaaccattttttgaaatgccaggtccataacccactgagtgacaagtaacctttattttacttaataatggccccaaagcacaagagtagtgatgctgggagttaaccatgcttaatttgtaaatgaaactttatcctaggtatttatgtctggaagaaatgtagtta

SEQ ID NO: 611731 - DNA, 544 bp, Homo sapiens
  misc_feature (65)..(65): n is a, c, g, or t
ggctcaattgcctctgtaggagccataagtgccgaattcttcaatgattccgcctttctaaatgnacatgttggtgggcagcattcatttcctggcagccttggaatggatggctttggccaatcagttggcattcttgcacgccctgccacagcatatggattccgccgtgatgaaccttactactatggctatggatcctgataaagtatctgtttccatgtgtaatctcagcttagaagaaatctgtgtgggctgggttaattttggatctttgcctaataatgcatgttgatgttattgcgggtcagtgctggtttctatttttatatgttgttagctgcagattaaccgcagcccctctgtcttgtgttaagtacagttgatgctgacattgttcactcatcgaaccccatggtgatggtaaggggcatttcccatgagcctcaaaactgaatgctgaaaagcttctagcctggaaaacaaacgcggcattatgtatgttaagtgactgatttaatttcaattaaaaagcgtaaagtga

SEQ ID NO: 611732 - DNA, 604 bp, Homo sapiens
  misc_feature (198)..(198): n is a, c, g, or t
  misc_feature (204)..(204): n is a, c, g, or t
  misc_feature (276)..(276): n is a, c, g, or t
cacgaggcgtcgtcgattgtctagagcatacctagccgctgtgtttgtggctagatgcgactggaaggatctagttggccgaatgtcctagatgcaagattgtaggaagcgcaaacgttgggggtcaccttcgcgtcacagggtgtatcccgcatcaggtcatcaagtacgcgtagacgtacttacctggtgcatccncctggnatgcgcgtcattgataggaggatcggcgaggagacacaaaagagatgagagtcgaccctatttgactgctgngtgaaagtccatagccctggacttgtcccgtgatacaggcatggttgcctagaattcaaagcacctattgtccctctcgtatgttcatgcattgcagccgcgtttcagacccgttctcccatgtatatcttctcgggcgtggcaactggggcccttccgagccgaaccttattgccacctgcgcaaccatccatgaagctctccaaagcgcatggcttcgcctacaaagtcgacgagtcgcactacgggaccacgagggggccaagctagtccgaaaggcagacgcatacggggtcactagaatcccctgaacaaggtattggtaccg

SEQ ID NO: 611733 - DNA, 910 bp, Homo sapiens
gtcaattgaatggaaagcagccgtgcgcctgccgctgatggatgtgcgtgtgagatgactcaggatgtgcagaaggcgatggacgagaggagcatttcgaagagtgcggttcgactccgagggaggagcgttcgcggtgcgacctgaacaccgtacaagcgacttgcccatttaagctggccggatgatcagatgccaaagaccaattgcaacgtagctgtcatcaacgtggagggcacccagcgtgtgggatgaacgcagtcgtactctccagttgtgcgcgtggcgcttttgccggatggccatgggatgctcctgccatctatgatggcttttgacggctttgccaatgggccagatcataagaactcggctggtccagatgtcgtgtgtggcttggcatccggcgcaatgcagtgctccgatgtcttggggacaccagggcgtaatccccgtgggaagatacttcgcgaaagagatcggccatatatgatgcgcacgcacagctatcaatgtgcgctgtgatcatcggcggattcgaaggctacctgaggaactccttgagctgtctagccgcccggggcgaagcaccaatgcagttctgagtccccaggtcaccggacccgcacatgttttgaagcaaaggtgccgggtacgaatagcagcatcggcgcacaccaacggccagatgacaatacggacaccctgtggacgcataagacgagtcgccacggaacacaaacggcgcgcgtaaacacctagagaaccctgtgcggcacctgggcgaccagcaccaaacagacagagccccagcacgataagaacccctacacccacgagcacagtcaaaaggacgacagacgcgagggctcgcaaaagagtacaccccccccgcacagcacagaaacag

SEQ ID NO: 611734 - DNA, 201 bp, Homo sapiens
  misc_feature (143)..(143): n is a, c, g, or t
agggaccttctgaacacagagtcaggtagagatttaacactaaaattccactcatgccgggcgtggtggcacgcgcctgtaatcccagctacccaggaggctgaggcaggagaatcgcttgaaccggggcggtggaggttgcngtgagctgagatcacgccattgtactccagcctgggcgacagagcaagactccatttc

SEQ ID NO: 611735 - DNA, 173 bp, Homo sapiens
  misc_feature (164)..(164): n is a, c, g, or t
ccagctaatttcttctttttctctctatctctctctcatctttttctttcttctttccttctactttgtatcttcttcttctttcctctttacttcttcttccttctcctcctttcttcttcttattcttctccttctccttctttttcttcttcgaagtatancgcgttgag

SEQ ID NO: 611736 - DNA, 343 bp, Homo sapiens
cgtttggtgacttagaggatcccagtcccacactcaccggggaggtcgaggctgccgaggtgggaggatcacatgagccggggaggtcgaggctgctgaggtgggaggatcacatgagccggggaggtcgaggctgcagaggtgggaggatcacatgagcctgggaggtcgaggctgctgaggtgggaggatcacatgagccggggaggtcgaggctgcagaggtgggaggatcacatgagcctgggaggtcgaggctgcagaggtggcaggatcacatgatcctgggaggtcgaggctgcagaggtgggaggatcacatgagccggtgcaaggtgtgggact

SEQ ID NO: 611737 - DNA, 182 bp, Homo sapiens
  misc_feature (18)..(18): n is a, c, g, or t
tatcccaacacctctggngtttgtattcacttatctagggagagacacaaatcccaaatctataaagcctctagcccaagggtatccaatcttttggcttccttgggccacacataaaatacattaacactaacaatagctgatgagcttaaaacaaaaacaaaaaaacaaaaccctcagta

SEQ ID NO: 611738 - DNA, 815 bp, Homo sapiens
aagactgcgaaatccgctgatgatgaggagaggaccgtcaacagcagcacacatggtggctcaatagaagaatcgttgtaacggttatgtgggattgccaatctcccaagatcaaaggttatacagaaagaaggtcggtgaagagaggatcgcgagagttcacgcgtgtatggtagtgggtgaatcatggatgggaaagtgggacattaatctgactcattattcctcacagattggtagtctccagagtatccggaggtcctgctcatagacattctaaagactgtaccggtggaagaatccaaagttttaaatcaaatgaaggtggtgttcagttgctgctcagaatcagtggataccccaggatttggatggcatgcagtggataaatagtaatttgcctggcgagccgtgtatatcgactcacgattgatagtaaaattcgaggactacctaaatgcatgaatcacgagtgaacagacgtccacatgcctgataacagggtgcaggtgttgttgtatacttcattgctcctgcaggacatgcgactggagaccattggatattgagtttatgaaagcgtttgcctcgacaaaagtggtatcatcccacttatggcgagagaaggacagactcacgacagaggaatggcactgtgtaaaaaacagatactgaaagaatccaggaacgtaattgcaagtttaagaattcagaacagatgtgcaaaagcacataactgttaaaataagggccgtacccttgcgggggcgcacgaaaaactggaactagggccaggtcaccgagaacacgggggc

SEQ ID NO: 611739 - DNA, 160 bp, Homo sapiens
  misc_feature (85)..(85): n is a, c, g, or t
  misc_feature (104)..(104): n is a, c, g, or t
tggccagcatctgggaactttgggttgttggaccaacttcttccaacacgtgcgcactgatggccggggccccagccaggcctgnctggaagggtcttccccgncccgagggactgtagggggtctctaggaagcatcacatcaaggtcctcaggttaga

SEQ ID NO: 611740 - DNA, 1056 bp, Homo sapiens
agcggagcagcaggaggaggcacagcactagcatcgctgcgggaccagactcgtctcaggccacgttgtcgagcgcttcatcatcacgaaacgctcgtatcacacacggaaacagctccacatacctactgacgaagttagcacgtgacttctgcgttatctgccgtccgtaggcagtcacctgtggccagtagcccatgttaaactaggctgattctggaagttctgaggaaatagcagctttacaacaaatacccagatgctgtggcgcacgagtggctaaagccctgacccatctcagtaagcagaatctcctatgccccatcaggaatgtctgtgtcctctgaagaaatcctaatgagctttaatagcaagagacccttccacatgtaacgtccaagctgacaagccatgatccatcactgagatggactagtgtgagtgactcaaggattgactgagtgaccactgtggcacaaggcaggacgtccacttagatcgtcgtaagcgactctgaatgaatgtacgatgacactgagtgacttctcaccagtctgatcagtctcacgcacttctgtctgaatctgatgaactggttcactgattttcccacgtgacctgccatcaaccgatagtcctgcactccagttgtgcccacatgtatacgcagtattgactggccgaggtgatagtgtggtgtacggactgaggtcataagtctacgaagttgcgcagacctgaacatccagtaccctgatgctacagacgaggacattcacctcactacatggaaagcgacgaagttgcaatggctgcattcaagggcatgcccccgttgcccaacgacccttaaacgcgccttctgattgggacaagccgaggggaagggacccagtctgaaaacgaggtcaggtgggactgacccgaagtgctgaaacccagagccagcatagcagtccagaatatattaagacggtaagcacaattgattgagagccaatgtagcattccgatttgatgatagtccggaactttccaaatcagctggaatttccg

SEQ ID NO: 611741 - DNA, 219 bp, Homo sapiens
tccactagtgtaggccttttgggttacaagtggttttggttacgtggatgaattctataatggtgaagtctaagattttactgcaactgtcacccaagtagtatatattgtatccagcatattgtcctttttttttttcttttttttttccattccaccatggcctaatgaaaattttgttaggaactgactttaggccccctttgacctaccttgacc

SEQ ID NO: 611742 - DNA, 427 bp, Homo sapiens
  misc_feature (293)..(293): n is a, c, g, or t
  misc_feature (382)..(382): n is a, c, g, or t
cctcggaaccatggcgtccctttcccttgcacctgttaacatctttaaggcaggagctgatgaagagagagcagagacagctcgtctgacttcttttattggtgccatcaccattggagacttgataaagagcaccttgggacccaaaggcatggacaaaattcttctaagcagtaaacaagatgcctctcttatggtaaccaatgatagtaccactattctaaaaaacattaatattaacaatccagcaactaaagttttagttaatatatcaaagattcaaaataataaanttaataatagcactacctctattaccattttagcaacagaattattaaagaaaacagaatctttaattacaaaaaagattcatccacanaccatcatagcgaattaaagaaaagccacgaaaactacaagagaa

SEQ ID NO: 611743 - DNA, 1188 bp, Homo sapiens
  misc_feature (363)..(363): n is a, c, g, or t
  misc_feature (365)..(365): n is a, c, g, or t
  misc_feature (387)..(387): n is a, c, g, or t
  misc_feature (590)..(590): n is a, c, g, or t
ctctataaaccacaatagaactttggaacactatacctattgagttcgtgcgcatgagctggagtcctatggcacaagctcataagccgtccttattcgaagccgagctgggtcccagtctcaggactaatccttctagagttgaacgtaactacttcgtacaacgtttcatcggtcgacagagccatgcatgttgtaataatcttcttcgtagtaatatcccatcataatcgggaggcttaggcatgctgagctagattcccctaaataatccgagtgacccccgaatagtggcgcttgtccgccgacactagagacaacaataacgcattctgagctcttaacctgcccgtctctctctancntccgtgcatctgcagtcgtgcntagtaggttgagaccgagccggggagcaacggtaacatgagtatgtaacaggatcatatgctcgtcctcgttaagacaagaggagatcgtacctcccgactccctgtgagccgtccgctcagatcgctaacccagtcgtatcgtctcttagcagccctagccagggtgatcatccgtgctatcgtgtagcgcggaccaatcanattttcattcacaaacgagatttatcaggtattaaaacctccacatgtcataagcgccgaaataaccaagacagacccccttcttcgatcgtgaatcgcgttccttaattcactaggcagatcctaagttgtgcgtacctattctcattcccaagtccctagtcgttgctgtggcatccactatttatttacttaaacagaatccgggagagcttcgaaatccaagctttcgttcgacccccggcgggagggaggatgaacccccactttctaatttgcaaagaatctattacgtagaagtaatcccgggcacccttggaagttctatattgggttatcctaaccagggggttcccggaatagtcttccaaattggctacctcaacaaaggtccggaacagcaggaccccctcttggactccacacggggtttcgaccggagcgcactgggcattcactggggccccagagggttaaccgcgtgagacgccaatattctacggcgacatgtccgctaacccacagacgtagtgtacgtcggccagttatatcggcgtacccacggggatacagatatagcgaccacagccacggaaat

SEQ ID NO: 611744 - DNA, 642 bp, Homo sapiens
aataaaacattatgtataaaagtcttatttttcacatttttcatccccaagactacaccctcctcgtggtatcgggggttttctctctaactttctaaaactcaactacctctctttactctggttcggcgcgtactcacccaatgtctcctacaagtgtcaattctttatcttcttaaacgactttacagcacacaagtcttatctttcaatcaggtcctattactattcaaatctaatactgtcacaattttaaaaacacaattatccaatactctgtcttttcacttacatataatgcaattaccccagcctttgatacagtgaattctacctaataaacacttttagattctattccacataaaactcattcctttttatgccaagtcaaaacgggccctccatgctccactccttctctgggttataccaaacatatttctttttcactttcataaactcgacttttttcatgctactccttataaattaacactttcaataactttctcataactaatttctcagttcattataactaccaaaaacactatttaataacttttccgcaataattaactataacttcattaaaatatatctttacaaataattactaataaccttcacctttcaccc

SEQ ID NO: 611745 - DNA, 105 bp, Homo sapiens
atagatcgagcagtgctccatgcttaactgatatttggaggtcagcacaggtgctcactgtgtctgacggcaacttgtacatgggaggcatgcacctgaagtggg

SEQ ID NO: 611746 - DNA, 310 bp, Homo sapiens
acacgctagcggttgcttcatcagaggtgaccaaaccagaagaaccaacaatactaatgactgacaataataagtctagatgtaaccatcgtacaaataacttcataagtcacattcttaatcaccaatagaaaaataatgaacaagtaaaactcttataaaaccaatatttacaacaatcatgatcacttatagcattatcaccaccattctttaatcactacttgtagtaattttaatcacaatcaattgttcatcatcatcaccaccaattgtcatcttattcactacttaccacaaccggcaacaa

SEQ ID NO: 611747 - DNA, 155 bp, Homo sapiens
aggattgttagagctcaggcgttcgaggctatgtagtacataatcacacctatgactagccactgcattccagcctgggtaacatagcgagcccctgtctcttaaaaaacaaaagatgtggccaggcatggtggctcacacctgtaatcccagca

SEQ ID NO: 611748 - DNA, 158 bp, Homo sapiens
  misc_feature (7)..(7): n is a, c, g, or t
cgcaatntcttgcgtccacctctcagaagtttttccaactgtgcggttgctgagcaccgctaggggaaatgagggtgacataagtggggtgattaggactgctggacccgtactgttatctcactcatgagggccgactcctatccccactttgattt

SEQ ID NO: 611749 - DNA, 1383 bp, Homo sapiens
  misc_feature (1383)..(1383): n is a, c, g, or t
cggtacgcgtgctcttggtgcgtaatcttgatattgtcatgcttgcagcttgattagccgactccttcataccaggaccagtagccgaacgagcaacataaaacgatcatcacccactaggatgagcagacgaactgatgacaccactgtagcacagatctgacatgaaccaaacgagcccctgaactacaatcacaactgtgtccaaaaataccgacctatccgcattgacgggggagtcaagtcgcgttagtctaattaagccagtgccaagtatacctatgtatatgtgtacctttgcaggcgagggggactgtttttgtacgtggaaagtctcgtttgtgcagctctagcatcctcgaggactcgtaagggcccccaatagacgcgcgcgcgataccgaaagcgggaagggcgaaactttctgaccacgcacaagagcgaggacgtctgtcacgctcgcgggctaaaaatttccacattcccaaaagctctgccacttgccttgatatctagaataccagtacttgaactttcgggcattctactgaaggtgattactaagagtctagcgcgttgagggcgacatcgcaattcaagtttcttgagactcaacatacatagtcaaagcacttgagagaaccttaagcctcacagtttgcattatcgccatggtatagggctgtacatccatcaaagtccttgatctctgtggtatacatctataccctttgtgattggccctataacaattatcaccacgactcgtccaggcatccctaccttctccgtcaagcgtaattcgccccatttcacaaccccagatctccctccgaaggcggggcccacgtcttacctaggcggatccaatgcggaaattgttggtgtggggtaattgcgcatacgagcgttttgtccacagctggtggacccttggccatcctccttccattttatttggtggccttccatatttttcctccctttctagtggtagtcccctcgtttagtaccaaatctcctgtcccaaaatcttaagaatttacctgtttacaaccctatttaccatgtgcgcaaatagcaatttcaccgttttgggtgcgttggccagaaaaagcgcccaaccccagtgcgtggcactcacattggggaccaattttcttgcttaaggaaatgataggggcgaccgcatcggtcaacatttacacaagggcacttggtccctatcccaacgcgtcactatggatttggcaccgggggtgctgtacaccagggcacagctatacacacaacaagaccctcctgacgagtacccagtgggaccccggccaagaaaaccctaccccggggttctcccccatcggagagatcatatcgtactgn

SEQ ID NO: 611750 - DNA, 126 bp, Homo sapiens
gttatcttgtttttaatattttctctttgtctttaatttttctctgttttattactgtgacttggtatttccctctttggctttatcctgtaatgggactctctcctaagttgcccgccaatcgaa

SEQ ID NO: 611751 - DNA, 318 bp, Homo sapiens
tactgtatctctaacatatgggcacatagtgagaccatctcttttaaaaaaaaaaaaaagaaaagcggggtgtggtgatgcgtgtcatagtcccagctactcgggaggctgagctaggaggatggcttgagccgtgggagttggaggttgtagtggcgctatgatcatgccacggagactctagcccaggagccggggcaacagagcaagaccttgtctctaaacagggcaaaacaaaaacaaaaaaacaaaattcaatggcatttttatatattagcagtgaacacttggaaatacttgcaataccatttataacag

SEQ ID NO: 611752 - DNA, 224 bp, Homo sapiens
gaaaagaaccatacatcaccaggccatatagcaaactgtgtaggaagccgacgcttatactatcttataaagcaatgatggtccagcacacacattgaaatgcagcatagcaagccaatacgcaatacattcaagcagagaaataggtgtcttcacctgcactgcttaaccgcatggactctgatgtaggtcacgtgcaccttagaccccagcaagcagcatga

SEQ ID NO: 611753 - DNA, 928 bp, Homo sapiens
acatcgtgtgccaaaggctattgctcatggagaagtgtcggtagccatccatcagtgctttcagtaatgatgagtgtaggacacagagccagccgtgggtcaggatgcgaattattgataaaagtctccaggtgaacatggctgaagatttgctaatatattaataattgactaggaagatgaacttgaaacaaatctttgggcagctgatagattcaaatctggatgggcatgctgtgcactcaccaatgagaccaaacagacatcttttgatatatcttataaatggaaactttacacagaagaaattagggatatgataaccactatagattccgtctacaaaatcgaactaattcttacagcttttctatcagttagtctatggaactagtgttgaagtatctggcagagaatcagggtaatccctaaggtcttgacaaaagagaagaaaaacaagcctcctcgtcctagtcttctgtctagcaaagggataaaccttagatggcagcttgtactgtgtcagaagtcccgggtatacactcgtgcttctgttggagagatgagacattagaccttagttccagtcttcttctgatgtttccaatctaccagaacccctcaagaacattgttgccaaatctgggggcaataggtggtactcaggattttaacccaagtgttcaaacgctattgactcctgaccttggttgaattcaaatgcgcttaaatttccttaacgtttcggtaagctctcagggacctacagggggctcaaaaagaacaaagcagggcgcacgacccgagaacgccggcaatccctccacccccattagataatatcacatatacaataatgtccagcacgacaagaacctgtcatctcacatccacgagcaccaaacaaataaatgtcccacagacataa

SEQ ID NO: 611754 - DNA, 222 bp, Homo sapiens
ctgtgtgtctgccacttagtcgtgctctctttgtttcgtcatctctctcttttgtctgcgtctctcttttatctctgtttctcttcactctttgtctctctcatctcttttgtggctgtctcctctccatctcttatctctgtctccctcttgtttctgtctcgtgtgtctgtctcttttatctcttcgtctctcatctttgtctcctcacctctctctctt

SEQ ID NO: 611755 - DNA, 873 bp, Homo sapiens
  misc_feature (853)..(853): n is a, c, g, or t
aagcatggtatcaacgcagagtggccattacgcccgggcgcagtgattataggctttcgtctaagattaaaaatgcctagcccattcttaccacaaggcacaactacaccccttatccccatactagttattatcgaaaccatcagcctactcattcaaccaatagcccgtggcgtacgcctaaccgtaacattactgcaggccacctactcatgcacctaatggaagcgcaccctagcaatatcaaccattaaccttccctctacattatcatcttcacaattctaatcctatgatatcctagaaatcgtgtcgccttaatccaagcctacgttttcacacttctagtaagcctctacctgacgaaacacataatgacccaccaatcaaatgcctatcattatagtaaaacccagccatgacccctaacagggccttctcagcctcctaatgacctccggctagcatgtgatttcacttccatccataagctctcataataggctataaaccaaaaataaccatttaccaatgatggcgcgatgtacacgagaaagcacataacaagggcacaaaacactgtcaaaaggctcgataaggaaatcctattatgactccgaagttttctcgcagctttctgggctttacatcagttagccctaccccattagagggttggccaaagggttacccgtatcttaagccattaacatcggtacgtacaggtcaccggcctgtttgaacccggccaatcgcggtgtcaagggggtataccaacagggaggggcaaacagggtggaatggacggaggagtagctgcgaaacagcgggtgtgggtcgcctccgcaacagnaacgaaagcgcgacaagaca

SEQ ID NO: 611756 - DNA, 1373 bp, Homo sapiens
gagatgcgcacgaagactccttgttctggtcacacctggacaccgtggtgctgactgaaataactttactcaagcggaccagctattttagcgaacttatcttcttcctagctggcatatcggcacaatgtgctctggataaccagtagccgatcactcggtgtgcgtatctcgcctagagattgcttgctcctgtaagattggaaagcggattgactgaatcccctatagcccttatcatacctgcaggcaccatacatggatatccggagtgactggctcatgatagcgacgttgcgtgacgccctacccatgattagtagtcgcgtactcgaaatcacgttgttgagagcattgcaatgaagaacgtaatgagagaccccgtaatggggaagactcagggatcatgagagatttcgcaaaagtttataccctggtggcacccccattgaggagattatctttgactctcgatcccaacctcttacctagagttggtgggccattcgtaggcctctactaccaaggacacggaaacaacaaggacgcattggcgtattccaactcattaggaaacgtcttttagtccccactggggaataggctccccataaagggcgacagagaagctccctctcttaacttcgcacatggattggaggacggtaacctcgttgtgggacaaggctctttcctgacgggttcgaaccttccgggcgcgatgggcaacacaatttaagttgggttgcggcacacgtttcgcaaaaactttgtgctcaatcagggggggctcaccacttgcggaattagacacagcccccatatggcttctgtcgacaaactacctaagaaggcggcacagccaaaggtttgtggaaacaggcccacagagtttcggacccattgataaagacaaccgtctctccacacattatctttcggacaacgagggcggtttggcaccaaaagcgaccgacttagggcaaacgcttggctcacccgaaactttatcccaacccacggaagttaggttccctaagcgacgcacattttggccttgcgccccaaaaaaaacaggaaatatttcgctgacacttttccaaccgacttagattctttcccacagtagcagaacgcctaacgcgccgtgtcatagtttggccccataaaaccgatgttaaccgttgagacgtcttccctttgaccccctgggactagacggcaacccagaacattagaatatacggctttacacagggaaagatcggaacgtaatacggagagccatctgggcagtcatttgagacagtaacgcctctgcacatagcacaaggtgtacggaaccgacacctctcggagacgacatggcccgc

SEQ ID NO: 611757 - DNA, 128 bp, Homo sapiens
cagcgggagcaggataaacagcgcaatcgccgccgtgcgaatcaggtacagcaacgacagcagatacttgcgccggaacagcccgcccagcgcgccgcagtaatacgtgccgacgatgttggcggccg

SEQ ID NO: 611758 - DNA, 364 bp, Homo sapiens
gggggggaaaaaaaattttctcctttttttggggaaggaaccccccgccattttcccccgcccgttttaaaaaagttggggtttccccttggtggcctttccacccttttttgttcctttttccccattgaaaccccccaaaaaaaccccttttgggggtttttaaaaggggtggccccctttcaaagcgttttttccctgggggggttttccccaaaaaggaccccttggaaaaactgggttgttttccctttttttgaaatttgttttaaaatttttggaaaccgggaaaaatttttggtttttttttttgtccaaaaaaatgttttttggtgggccaaaaaaaaaaaaattttggcccata

SEQ ID NO: 611759 - DNA, 137 bp, Homo sapiens
tgattcttacgggcagcacacacggtgtgaatgtcagcatgcaaacaaagccgaagaacagcaaggcaattgccccgaggttgccactgcccagcgtgctggcgatgcggccgagcttgtcgtcggaagaggactcg

SEQ ID NO: 611760 - DNA, 641 bp, Homo sapiens
aaagagggaactcaagccagaccagactgttcatgcaacacaattctatacccaatacctagactatacctacatagatgccctcttctgggccttcccaggccccaaccccatcaccctactttaccagttccactctaatttaagtcttagcaaacacctgtaatgccttgaagccagaaagtgaagtcctccactgtgttgtcaaggccaccaggagaagtggatagaaaattagtcccatgttcttcaaaatataacaacaaactcacttatccaaacaaataatagtgattaaggggtattatgctattactgcaaaaggaccaacagtttagaactgggaaggctgtgtactataagcaaaaaaacatggactttggagcctcatcgaaatgaattacaagtggacactacaacttaatggcaagcctagtatttaactcagttttcacacatctaaaatgcaaataataccttctttatagagctttgggacattaccataacccaaaatctgtacagtgcctagcacattggttggtgctccattcacctgttcattattctctttttctttttcaagttttccaaagattacccaagatttgatattacctttatttcccccggacacacag

SEQ ID NO: 611761 - DNA, 140 bp, Homo sapiens
atggcatcgtattcagggaaagaaaagctgttagacgccaattaaggttatgaattctgctactactttaatattaaacctttaagtgacactttattgaacactattacaaatgtggccaactgacatagctggtttac

SEQ ID NO: 611762 - DNA, 1134 bp, Homo sapiens
  misc_feature (120)..(120): n is a, c, g, or t
  misc_feature (495)..(495): n is a, c, g, or t
  misc_feature (501)..(501): n is a, c, g, or t
  misc_feature (950)..(950): n is a, c, g, or t
gtgttgtccaacgccgctcgctgttttgccctatatgttccacggtattttattgttgccacgcccgcaaaattagatgtttaaatttgggagggcgcccccccttaatcgcttgttggngggacacaaaattctcagcatggtgtttaagacttcggggaagattaaaaattttgtaaggagaaaaatattatagatatagtgtttccccccttagatttccaccgctgataaaattggttggtctatccttcggagagcgcacccacaaattttcttaatgtgggtagaaatctcacatctatcacacagtgattttgggccgccccaacacgttggtgtttttcgtgctttttgagagggtgtgtgtgttgtatatgttccacataggacgccacacttatggtgtggtgtacagcacgcccacattgtcgcgtgatatcgcacagatgggtgagagatgtatatatgagacacactcgcgacatatatatncgcacntctcacacgggcatatatagagtatatatgttgtttgtgtggggttattatcttgcccccacactgtgtataaagagggtatatctccacgcgtatatgtgtgtagatgcacacacactgtatatgtatatatacaatatatatgtagaaacaatatgggagattgtataaatacgtggtataatatatacactcgtggttttatatttgtgggccacgcgtgagcacgtgtgtataataataatctcatagagaggtatatatataataataaagttgtgtttgtatacgtctggcgcgtgcacctcacacacacacacacatcgggctataggagataatatacactcctccacacacaatataagtatatcttaacactttggcacatatatggtgaatataaaggagagagactcgggggctatatataatatataagattattnttgagggcacgaacacgaggaggctcgttaatcctatactgagtttagtaatgtttctgtaaattgaggagaaaatgttcacccacacaattattaactttttaagtgagtttaaacacatggacacttttaataggggacatgttctgtgtatagcgaataaataacttttatagtatcacca

SEQ ID NO: 611763 - DNA, 590 bp, Homo sapiens
caacgatggtcctacagctgacactgcggaggaggagagggaagagatatcatcccctcctatggcaacctgtgggatagcaatggcccttttcctgttgggtgtaatctgctgccatctcttgctgtctgcagcctgacacagaagggtgaaggtcaccaggttccactgacagtggtctttgtctcaagcagcaaccctaggacagtggctcccttgcaagattcagccacatctcatgactgtctgcaacacaccccatgcctctgatggaaggaacccaatgccccatgctacacccatttctgccagactggggtccctgatctcaatttccctctgcagtccccaactctggggtctgcagacacatttcagatccatccttagtacctcccaggaggcagaagccagaggaaataatccttgccccaatgcacctgaccatgccacttcactgtatgctctttctccctctccaggaaaaatcaagcttgttgaatacttaccaatgtgcccacgtacatttagtccccacaaccacttcatgggacagcattatcatccccaagttacagatgaggaaattg

SEQ ID NO: 611764 - DNA, 136 bp, Homo sapiens
aaccaaaccaaacaaaacaaaacaaaccaaaagaagctatggaagggccttataagctggctcagaaccaaggacttcctacctttctctggtttctccccatctcccaagcacagggaggggcactcttgggaag

SEQ ID NO: 611765 - DNA, 120 bp, Homo sapiens
ctccaatcagtgctcccctcccatcaaaccagcgtattgtgtgacacgtcgttggactgctgtttttgataaccaacaagaggtcaatgtatagaaatccgctgatgggagcaagactgg

SEQ ID NO: 611766 - DNA, 362 bp, Homo sapiens
ttcgcggaagcaacactgtatttgctgactggaaaatcaaagataacttaaagaatgtcttgatatttcaggtgggacttagttattaggcagaccttggcttgcgcacctatttcttccgatcccggcgccgaaacaacaccgttttgtagtccttaatccacgatcctcatgaatgtattgatatgatggagtgcagacttaccttattagagagacctagactcaagcatgctattacttccccgtagctcgaatacgaaaaccgttgtctattctttatccccttccctcattaaagactggtagatgactcagtggccaaaagaagacagagaccaaaatgcaaaagggtaccgagc

SEQ ID NO: 611767 - DNA, 125 bp, Homo sapiens
  misc_feature (18)..(18): n is a, c, g, or t
  misc_feature (87)..(87): n is a, c, g, or t
tcggtaccgcgacacgtnagctggacccgcagctgaagcggaaattagacaggctggcacctccggaaaaactgcctttcagccttngtgttccgtgcggtacgtgtccggtacgtgtccggcca

SEQ ID NO: 611768 - DNA, 148 bp, Homo sapiens
ccctccctattgagacatcagctcaggccagaagcacctggacactccggagcttgtggactgcgtactgacgtgtgctggaagggcaggactcaataatgagatcccagtttgactcccatctgtatgtactagtgcccgtctcctg

SEQ ID NO: 611769 - DNA, 182 bp, Homo sapiens
gtgacatcgtcttttaaaccctgcgtggcaatcctgacgacgcgtgatgccaggagacaggcgactgagtcactacttctagatcatcactattgatgatatcgaatgttcatgtgagcagcatgtgctcagcagatgcagcagatcgcatgtcctcgcggagctgtgtctgatgcagacac

SEQ ID NO: 611770 - DNA, 378 bp, Homo sapiens
tgtctgcacggatggcaaatatcggtcatatgacccgattgcccgggtttccattgtaggactgacagctcaagttgcctaaagtgtggaacaagtactgacaggtagagggagtttcactctatgtctatgtgaaggaggaccttaaagagattctttcctgtataatacgtgggatacagtacactgccaggtgaaatcaggagcctaaataaagcatgcttcgcccacaccgcctgtatgagacccgcgaagcttgggggtcacattgagggatgtagcatctgtcgaactgcaccatgaagcttggagtgaagctcttccgggggacactgtgggcttcaatgtcaaggaatgtgtcctgtcgaggatgtacgg

SEQ ID NO: 611771 - DNA, 137 bp, Homo sapiens
cagaaccggaagcagataggaaaatgattatgagggcgtgatcatgaaggtgataagctcttctatgatggggaagtagcgtcttgtagacctacttgcgctgcatgtgccatccgaacttctccttccttcgcacg

SEQ ID NO: 611772 - DNA, 906 bp, Homo sapiens
  misc_feature (2)..(2): n is a, c, g, or t
  misc_feature (98)..(98): n is a, c, g, or t
  misc_feature (100)..(100): n is a, c, g, or t
  misc_feature (167)..(167): n is a, c, g, or t
  misc_feature (391)..(391): n is a, c, g, or t
  misc_feature (502)..(502): n is a, c, g, or t
  misc_feature (574)..(574): n is a, c, g, or t
  misc_feature (600)..(600): n is a, c, g, or t
  misc_feature (604)..(604): n is a, c, g, or t
  misc_feature (693)..(693): n is a, c, g, or t
  misc_feature (725)..(725): n is a, c, g, or t
  misc_feature (754)..(754): n is a, c, g, or t
  misc_feature (765)..(765): n is a, c, g, or t
  misc_feature (767)..(767): n is a, c, g, or t
  misc_feature (788)..(788): n is a, c, g, or t
  misc_feature (796)..(796): n is a, c, g, or t
  misc_feature (820)..(820): n is a, c, g, or t
  misc_feature (842)..(842): n is a, c, g, or t
  misc_feature (902)..(902): n is a, c, g, or t
angggtgaggagagggagaaaaactgaaaaagaaaagagagaggagagaggtttggggcaggggagaaaagccagctagatttggggcggcaggagananttgagggggtgggggccaaggtggggccacaggaagagagggctcctccccccagaatacaaaattngggggactgaaaggggcggtcctgggcctgcgggacggggaagagaagggcgatgtggtggggctgaggtcagttgttggtttccttctccacccaaccccctgggttcctgcgcaggatgagtttgcggatttcgtcgtagaaatgtatgaggaaactgtaggggaaggcacagaaccaccagctgggcttgagagggtacatgcgcgggccacgtccatgcnggggcagtgggacaggaaggcagcaagggccgtttcctcaaacagcccgaagatcaggatcttgttcttcatgccctgctggaagaccgagttcctccgggtcttgcagangatcagatcggcccactggacgacaacaatgctcacaaagaaggccgtgtggcaggggaactccaccacctncctctgctcgtatgttcactgctgcncgtnactgttttccaggtcattgacggtgcggtcatcccagttcagccggatgcccaccaggttgccgggcaagaagccattttctgccaggntcacaaagtaagaaaagaagccaccgagagcntgggtcattccaatctgcccgtggcccangctgaagagtntnttattgaccaatttgtccgtncgcgggtncctgggctgtctcttcatgaagtngctttcggcagcttcgtacgcnattaagaaggcagggaccatgttagttcccagatcgatgcagaagatggtgaaggtgccnaggg

SEQ ID NO: 611773 - DNA, 192 bp, Homo sapiens
tagagtcagctcaccaggatcttctttccccgctgattccgccatggccttctctcatatacctttatagaagaggttccatgataaactagaggcacagggagatgatatgactatgcctagagtcacactagcatattacagtggcagtcagtaccatatctgaccgctagagatctatactcatgcaac

SEQ ID NO: 611774 - DNA, 151 bp, Homo sapiens
catcatgtaggcagtggtccaaccttctggcaccagggctgttttgtggagacagtctccggggactcgggtcgggagcgtttgttcagatgaccgttccctgggatcacagtgttagtcttaaggggcagcaccaggccctcactgggca

SEQ ID NO: 611775 - DNA, 381 bp, Homo sapiens
cagttccccactgatatccatgttatacccagagtatagctcccaaattcacctgtaagtgaaaacttgcgatatttggttttctgtttctgcattaaattcgtctagggtcaatggcccccagactacatacgtgtagtcacaaagcaacatcaattttgttcttttctatggctgtgggcaaacttaacacacaacaaaactcagatatgtgatctgaggttcataactgatttttatctcagaaactcatatttcacttttgtgttcttgtctattgtaggttttaacacatcaaagctgggaaaatcggagcaaattgcccttccccatggccagcttgtccatggtatacacttgtatgagcaaccaaaagataaa

SEQ ID NO: 611776 - DNA, 334 bp, Homo sapiens
cggtgaacgccaaagccagcttttccgccacgacaccatcgaaaggagcgacgatcatcgtgccacgttgtgctcgttcggccaggccaagcgccgccttggcagtgcgcgcttgaccctctgcgaccgctagctgcgccttcgcgctctcgaacgcagcaggggagatgacttcgctttcgagcaaccggcgctgttgatctgtctgtacacgtcgatccatcaggccggcttcggcggccgccagggatgcttgcgcttgtgtcacgcgaagccggtcaggttgcgcatcaagttctgccaggacttggccgcgggagaaccgttcaccccc

SEQ ID NO: 611777 - DNA, 835 bp, Homo sapiens
tgggcttactattcagaagtttattggacctccccagccaggcaggccaacccttccgagcgggggaaatgtccatctagcggccctctgctgggttgacagcctatgcccatgaaagggtatctgggaagcagggagggagcccgtggcgtagggcaggccttaaacgcaagggaagctggagcagagatctgcacgactcaaccccattggatattcttctcctgcctcagtcagggccagcggtggtgggtgactagagccgggggccagatagtccggtggccatctgcgcagggtgaaacgctggcctttctctaaagatcatggggtgcccgccaagaattgcgggtggacttccgggtcttcccggggcttggggaaggctctttctcgggggcgcaggataactccgacgggccatgtcccaatgtcggggagaacatgacgggcatgaaggtgggacacacaggggctggtgggcgggcaccttcctcctggctggaggatgtaaaccctggggcctccacctttggggggggcttgagggaacctggctggaccttgaccaggccccgccgaagtcctcccggttcaagcctcggaccaagggccccgaggtttatctccgggcctcggcctctccaggttcttgtgggacacatctcaattgcgtgtcaccacaggtgcgggatgttcttgaatgtcctaaggaggctcacacttcgtttccgtctttaaaatggcgcgctctagtgtccttgcacatgtggcccggccatggagggaaaccgctccaaaggagagaaagtccaagtcggcgggctggaatatg

SEQ ID NO: 611778 - DNA, 443 bp, Homo sapiens
ctagagtacccccctcccccacagtgagcatgcctcttcagaggtagagccaaagccttattgtgaaaggcctggacttggcctaggacccatcaggcctgggtctctcacgcataacatgcaaagtggattaatcgccaaagattcttctgatctgacattaggaaatggtgagagaaactagatgactgtaaacttggtcacaggcctggtcctggcagttctttgcggacttttctctagcataatgccaaataaacttgcagtctcagtgtgctctcgattgtatgaatatctagtcctttctgtggtgctcagccaagacataaaatctaggattcagagcacatacaataccagttatgtttcggaacgagggaaaagagtcccctagcccggatcttgtgctgctttgctcactgtggtgtaagggaggtccgagc

SEQ ID NO: 611779 - DNA, 2323 bp, Homo sapiens
ggcacgaggcccgccctcgctccctccactcctctcccctcccctccccggcactgcagcaccagccgtctgcagctccggccgccacttgcgcctctccagcctccgcaggcccaaccgccgccagcaccatggccagcaccatttccgcctacaaggagaagatgaaggagctgtcggtgctgtcgctcatctgctcctgcttctacacacagccgcaccccaataccgtctaccagtacggggacatggaggtgaagcagctggacaagcgggcctcaggccagagcttcgaggtcatcctcaagtccccttctgacctgtccccagagagccctatgctctcctccccacccaagaagaaggacacctccctggaggagctgcaaaagcggctggaggcagccgaggagcggaggaagacgcaggaggcgcaggtgctgaagcagctggcggagcggcgcgagcacgagcgcgaggtgctgcacaaggcgctggaggagaataacaacttcagccgccaggcggaggagaagctcaactacaagatggagctcagcaaggagatccgcgaggcacacctggccgcactgcgcgagcggctgcgcgagaaggagctgcacgcggccgaggtgcgcaggaacaaggagcagcgagaagagatgtcgggctaagggcccgggacgggcggcgcccatcctgcgacggaacacgttcgggttttggttttgtttcgttcacctctgtctagatgcaacttttgttcctcctcccccaccccagcccccagcttcatgcttctcttccgcactcagccgccctgccctgtcctcgtggtgagtcgctgaccacggcttcccctgcaggagccgccgggcgtgagacgcggtccctcggtgcagacaccaggccgggcgcggctgggtcccccgggggccctgtgagagaggtggtggtgaccgtggtaaacccagggcggtggcgtgggatcacgggtccttacgctgggctgtctggtcagcacgtgcaggtcagggcaggtcctctgagccggcgcccctggccagcaggcgaggctacagtacctgctgtctttccagggggaaggggctccccatgagggaggggcgacgggggaggggggtgatggtgcctgggagcctgcgtgtgcagccggtgcttgttgaactggcaggcgggtgggtgggggctgcagctttccttaatgtggttgcacaggggtcctctgagaccacctggcgtgaggtggacaccctgggccttcctggaagcctgcagttgggggcctgccctgagtctgctggggagtgggcattctctgccagggacccatgagcaggctgcatggtctagaggttgtgggcagcatggacagtcccccactcagaagtgcaagagttccaaagagcctctggcccaggcccctccgtgggacagccccgccgcccctccccaccagggctttgcagatgtccttgaaagacccaccctagagccctttggagtgctggcccctcctgtgccctctgccctggtggaagcggcagccacaagtcctcctcagggagccccaagggggattttgtgggaccgctgcccacagatccaggtgttggaagggcagcgggtaaggttcccaagccagccccaacacccttcccacttggcacccagagggggctgtgggtggaggcctgactccaggcctctcctgcccacaccctctgggctgagttccttctttcccttggacgcccagtgctggccttggaggacggtcagctggaggatggcggtgggggaggctgtctttgtaccactgcagcatcccccacttctccacggaagccccatcccaaagctgctgcctggccccttgctgtaaagtgtgaagggggcggctgagttctcttaggacccagagccagggccctcaacttccatcctgcgggaggccttggccgggcactgccagtgtcttccagagccacacccagggaccacgggaggatcctgacccctgcagggctcaggggtcagcagggacccactgccccatctccctctccccaccaagacagccccagaaggagcagccagctgggatgggaacccaaggctgtccacatctggcttttgtgggactcagaaagggaagcagaactgagggctgggatattcctcatggtggcagcgctcatagcgaaagcctactgtaatatgcacccatctcatccacgtagtaaagtgaacttaaaaattcaatcaaatgaacaattaaataaacacctgtgtgtttaag

SEQ ID NO: 611780 - DNA, 365 bp, Homo sapiens
tgccggtaccagcgctggagcgctggcaaacagccacagcagcacagggtgaagcaccacatcaagagcgtggtcagcaccgaaaagtaccattgcagggtaaacgcctgggcgttggtcagcaggtagtcgcgcgattcgggcatgaagatcgccatggcgtacaggagcagcatcaggctggcgctgagcagggtgacgatcagataggccatcggggccagcaaccaaccgccgatacgagagtattcagcttgagacataaaggcttcctgattgaaacggggatcacaggcggcatagcttagcgggtaataccggcttcgtcatctcaatcaaccggatagctcggcatcgcggcgggt

SEQ ID NO: 611781 - DNA, 880 bp, Homo sapiens
  misc_feature (226)..(226): n is a, c, g, or t
  misc_feature (454)..(454): n is a, c, g, or t
  misc_feature (635)..(635): n is a, c, g, or t
  misc_feature (769)..(769): n is a, c, g, or t
  misc_feature (854)..(854): n is a, c, g, or t
tctaaattcactcagcttggctggagaatttggttccttggtgactttagaactcatcagagggctgggcacgggtgggtcacgcctggtaacccccagcactttggcaagggtaagggagggccgattggttttggagctccaggcagaacaccagaccctggggccaccattagaccaaaaaccaccatctcctattcaaacattaccacaaattggccccaantcattgggtgggtaccctgcaggtccccagactactgtggggagcacatggaaggctggcagcaatctgcttgtgggccctgggcaaggcggcagggttgagcagtgcaacccggagcatctacggcccaatggcacatcccagagcccctgggcatggaccagcagattaaaaacccctggtcttctcaaaaacaacaacaacaaacaacaaacaactctggagggnggggggcgcccggggtacccccaaattctgggccctaattagatggaggtccgtcaattcaccaaattccacatgtggcccggtacggtcttcaacccaacaggtctggtggacatggggggaacaaaacccctgtggcgggttaaacaccaaacatttaactctgggccttgtgcagagnaccatatcccccctattctggccaatcatgggcgggtaaatatagcgagaagaaggcgccccggtacacgcaatctgggcccttttccacaacaaggatgtgcgccaggccctgaaaatgtgggcaaatggggnataattggttaagccgtttaatactttttggtgttaaaattccgcgggtttacaatttttggggttaaattaaggatctattttntttcccaataagggcggatcggggcg

SEQ ID NO: 611782 - DNA, 539 bp, Homo sapiens
  misc_feature (92)..(92): n is a, c, g, or t
ccgccgtaccagttgcgggataagctcatgggactccaattgcatctaaataaatgtgagagtcgaaagacccataaggggcttcccttgtnttacgatgttgtattttccctctctcatagttgatgaaatgccagggtgaaaggaacagccaactggactagagcacaagtgtcactccagttaccaggcagagtgtccagtaaaggttgaccactaccaccatacatctgctcggggatgaaaaagggctgattgatcagtaagctcttgaaaattcttaagctcactgcatcccttcaggtctccaaaacactaagtttcctccttgtcgtgagagacatgaagcgaacttagtgtcggaagacagagactggatggccctcgggctgacctgcagggtgttgaacttcgggatatagcagagagagagcttggcacgacttgttaccccaggctgtggaatcctggaaaagagctaccatacggcccatgcctggtcgactggaggaccatcctagcgcaactggtacggcggg

SEQ ID NO: 611783 - DNA, 259 bp, Homo sapiens
ctattcacccaatcccggtaatatgagatggccagcaggctcgacacaatctatatcagaaggttatggccctatatggcatcagctagcatgttaacaccaaaagccttatctctatggaactatctgcgtaaagaccttagacttgtaacagacctggaaactaagaaaagcttcgatcctcagcaccaggggagtgccattcagattatagaagaacctatacaggcccactaatgaaagactattctagcaggat

SEQ ID NO: 611784 - DNA, 237 bp, Homo sapiens
actgcgaagcggctctttgggaatagtgtacagtttataacttatgtctgggagtgagggatgagattgcttacggagatagtatggagaagataagggggcttatgagtcagccctgtgaatctttcacatttgaaatttggtagaaagaaatggaacaaaagaggctgagaaggaagaagccgcttcgcagttcgcagtaagaagccgcttcgcactatgaagccgcttcgcagt

SEQ ID NO: 611785 - DNA, 491 bp, Homo sapiens
cacgaggggtactctaaacgatgccatgggaaatacagaactctctatgatccctttctttgtgggattaacagtgttaagatcccttgttttcatttgatttaaaatgccacctgcaattgcaatatgcagaataaatggtataaagaaagacatacaacatcttttcatttcacttatagctcactgtatgatcaaaactatgttacttgacttcacagcactccattccatatccataaatgatacttatttaccatttctaagcatcttgagatctcctcttaaaatatgctttgaactattcagtctaaatgcagcattctaaaaagctactagttaaaaaaataggaaatggagttaatggagttaatcttgtgtaaattcagagtgggatgtcaagaatacctctaagtaaagaaaatgactctaatcttcttaaataattcattttctcagcaactttgatgcacgagttaatttactctgcc

SEQ ID NO: 611786 - DNA, 401 bp, Homo sapiens
atccatgcttcatagttcataagtactctaactaggcactgcacttcatagtagcatggtcatgtcgcacttggttatcatatttcgtcagcatcatcagtcagttgcaatgctctgatctcctgctcatcctacaatcctttgcgtccgtaggtatgtcatacgtcggtcagatgctgtagattgtagtccaccgtggtcggttaactacgcacaagatctccatcgcaactggtagtcatactcttcctccagaatcgttcttatcagacagcctgtgtgcctctcgcactgtcatctgcttcagttgtcacagctcttcctgcttcagcctggacatagtcaccttcatattgaatgtgcaaggcccctcacatcacgtgtcattacatggaccttct

SEQ ID NO: 611787 - DNA, 2114 bp, Homo sapiens
cggcgggcggcgagcggcgcgcacaatcctcgctcggctgcggctcccgggtgtcccaggcccggccggtaagcagagcatggccggtgcgggcccgaagcggcgcgcgctagcggccccggtggccgaggagaaggaagaggcgcgggagaagataatggccgccaagcgcgcggacggcgcggcgccggcaggcgagggcgagggcgtgaccctgcaggggaacatcacgctactcaagggcgtggccgtcatcgtggtcgccatcatgggctcgggcatcttcgtgacgcccacgggcgtgctcaaggaggcaggctcgccggggctggcgctggtggtgtgggccgcgtgcggcgtcttctccatcgtgggcgcgctctgctacgcggagctgggcaccaccatctccaaatcgggcggcgactacgcctacatgctggacgtctacggctcgctgcccgccttcctcaagctctggatcgagctgctcatcatccggccttcatcgcagtacatcgtggccctggtcttcgccacctacctgctcaagccgctcttccccacctgcccggtgcccgaggaggcagccaagctcgtagcctgccactccgtgcattgacttgatgcacaacatcacaaaggcgatttttgagaactgatagtgcatcagccgacccaggtaatttaaaatattcttcatccagagatagaggtggttcttcctcttacggactgcaaccttcaaattcagctgtggtgtctcggcaaaggcacgatgataccagagtccacgctgacatacagaatgacgaaaaggagagatcaatgtcttattgtgatgagtctcgactgtcaaatcttcttcggaggatcacccgggaagacgacagagactgaagattggtcactgtaaagcagttgaaagaatttattcagcaaccagaaaataagctggtactagttaaacaattggataatatcttggctgctgcacatgatgtgcttaatgaaagtagcaaattgcttcaggagttgagacaggagggagcttgctgtcttggccttctttgtgcttctctgagctatgaggctgagaagatcttcaagtggatttttagcaaatttagctcatctgcaaaagatgaagttaaactcctctacttatgtgccacctacaaagcactagagactgtaggagaaaagaaagccttttcatctgtaatgcagcttgtaatgaccagcctgcagtcaattcttgaaaatgtggatacaccagaattgctttgcaaatgtgttaagtgcattcttttggtggctcgatgttaccctcatattttcagcgctaattttagggatacagttgatatattagttggatggcatagagatcatactcagaaaccttcgctcacgcagcaggtatctgggtggttgcagagtttggagccattttgggtagctgatcttgcatttcctacgactcttcttggtcagtttctagaagacatggaagcatatgctgaggacctcagccatgtggcctctggggaatcagggatgaagacgtccctcctccatcagtgtcatcaccaaagctggctgcgcttctccgggtatttagtactgtgctgaggagcattggggaacgcttcagcccaattcgggtcctccaattactgaggcatacgtaacagttgttctgtacagagtaatgagatgtgtgacggctgcagaccaggtgtttttttctgaggctgtgttgacagctgctaatgagtgtgttggtgttttgctcggcagcttggatcctagcatgactatacattgtgacatggtcattacatatggattagaccaactggagaattgccagacttgtggtaccgattataccatctcagtcttgaatttactcacgctgattgttgaacagataaatacgaaactgccatcatcatttgtagaaaaactgtttataccatcatctaaactactattcttgcgttatcataaagaaaaagaggttgttgctgtagcccatgctgtttatcaagcaatgctcagcttgaagaatattcctgttttggagactgcctataagttaaattggg

SEQ ID NO: 611788 - DNA, 1076 bp, Homo sapiens
cactggtgcagagaggagggaccccgttcgtgcattctgacaggatcttgtgccagcctgcatgtgtgagtggatgtgcatgtcatctgccattgactagatggccacccctgtgacaccccagcattgctgtctgttgtcacttgaactggtgaaccactgcctgtgctgcctgcctgcgtgattggagtgctgtgcagattgactcatgtgatgttgcatgaaggctgactgtgaccgacgacgtgagactttcacatgactgctgtgttctgcactcccgatggtgacgcgacgcattttgcctgtgtgcaaccttgacacaccttacaacgcccgacctttgccactcacatgcttgcctgtgcattgatacatgattctccaacacgaaccaaatttgcaatctgctaggcctctgtcatacaaacctgtttgtgtgtgtgcacccccctgcctggccttgacgaattgacaccatgctgtgccctggtaacgtctttccaagccttgatggcggcctgttgtggcctattttgccagacccggggcacaccacggactcgcctcctgcccagtcttacctgcacttggccatctacagcactgtgcctatccgcccaagggggcaccaagaagtccacacatcgacacagtccgcgccttgcgacccaacaattgttccgtgcttggagcctttgtggacgcaggagcacaaaatcgggatccgggcttccccaaatatccaatttggggcagaccaacacaaccagacctggtttccttcccactgtgcgctacaaaagataccgatatgagcgcaaggaacgaaaatcagcccacacaacaaagaaccgcccgcacactggcacccagtgcaatcaaacgcgccggccttgcgcttgaactcacatccgcgtactgtgattccaagaactgctctctaacacccattgacagaacaccccttgctaacccactgtcccaccaccagaacacccgacgtagacctcgacacccaagcaacgtccatatgacgatcccccaattgccctccattggtgtctacacccagg

SEQ ID NO: 611789 - DNA, 228 bp, Homo sapiens
gaggagtcccagtgaaacctccggcctggtcaggaggtcagggagggcttcctgcagcgaggtgagaagggatgctctggcagtgttgtggctccagacaagagctgccgtttgagagtagctgaggcctgtcaggtttctaccagcccagttacagatgtggctgctcagctcagagagaggggttgtgactcccctatggaccacttcttagctgtgtgttcctag

SEQ ID NO: 611790 - DNA, 201 bp, Homo sapiens
tgcctgcagatcacactagagatcccctgggcagaaatatatgaaagaatcagtttgccatcccaatgctaccactgttaatcttttggtgttcaatgttccccctagacatttctgtgcatagatatctctggtgtgtttacatagtcgttattctgtatataccatttctgtgcccatttcaagggtaccgaggctaca

SEQ ID NO: 611791 - DNA, 841 bp, Homo sapiens
ggaggctgtgccggtgggagagggaggcgagccgaccggtgggctgctgggctcccgcggcgctcgtgctccccgccgcagccaggcgcaggcagagcgcaggcggggcgggcggcatggagagcctgctggagaatccggtgcgcgccgtgtctacctcaatggagctcacgggcatcgtgcaagaaccatgcagagcctcatccatcccagacgagagcgtatcgacgagctggagcggcggtggacagatgctgagccgcttgagaaccgcagcctgtgggagcaaacagcaagcttgttgcaaagcccagcctccgaccgggtactggtaccccccccgtcatacggccccgatgcctggccggtccgtggccacaccggattcctagccgccgccgaccaaggggcccgaggaaacctctccgaaggaccaggggacagggctcaagcagcccggcgccccgattcccgggccccggatcggtgcacgccgcggtcaagcaacgccacgggacagggctcctggaagcatgcacacccaaggggggggacacctggacaagcccaagggggcttcaagaagcatccgcaatgggtcggccccaaaaaaggcatcctggggggaacacaaaaagggggggcccgttgcacgtgacccaacgggagaaagggacggcggtacccgcccggaaggtttggatgcggcatggtttgcacgggaggcacccatcacgttacaagggcgacagcaattccccctttccggagccttcgagcaaagggggaggtcctgagcgcgagtgagcaccttgaggtgaccgggcgcacaagggagatg

SEQ ID NO: 611792 - DNA, 627 bp, Homo sapiens
gttccattccagaccaccacaataaagcaaatattgcaataaagcaagtcacacaaattttttggtttcccagtgtatataaaagttatgtttaggccagacgcagtggctcacgcctgtaatccaagcactctggaaggctgaggcgggaggattgcttgaatgtcaggagtttgagaccagcctgtgtcaacatggtgaaaccttgtctctactaaaaatacaaaaagtagctgggcatggtggtacgcgcctgtaatcccagctagctcaggaggctgaggcagtagaatcgcttgaactcaggaggcagaggttgtaatgaaccgagatcacgccactccactccagcctggacgacagagcaagagtctgtctcaaaaaaaaataactaataataattcacaataaagagtcatgttctacattatgctgtagtctattaagtgcaagtaggattatgtctagagaaaacaactgaatactgtcttaaggtaggaaagacactttcttgcgtaaaacagtactaacaatcatctgaagccttcaggcaaggtcattatctggtcagctggtaagagtgtcttgcctcccatgtgggtgactgctcacccattagtgtggtgg

SEQ ID NO: 611793 - DNA, 905 bp, Homo sapiens
  misc_feature (280)..(280): n is a, c, g, or t
ggccgcagcaagatttgtggggcccgttttggtttgggcccaaaagcggcttgttggacgcagacagatgattttcctgaagagaggtggtgcaacatctgttgtgtgggggcgcaccgacacgtaggtgtctgttctgctagggagaactctctatataaacgggcgtgggtataacaggaacagatggcggtgcgtcctgcttgttgtctgcacaacaagtgtcgctgtgtcgggcggcgccacacagccccccccaccggtgatatatacaccccgncttggtgtggacgcatcgcctgtgttgttcttttcgcctctcacgagaatggactctactacttctgttgtgcgatcaagagaagatagagacgcccccgcgctacgggaacacacactaatcttctgttgtgtaacaaaacaagagaaagggcgtactatagaaataaagatgtctgtgtggggtgcgcccgctaaacacacctcttctctgtaaggaggtacatcacggggggcgcatatttcatatcatgttaccgcaaaggagtgatgtgacaaataatgtgctcgcgtctggttgataacgcgctgtgggtacatgcctcgccgctccgcacgcgcgctctctaatactgatgtgcccccactgtttgtgtgcctaaaacgtggggtttggggaccaccggggagcaactattgtgggaatattttgtgggcgcctctttaagatttctttttatacgccaccagtattcagagagtgatgagagaaagtccccaggagaccatgtgtgtctcacacagtgttttctcatgtgtgcggggtctctcgtcgcttactctcctctcgttgagcagcatatacaagaagtagctcctccggaccacaacaaatgtccgaacaa

SEQ ID NO: 611794 - DNA, 333 bp, Homo sapiens
gcacaaggttttgcctgaacccctggttcctcttttaagttcccagaagatagcagtagcagaattagggaaaggattaaagtctttgatctctcggaaaagggaaaaaaaaaaatgctgacaaaaggggtcctctctcggcttcggcgcccccaaaaaagccccccatgtgatttgcttgcccttatcaatcacttgggaggactccctttccttaccctgcccccttgccttgtaaacaaaaaataacagccccttcaggcattcggggcccctactggaccccgtgcattaatggtaggggccccctgggcccaactgtttttcctccta

SEQ ID NO: 611795 - DNA, 559 bp, Homo sapiens
cgacggacggaggacggacttatgactgactgacttcacagtgagcctacatcatctgctcagctcctgtgcagactgggtgcatggaagacatagaccacgatgtactcagacggaggattatcgaaccctcaccacctacaaggacttcagccagtttgtcagacccctcattgctgcccaacctcccaagattgctgtctccaagatgatgctggttacgggtgcacaatggcgggagtacagtaccaataaccccttcaaaggccgttcttggggcatcaagtggcagctgcggcaacagcagcggtagctgtggtggagagcctggtgcaagccactgaggtagcaccatcacctacccctgtggaggtgcctatccgccaggacaagaccacggcgggccaagtgtcccactgctcggaggacgcccaaaaggcagacctcgtgtccctgatgccaaagactgctacacccaagaaagtactcccctgaaaatcatgctgggaggtaatggttccacgcgtaagagatcatcgaagtaggctgctgacttaac

SEQ ID NO: 611796 - DNA, 153 bp, Homo sapiens
  misc_feature (116)..(116): n is a, c, g, or t
ctacgacttcgagctcgtgttaccctaggcgcatctgttagcaggtgaatggcgaggtgaaagggcggttcagcttacgcttgccatcgtgagtgtaggctaggcatcggcagctngccttgtgtcgcttcgtcgtgcagagcgtctccagga

SEQ ID NO: 611797 - DNA, 429 bp, Homo sapiens
  misc_feature (8)..(8): n is a, c, g, or t
  misc_feature (102)..(102): n is a, c, g, or t
  misc_feature (240)..(240): n is a, c, g, or t
  misc_feature (333)..(333): n is a, c, g, or t
  misc_feature (417)..(417): n is a, c, g, or t
  misc_feature (422)..(422): n is a, c, g, or t
  misc_feature (428)..(428): n is a, c, g, or t
acgagccnactccccggggccatccaaaaagccctccttttatcccagagactccccattcccctcccagtatcccaacctatttagtaccccacctatatncccaggcacctaggcaggagactggtgccagctctgcccctaaagattcacagtcctgagtggagagggaagtggggacacacatcaaaagttatgacagtgcatcccagcaggtgttttgatagatgtacacacaantgccgccgtggaagcaaacaggagtaatttagtctgcttaggagtggatggggtggctataaggaaatgctgctttgaagaagcaacatttgncctgggttttgaagtttgagtaagagttcatcagggaaccataagtgtaaaggcatggaggtacaactattacgtacccaatangatgnaattcnc

SEQ ID NO: 611798 - DNA, 855 bp, Homo sapiens
taaaaaacggggtctcggtatgttgcccaggccagtctcaaactccgggcctcaggcagtcctccccgaaggggctggggattatagggcagggaggccgcggggccgggcctctatttcttaaatacctgccctcagagccgtcctgctttataaactggagtgcaaatggcagcagtgaataatcaattcaggggttcgctgtgcttggggattatagtacaacgattatttataaagaaataacaaagggagaacaagattgacgctggatttggctgattctcaggtatctgtaccccagggtcaaccctgagatgggcccaatctgccagaacctaagatgccattttggaccccaggggcagtttccagaagccacaagcctgcatttggggaggagtgtgcgcagcctccagggctgggactccaaatctcgagctgaaggaactatgctggcaggtagctctctcagggtccaccgggggtcccagctgctccaagacacagcacattttagccataaacttggaagggctgggacctacaggaggctccttggtgtagaggccaggccaggcgtgtgaccttgaaccaggtggacttgaggtcccttgaactcccttctctctctggcttgtcccctgaagcactggccccccagtgctgggcttattgggccatcctgtgccagccccctggtcacccaccgtcacagtggaagtgtccctcctcttacaagggtgtcccttgctcggggggttctggggacaagaacatctttttccatccgggaacgaacctgtgcactcagtcagcgcttctactggccctcctgacggtcaaacctctgag

SEQ ID NO: 611799 - DNA, 174 bp, Homo sapiens
agagcagagactacgccacatgcttatgctgcagctgtgccgctggctatacggtcaatgtcaggcaatgtgttgcagaaggatacccgcagcgagtcaatggcacggtgaaaggaaggatctttgtggggagcacgccaggtccccattgtctttgagaacactgacctgcac

SEQ ID NO: 611800 - DNA, 236 bp, Homo sapiens
ttcccccccccattgggccccagggtttttttggcttttcaggttttattccccttttggggatgttttaaatattaatgtttggggtaataaagaattttttaaagtttttttttgggtataaaggtttctggtcccaaaatttccttttttttttgggggctgggaaatttctgttgggggggggctgggccttgtttttttgtttccccccccttttcccccttttggggcca

SEQ ID NO: 611801 - DNA, 165 bp, Homo sapiens
aggtgtcatgcgagctcgtatcttttcctctaggcagagcacagcaggcgatggggcgatggcatctctcggtgcctggggctgtcctgttgtccagcctctcccgttgctcagccgaggcctgctggagccccagatctccctttcctactacaccatttctgg

SEQ ID NO: 611802 - DNA, 1360 bp, Homo sapiens
ggcccggggtgtaccggaggtgaggtggagatggtgaaggggcagcctgttcgacgtggtgcccgagctacacgcagattgcagtacatcggcgagggcgcgtacggcatggatccgctcggcctatgaccacgatgcgacaagactcgcgtggacatcaagaagatcagccccttcgaacatcagactctactgaccagctgcacgcatccgggagatccagatcctgctgcgcattccgccatgagaatgtcatcggcaatccgagacattctgcgggcgtccaacctggaagccatgagagatgtctacattgtgacaggacctgatggagactgacctgtacaaggttgctgaacagccagcagctgagcaaatgaccatatctgctacttcctctaccagatcctgcgggggcctcaaggtacaatccactccgacaacgtgctcgaccgagatctacagcctccaaacttgtcaattcgaacacaacctgcgacctttacgatatggagatatcaggcccttgaccggattgccggatacctgagcatgaccacaccggatttcctgacggagtaatgtagactacgcgctgataccgagggcccagagaatcgttgctgaaacattccaaggtgctaataaccaagttccattcgaccatctgagcctagacgacatgccatacgagccatagagatgcgactcttaacagggcccatactatccctgacaaggacgtacctgggatacggttcaccgcacattctgggcatcctgggagatccccaatacccacgaaagaacacttcagatggcttcgctcacacaattgtaagtgcccagcaacaaccatacagagattagtgacatacacgacccagctgtctttgagccaaacattcccccaactacaaatctcacaaaccttacagctgtgccgacgatttaccataaccccaacatacgcatcacgtgagaaagctgctacccccaccgagcgactatatccgccagataacacaactgacgaacccgcacactcgacgcaggtgtgacaccacacagggagagcaccatcagaaaagagacatcacggagggaagcaccacaaaaaacaaggagggcgacaacaccacctcaacggacaatcccacagcaacggggagcacaaagcaaagccacgagcgacgccgctggtagaacgatagcgcatcagcagagagtgccgaaggcaaacactgccgtcgaccaccagcagaaccagcaagaccagatcgcaccagagcacagcagaacgacgaaacaacgcaaagaggcggcaaaacaagcaacaaagaacacaacaaaccggagg

SEQ ID NO: 611803 - DNA, 209 bp, Homo sapiens
atcccccggggtagagccccgcttcttcttggtttctcatgccgaggacttgcctttgggaacttcaaaacctgaggctcgctctccccagtctccggctgcacctcgctgcatcaaaggagtgccgcactcggaatccacctcaatttcctcctccctgacccttcgaatgggatgatgcccttttttctccttcaggggcatctacc

SEQ ID NO: 611804 - DNA, 423 bp, Homo sapiens
cttcgtcccgtcgcgcgacttgttgcctccggctaacgttgtcacattcactgtacaagccccgtcgcgattttcctgtgccctctctttaacaaacgattcaggagtggctagggttgggcttcgaagccggcctagggcagagtccggctccggacaggggttcagtatctgtgggcagcaagacttgctccagcttcactgtgcttgttccttctgggactctgtcaccacctccccatttccgggtctcactggtcttgttcagaaccgtcttccggctgtggctttcctggggaggctccacctccggcccagtcgtctttctctttgcggaggccaaagaatggacgggcactgagatccggctctcctcgccctcctgcagcttgcggtccgttgcgatctccatgtccagggcca

SEQ ID NO: 611805 - DNA, 1173 bp, Homo sapiens
  misc_feature (1001)..(1001): n is a, c, g, or t
ggccctttgtcgtctccctttgggccccaagaagggcccttgcgtgtgtgctatggccattgtgggggtgccctttggtcccctgttgcagatgccccggaggtctgttgtgacccccttcgtgcgctcgacacccgtttgtcgcgcggtgtgtctgtgtgcgttgtcgtcgcgcgctggtggccgctgtggaggggggcgcacccgggggtcccctgtcattttgcggtgtgggggtctcccccccctgtgtttggtaatttcccgcgggggtttgtgggcccctgttggacactgtcgtctctctgtaggcgctctctccgggggaacgcgcggggtgcccctcgggagccctctccctagggatagcccgcggggggcgtcgtcaccggggtgcccacctctgtgttgtttggggttgggagaccgcctcgggtggccctctcaccgccacgagtcccacggtgtgggaacccgcgcctgtggtggggctctgtgtggccccccccactttggggactccagagattgggtgtgccctttcctctctctcgccgcgcccgccgaggagggctccccttgttgcgcacacggttttgtgtggggcggagagtgcgcgctgcgcacccccccaccactgttccaaggagagagtgccccctcgaaatctgcgtctctccacaggagaccccccccccccgagcccccggagcttggcttgggcctctctttcccaaggcccaggactcccctccccgccacctcgaagatcgcccacaccccgccctcttagagggaaagagcccaccctctcctcgtgcacaccccgagcctccaccttggagaagccccttcccccccactctccctctggattccccacagaggtgtgtgtggcgagttccccccgcgaggtgtgcccccccctcttgtgtggggggggcgcaaggtgctgcccttctccccttgtgcaccaacctgctctctcccggagaaatgcncaaatgagacctccctggagaacctgtgggtgtggaaattggcgtgaaccccaaaatggaaggccggggccccggcccccggccccttccccgggccggaaggggaggggaaaaaaaatttccgactttgggaccccggactccccacgaattaaccaataaggtggctgtt

SEQ ID NO: 611806 - DNA, 938 bp, Homo sapiens
cagcataatcatgctgtagtttggcacacgaggaaataacataatactagtctgagtgctcagcgctccttgcttgatggtacagctctggtaataaaaactccgtctccggaatcctgtagattcaggacctatattgaatttgtgtgggagcacgaggtggtcgaggcccactactctgcgtggggatatagctatattgataggttcttcgattgcaccttcctgatgtagatttggttctatgggaccttgcaactaatggcgcgtcatatagggcagaaaagcactataacgatcctcttccgttgcttatgtgagacattttctaaatggggtggggtttagcattgccgtttacccttgctccacataggacgaagttccacggttccagaacactgctgaaacccgattcggaatgaacctaacttgtcctaagtagctattcagtagtcctccatatgcacattggatacggaggattcctcatagacgttttttacgaggcactacctagtgaaaagcttacctcatattgaataagcattttatatggtgttagtgccttgtgatgccaatggcctatgggtcccaggcaccaggtctggccccggatgattaaatgccaagcggagctatgatgggactgtgggtcagatcctattgcagtgagctctgagcagctagcgcattccagagccgttggtgctgggctactgcttcttctgcgcatctgaggacctttatccggccatcctccgctggccagcactacggggcgtggccgttggcttgtcttgattcccgccgccctcacaaaggcttccttcctcaatgtggaagcaacccctgtttttcacccgccgccaacgtgcgggcctttggcgccacgagggtgcttacgggtctctatacatcttcctggggcttccgcc

SEQ ID NO: 611807 - DNA, 1312 bp, Homo sapiens
ttttatttttttttttcgcaggtaaaaattatacttttattgagagtcaccaggaaaaagaggcactggtggttcaagtcaaatgttcaaaatcataacaggccaaaagggttggactcccgagcacaagcccacgagggaggggaccaaaacagaccaaaagtgagacaacaaccccatataaaaagagtgaacgtgggggcttcacacactcacacacattacacattacgacaggggagtgaaagtgttgtggacgagagaggcaaattttcagggtggctcagtttaggtggtattcattttataaattacgagggttgtggaaggggtggtaattgtgggtaattttgtcacagcttattaaaaaagaggcgccaaaaggtgcagtggtggtagaggggggaagaggcaaaaattataagcaaatcaagctcaattattcccggggagggacagtaaaagggagaaaaccgaggaggcaagggcatagaggagaacacgcatatattacctaccaccagcgggggctatactagggtaatatccttaagaaattgggtccacaaaagagttatatattcaatatttcaagagcttaggagtgccttctttccgggggaatataaaagtagacgctgagacaaagaccatactgtggcgacctgtgtactagaagaagagaccaggggcgcatcaagcgccaagcccaggccacagagccctacagggggaatacagaggagcaactatcaaaggggactgggatgggatatggggtacaaaaacacagaagagccccagaaaagagcccgggatcaaattacagaacccaagggtgtgacaagaccctaccataatcatcagaggggggtgagaaacgaaaacggggccccaaaatatataggcacagggaaacatacaacagcaaggagcatcatgacaagaaagaagaatccaaaatgacagtgatgaatgtgaccaataaaatcggcaggcacggggaaaactaaagggcgagcgtgagaaaacaaaggggagcgagaactaatggaagaggcaccacaccctaactcacatacacgaaatattccaaaagaacacagggcccacaaacgagagagagggtccccgtacaaagtggtgggcccaaaaacaaaaagcaaaggaaagaagaagaacacccaaagtgaggaagaagaagacaggagacaaaaatccaacaacaaccgggagaacacaatacggaaacatgctaaccaacacagcagtagcaaaacgacgacgaaaaatgagaaagacaagcagaagg

SEQ ID NO: 611808 - DNA, 357 bp, Homo sapiens
caggtgcccagacgggtcccgaacttctggagttcaagcaatcttccgtgctcggcctcccaaagggcgggaattagagtagtgagccacggcacgtggcctcaatcccccactcccccgcttcttttttggagacagagtctggctcggtcacccaggcgggagtgcaggggcacaatctcggctcacggcaacctcctcctccgggttcaagtgattacccggcctcagcctcccgagtagctgggactacaggcatgtgccaccatgcccagctaatttttggtattttcagtagagatggggtttcaccgtgttagccaggagggtctcgatctcctgaccccgtcctccaca

SEQ ID NO: 611809 - DNA, 414 bp, Homo sapiens
caattatattactaccagtgacatgactcttcaactaacgcataatgtgaatcaactcagccacgcacagcctaagtattagcatcgttcccctactattttataaccatatcagacaacgacctatttagctgttccccaaccttttcctccgacccactagcaaccatactcctagtgctaactaccggacttctacccctcacaatcatggcaagccaacgccacttatccagtgagccactatcacgaaataaactctacctctctatactaatctccctacggatgtccttagattatgacattcacagccacagaactaatcatatagtatatctgcttcgccacacttatcaccaccttggctatcatcacccgatgaggcaaccagccgtcgcctggacgcaggct

SEQ ID NO: 611810 - DNA, 582 bp, Homo sapiens
  misc_feature (197)..(197): n is a, c, g, or t
  misc_feature (422)..(422): n is a, c, g, or t
  misc_feature (426)..(427): n is a, c, g, or t
  misc_feature (432)..(432): n is a, c, g, or t
tgattagtgtagaaaaagttaattatcaaatcgctgatcaacatattttacatgatgttgattggcagattccagctggggctcatattacattgacgggaccatccggtggtgggaaaagtacgttattacggatcattgcggccatgatttctaaaacaagtgggaccttgatttttgatgggcagccgattganagttatgacccaatcatgtatcggcggcaagtctcatattgtttccaacaaccgacgttatttggtgagacggtagcagataacttagctttcccgtaccaaattcgtaagcaagtcatggatacgcaacgagtggtaacgccgttaaataatgttgggctgtccgaacgaaccctgcatcagccgattatcgagctttccggtggtgaacggcagcgggtcggntgtnncgcancatcttattcttaccaaagtgttgttattagatgaggtgacagcttgtttggatgaaaataataagcaaatcgtgcacgccttgttacgacagttaatgagcaggtcacgtgacaacgtcatgattactcatgacgcgacagagatttct

SEQ ID NO: 611811 - DNA, 110 bp, Homo sapiens
tagaagacacactaagggagaaatttagaaaagcacacctcttgtgaagttatctttatggtattggggggagtcctttatttgaacagtaactaagttaataggaccta

SEQ ID NO: 611812 - DNA, 1599 bp, Homo sapiens
  misc_feature (381)..(381): n is a, c, g, or t
  misc_feature (524)..(524): n is a, c, g, or t
  misc_feature (539)..(539): n is a, c, g, or t
  misc_feature (804)..(804): n is a, c, g, or t
  misc_feature (825)..(825): n is a, c, g, or t
  misc_feature (835)..(835): n is a, c, g, or t
  misc_feature (887)..(887): n is a, c, g, or t
  misc_feature (923)..(923): n is a, c, g, or t
  misc_feature (1009)..(1009): n is a, c, g, or t
  misc_feature (1111)..(1111): n is a, c, g, or t
  misc_feature (1135)..(1135): n is a, c, g, or t
  misc_feature (1277)..(1277): n is a, c, g, or t
  misc_feature (1363)..(1363): n is a, c, g, or t
tcagagaatgcttggtccgccggaagaaaatcatctagtgttgttggaaagaacgagttggaaacacaaaacaacagatggtctctcaaaataatataggacggccctcctctcctcttgtggcgacgcgaccaccataaaccacaacgtgtgtatttttggagggaggccccaccacttctgggggggggaaaaattttgttggggcgcgtttatactatattttgcctcttgggggaagaaccccccctccttcgagttttcctcaagggaaaaaattgcgcccctttgttccaacacggcgggaaaacagacattttttttcccaacaggggggaggagtgttctctactcaacaggggggtttctctatttgggagnccccgcctctttgtgcgcaaaacgcttgtcctcacacagtgggggcccgccctaccaacatggcgtttatctccccacaaaaaaaataataggaggcgttgggggggccattctcctccctttcacaagacagagaagagaanttgggggggacaacnacaccgcgcacttgggggcattataaattcacggcggggggggtgtgtaaaaaaccgccgcaccgttctccacaatttacaaacggcgtttctcaaaatccctctggcttaccacagactgttggtaggagaccttatgtggagcaccccccaccggggttgtaagagagctcaacgcggggctcttgtagaagaaagaacctcgggccccccccatctgcgtggggctccttaggagaagcatgctttttttggcaattaattnagggtgcccccaactacggcncccccttttnggccgacacaccatcctgtagcgaacacaacagtgtttttccttcttctatntggacaacatcgtttaatacttgatcaggtgaaatnttttataaacgagggttattaccccctcttcgagaagacatcttgcgcgagagcgaaaaattatagagagagagagcgccttctgngtgacaccacaaaataaaagagttgggagagacaccctctccttcgggggaattacacagtggagaaatggccctcgagatttatcagagacacacatcggngggccataattagacacatatagnccctcataagagagtataataataggcgtctataagagaatctgttcggagagtatacactatataaacactgtaaattgactgagcccgggcgcacgggtggcgctacacacgccctgtgaaaatcccaccgcacactctntggggagaggcctacacaggcgcgggacacagagaccacatagagagagtctacaggagagagattgagagagcacacatccctgngccacaacacattggtggaaaaccctctgttttctaactatacaaaatatcacacaaaatgagagcttggttgtggtgggcacacgtgcctcgtagttcccacagctaacttcgaagagggctaaaggcacggaaaaatcgcttgaaacccacggaggcagagattgcagtgagccacagattgcaccagctgcaactccagactgggcgaacagagcgagactccattctcggga

SEQ ID NO: 611813 - DNA, 237 bp, Homo sapiens
cagatgagtatgacgatgctgagttaattgggaaaactatggaaggagccgatcagtgtaaggtactacggctggacagcaagcttgggtgctttccagggccagcagcggatggctcagaggggctgcattagagcatgcgaggaggagagagtggaaacgccggtcagcgaggagcctggggccagatggaggaccctcgctccaaagctcagtcatttcctccttaacggagaa

SEQ ID NO: 611814 - DNA, 725 bp, Homo sapiens
gcctgtcgcctgccacggaggaggcttctaattagctggaaaagagtattcctaatacgtggcaaggattagccaaatcttcttatggaacgaaacgaagacaagtgaagagtggttacctatacctagcatagtacaatcagaacctcgtgaagaccaccgggaacaggcttgcggacgccggctgtccttcccgccacgatctttctgtggtagcggccagcaagaagacatgggctggttccccaatccctttttccccactccttctttatgtgcacacaaggaacacccaagtcttccacaggacagggggaacttttcacccagctctgcccaatcattaatggcgaaacaggtgctagcgtgtggcttcacctttccatggggggctgttttccaagcttcggtccacaaaggctcaattcggaattttctttacagttaggataaccgggtggtaaataccccaggtggtggctttactgacgctcacagtcaagtaagaacggttctttgacattcccactgtgggcgaggtcacacctagagttcaacgggcctttcccttcggcaaccaagggagccagagaggctggtccatccgtggcatgtgccgtgggaactgacacacagagacacctcaattccaatgcctgggagaaccatctaagaaaaaccctatcacggcagccctccaggtgctgtcgaagaagaccaacttt

SEQ ID NO: 611815 - DNA, 238 bp, Homo sapiens
tattgtcgtgcaggcgcatcggtgaggaggcgttgtcacattcagctgagcaacagctagggcgaatcagggaaaaaaacagtgaaaatgaaagaaagggggaaatcaggatatattgcgagacctgattgccattgataaaaactggaaaatcacaaggcggagttggcttgaaggggaaaaaaatagaacttgtcttcagacttattgattgtgtgacatcagtggaagaacccag

SEQ ID NO: 611816 - DNA, 546 bp, Homo sapiens
  misc_feature (3)..(3): n is a, c, g, or t
  misc_feature (72)..(72): n is a, c, g, or t
  misc_feature (100)..(101): n is a, c, g, or t
  misc_feature (108)..(108): n is a, c, g, or t
  misc_feature (122)..(122): n is a, c, g, or t
  misc_feature (177)..(177): n is a, c, g, or t
  misc_feature (179)..(179): n is a, c, g, or t
  misc_feature (182)..(182): n is a, c, g, or t
  misc_feature (188)..(188): n is a, c, g, or t
  misc_feature (191)..(191): n is a, c, g, or t
  misc_feature (210)..(210): n is a, c, g, or t
  misc_feature (226)..(227): n is a, c, g, or t
  misc_feature (277)..(277): n is a, c, g, or t
  misc_feature (288)..(288): n is a, c, g, or t
  misc_feature (302)..(302): n is a, c, g, or t
gcntagatgtcattttcccacattatccaactgtgcatctcaaacatatcctcatctcagtaaagacaaaantatctatttcattttgttaagtgcaggnngttgagngggataaaaatccngtgaaaacacatcaatctcaattcaactcagttaaaggggggggaagcgaatttngnttngttttnttnagggaggggagggaaaggngtccatggggttaggnntcaaaactggccagggctggcaactttagatggcatgttgtagctctggnaagtttctgtnacatgatattttanaataaagtggcttttgtggattttttcttttttggtattgtaaacatgtactgtttaatattacccgaatttaatttaaaacatgtttgcaaacaaaacaaaattaaaagcctttaaggcaaacctccccctaaggaaaaaagtcatttgttataaaattgtgaggacacccaagcaagaccccacttaagattcgtcagcatgaacttgagagcttttgtccactgctcctcagagttaaact

SEQ ID NO: 611817 - DNA, 1458 bp, Homo sapiens
  misc_feature (156)..(156): n is a, c, g, or t
gggccggagcggagatggcgccgcagaggacagggtggctgtggcggcctcgtgtccttggagttccgtctgcagatgctcgttggcgtggtgcacgccgcgagatgaagagcgcgcttggtgcgccgggccaggattgccttgacggtcatggcntgctggaggtgtgcagcgtgtaggtgctggaactctgcgacggcctggtgcgcttgccgcgtgcggagcagcttgggtcgcgtgggacgctgtggccagtgtggacattctggacgatggctcaccttggagcgtcagagtgcccgtgactacccatccagagggtcgtcacactctcaaggcgaacggaagacgtaacgagacttacacaaacgcaagggaaggggaccttgagagaatcgatctaggcatgacacatttctgctcaatagcactaccaagtgaaaggcgtcaagacagagttaggggcaaggtacccttaggttaccagaagggtgcccatcccggtgggcaacagggaaccagggaaaattggggcaagacacagaaggcaaatcttccaagccaacccaagggtccttgtgggcggccccagtgaacacgcattgccccattggttcttacacctttgccgcgcaagttccgccacccggaggacaggcccatcacaaacaatcttcaaatgcgagtccgcccttacaagccagtggaggggaccacgaactcttgttcccattaagggaagaccccttgtgagacaaccttttgaaccagcgcaagaacgacggacagaagagccttgtgccacggggcaggaccctcatggggcgcccagggcaggcatagtttggccaagcggtggcgaatgcaaccagaaggacacagggggcgggggcagaggcgaccccaaaaagagttggagtgaacgactctggctgcactttggggcccccatgcagactatcaggtgaggtgtgcggcccatagatagataggtagcccaaggcttatcaagcgggaacggggccattgagattttaccacagactatggggccccccaattcaagagggcttgcaacgtggtcaccaagctttgacaagaaaaggccctggccattcttagcgcgagcaaatttacgggcacgacgcttcccttctgtctcacaacacgttttgcacccctggacatggggtttcccacccccccaactgggcccctgctttgggacgctcgttcttccacgcgagcacagggcttgtttcctcgcaagagcgctcggggttttgacaccgcccaagtgccgggctggcacaaggcgctcgcggcgctacaactccggggacccgggtgtgcccgtgcgtttgtgtgccacgctgacaagtcgaccgctgcgcttgtctccctttcttaacgcgcggggtctcggggcgcgcattggggcatacccctgtgtctcgc

SEQ ID NO: 611818 - DNA, 217 bp, Homo sapiens
tgcgcgccttgagccgtcgccacgttagaggtggtacagcggcggacgttgtacagcagttggggtcaagttcattgtcgccctgcacacttgctcagttttgaggctgtcgaacagcccaatgactgggtggtgatcacctgagccgtggaacaccgccttgatacaaacggcagggcgcatcggtacgtgttcgaaaataacagcgtgcgacaac

SEQ ID NO: 611819 - DNA, 1577 bp, Homo sapiens
actactttaaatttcacatgagtcaaagaagaacccatgtagccaagacaatcctaagcaaaaagaacaaagctggagacattacaatacctgacttcaaactatgctacttccaagcctacagcaaccaaaacagcatggtactgataccaaaacagacatatagaccaatggaacagaacagagacttcagaaataacaccacacatctacaaccatctgatctttgacaaaactgacaaaaaaaggaatggggaaagaatcttctctgcagtaaatggtgctggctagccatatgcagaaaagtgaaactggaccccttccttacaccttatacaaaaattaaatcaagatggaaacaagacttaaatgtaaaacccaaaaccataaaaactctagaagaaaacctagacagtaccattcaggatataggcatgggcaaaggcttcatgacgaagatgccaaaagcaattgcaacaaaagccaaaattgacaaatggtatctaattaaactaaagagcttctgcacagcaaaagaaactatcattagaatgaacaggcaacctacagaatgggagaaaatgtttgtaatctacccatctgacaaaagtataatatccagaatttacaaggaagttaaacatatttacaagaaaaaaacaaccctgtcaaaaaatgggcaaaggatatgaacagacacttctcaaaagacattcatgcagccaacaaacatatgaaaaacagcccaacatcactgatcatcagagaaatgcaaatcaaaaccacaatgagataccatctaatgccagtcagaatggcaattattaaaaagtcaggaaacaatagttgctgatgagatatggagaaataggaatgcttttacactgctggtgggaatgtaagttagtttaaccattgtggaagacaggatggcaattcctcaaggatctacaaccagaaataccatttgacccagcaatctcattactgggtatatacccaaaggaatataaatcattctataaagatacatgcacatgtatgtttattgcagcactatttgtaatagcaaggctgtggaaccaacccaaatgcccatcaatgatacactggataaagaaaatgtggtaatgggtgcagcaaaccaccatggcacatatatacctatgtaacaaacctgcacattctgcacttgtatcccagaacttaaagtataataaaaaaggaaaagaaaatgtggtacatatacaccatggaatactatgcagccataaaaaggaatgagatcatgtcttttgcagggacatggatgaagctggaagccatcaccctcagcacacttacataggaagagaaaaccaaaccccacatgttctcactcataagtgggagttgaacattgagaatgcatgaacacagagagaggactaactcacaccagggcctgttggagggttgggggtgaggggagggaacttagaggaccactcaataggtacagcaaaccaccaaggcacatgtatacctgtgtgacaaacctgcacattctgtgtatgtaccccccttttgtttagaag

SEQ ID NO: 611820 - DNA, 211 bp, Homo sapiens
aaggacatataatacacacagtgcacacacatgtacacactcaaacgcacatgcacacacaaactgccagcacacacacacacactatgcacaaaaacgagcacaaatgcacacaaacgcacatgcacactgcacacacatgcacacacagcacacacacgagcacacagcacacacacaaagacacagtacacatggaattgcacacaca

SEQ ID NO: 611821 - DNA, 215 bp, Homo sapiens
gctggctagaagacagcaggggaactcgagaagttggttgttttcagcagattaaaacaatacagatttatcagcaagactgttgaacgcatacgcccaagatgcctgtccctccccctccagtccccagcgcacgagtgcgtgggcaataggaattactgatcaatagaggggaagaccttgttgcggcgctgaaagcaaggatgcatcggata

SEQ ID NO: 611822 - DNA, 787 bp, Homo sapiens
ggcgcgtactaggtcccccaggtctctccgggcctccggttccgtatagccgcgcatgctagcccgaagctgatgctgcccggtcggctccggccttcccggctgcctgacccgccgggccccgaagccccgggctccggcctgggcccagcggcgtggagcgcggcttggcccgtctgcccgccgctcgccgccacgacttcgcccgtctgtgccccaccggccgcagctttgaataggtagtcgtactcgtcgtcccgggtccccattgtcctggctgcttccggtcgggatcggcgactccgtgagacaccaccgacaaacacctcgacggtggtgctggagcctggcgccagcgacagagcaggcggttgaactggcctatcatgcggcgagtggagtagcgacgggcaccacagcgaagcctaatcagagatggaagtagttgctcatgagggtgggtcgcctgtttggtagccatcccatcctcgtcccatcggtgctcctggcagaagaggcggaccggcaatgcggaccttattgaagtgactggacgcgccgagcctatcaggggcgagctcacagaggtgctggggcggaacgcactgcaggaatgagaatggactttgacagatccgaaatagctaatgagagggcttgatttgagaacctacccgactatcagaggacctgtccgggaacgagaaatggggcctacggtccagacagaatctcgctctgttgcctgggctggaagtgcagtggcactgtatccggaatggggggg

SEQ ID NO: 611823 - DNA, 352 bp, Homo sapiens
gggaaatgggagctcacagcactgggaaatgggagcatagcattgggaaatgggagcacagtactgggaattgggagcacagtactgggaaatgggagctcacagtactgggaaatgggagctcacagtactgggaaatgggagcacagtattcggaaatgggagcacagtactgggaaatgggagctcacagcactgggaaatggagcatagcattgggaaatgggagcacagtactgggaaatggaagctcacagtcctgggaaatgggagcatagtgctgggaaatgggagcacagtactgagaaatgggagcacagtactgggaaatgggagcccagttacttgagaa

SEQ ID NO: 611824 - DNA, 356 bp, Homo sapiens
cgccaaattaatgatcaaaaaatggtattttgtcggttcaacttacatgtccttaatgattaaaagctatgtatctgtttattatttacccattttaaaattagtcttatattgttaatttgatcttgatattgtaaaaatattgtctctttagagtggtttgaatatgatcttgataaaacaatgaattgaactagatgactttgaattttatgatatcatggtttccttatgattaaatgattatgtgacaacttcttctccagggtaaatttcaacgttatatttctgctttattgatctttaacagttaagggaaaaaagtcggaggctggctttggcccgcggaaaagggg

SEQ ID NO: 611825 - DNA, 924 bp, Homo sapiens
tgtagtggctcacgcctgtaattccagcactttgggaggctgaagcagtagaatcacttgatcctgggaggcggaggttgcagtgagccgagattgtgccactgcactgcagcctaggcaacaaaacaagactctgtctcacaaaacaaaataaaaaaattttaggccaggtgtagtggctcacgcctgtaattccagcactttgggaggccgaggtgggcagatcacttcaggtcaggagttcaataccagcctggccaacatggcaaaaccccatctccactaaaattacaaaaattagctgggcgtggtggtgggcacccgtagtcccagctacccgggaggctgatgcaggagaactgcctgaacccggaagtcggaggttgcagtgagccaagattgtgccactgcactccagcctgcgtgatagagcaagactgcgtctcaaaaaataaatcaataaacatttaagtaaaagtaaaataaaactgctggggaatctacaattactacctcaccatctctcagcgaatccctgagaaagggagccccctgtaactgatggaggtgtgtcttccccctgggagaatagggccacaaattaatccatgggtgcattgattttttccttctattgtcccactttcaatcctttgttctaactggattattaccttttgggcagggttcattcggttaccagccggatgtctgtcctgtttgggtcaaccgggcattgatcccccggaccgggtgctccactctgccccgaggtggacaggtgccacccgcctttctgtgtttgaagagcgcccgtcgtgggtccagcgtgtgaacctcccggggcggtgccgggcgtggtgttgacgggggccccctgtgggttgtggcctcctagttgtggtgtgcttcgctcgctcccgc

SEQ ID NO: 611826 - DNA, 106 bp, Homo sapiens
cttcttcctattgctacgccctagttgctcccttcccctactgatcgcactaatttatcttctctcttccactgtgctatactctgtttgtggcggtagctctggt

SEQ ID NO: 611827 - DNA, 1717 bp, Homo sapiens
aggacccagtagccaccagaaaaagagttgtactgccttacgactacgagccgagtcgagacttcgaaggcctttgggctggaagacgatgcaagatccgatcagtttcttctcagctttgatcccatgataaacagtagccccgtctggcgaaggataatgctagttgccaggcacaataacatagattgatcacatgtcggctgggaaaacactaagcatgctcctttcctatactggtaaagctcacgacacgaggtcgttccaggctacacacttggtcccacagaagcatacgttcctaggagatgacagcgtgagctgcgctgtggaacccggtacagcaaccaagatggctggctgcgtgcctcttccgttagcataccatagtttgtctgaaaagccgactctaacaattcgtatccatggaagcaacaagaaacaagacatagagagacaatagacacaaagaaacaaagcggcggggcgcagaacacgcaaacaatcactactcgcccctcgaaagggggacacacaacaagacagaacaaaaggcacgtagataacccctaattacaatgtatgacagtgaaaaacacagatagggagcacactctatgatttatgtgtgcaaatctgcacccatatataatataacccaatagaggagatccctatggccaccatgaggttacactttcacaacaaacaaacataaatcaggaacgcacccagcgggcacagacaagcaggacgtgaacacacccattggaggagaaatgcagcacaccatggaggcacgaccaaggcagaacacctagtgtaaaccccaattacctggggagagccgagcactgccccaacacacaactagcgagcgaaaaccaaaactgtgcaacaccccacaatacagcaagaacaaaccattccatcaaaaggccccgtcacaacacgggggacacaaacaataccacaccacgacaaaatcccaccccagaaaaagtgtagaaccaaaacacacgcgggcgaacgacccaaaccgaccacaccgacatcggcaccgacaataatgcacccatgagcaccagacgacccccaacagaaagcaccctataatgtgacgaacccgcgcaccccaagcgaaactagacaactaaacgcacaacagccacgacaacagcaaaccacacctcaacaatacacacaccgagaacagacaagacaccatcgcacgaacaaacacaccacaccacaccacccaaacacaacacacacaacacaaatagattacaaacactaaaatagaaaaacatcacaaatatcaataaaacaacaactcaagtctagacaataatacaacataatctacacaactgacatacacacctactatactacctaacccaaaacgagagggagagagcgacacagagcgagacgcgagaggacgaacagggcgagaaagcgagaagaccgcaacaagcagaacaggagcgcggacaagcgcagcgttgcagctacagcaacagcaacgaagatcacgacagagagacagcgcacagacagagccagcgcgcggcacaaacaatgagcagcgtggacgagagcagagcgacatagaaacaatagtgcagagagagatgatcacagacaggcgctcaacgcatcgaccgtcgcaacgacaaagcgacagagaggcgcggaagggaggagaaac

SEQ ID NO: 611828 - DNA, 230 bp, Homo sapiens
cgagggttggaacgaaaaatgggaattaaataactatttaggacattaaattagctgggcaggcagacggaagaagaggatgaagggggccgagtcaaaggtgactaaggttctaggcccaatgatgagtggatggtgaatagagagaccatctccatttgactggatagtgacagttaaaagataagagagtcccacatcctcagaagcccttacagtcctgggaaaat

SEQ ID NO: 611829 - DNA, 266 bp, Homo sapiens
  misc_feature (102)..(102): n is a, c, g, or t
ctcgcgaacgtattatcacgacaaagaactcacgtttgccaacactaagtcaagtccccccgcacagcggccacttaaagggaagaggacgacggggccagncctctcgtctgtgacctctgcctgagtgtgtgtgctggactcactgacacacatgagtcatatagcgagaaaggcactcacgaaaagcagaggtttcggcaataacagacgccatcacacactctctttccacacagtatatctcggtgggcagcaattgtcca

SEQ ID NO: 611830 - DNA, 120 bp, Homo sapiens
ctcaacacttttcctactaaatgtgaccacttgctaacaaattcccttcttctcaacaggcatgtgacactgccagcagcctgagtccttccaaacagtgctcacagtccaaacagtgcc

SEQ ID NO: 611831 - DNA, 153 bp, Homo sapiens
ggttttggatttttttttcttggggtttgttttttaaggggatgggcacaccccttgttgtttaaaaggggctttttaggcgggcccctggcttttgaattcttccttgccaataaatgtaagaatttggaataaaaaaaagagccctgctta

SEQ ID NO: 611832 - DNA, 623 bp, Homo sapiens
agactaattcgtgtcaaacttactcgcacgggacgggctccagctgcagcaccctgggtctgtcagtcggggacgggttctactgaaagacctggtacgtcctggctaggcgaccgtccttactggacaggtcggtctgtatgtgctcatacgtggctaggtcatctagttctcccaggtcgtacactcacggcttccctcgacgcatcttagaagcgactctcttcacatcttccggcttcacgtttcgtatgagcgtgcacagctcgtgcggcagctatctggagcgagtggccagcatctgcctcagcacatcctcgaagatcacaggcctggattccaggttcatcatgagcattgatgtcagctgcgtcttggctcgttccagctcctccgtgtccgcggttccgcccattaaaatacactcctatgtgatgatttctaccatttctcgagcctgtcttgggtcggcgctggcatgtatgcaaagtaggtcagtgtcctcgtagctgtggtggtagaaggtcgcgttatacatccagtggtgcctgttgagcacgttgaggtagagcctggagaacatgcccttgtcggggccaccaggcgagaaggatccacctccg

SEQ ID NO: 611833 - DNA, 151 bp, Homo sapiens
tctagaggatcaccggtcggcgtatcggggggtttcagggggtttttggttgtgtttggttaactaaacctaaaggttgacttactcgttttctttcctcgtgtacctctccaaaggaactgagagagagagtattaagagggaaatacag

SEQ ID NO: 611834 - DNA, 680 bp, Homo sapiens
agaggcggacgcccagcgctgcagagagaaagtgacgagccgcccttcgttgtcagccaggaacgcggacacagcggcgctcccaccctgctgctgtcgatccctaggccgccgcgatggcagctgccggcgcccgaggcctgcgggcacctaccaccgactcatggataaagtggagttgttgctgccaaagaaattgaggccgctttacaaccacccggcaggccccagaacagtttttttctgggctccaataatgaaatggggattggtgtgtgctggactagcggacatggccagacctgcagagaaactcagcacagctcagtccactgtgttgatggctacagggtttatttggtcaagatattcacttgtaattataccaaaaaattggagtttgttcgctgttaatttctttgtggggtcagcaggagcctctcagctgtttcggatttggagatataaccaagaactcaaatctaaagggatccagtaagagagttcctgatcacctgaacattctagatgtggacagaaacattggaacctagtgtatttgcttaccgataaggtgatgctaaattctgataacattcgaaaagaaggaaagcaaaatctaactgtacttaaaagctagcacttgacttcacaaaaaataaagcaaacttttagtacca

SEQ ID NO: 611835 - DNA, 583 bp, Homo sapiens
  misc_feature (6)..(6): n is a, c, g, or t
caagcnggatgcaaccaggtagatgccatccttatctcaacccaaatgaaactttctggatttctgcaaatcaaaagatattgtattggttgcctatggtgttctaggaacacaacgatatggaggatgggtagaccagaattcccctgttctcttggatgaaccagttcttggttccatggcaaaaaaatataatcgaactccagccttgattgcccttcgctaccagttacagcgtgggattgtggtcctcaacaccagtctcaaagaggagcggatcaaagagaacatgcaggtttttgaattccagctgagttcagaggatatgaaagttcttgatggcctgaacagaaatatgcgatacatacctgctgccattttcaagggccaccctaattggccatttttggatgaatactagtatgtgaggatgtctcctgaaaagcctatgggtgggacactgctcagctgctgccatctacagacttgccacttctctgtagcaattgagaacttcttgaagataacaaaaagatatcataccactctgaaaacaaataaaagactcattcttcagcactta

SEQ ID NO: 611836 - DNA, 1020 bp, Homo sapiens
  misc_feature (316)..(316): n is a, c, g, or t
agcggaaccgtcccgcaactgtcctgtgccacgacctttggcaccgtcggggtccgtcgtccccgcaatgtgacagtaatccctcaccccggctgctgaccaggatccggcggaccccggcctcgatatgggagaccctggaacatgcctggctgcccgggaaagctgaacgtgctggtgcggggatctgcagcagcttccgcgacttacgcgagatgggctcctgaaggtgtccctaagactggtggaggagctgactcgcagtggagatgtggaagcaggaaggtgtcccctggtggttcttgcagggtggagngacttcaaggccgccacgaacatccttcccaccatggtaacaatgggtgagtgcctaccacgaggctcgttcgcattcatgcaagcctcctgtggagacgagtgattcgttccaccaaggcaggtcgtgctgagctcacggcagaaagacgctgtcctgtggcacattgcgtcagtactattgccacacggcaaagactgtagcgctgctggtgagccccagacgtggcctggcggtgggcacccctgagggggcagcggatccccaagcagaagcaagccctggccaggacgcgtagccagaatgctagagccaagaggctagaatggcgacagttcgtgcagacttcgcgccgtgaaagagacactacatttatgtacataccgtcttagcattcgatcaatcaccgtgtgtggtgaccgatggccctatctcttccgtcggaggctccttctttgtgacggctcgcggtggtcgccatataagggaaagaccagacgaggatcttgccgccttgaaccttccccggggttgtttgggaaccttggcatggggacgctctataacgcttccccttgcgtagggcgccgagcgcttgcggaacatgcgaggtcgcgccacggcttgccatcgccttgttgcgctacttcgcggcaagtcccgcttggtgggtcacttcaccttggtgtgggaccccccccttg

SEQ ID NO: 611837 - DNA, 241 bp, Homo sapiens
gacggcactggtgtatacagtggttgaaccggggcaggtgacaaggcacctgtgtggctgtaggccggggggtcatcagtggttgaaccggggcaggtgacaaggcacctgtgtggctgtgggccggggggggagaatcaggggttgaaccgggggcaggtgacaaggtacctgtgtggctgtgggccgggggggtcaaagcccggctctgactccctgccagcttgctcagccacctccc

SEQ ID NO: 611838 - DNA, 352 bp, Homo sapiens
caacaattaacagcagaaacaacagccaacaccatagacatctcagttggttcaccttacacaattttgactggaaaagttcagcaaactttatacctgataggtaccaaaaccattgcacccagatcagctacagacaagaatagagctttcaatgggaaattttaaataaatggggatcaggatcttgaaggccttttcattggaaaaattgtaacagggagatggaaacatgggctttaccaggcggcaatcctggaaggacaaaacaaggcgtgggttacccaggataggtagtttcagtttaaaggcacagggggactgggtttgaggaggcaagggttctggggcc

SEQ ID NO: 611839 - DNA, 412 bp, Homo sapiens
  misc_feature (27)..(27): n is a, c, g, or t
  misc_feature (37)..(37): n is a, c, g, or t
  misc_feature (127)..(127): n is a, c, g, or t
  misc_feature (157)..(157): n is a, c, g, or t
  misc_feature (198)..(198): n is a, c, g, or t
  misc_feature (248)..(248): n is a, c, g, or t
  misc_feature (277)..(277): n is a, c, g, or t
  misc_feature (281)..(281): n is a, c, g, or t
  misc_feature (352)..(352): n is a, c, g, or t
  misc_feature (362)..(362): n is a, c, g, or t
ccatctttgtgttcaatgatccgggangctgcggctnaaagatctttggcagacgcagcagctgaagggggtcccggtgcgtggggcccggaaccaagtgcgcatgtacctgaccatggcggtggcnggcgcgcagcctatgctcatgtactggctnaccttccacctggtgcggtgagcgcgcccgctgaacctccngctgctgctgctgctgctggggccactgtggccgccgaactcatctcctnctgcaggccccaaggtccaccctgtctgncacnagcaccgcctccatcccatgtcccgcccagccccgcccccaacccaaggtgctgagagatctccagctgcnacaggctacncccaggggtggccgctgttacagaaacaataaaccctgatgggcatggaa

SEQ ID NO: 611840 - DNA, 821 bp, Homo sapiens
agtgattggatagacgcctgcgaggcggcaatcagtagcgacacagaggacccgccccctgagcagcccgcgtactgtggatccagctgttcggttctggtccagagacattccaggggtccagggtgtgggtcctgggctgtcacagccgtgtgtgtgtgtgtgtgtgtgtgtgtgtgtgtgtgtgtgtgtgtagtgggtgtgctgtgtgtgtgtgtgtgatgatgatgatgtgtgtgtgtgtgtggcgtgcagctgtgtcacgtggggtgcgcgcgatgatgtgtgtgcatcacagggctacgcgggggtgtcgggctcctgggccatgaggggcctgaagtgatctcacgttgtctccgaaagccttggtgtgttccctgcagcgctgctggcccccaccagctctttggtggtctctggtctccccgcgcgggggaagtggggggagctgttgctcggcagagtagtcgcgtggagcaagggaagcccatactagagggctggaagcaggatctctagcagatgcttctcaagcagggcagcgtgcactcatctcaaagctggagcttccgcgctctctttctaccatccttcgtagtgcgcagtggggcggaagaatacaagagcgcggcggtatcccacaaggttccctgggggtgggcaccagaagaggggaagcccggccccactcccctagtggtaaaccaaggagagcccggtaacaatgtaccacgggcttgtgtagaagcagaagcagggcgttgggattgggggacacgttgataatcaaaaggcctttaaataaaagggagccgggc

SEQ ID NO: 611841 - DNA, 731 bp, Homo sapiens
  misc_feature (641)..(641): n is a, c, g, or t
tcctggcgctcaagcagcagcagcagctgcagaagcagctcctgttcgctgagttccagaaacagcatgaccacctgacaagggcagcatgaggtccagctgcagaagcacctcaagcagcagcaggagatgctggcagccaagcagcagcaggagatgcgtggcagccaagcggcgagcaggagcgtggagcagcagcggcagcgggagcagcagcggcaggaagagctggagaagcaggcggctggagcagcagctgctcatcctgcggaacaaggagaagagcaaagagagtgccattgccagcactgaggtaaagctgaggctccaggaattcctcgttgtcgaagtcaaaggagcccacaccaggcggctcaacattccctcaccaagaccccaaatgctgcggagcccaccatgcttctttgtggaccaggagttccccctccacagaggcggccccccttgggacgcctcgctcctagaaaggtgccttggccgtgggccctacgacagtcgagaggatattcccccttccgaaaaaacagccttcgtgaaccccaatctttgaaatgttgcgttcaaggctaaaacaagaagggtggctgaggcggagaagccagtccccttctgcggtggcnagggattgcgactgttattagcaccctttaagaagagagctgttgagatcacagggtgccggacatggggcgtcgcccgtgtgtaacagg

SEQ ID NO: 611842 - DNA, 1090 bp, Homo sapiens
ttgctctcgtgttcttgttcagtcatgcttttgtcctcttctcttgtcctcttgttggccctttgtttgtgctctgttttggggttcttggttctttattttcctcggtcataatatgtgtcttgtgtctttctctcgtgccttttctctttcttttccttctttcactgtcttcattggtgtgttcgtttttgtgtttcctttgttgtgttttggtcatctcttatcttctatttttcgcttttgttctattgttttgtacttactggccgggatgttcttcgtcttgtggtttcccctgtccaggattatcgcagtctttcgattgggatcttgccaagtctcgtgtcttatttgcttcctgtccgtgctctcattcttttgtgggtatcatcatctcgggttcttggtgctcctattgtgctagcggtttcatagctagttgtttcgtttgggtagttgtctttggcgcgttatggcgttttttgaggtctttgtatgtcctttgctgttgtgttttttttttgtattttttccctttcttgttacttcattggtcttccatgtctgttccgtattggtgtatgccagttttggcggttcggctccggtcaagtctgtgatggccttgtggtttagtgtgctcctctgctcatgtgttgatgtgcattgggcccatggtgttggccttggggcacctcagcgtgatattgtgcttagtatatttgttctccatgccgtcatcctgggcttttccgtcctgtgtcttcgtttacaggtctctctagcaagtcctacaggacgtcgtcgtcgtccgttccgtgtccacctgtcagcttcttctgcgttgctgagataagaaccatttgtgttacacctacacttaacttcagaaagacatgcaattatgtaggtgtaatcaaacccgatgctttcaagatgacctacggacatcttcaatgtggataagataaagaactaaacacatgcatctaatctgctgggcaatccagttgacgtttaaatgtaagaatggattccttacacttgacacattcagctatatgacagtaactcatgcgcggatatg

SEQ ID NO: 611843 - DNA, 1025 bp, Homo sapiens
  misc_feature (26)..(26): n is a, c, g, or t
  misc_feature (33)..(33): n is a, c, g, or t
  misc_feature (35)..(35): n is a, c, g, or t
  misc_feature (41)..(41): n is a, c, g, or t
  misc_feature (44)..(44): n is a, c, g, or t
  misc_feature (56)..(56): n is a, c, g, or t
  misc_feature (62)..(62): n is a, c, g, or t
  misc_feature (68)..(68): n is a, c, g, or t
  misc_feature (79)..(79): n is a, c, g, or t
  misc_feature (84)..(84): n is a, c, g, or t
  misc_feature (86)..(86): n is a, c, g, or t
  misc_feature (88)..(88): n is a, c, g, or t
  misc_feature (92)..(92): n is a, c, g, or t
  misc_feature (118)..(118): n is a, c, g, or t
  misc_feature (126)..(126): n is a, c, g, or t
  misc_feature (132)..(132): n is a, c, g, or t
  misc_feature (143)..(144): n is a, c, g, or t
  misc_feature (150)..(150): n is a, c, g, or t
  misc_feature (156)..(156): n is a, c, g, or t
  misc_feature (375)..(375): n is a, c, g, or t
  misc_feature (468)..(468): n is a, c, g, or t
  misc_feature (482)..(482): n is a, c, g, or t
  misc_feature (995)..(995): n is a, c, g, or t
  misc_feature (999)..(999): n is a, c, g, or t
  misc_feature (1004)..(1005): n is a, c, g, or t
  misc_feature (1007)..(1007): n is a, c, g, or t
  misc_feature (1013)..(1014): n is a, c, g, or t
  misc_feature (1016)..(1016): n is a, c, g, or t
  misc_feature (1021)..(1021): n is a, c, g, or t
tagaggtggagatccatgccggcgtntcaaccnanagccgnttntaaagcgcgtcnatgcgnacgccnacccgcggcantatgntnanacgntcaaggctctccgcgtgcggcggctnacagtggnagccgnacaggttcctnntcagcnactggnaggcgccctgcgtgtgctagcgaactcccgcctcaaggaactgacgctcgaggacctaaagataaccggcaccatgcctccgctgcctctggaagccacagaacttgcactttcccagttgcgcctacgcaacgtgtcgtgggcgacagggcgttcttggctcgccgagctgcagcagtggctcaagccaggcctcaaggtactgagcattgcccaagnacactcgcctgccttttcctgcgaacaggttcgcgccttcccggcccttaccagcctagacctgtctgacaatcctggactgggcgaacgcgnactgatggcggctntctgtccccacaagttcccggccatccagaatctagcgtgcgcaacacaggaatggagacgcccacaggcgtgtgcgccgcactggcggcggcaggtgtgcagccccacagcctagacctcagccacaactcgtgcgcgccaccgtaaaccctagcgctccgagatgcatgtggtccagcgccctgaactccctcaatctgtcgttcgctgggctggaacaggtgcctaaagaactgccagccaagctcagagtgctcgatctcagctgcaacagactgaacagggcgccgcaacctgacgagctgcccgaggtggataacctgacactggacgggaatcccttcctggtccctggaactgccctcccccacgagggctcaatgaactccggcgtggtcccagcctgtgcacgttcgaccctgtcggtgggggtgtcgggaaccctggtgcagctccaaggggcccggggctttgcctaagatccaagacagaataatgaatgactcaaactncttngcttnngngagtcnncncagancttt

SEQ ID NO: 611844 - DNA, 532 bp, Homo sapiens
aagccatctcggtccttgctggaaggtggagacatcgcttgtgttctggtgtcaatcagggggctggatggggcaagaatgggggacaagggtggctttgtaaatagcagcaaatccctgcaactaatttattactttttctttttttttttttttttggagacagagtctcactctggttggcccggggctgggagtgcagcgggcgtgatctccggctcactggcgaacctccgcctcccaagttcaggcgattggtcctggcctcaagttcccaagtgggctggggattacagggcgcccaccattatgcccagctaattttgggtattttagtacagagggggttcaccatgtgggtcagcgctggtctcgaactcttgacctcatgattggcctgccttggcctcccaaagtgcggggatcacgggcgtgagccagtgggccagctaattataccttttatagcgaaagcgtatgagcgccttgaggcggttgcacggtttgctcaggcctgggacctgtgcagctg

SEQ ID NO: 611845 - DNA, 220 bp, Homo sapiens
tgtagattaaatggctgatctatgtatcacagagcgcaatatgtacgggacaaagtgggaggttgtatttcttggtctcttcctccttggataaagtcttgatgatctcctccttcttgtgcctggaggccgctcttcacggcgcttgcgtgcttccttggtcttagacctgcgagtctcagcgtggtcagccaggagcttcttgcgggccttatctgcg

SEQ ID NO: 611846 - DNA, 171 bp, Homo sapiens
catgactgaggcgggcataactgtgaccgtagcccaccacaggccaggcgctgcagttcctgcagcctttcgacaagtggcactggcacggcccttgaatggacctgcagactcctcatcaagggtcaaaggggagttgtaccatttgaccacatctcgagctgcaggccc

SEQ ID NO: 611847 - DNA, 358 bp, Homo sapiens
  misc_feature (129)..(129): n is a, c, g, or t
  misc_feature (131)..(131): n is a, c, g, or t
  misc_feature (153)..(153): n is a, c, g, or t
  misc_feature (162)..(162): n is a, c, g, or t
  misc_feature (180)..(180): n is a, c, g, or t
  misc_feature (206)..(206): n is a, c, g, or t
  misc_feature (213)..(213): n is a, c, g, or t
  misc_feature (301)..(301): n is a, c, g, or t
  misc_feature (339)..(339): n is a, c, g, or t
  misc_feature (342)..(342): n is a, c, g, or t
  misc_feature (355)..(355): n is a, c, g, or t
cccgcggtggtcattgtggtgccgggccgcagatagtccagcccgaactgcccgcccgccacgtcgaccagcgtggcgatcagcccgccttgcagcgccccggaggtgttgaccaccgcggggctgacngncatggtcatcgcgaactgaccnttgcgggtnccggggcgcatgccgatntgcccgaacaactccgccagcgacgncgcgctngagtcctcgtcggtgtcccggatgcccagcgcccggctgcagaagtcgtagagctggccggcgtcgacgggggtgccgttcaattccncacccagccagtgcaatcgctgcgcacccatcatggtntgnatgacgatggcgnccg

SEQ ID NO: 611848 - DNA, 286 bp, Homo sapiens
ggtggatgaagactcggtaaacagctttcaccagcttctgcgtatcgaccgtgacagctccagagtggaccaacctccgaacagctgtacggataaccacatccactcctggacagtaatacagtggcagcactcctcacgcctccacttcaggttgacttgtgacgagacataagacggtcccatgacccacgtgccactgaacgcgacaaagggactccaggggggcacgttggactgtgtcctacaatcacggagtctgggggacgagatccagtgacttctg

SEQ ID NO: 611849 - DNA, 466 bp, Homo sapiens
  misc_feature (424)..(424): n is a, c, g, or t
  misc_feature (430)..(430): n is a, c, g, or t
gcacacctgtcgcaggtctgtcttctgtacgctacagagtcacgcgtaaaacacctactataccgccaaaaaaatacaaaacaaacacacatcgacttcataaaacaccaactttataatctgtatataacacaagtctgaacgttacacaacggccttaaagcaaggcggaatatatacaggatgcacacattactgaattcaagaacagccccaatgcatacgattaagtagcctacactgacaacacggactgtatctagagtctggctggttgaacgtctcttggagaatctctgcctgttaaccaaaaacatgtgctacacgcgccacttaaaaaaatataggcctcttaattaaaaaagttcagacggaaatcgagttaaattactttcagaaaaagttatagattaaacgttaaaanaaagtngacgcggccgcgaatttagtagtagtaggcgaccgc

SEQ ID NO: 611850 - DNA, 126 bp, Homo sapiens
  misc_feature (5)..(5): n is a, c, g, or t
ctcancccaagcagcagcacatttggtcgcaggcttcccagcaaaggctacacaagggcagctcagctgtagcaaagcagctcaaccaagtagcaagcagtcctgccagcgaaaacgggaagctat

SEQ ID NO: 611851 - DNA, 199 bp, Homo sapiens
ccggagggagaggagaggaaggaagaagagagagaaggacgcgaaagaggaagacgaaggtaaaaggagagagatgcgaggaatggacaaaggagacaagtcagcacctacgaaggttcgagaattatgtaggaaaagatagaaaaggagacgaagaaaaacgaaaaactacagtagtcaaaaacaagctacaaaaggg

SEQ ID NO: 611852 - DNA, 149 bp, Homo sapiens
gctggacctcagtacatggaggatgattccaccaccgtctcacaaaacggacaactgggtcagccaccttgatgtctatctctgagtacatcttccgcaaatcatgcagtcacacatgtccagtgtagagctccccatgtgcccagtga

SEQ ID NO: 611853 - DNA, 553 bp, Homo sapiens
  misc_feature (553)..(553): n is a, c, g, or t
ggcggggcgcggtggctcacgcctgtaatcccagctctcagggaggctaagaggcgggaggatagcttgagcccaggagttcgagacctgcctgggcaataatagcgagacccgttctccaggaaacacggcaacaaaacaaaaacaaaaaaaaccaaaggaccaaaaaagaaacaaaaaaaaaaaaaaaacatatttgtgggggcgccgccccgcgcgccctgggaaaaaaggtttttaaacacccatttcgggtggggcgcggcgcgggcgccccaatcggtagtgttaatggcaacacgtggggcaaacacggggcgacccaaaggagaactcggggggcaagcgagagaaggcggggtggggttctcctcccacaccataaaaaaaaccgcggcgggcgggacacacccgagcgcgtttcttgggacacaatccccagaggggggggttcccgaggagggcgcacagacgggggctctactaacaccacgagggtgcgccaagaggaacgcggccgaaattacaaaattaaccccgcgcagaggtaggn

SEQ ID NO: 611854 - DNA, 637 bp, Homo sapiens
  misc_feature (10)..(10): n is a, c, g, or t
  misc_feature (215)..(215): n is a, c, g, or t
  misc_feature (329)..(329): n is a, c, g, or t
ggggggcagncccacacccctccaagtgtggataaaaattttcccggcagggtcttattgggcgcgaaaaaccaaagaagttttttccatcccccgtgggttggggggcaaagtggagacctcaaacccacaagggatttttattccccgtgacaattaattgctggccctcggagagtggaaagggcggtgaggcgccccatagaaaatgaggnccaagaaaataatttagaattgaatgaggggggtatccccaccccccccccgttgggggggggggggcctgttatcggtgagattaatgggggggattcacaacccagttcccnaaaacccctgggggggggcccgcctgtgattgaagcccaaaaaaaaaggggcggcctggggtttagcattggggggcagcccaaagaatttttcccgggtcaaggttcctttgttcccaaaaaaaatttttggaacaaacggggtccccaaagggccccagggaaagggaaacacccccgccgggttttccccaaagccccctttcctagggggaaaggatgaaattttggaaaccccaaaaagggggggggaaaaggaaaattttcaaattaaaaaaaaaaacgcccaagaggggggaagggttttt

SEQ ID NO: 611855 - DNA, 275 bp, Homo sapiens
cgatctagaggatccctcggacagaggtagggacacacccacccgcacacatccatacagtccacaccataacacacacccgcacacatccatacagtccataccatattattggagcatagaaaaaaagttcaagccaggtacaggggcaggtgcctgtggtcccagctactggggagacaaaagcgggaaaacggctggagcccagaagttcaaggccgagccggggcaacatagcaagaccccatttcttaaaaaaaaaaaggttccagcca

SEQ ID NO: 611856 - DNA, 116 bp, Homo sapiens
caagtttatacggtgaacccaagctcccctcgtctatcatccataaccctcgcatactcgagcaacagccggaacatccaagccggcatatcttccctcctcagcacccttttcgg

SEQ ID NO: 611857 - DNA, 174 bp, Homo sapiens
cctgttgactcacacagacgtggcatgtaaggtggagcgttacaagaataacaaaaatagctccgtcaaaaaagcaaaaggcttcatgctatgcagagcagcactgagtttgtgaagcctcagtatgcctctttatcattaccagccgttgctgcacacgcctcaaatatctca

SEQ ID NO: 611858 - DNA, 910 bp, Homo sapiens
tagcggaaatagtgcgtagatcagcctgggtatcccatgtctattgcatcaactgacttgggtacctactgagacgctgatatgcctgagatgactatgagcttattgacgtggtgtataatccagatgacaaacatgtcagtgggagatatggagagcatatggaagtgaagtcagaagatagtcgatcacaaataacgattggacttagttagatacgctaaggaatggaaggagatagagctgtgatgaatgaggcaactggattcaatgagtactaaccaaggattcagcatttagttaaagcatatagttgtagtatcggttgtctaaagggatgctagagaaggtgagagagtgttttagggtaaaggaatgcaagtgtgctgtgaagtccagaccggatttttagtctgataaaatgacttttccattggggacaatgccccgaatgatagtggagatcacaatcattgcgctgaattggccaagcctttgtgtgtccaacccattattatctgaatctttgcatggctgcccacgcagaatagtctttcaggtaatcccgttaaagaaagcttaaatagcaatcctaggtattatcgcacacgtaattagacaaggccatttccttggtaaaaaggcagttccgagattcaatgcttcctatggattctagagtcgggaaccaattctcgtaggccaatgatggacccaatgtcaggagcttcggctctgtggacagccacataaagtgcgggccaccaggaatttgtactcccaccggtgggtggccgacttggaatggccaatatgagggcccacagcctcgccggccagccaaaaaaagggggaaaaaggccaaaattcggtttacacgactattccttgttttgcttctccttaacca

SEQ ID NO: 611859 - DNA, 146 bp, Homo sapiens
  misc_feature (55)..(56): n is a, c, g, or t
  misc_feature (108)..(108): n is a, c, g, or t
  misc_feature (142)..(142): n is a, c, g, or t
gtttcaaactacttttaccatgttatatctatttgcccaaacgtttgacatattnntggtcaaacaaaaagctataagtttatggagcttgagtttaaaatgtgcatnctttaggttaactcttaaacttgaaaaaataagntggg

SEQ ID NO: 611860 - DNA, 1182 bp, Homo sapiens
agcgggcgttctctcctccttcctccccgtcctccaggctgccggcaggaactttctctcgctgccggtgggaccccgtggtcatcgaccacgcgcgatgcactatgtcccccttacgaaagggaggtgactggagatgtaaaaccgacccccaatcgatcggacagatttggaatctcactggaacaacttggtatatgtccgagattgccaggatgttggggaacactctagctgttactcttcgggatgtgctttgaagctcaattaacgtgcaaggcctttctcgccaagagacacacctttcgcccgttccttgccattcgtgattgaatcccgtatagttgacaaagcatgaggtcactcgtgtgtcctagggatagacaagggttggggcaccgtttccttggggtccaaggtagcctaccatgagcaccagacaaaagcccataagaatttccgctgtccctttttcccttaatactggtgagattgcgtactattttgacttgggtccctgtgctggaagcggggcaagcctttcgatcaatagtgggggccacggggccccctgggtgggggaacattgggctttggtttcctattcttccatttatttataggtggccccttggggggcatggggcgaatacgtttgtccaattccttcaaaccaaacggttgtctttcttctggagatggagtcgcactggacttgatttctacggaccacctgttttggaaaacgcgaacaagggtggtccatcaatacccttattcccccgacgaattagtgagtgaaatcttatcattatacccttgagtaaatgacggcgtgtccgaggctttgtaaaccaggaagttcgacgcgggacaagattaggcatcctgggggccccccaagttttactacgcacttaaaaccttctacacacgacggcgtgggtgcttggtcgcacaagaagggaacgggacgcaatttggagaccaatggtcaatggaaaccctgggaaattaagtggaagttattggacttgaggttgcataggagttaaagaaacttccctgggtggtgttgattcagcaatgtctcaaaaacgaaacagacctcgtttaccggctttcattacttcaatcgcgaatgttggggacctcttgaaccataaaggaagacatatgcga

SEQ ID NO: 611861 - DNA, 100 bp, Homo sapiens
cgcacacgcccgagcacccacaccacacgccgagggcccacagctgcacacgcgaaagaccaaaacgccgcgaaaccgttatcgccgatcttcacggggg

SEQ ID NO: 611862 - DNA, 988 bp, Homo sapiens
atatgacctcccaatgaagaattcacttcttgcctacgaggataacactaagtggattagccaaaaatgccactgaccttcagaactccagcatgtcggaacgaagagctgacgctaaggccatggaggggcctaggcatggacgacggggatggggaagggaacatcctccccatcatgtcagagggatcatgcacgtaatcctacatctccaaggcatgtgcgtgtaccctatcgactgaaagtgagatcacaagaaaagctatccaggaatggcttgcatgcagatcatcggcgaatctcgtactcctcctcatcatcgagtgttgtataatagtatccaggagcagcttcacagcgtctgtgtgctaaaatatggtgcagccagatttgcaggccagtagcacccccagcaggacgagtggacaacccactcgaataaggcctcgctatctgagatggacgcgttcggatcgttaagtgcgcgtcaagcgtaccataatttagggccatcctccaaaagagcttggttggacgcatatgactcctggactcaacctttgacctgggatgccctcaatcttgtcgggacccacctatggtgcctgtggtagaagcagtgtctgatcatgtgaaacacaacacgttgtcctctctgagtcccagctatggggaaacctctggagtcagcagaaaccattgggggtaactgaagcaagggaagtgtcacctgcggcgaggaagttctgccgcgtggccctctgtcatcccattcaagattgttgcctaacagctgaggtttttgcctcttggtctctctagggactaggggcctggtttccaggcccttttgtggaaccttctccatgggggtttctgcccagtttaagttcacttcccggcggggagggaagggaccccttggggcggcagccttctcttccccaattttttttggcccctttttacattaaagagagtgggttca

SEQ ID NO: 611863 - DNA, 515 bp, Homo sapiens
tataattattctcagactaacactgataaagtggcaaagttggagcatgtctctacccaaagctattttacagtgttgatcatatatattttgcttaaattaacagtgtgacaattatgttactctgtcatatatcagttctaacaaattatttaaaaaacacttttctcttaatgattttgctattcataaacatgactgttaagtctagggctgatagcttgtatttgcagtttgaatgacaaatcttttttttgtttctcaacataattgacatatttttaaaagaactataatttttcaaagacattattttcttttatggcagacaccttaaacaatcagttatgtctgtgtgggtaattacttaaatgttccagcagttgcatgacactatataagtgagtgtagttagaaaaatgagctcatgcccatttatgtataaagagcatcatgattaaaattaccaaaaagagaaatataagccaagcccaagttatcagtgtatgtttctt

SEQ ID NO: 611864 - DNA, 184 bp, Homo sapiens
ggagttcaaagttaagaacgggaagaatgtcaataagggcacctttccaagagctactaagcaggcacttggacatttcaggagtttgtcttataggttgcataagaattatccctaatcacccgagacctggcaccgctttatggtttcaacagttaacgaaccgggacagacatggcgtggc

SEQ ID NO: 611865 - DNA, 334 bp, Homo sapiens
gagcctgacctgcagctctctctgatgtggcaaagcagaacttagcattctgttgattttaaattgttgaggtcaaaacttagatgtcagctggacgcggtggctcacacctgtaatcccggcactttgggagaccgtggcaggcggatcacttgaggccaggagttcaagaccagcctgaccaacatggagaaactccatctctactaaaaatacaaaattagctgggcttggtggtgcatccctgtaatcccagctacttgggatgctgaggcaggagaactgcttgaacctgggaagcggaggttgtggtgagtcaagattgcaccactgt

SEQ ID NO: 611866 - DNA, 3493 bp, Homo sapiens
cacaaagaaaaaagaaatacctgtagaagcgcatcgaaagctcctggaacagagttgtgtctcatatttgcaaagatgcagaaaaaataaacccgggacatccagctttcttttcctttcttctttgactattctgagaagctatgcgactaggagcacattttaggtaaacacgtggcttgagtagccataaggccactcttccctgtcgtgtgacccgcgcctgggcctttaagagatattggtgtttgaaaagggaggaatctgtttgccctcagatatttagttcaactgcctgcattgcttcctattttgttgtccaactctgtagtagttagcactggccttaccaacatgtaaagaaattttctttactgccccatgagtagttggaggcaaagagaaatttttaaagcgcagaaaaaggcctgcagggagatggaatttgttctgccagagaaacgagatgatagctgtatttaataaagttactgacctcttgtcaaaatttaaaacgcaaaagaagatgtttcaaaatgcagagaatgtcagaaaacaaaaactacagggaccagaccagtataatgtttagttttcattatactaacttttgtctagactggagttgattcactattttttctttaactcctcaggaagcaaaccttcccgatgatgaagacttcttgaaggatttcatgggtgatttgggatcccaggaccatttggctagtgtgcctaggtgaccacatgattgctgttttaccaggaatgcagcatcccattgacaaaacaagtgctctgagaaggtttaaaatactacagagaatatgggaacacagaccttgaaatttagctgagttgtaacagctgaaactccaagaggtgtcttccttgtttgaggtgaaactagtgttgcttccagagggcagctggaaaccgtaaagctgtttggaaatctttttgactgacttgctgacaaagaggtactgtgatgcattttaacaatatctaagttgatttttttttaaatcaaggaaaataaaaaccaagcatgaatgctatggtatgtgccccttttgaccatcctgggctgattaacatcatttaaatcaaagtaatcataaaaaggcatattctacttcaattatgtggtcaaataagagtaaacacacacactcacacatgctgaccccaattgccagagcattactgcactataaattacggttaattcccaaattatactactgtttatcttatttaacaagtcagaaagcacttttaaaataacttgagggctacaaggtcattctattaatgtcattctccattcgggttgtaggcatgtggaagtacccattaaaagataagttagagtttaaatactgataaacaaaaccttttattgcaactggacagtttctggagagttagcggaagaatcttggagtttcctttggtcagatgaatacaacatttcacttttgcagcactatttagaatgtactccatggttctcttgttcccaacttccaaaaagaacagaaaactttggtttacacagaacacgggcatctgaggcaggacctcttccctgccctttgatctgactcacacctccacatatgacgtaatcaacccaaatttgacaccaattcactcttttctgcaaagggcatattttgaaacaagggacagcctgagggcggctgtaatgagaatgttcatgggggttactgggtccctaattctgaacttgcttatgacacccagagtgaatagattcagattcagaaccttctgagaaataacccaaagaaaatttgttacccagccaattcttcgaaagcttaatatcaaaatatatcttttcaagaagaaaatcgttagagagaagaatgtggaggggagagaaatgggtttctcattgatatgatattttgttaaccatttcattttgaattattcaagttttggttaatattgtattcttttttcgtaactattttaccgtgagagtaggtcattgggttacttagatatttatttttacacagttattagtcttcagatagttttattttacttcatatgattttagtttttgtcagtataattttaaatcatgtttttcttggtcatctctttgtgtatattgtgtaattggattttcattgactgcaagtggagtgtttgccactcaattcagtactcagtactatggtgacttgttttcaaataagtctcagatacacatttagggagcctttgctggccgaatatagactctgtcaggacagcaggtcccctgatctaagaattttccccaatggttgctctaaaaatgctgctattttgctgttcactgtattgcacttagttaaaaagaagataatgtgaaagatgagagcagttttttaaaggatcttttcatatacccaattcccttattttcagatgtcccatcaattttagatatgaaagctttaagtaaaagtgtgtatgcctttctactgtcagaacaggatggatgcagcctgggtcagatttatttaagataaaaatcatgcagactcatcattcatatcataggtgaaaaatgtaaaaaccaaatggtttccactaaagccaccaagatcttttagaaatgtttgcacctttggtggtggcacaggaaaagagaagaattcagctggagtgaattctagaagtagatatcagaaacggggcatgaagaacaggggaactgggtggcatcagactcctaaagaagtgagttaattttccttcccttccattcagattcatgccacagctccatatcttgagtatgtgtaagaggtgagttccttcttcagccaggggcggtggctcatgcctttaatcccaatgctttgggaggccaaggtgggaggatcacttgtgccttggggttcaaggttgcagtgaaccatgattgcaccactgcactccagcctgagtgacagagcaagaccctgtctctaaaaatatatataaaaagtaaaactaaagaacttcttgcctaaacctgaattaccgcaatttgctgagtgactttgagaaaaatcagactgtttagttcagtcgggatgaaaagcttgcgattgcttcccacaagaatgggcaatagtgacggctgcaaggtacttttatttgttcatgaaagaacgacaatttttcaaaatgtaattaaacataatagaatgttttaaactactgggcactgaaactggaagaaaaaggaggctttattgaacattcccctttttcagttggttcaaagttcagcactgtggttatcattggtgatgccagaaaacattagtagacttagacaattgctatggcagtttctaaacagagctttttctatacactatttgcaactggagtgcaatattgtatattctgtgttaaagaaataaagtatttttatcatttattaaaaaaaaatatattttatttattt

SEQ ID NO: 611867 - DNA, 127 bp, Homo sapiens
ctaacatgctataagcatgcacttggccgtcgttgtacatttaacagctatgacgcatgcactgggcgccgttgtagactcgaccgctatgaccatgcactggcggtcgtattccacaagcggccat

SEQ ID NO: 611868 - DNA, 597 bp, Homo sapiens
cagacgtagtcaataacaaagtaatgaacaatttacatctatcattaaaaaagaaaacccacccagagtggagggtcagtatctgtaatcccggcactttgggaggctgagagtggaaagatcactcacgagtcagaagttcaagacctgggtaacatcgagatcttatctctacaacagaaatttaaaacttagctgagcgtgatgatcacatgccgtggcagtcctaggtacttggagagtgctgaagtggaaaggatgcacttaagcgcgtgagtaccaggcagaatcgagctgtgactgtaccactgcactccagaccgtgtgacagaatgagactccatttccaaaaaataaataaataagcaaaaataaaaacctgagcttggtcatcaaggacaaagatttaaagaaggtagaacaataactgtactttcttataatcagttaaattaaacctgcgggaatatgaccagttaatttccagcctgctttttctggtgatgaggcagtacaagaccagtccataaaattaagtgtcttcagggtgggtgagggatagacaggccaacaatttctacaaagaaggctgtctta

SEQ ID NO: 611869 - DNA, 791 bp, Homo sapiens
ggtctgctctctccggcatggcgtgtggtcgcccagtgatatcggggtactccgaaggagggggagtcatctggcgagaagtgtcacttagcctgcgtgtattcaagggtcctatgtcgaccagatattgtgaactttgttgacaccaacttgcgcaataaacaacagatagccctagtgcttgtcagtgaatgatcatcggtcatcaagacgtattgcatgaagttctctggaggttgctatggtatgagcctagtagagctcgaagtatccctaggacgattcgatggtggatgcggagtcacccggatctgagacaggggctgccattttggaaacatgtgatccgtgtaggccgattgtgtatgctaccaacccaaaaaacttggcgccagtgagcatcgtgagcagtgacacacaaacccaaaacaaggatacagccaatcttgtatctagccctaggcatggctcaagtccgtacctagcacatggtcgttgtctcacacacggtacttccgtgttgacgggaacgataccctgaacattccttttgagtcttccgtgagagactacaaggttaggcatgggttactaggaaaggcatgcacatagcaaacgggctaggatcagtctcccgtgtacaagaacttgttacacagcctgggaactgactagtctggaaaaggtgtgcctatttctcgtcatcaggcgcaattgacgatgcctgggagaagggcataatctgataactactcggttccaccgatactccggactggaaggggtgccga

SEQ ID NO: 611870 - DNA, 2916 bp, Homo sapiens
attcgcggccgcgtcgacgtgggggttcagagcctgctcgccccagcgtcctccaggcggttggcagcgccgccggaaggaagcaaaccttcccgatgatgaagacttcttgaaggatttcatgggtgatttgggatcccaggaccatttggctagtgtgcctaggtgaccacatgattgctgttttaccaggaatgcagcatcccattgacaaaacaagtgctctgagaaggtttaaaatactacagagaatatgggaacacagaccttgaaatttagctgagttgtaacagctgaaactccaagaggtgtcttccttgtttgaggtgaaactagtgttgcttccagagggcagctggaaaccgtaaagctgtttggaaatctttttgactgacttgctgacaaagaggtactgtgatgcattttaacaatatctaagttgatttttttttaaatcaaggaaaataaaaaccaagcatgaatgctatggtatgtgccccttttgaccatcctgggctgattaacatcatttaaatcaaagtaatcataaaaaggcatattctacttcaattatgtggtcaaataagagtaaacacacacactcacacatgctgaccccaattgccagagcattactgcactataaattacggttaattcccaaattatactactgtttatcttatttaacaagtcagaaagcacttttaaaataacttgagggctacaaggtcattctattaatgtcattctccattcgggttgtaggcatgtggaagtacccattaaaagataagttagagtttaaatactgataaacaaaaccttttattgcaactggacagtttctggagagttagcggaagaatcttggagtttcctttggtcagatgaatacaacatttcacttttgcagcactatttagaatgtactccatggttctcttgttcccaacttccaaaaagaacagaaaactttggtttacacagaacacgggcatctgaggcaggacctcttccctgccctttgatctgactcacacctccacatatgacgtaatcaacccaaatttgacaccaattcactcttttctgcaaagggcatattttgaaacaagggacagcctgagggcggctgtaatgagaatgttcatgggggttactgggtccctaattctgaacttgcttatgacacccagagtgaatagattcagattcagaaccttctgagaaataacccaaagaaaatttgttacccagccaattcttcgaaagcttaatatcaaaatatatcttttcaagaagaaaatcgttagagagaagaatgtggaggggagagaaatgggtttctcattgatatgatattttgttaaccatttcattttgaattattcaagttttggttaatattgtattcttttttcgtaactattttaccgtgagagtaggtcattgggttacttagatatttatttttacacagttattagtcttcagatagttttattttacttcatatgattttagtttttgtcagtataattttaaatcatgtttttcttggtcatctctttgtgtatattgtgtaattggattttcattgactgcaagtggagtgtttgccactcaattcagtactcagtactatggtgacttgttttcaaataagtctcagatacacatttagggagcctttgctggccgaatatagactctgtcaggacagcaggtcccctgatctaagaattttccccaatggttgctctaaaaatgctgctattttgctgttcactgtattgcacttagttaaaaagaagataatgtgaaagatgagagcagttttttaaaggatcttttcatatacccaattcccttattttcagatgtcccatcaattttagatatgaaagctttaagtaaaagtgtgtatgcctttctactgtcagaacaggatggatgcagcctgggtcagatttatttaagataaaaatcatgcagactcatcattcatatcataggtgaaaaatgtaaaaaccaaatggtttccactaaagccaccaagatcttttagaaatgtttgcacctttggtggtggcacaggaaaagagaagaattcagctggagtgaattctagaagtagatatcagaaacggggcatgaagaacaggggaactgggtggcatcagactcctaaagaagtgagttaattttccttcccttccattcagattcatgccacagctccatatcttgagtatgtgtaagaggtgagttccttcttcagccaggggcggtggctcatgcctttaatcccaatgctttgggaggccaaggtgggaggatcacttgtgccttggggttcaaggttgcagtgaaccatgattgcaccactgcactccagcctgagtgacagagcaagaccctgtctctaaaaatatatataaaaagtaaaactaaagaacttcttgcctaaacctgaattaccgcaatttgctgagtgactttgagaaaaatcagactgtttagttcagtcgggatgaaaagcttgcgattgcttcccacaagaatgggcaatagtgacggctgcaaggtacttttatttgttcatgaaagaacgacaatttttcaaaatgtaattaaacataatagaatgttttaaactactgggcactgaaactggaagaaaaaggaggctttattgaacattcccctttttcagttggttcaaagttcagcactgtggttatcattggtgatgccagaaaacattagtagacttagacaattgctatggcagtttctaaacagagctttttctatacactatttgcaactggagtgcaatattgtatattctgtgttaaagaaataaagtatttttatcatttattaaaaaaaaatatattttatttattt

SEQ ID NO: 611871 - DNA, 2862 bp, Homo sapiens
attcgcggccgcgtcgacgtgggggttcagagcctgctcgccccagcgtcctccaggcggttggcagcgccgccggaaggaagcaaaccttcccgatgatgaagacttcttgaaggatttcatgggtgatttgggatcccaggaccatttggctagtgtgcctaggtgaccacatgattgctgttttaccaggaatgcagcatcccattgacaaaacaagtgctctgagaaggtttaaaatactacagagaatatgggaacacagaccttgaaatttagctgagttgtaacagctgaaactccaagaggtgtcttccttgtttgaggtgaaactagtgttgcttccagagggcagctggaaaccgtaaagctgtttggaaatctttttgactgacttgctgacaaagaggtactgtgatgcattttaacaatatctaagttgatttttttttaaatcaaggaaaataaaaaccaagcatgaatgctatggtatgtgccccttttgaccatcctgggctgattaacatcatttaaatcaaagtaatcataaaaaggcatattctacttcaattatgtggtcaaataagagtaaacacacacactcacacatgctgaccccaattgccagagcattactgcactataaattacggttaattcccaaattatactactgtttatcttatttaacaagtcagaaagcacttttaaaataacttgagggctacaaggtcattctattaatgtcattctccattcgggttgtaggcatgtggaagtacccattaaaagataagttagagtttaaatactgataaacaaaaccttttattgcaactggacagtttctggagagttagcggaagaatcttggagtttcctttggtcagatgaatacaacatttcacttttgcagcactatttagaatgtactccatggttctcttgttcccaacttccaaaaagaacagctttgatctgactcacacctccacatatgacgtaatcaacccaaatttgacaccaattcactcttttctgcaaagggcatattttgaaacaagggacagcctgagggcggctgtaatgagaatgttcatgggggttactgggtccctaattctgaacttgcttatgacacccagagtgaatagattcagattcagaaccttctgagaaataacccaaagaaaatttgttacccagccaattcttcgaaagcttaatatcaaaatatatcttttcaagaagaaaatcgttagagagaagaatgtggaggggagagaaatgggtttctcattgatatgatattttgttaaccatttcattttgaattattcaagttttggttaatattgtattcttttttcgtaactattttaccgtgagagtaggtcattgggttacttagatatttatttttacacagttattagtcttcagatagttttattttacttcatatgattttagtttttgtcagtataattttaaatcatgtttttcttggtcatctctttgtgtatattgtgtaattggattttcattgactgcaagtggagtgtttgccactcaattcagtactcagtactatggtgacttgttttcaaataagtctcagatacacatttagggagcctttgctggccgaatatagactctgtcaggacagcaggtcccctgatctaagaattttccccaatggttgctctaaaaatgctgctattttgctgttcactgtattgcacttagttaaaaagaagataatgtgaaagatgagagcagttttttaaaggatcttttcatatacccaattcccttattttcagatgtcccatcaattttagatatgaaagctttaagtaaaagtgtgtatgcctttctactgtcagaacaggatggatgcagcctgggtcagatttatttaagataaaaatcatgcagactcatcattcatatcataggtgaaaaatgtaaaaaccaaatggtttccactaaagccaccaagatcttttagaaatgtttgcacctttggtggtggcacaggaaaagagaagaattcagctggagtgaattctagaagtagatatcagaaacggggcatgaagaacaggggaactgggtggcatcagactcctaaagaagtgagttaattttccttcccttccattcagattcatgccacagctccatatcttgagtatgtgtaagaggtgagttccttcttcagccaggggcggtggctcatgcctttaatcccaatgctttgggaggccaaggtgggaggatcacttgtgccttggggttcaaggttgcagtgaaccatgattgcaccactgcactccagcctgagtgacagagcaagaccctgtctctaaaaatatatataaaaagtaaaactaaagaacttcttgcctaaacctgaattaccgcaatttgctgagtgactttgagaaaaatcagactgtttagttcagtcgggatgaaaagcttgcgattgcttcccacaagaatgggcaatagtgacggctgcaaggtacttttatttgttcatgaaagaacgacaatttttcaaaatgtaattaaacataatagaatgttttaaactactgggcactgaaactggaagaaaaaggaggctttattgaacattcccctttttcagttggttcaaagttcagcactgtggttatcattggtgatgccagaaaacattagtagacttagacaattgctatggcagtttctaaacagagctttttctatacactatttgcaactggagtgcaatattgtatattctgtgttaaagaaataaagtatttttatcatttattaaaaaaaaatatattttatttattt

SEQ ID NO: 611872 - DNA, 2981 bp, Homo sapiens
gcagaagtcccttgttctgagaccagttctgcaacttctggaagatgtggaagcaggaatttaagctgtgctttttctgctgaaatttataaggattcattttaggatttcttgaaagattcagaaaacttgagacgaacaaaggaagcaaaccttcccgatgatgaagacttcttgaaggatttcatgggtgatttgggatcccaggaccatttggctagtgtgcctaggtgaccacatgattgctgttttaccaggaatgcagcatcccattgacaaaacaagtgctctgagaaggtttaaaatactacagagaatatgggaacacagaccttgaaatttagctgagttgtaacagctgaaactccaagaggtgtcttccttgtttgaggtgaaactagtgttgcttccagagggcagctggaaaccgtaaagctgtttggaaatctttttgactgacttgctgacaaagaggtactgtgatgcattttaacaatatctaagttgatttttttttaaatcaaggaaaataaaaaccaagcatgaatgctatggtatgtgccccttttgaccatcctgggctgattaacatcatttaaatcaaagtaatcataaaaaggcatattctacttcaattatgtggtcaaataagagtaaacacacacactcacacatgctgaccccaattgccagagcattactgcactataaattacggttaattcccaaattatactactgtttatcttatttaacaagtcagaaagcacttttaaaataacttgagggctacaaggtcattctattaatgtcattctccattcgggttgtaggcatgtggaagtacccattaaaagataagttagagtttaaatactgataaacaaaaccttttattgcaactggacagtttctggagagttagcggaagaatcttggagtttcctttggtcagatgaatacaacatttcacttttgcagcactatttagaatgtactccatggttctcttgttcccaacttccaaaaagaacagaaaactttggtttacacagaacacgggcatctgaggcaggacctcttccctgccctttgatctgactcacacctccacatatgacgtaatcaacccaaatttgacaccaattcactcttttctgcaaagggcatattttgaaacaagggacagcctgagggcggctgtaatgagaatgttcatgggggttactgggtccctaattctgaacttgcttatgacacccagagtgaatagattcagattcagaaccttctgagaaataacccaaagaaaatttgttacccagccaattcttcgaaagcttaatatcaaaatatatcttttcaagaagaaaatcgttagagagaagaatgtggaggggagagaaatgggtttctcattgatatgatattttgttaaccatttcattttgaattattcaagttttggttaatattgtattcttttttcgtaactattttaccgtgagagtaggtcattgggttacttagatatttatttttacacagttattagtcttcagatagttttattttacttcatatgattttagtttttgtcagtataattttaaatcatgtttttcttggtcatctctttgtgtatattgtgtaattggattttcattgactgcaagtggagtgtttgccactcaattcagtactcagtactatggtgacttgttttcaaataagtctcagatacacatttagggagcctttgctggccgaatatagactctgtcaggacagcaggtcccctgatctaagaattttccccaatggttgctctaaaaatgctgctattttgctgttcactgtattgcacttagttaaaaagaagataatgtgaaagatgagagcagttttttaaaggatcttttcatatacccaattcccttattttcagatgtcccatcaattttagatatgaaagctttaagtaaaagtgtgtatgcctttctactgtcagaacaggatggatgcagcctgggtcagatttatttaagataaaaatcatgcagactcatcattcatatcataggtgaaaaatgtaaaaaccaaatggtttccactaaagccaccaagatcttttagaaatgtttgcacctttggtggtggcacaggaaaagagaagaattcagctggagtgaattctagaagtagatatcagaaacggggcatgaagaacaggggaactgggtggcatcagactcctaaagaagtgagttaattttccttcccttccattcagattcatgccacagctccatatcttgagtatgtgtaagaggtgagttccttcttcagccaggggcggtggctcatgcctttaatcccaatgctttgggaggccaaggtgggaggatcacttgtgccttggggttcaaggttgcagtgaaccatgattgcaccactgcactccagcctgagtgacagagcaagaccctgtctctaaaaatatatataaaaagtaaaactaaagaacttcttgcctaaacctgaattaccgcaatttgctgagtgactttgagaaaaatcagactgtttagttcagtcgggatgaaaagcttgcgattgcttcccacaagaatgggcaatagtgacggctgcaaggtacttttatttgttcatgaaagaacgacaatttttcaaaatgtaattaaacataatagaatgttttaaactactgggcactgaaactggaagaaaaaggaggctttattgaacattcccctttttcagttggttcaaagttcagcactgtggttatcattggtgatgccagaaaacattagtagacttagacaattgctatggcagtttctaaacagagctttttctatacactatttgcaactggagtgcaatattgtatattctgtgttaaagaaataaagtatttttatcatttattaaaaaaaaatatattttatttattt

SEQ ID NO: 611873 - DNA, 195 bp, Homo sapiens
aagtacatatacgaactcgagctggtaccctgtggaggggatgaggttgcccctattagccgagccggaaggccgttattgactgccattctgcagtggtggatgatcctgttgctgccacctgtgatgcaccgtcctacatggcagaccgtggctgtgaacatgtctgtccggtaacctggctcggacggcctg

SEQ ID NO: 611874 - DNA, 203 bp, Homo sapiens
ttcatgacatttaatcctagtaataatgatctgtctaaggtcagttaggatcaccactttattttaagaatgtgaaatgtcagaataatagtggatagaattatttatttcagcttttatatatttcttggcggatgagatcgcaaaagctcaggttgcccagcccggcggagatacaatcttcgctaaaatcatgtcgacgc

SEQ ID NO: 611875 - DNA, 950 bp, Homo sapiens
tgccaccgcaaccccgccatggagctggacgtcgcatgcgcgccctgctcttcggcgccgctgggctgctgctcctgctcctgcccctctccatcttcctccttcttcaggacacctgcggcccctgcgagccggcactcctgcccgcacccatgcccccgctgggctgccatgctggagcgagacccagagacgcgtgcggctgctgccctatgtgcgcccgcgtgcgattggcgagcctgtgcgggggtggcggcgccggccagggggtcactgcgcgccgggcatggagtgcgtgacagagcccgcacacgagaggcggacaacgggtacaagcccgggcgccagccacgcctggcggcatccagggctgctaacgcggccagctgatgccgtgtgcacagaagccgctaccccgcgtgctagccgggccacgacagaaaggagaagccaccctaagccccgagacgggcctaggccaacctggcgcccgccggcacaagccccagcaagaggccccgagcaacaccgcaggccccacccaaagggcccactaaaacccaagagcgtcacgcccaacgcgtcacacaccactgctcacagccaacgggcatccgctgtcccaccacagatgaacagcccccaccacaagtgccaccactcactgagaaaatggccccaccattagagctggaccccaaaggcagataacctctggacaacacggactcacatcacccacgtccgataaaccaccccccgtcaaaaccattgatcccctcaacctacttgagaacacgcaccaggttaaacctcaacagatcgctcccctctactcccgaactatccaccacagcggaacccaaacatctcacaaacaaatggcatcgaaccagcggcacaaccctttggacccgttccaataatctctcgcgaatgaacaacaacca

SEQ ID NO: 611876 - DNA, 481 bp, Homo sapiens
tatctatactgacgcaattaaaaaataggctgggtattgtggctcatacctgtaatcccagatcttgtgggaggcggaggtgggaggatcacatgaggcctggagtttgagaccagcctgggcaacatagcaagaccccatctctaaaaaagcagaaacaaattagctgggcatggtggcgtgtgcctgtacttccagctactcaggaggctgaggtgggaggatcgcttgagctcaggaggcttgagaccagcctgggcaacacagtgagacttcttctcaacaaaaaatacaaaacgtcagctgggcatggtggccagcgcctgtaatcccagctacttgggcggctgaggcaggaggatcacttgggcccagagttgaaggctgcagtgagctatgatcatgcccctgctaggccacagagcaagagcttatctctaaaaaaaattaaaaataaaaataataaatagcaaaggaggag

SEQ ID NO: 611877 - DNA, 476 bp, Homo sapiens
  misc_feature (110)..(110): n is a, c, g, or t
  misc_feature (469)..(470): n is a, c, g, or t
  misc_feature (472)..(472): n is a, c, g, or t
ccccttcctttgttgttattgttgttttgagacaaggtatcactcgatcactgaagctggatacagtggcaagatcatagctcactgtaacctcaaactcctgggcacangggatcctcgcatctcagcctcccaagtagcttggaccacaggaaagtaccaccatgcccagctaatgttttttcattttttgtgcagacgaggttttgctatgttgtccaggctggtctcagactactggccagaagcgatcttacctcctcagcctcccaaagcactggaattacagagtaacatctaattttaatattcacattcctattttaatattcatattcgatgatggcacttagcaacatcctcctatatccatattaaaacctgttttccaagattgtgtctaatatgaaggtgtaaaattgctttgttttcactccttcttgaatgaataaatttgatagtaaccaannanaaaa

SEQ ID NO: 611878 - DNA, 116 bp, Homo sapiens
atgctgcggtcgctctacagatccccctcgggagcgtgactaatgcttgtcaaaccaaaggaactttgcaaaataatatgcactgcttaagcgcaagactgtaccaattataccat

SEQ ID NO: 611879 - DNA, 414 bp, Homo sapiens
gttgccctctacgaaaaatacaaaaattagctgggcgtgatggcaggcgcctgtaatcccggctactcgggaggctgaagcaggagaatctatttgaacctgcagaggtggaggttgcagtgagccgagactgcgccactgcactccagcctgggtgacagagcgaaacgctgtctcaaaaaaaaaaaaaaaaaaatccccatttagttttaccgagaaggcgataaaacctgataggcccattcaaatcatctgacatgaggcttctacttctgaagggaggtctgacacaggttaaccgatttcaggtttttctacacaggttttgtgactgttgattgatctaaaaaagctggtttcaaccaaaacacttgtgatgtcggatgtggacgctccgggttttaaggctataac

SEQ ID NO: 611880 - DNA, 176 bp, Homo sapiens
  misc_feature (38)..(38): n is a, c, g, or t
  misc_feature (77)..(77): n is a, c, g, or t
  misc_feature (84)..(85): n is a, c, g, or t
accgcacctggccctagaacctcattacatcttaactnggaatcttgcaatcaacttcacactggcctccaagttancccactnnagtctctcctcatcccaaggatcgccagagagaatcttccaaaacactggacttccgtgacccagtccctgccaaccggcttcctgaactt

SEQ ID NO: 611881 - DNA, 453 bp, Homo sapiens
  misc_feature (446)..(447): n is a, c, g, or t
  misc_feature (449)..(449): n is a, c, g, or t
gaggcagatggatcacgtgaagtcaggagttccagaccagcctggccaacatggcgaaaccctgtctctactaaaaatacaaaaattagccggacgtgtgcctgtaatcccaagtagcttggaccacaggaaagtaccaccatgcccagctaatgttttttcattttttgtgcagacgaggttttgctatgttgtccaggctggtctcagactactggccagaagcgatcttacctcctcagcctcccaaagcactggaattacagagtaacatctaattttaatattcacattcctattttaatattcatattcgatgatggcacttagcaacatcctcctatatccatattaaaacctgttttccaagattgtgtctaatatgaaggtgtaaaattgctttgttttcactccttcttgaatgaataaatttgatagtaaccaannanaaaa

SEQ ID NO: 611882 - DNA, 520 bp, Homo sapiens
agtgtatcatgattacttgtgtttcctctcttatttcagtaagcagactacaaggtaagacgacgacccagagacagctacaatgttcccaattaactgcgcacaaagtctttatgcaggcagatgatatctcacataatatgatatccatggatccgaaagggagggagtaaaacaaagaccagctacaggggagggcggaaggagaagggcatgtcaatgtacaaagaattcgggtgtcttccagggcaagacacaaaggtttccgtgaggtgatgaggtgagtggggccatgagcaccctcctgagagaggacaggctccactgtcgggcttgtaggtctttgcaaagtaaaaacaggactgaagccagcacgtctgtttggttagtcggtgtccccccaccccccacagctgctccaaagtctttccatccagtcccacgaatatacagagcactactgatcagtatcccatatttgagaacggacgaattacgagaaacacacaaagaaaacggg

SEQ ID NO: 611883 - DNA, 1381 bp, Homo sapiens
gggtgtaccgtctcagccccatttctgatcaacagggtgaatggcagaacaggccctggcccttggtcccagccagctctctgtgtggcgcccttagagacctctgtgcgcctcagtttccgtactctgctctttggctaaattcgcagacccttgtcacgaagatggctcgaacgccccttagagcctcgtcctccactctgcaactcccaataacagaacaatttgataggatgcttactcgtagactggagtggtggtggttaagtcaagtttactagggaatttgagcaagaatcattgctccgacgctacaaggaagcatagggataatacaccagacacaatagcgagcgagtcgagcactccaaggagtctaccccgcgaagagaaagggtcaccgaaccatattaacccgcttgcgcacccatgggtgtcccctgaggtcagaggcggttcgccacgcctaaatttgccgccggctccggttgttttggccctactcggccgcggggcttggacgggattgtcaacacgcccattcgccaccgtctgaaacaggggagcatcggccatgggagcacgctctctgttatcgacaaggaggactcccctcgaatcactggtgggagagcgtgaggaatccccatctgagggcgactaaatagttcctgctctacagtaaaaactttgtccaatgtccctgtttaggggcgatggatttctaaaagttcctaggtccatttcgttcttctcatgtcgaggtcaagggagcgccatacctcagggggacactcgtggagctatgtcgcttacccaaccattattgtggggggcctatccagtggggacaatgtaacaccttggtgagacccatggatgtgtgtataatgcccgcagggagttcccttggaggtgtgtgctattaccaccatttggggggaggtccatttactttcccacatggaccgtttaccttatgggcgcgtgacaattttacacgtgtattgacgcctttgtggggatcccaactacctttaaacaatgtgctcagaatcgccccacaggggctcgtattatggggcaggcaaaccgctgtcgagtacacatgggaagatttggtgaacatgaaattgccccctggagcatctacctctaaagagacatcaatttgggtcaaaccccaaaacttaatcgttttcaaaaacagcaaaggccccaagacacagcttcagtgtcaaacctatgcattcagcacgacaatcccaccaacagagaatgtcataaacacccctggaaacgcccggcaaacaggagacggtggcaagcgccctttgcacacagaacaaccaccacattatcccacctcaagctagtcaac

SEQ ID NO: 611884 - DNA, 740 bp, Homo sapiens
gattccattgatggctcgatgtaacacgataaatctcgataccataggtgcagcacacaccacctgtccgacaacaggccttcaggataacgggataatgcctcatatattcacctcagaataggtgttctctctcttcgcatggacttggtcatgcatccttgtgactccgatcgtcctaggtgcttagcccgcgtacctcctccaattgaggagggcatcgtggtcgccgaataggtcatcaccccggctaaatcccgtataatgtcccactcctaaacatgtccgtatcagtcgtcagtcatggacgtaatcagatcacgcgtgagtctcacgcatcagtcataacttggaaagcaaaccggagaacccaagagtaattcagagcagctgcttattacgatgttttactgggatctctagttttaccgcgtcgcgttacaaggcctcagagtacttgcgagtctaccttcaccatttccgacgggatctacggctcaacatggtatggtagccactaggctttccagcggacttcacgtcgattagttggctcacacctttcctcagctatctgcttcatccgccaacgtaatagtttcaggtttacatccaagacagtcactttggcttcgaagccgccgctgaatactggcatttctgtagatgtggttttgactatttctgtatgtctccatctattgcatgagggtcttaacaaaaacacatgtagaacaaat

SEQ ID NO: 611885 - DNA, 370 bp, Homo sapiens
tgccgtctgtgatacaaacgctctgtgactggttaaaaccctgacgaggatatgcgaggacgtgcccgttgaggaataattggtgtaacaggccctggcatttggagcttagactagtctggatgtacggagaactgagcctagactggaaaggaaccagaccaggccctcggtcttggcagggagggccctttggacaggaggagctccagggtgtcagaatttgattggagttgagttcgagaagtaagagggatgtaggggcagggagttcctaggcctcactgaggaatagagaatggggaagaatgctgagaccgcattctgggaaacgtccactgcctgcagtctgggactcaggatcctagat

SEQ ID NO: 611886 - DNA, 159 bp, Homo sapiens
ctccgttatataccttccccctctaacccttaactagtggtctagaccctccgctatataccttccccctctaacccttaactagtggtctagaccctccgctatataccttccccctctaacccttaactagtggtctagaccctccgcgtcgacgcg

SEQ ID NO: 611887 - DNA, 447 bp, Homo sapiens
  misc_feature (8)..(8): n is a, c, g, or t
  misc_feature (34)..(34): n is a, c, g, or t
  misc_feature (442)..(442): n is a, c, g, or t
  misc_feature (444)..(444): n is a, c, g, or t
  misc_feature (446)..(446): n is a, c, g, or t
ctgaacangggaaaacaaaggcctgcctattttnaatccacctagtagtaaatgtcaaaacttcctgaactggaacaaaatgtgccttatccttttcctcacccaaaatgcccaatgaaataacagtatacggattaaaatttaaaaagcagccccaggcgccgcggctcacggctgtaatccccagcactttgggaggctgaggcgggcagattgcctgagcctcaggagtttgaaacccagcttgggcaacacagtgaaaccctgtctctactaaaatatcaaaaacattagccgggcatggcagcatgtgcctgtagtcccagctactcgggaggctgaggcaggagaattgcttgaacctgggagacggaggctgtagtgagccgagaattggctactgcactccagcctaggctacggagcgagactccatcaccanantna

SEQ ID NO: 611888 - DNA, 121 bp, Homo sapiens
ccggctcatttagttcaactaaatactaccgtatggcccaccataattacccccatactctttacactactccccatatctaacaacgtaaaaataaaatgacagtttgaactgaaatgag

SEQ ID NO: 611889 - DNA, 421 bp, Homo sapiens
ttcatagcaggtgggcacagagaactattcaaattttccatttattcttgtgataggttttttcaggcactgtatttttaaaaaaagtttatccattttatttaatgattagacttgtggcctaatgttgttcataatattcttttttatgtctataggatctatagttatgtcccctctttcattccttgtaataataaggtttttttttcctctcatcagtctcgtgaagagtttatctagttaagttaatttaagaatctctccagaaccgctcttgactttgttatttttctctattacatctctgttttctacttcattgattacacattttattaatttgtttttcttctaccttcttcaagtgaaagtttagatcaatgattttaaatcttcttttctaatgcatttaaaggta

SEQ ID NO: 611890 - DNA, 101 bp, Homo sapiens
attttggtagtttgcgtagagataagtttggccatgttgcctaggctggtcatgaagtcttgggctcaagcagtcctcctgcctcagccttgggtctccat

SEQ ID NO: 611891 - DNA, 106 bp, Homo sapiens
accggctttgcccttttgggctttccaaaaggctttttgggcgccctcataggaggaccccccgcagggcccggccccgggttcccgggcgaacccccgggcacga

SEQ ID NO: 611892 - DNA, 153 bp, Homo sapiens
atggtagcaatatgcagagtattgccaaccagaggaagcttacctgaagcctttatatccagattctttgttgggacttcattacatgggtatgtttgttgaatcagtgccatgatgtccaatcatttcagctcttgttccagtattttggtc

SEQ ID NO: 611893 - DNA, 177 bp, Homo sapiens
  misc_feature (10)..(10): n is a, c, g, or t
actacatgcnctattacaagctttataactttatttctgatgtcgttcagtgtctaaaatgtttcacatgctctctgccttagaaagggttaagagttgataccacataatttacaccattctttttttggtaagcggaaacagggtcttcctctgtccccatgcgtggattgccag

SEQ ID NO: 611894 - DNA, 1359 bp, Homo sapiens
atggacgacattttcactcagtgccgggagggcaacgcggtggcggtgcgcttgtggctggacaacacagagaacgacctcaatcagggggatgatcatggcttctcccccttgcactgggcctgccgagaaggccgctctgctgtggttgaaatgctgatcatgagaggagcacgtatcaatgtgatgaatcgtggggatgatacccccctgcacctggcagccagtcatggacaccgtgacatcgtacagaagctgttgcaatacaaggctgacatcaatgcagtgaatgagcatgggaatgtgccccttcactatgcctgtttctggggtcaagaccaggtggcagaggacctggtggctaacggggctcttgtcagcatctgtaacaagtatggagagatgcctgttgacaaagccaaggcaccccttagagagcttctccgagaacgggcagagaagatgggccagaatctcaaccgtattccatacaaggacacattctggaaggggaccactcgtactcggccccgaaatgggaccctgaacaaacactccggtattgacttcaaacagctcaactttctggcaaagctcaacgagaatcattctggagagctatggaaaggccgctggcagagcaatgacattgttgtgaaggtgctgaaggttcgagactggagtacaaggaaaagcagggacttcaatgaagagtgtccccggctcaggattttctcacatccaaacgtgcttccagtgctaggagcttgccaggctccaccagctccccacccaacccttatcacacactggatgccatatggatctctctacaatgtactacatgaaggcaccaatttcgttgtggaccagagccaagctgtaaagtttgctttggacatggcaagaggcatggcttttctacacacactagagcctctcatacctcgacatgcactaaatagccgtagtgtaatgatcgatgaagacatgactgctcgaatcagcatggctgatgtcaagttttctttccagtgcccagggcgcatgtatgcacctgcctgggtagcccctgaagccctgcagaagaagcctgaagacactaacagacgctcagcagacatgtggagctttgcagtgcttctgtgggaactggtgacacgagaggtgccctttgctgacctctctaatatggagatcggaatgaaggtggcactggaaggccttcggcctacaattccaccaggtatttccccacacgtgtgtaagctcatgaagatttgtatgaatgaagatcctgcaaagcgatccaagtttgacatgattgtgcctatccttgagaagatgcaggacaagtag

SEQ ID NO: 611895 - DNA, 161 bp, Homo sapiens
actagcgcgtatggtttgtttctctgggctgggagaacttactttctagagcgtttgttgacttgtgtgcctggggagcggtccatgatgacactcacaggaagccactgttcactgacacttggaagcggtcattgttaatatcacatggccactcaata

SEQ ID NO: 611896 - DNA, 343 bp, Homo sapiens
  misc_feature (47)..(47): n is a, c, g, or t
ctgtcaagtcggtccaactcagccctcaccctgacagattcggagcncgaaaacaagtccgacagtgagaatgagcaacctgcaagcaatcaaggccagtttaccctgcagcccttgccgccttcccataagcagcactttgcacagcatcatccatccatcacttttttcaacagaaactccctgaccaataaaaggaaccagagtccggccccgccgggtgctttgcccgccgagttgcaaaccacacccgagtccgtccagctgcaggacaactgggtccttggcagtaatgtacccctggaaagcaggcatttcctattcaaaacaggaacaggtacaa

SEQ ID NO: 611897 - DNA, 173 bp, Homo sapiens
ggccttactgatgaaaaattggggtattatgggaagtcagtcattaagaagaattatccctatagtttataaggatatattttatacatgtttatcattttaccaccttgtgaaaggtcatttttaaaaaagaccaagatggccgggcgtggctcacacctgtaattccagca

SEQ ID NO: 611898 - DNA, 105 bp, Homo sapiens
tcggtacccatcttgtgtctgttaaattctttgtatcatggcagacagtggctcatgcctgttatcccaggacttttggaggctgaggtgagaggatcgagatga

SEQ ID NO: 611899 - DNA, 155 bp, Homo sapiens
  misc_feature (47)..(47): n is a, c, g, or t
  misc_feature (116)..(116): n is a, c, g, or t
aactttgctgccagtccaagaggtgatccatcggccttttaccattngagcctgccacctcatgcctttgggcctgttaagctgtctcagaaaggattgcttggtccaccagagcnaaagagagcccgaggccttgaggagaggatttggcgcct

SEQ ID NO: 611900 - DNA, 220 bp, Homo sapiens
  misc_feature (71)..(71): n is a, c, g, or t
  misc_feature (220)..(220): n is a, c, g, or t
ggtgaataacttgctgaattgtgaaactctaggctgcccatatcacactgacattttgagggattcagaancagatggcaacatgctgggccccctgcctgttgccagaatgggccagaaaaaaggtgacatgttttgagggggggcatgggggtggcagcagctttctctcgccccaagcattaagagtctttacagagtcagaactgtttattacggn

SEQ ID NO: 611901 - DNA, 923 bp, Homo sapiens
  misc_feature (265)..(265): n is a, c, g, or t
gcagtgtgcggggcgctgtcggatctccgcagagcgatgccatgcagacatccattcttcctcagatctggggtagcggatccacaaagttcctgacactacttccatatttgcgctacaggagattcacgctacaaaagggaggccagtccgttctggtcttctcgtagattgccttgactcaggcatggccagcgtttcgcgcgatggttggacaccgtagtgctaagtccagtagagcgatggacctcagcatagcatgctngtcgtggcagggatgccacagcccacgtcacaggggagaaccccaagtgatactcgttccctgactgtactcgtctgacctacctgcctgagccatgttcacctgcccagcttgtccccgtgctgcctgcccaaagaccccagccatttggcctgtcaacccacccattggcctgtctgctgggtgctaacaaagctctcatcactccttcacttggtctgtctgtctctgtcttggtagttgccggtggacagcatggccgtgccagactcccagactgaggccaggtctaagcccccatcataccagcccccaggaccagtaagcccacgggcagccagggtccagagctagcccaggctggggatctcgactcagacaagatggtgacaattgccttgagtctgaggcatcctctgactgctttcctgccttgacccaactgcctcactatggtgaggagccgttcacaagtagtgttacacttcaatggtgaatgaaaatctgtaaaaaagaatgttaaagactgaacatttagagggacaacatgaaacgtgcagaaaatcctcaggtataacaaactgtgtgcatggggacccaacgccctgagttctggccatccgaaaagcacgtttgggagaaggaaagccctgctccc

SEQ ID NO: 611902 - DNA, 314 bp, Homo sapiens
tctagacggatccccactgctcaaaagatatggtaacatctggtatatgttattcacacaaatctcatctcctgtagtagatacgagatgactagaacagcactagctagcagaagcatgcttactacagaactaacttttactggtcttcaacatgttcattaagccattattcttcaatgagtacattacagaaaggcattgagataatctcttgacaattttactcagttagtaactattctttaagaagaatgatcgaggacaattatgagtgatactgaaaaatctcatcttagttcaaccttgtagct

SEQ ID NO: 611903 - DNA, 243 bp, Homo sapiens
ctggttccgttgctttttttgtaaccatttgtcttttaaattgtttatttctctgtaaccatttgttttttgattcttgcatgtttttacttctgtagaattattgcatttgagctccgctccccttccgaaccaaggtataaaagtaaatcaagccccttcctcggggccgagagaattttggaaagtcaagccttctcttggctgccggcttaaataaaggactcttaattcgtaaaaaaa

SEQ ID NO: 611904 - DNA, 193 bp, Homo sapiens
cgttatattttgtattttatgtagagatggggttttacatgtcgcccaggctggtctcaaactcctggactcaagcgatcctcctgcctcagtctcccaaagtgctgggattacaggcgtgggccactgcgcctagcctagttgttttaatgtattagtttttctcttgggctaaaggtattgactagagtgg

SEQ ID NO: 611905 - DNA, 755 bp, Homo sapiens
atgggacctcacgggagtagggcgaaaataataaatggaagagaatgaatttatgcagcagagagatgctcatggccatgggtgaaggacgagtactatgggtatccacatggtgagaaagaatactggcatgcagctggtgatgatctgtatcgtccttgcggagactgcccgggtaaagaactctggtttggtggcagcatcgcatatgtcgactctgaagtgcgctggattgtgtgtgctggtatggggttaagacgtcactgtaatggtaaggtccattcttcttagaggattggaccaggacatggccaaacaaaatggggtgaccacaatggaagaacatgcatcaagttccatacacgacagttcgtaccacttaaaccgtgacccaacatggaagcagggacacccaggccgactcagagtcgtaagctcagtcccagcagatagtgacggcaactcctcggaccggcaaaccaacaacaccacacacaccaccaccaacacccaccccgcggtgcgccgccctccgcccccctcgccagaccaccctccaccacaaccccccctccgcccagcggccgcccggggcccccagcaccggtcacgctcaaccggtgccccaatcgacgcccccaggaacaccctgcggccaaagcaaacacgggcgcggcaccccccccacataaaaaaaccgccggggcgcaaccgcggctccgcaccacccccaaaggcgcacgagccccacggac

SEQ ID NO: 611906 - DNA, 226 bp, Homo sapiens
gatctcgaggattcctgcaaggcgtttagtatgaggtccagtgcacataggcggactgagcactcgatgtcatccgtgtcgatgtccatccgtgtgtcccagaactgcctgctgtagaacacacttcctcctctcctgactctgtgaagtactcagtggtcctttttggattctaggcttgcacctcatactaaatattgaccctttcactgaccgcctctgcaca

SEQ ID NO: 611907 - DNA, 142 bp, Homo sapiens
gatcgagccggcccgagttatacaccatcacgaccatcatcactcactgtacaccaaaaacaagggaaaataatttaacttgttttcattaatctttcttaaacgtatatatagctcacacttacttcaatggtggtatcag

SEQ ID NO: 611908 - DNA, 1080 bp, Homo sapiens
cgagcttgtgtactggctcagccctgtctccccgaagcctgctgcgccctgctgccctgctgcccctcagtctgtgtgtgatgccctgcagccccccttgttgtgcctgctgtgcatgcttcccctgccctgctctgtgccctgctgccctgccatggtcctgtcctgctgcctgttgcccctgtaacctgctcctgtgctgcctgtgtgtgtgccacccttctgtgggtggtctgctgtgcctgcctcatcctgctgtgccccttctgattgtgattgctgctgcctgatcctgcatctgctgcttcctttgtgcctttgccatgcacccctgatggtgccctgcatgccttcctgctgtgattccttggtgccctgcttctggccaccttcccaattggaatgtgtgctctgagtgtctttctgtgtgtgcacttggggtcccaatcggtgtccactcctcaccttggtgctcacccatcggcggggtcttggcctgttgaggctgagcacctgtgctcagcaaaacaaatgcttgacttgtgctttgagatgctgggcagtcctctgatgttaggcatgtgatgaactgctgcatgaccccttacttccttgaactccacttgcaatatccttgaatgctggacccttgccctgcccaaggcctactgttgaacccaatggctgagaaccctgggaggaccggaccatgttggcctgcaggaatggctgatcaattgcagcttagattcccatcaggcagacttgcttgacacaaccccttggtgccccccttgttcccgtgaaactccccagtttgggaacaaattccactttcacacaacatgatgacttgcagactctgctacaaggtggggctcctgcccgcaatcaatgtggacagcggctttcgccgtggctggcattgctgtttccacccaaatacttccccttttaaggttgcagcgtgctcatgctcctaggaactcgttcaagaagcagaattctacatgtggcctcaatcccctaagaccagagggggtcgacaagtgcatcccggcaggtaaataccaaccgaag

SEQ ID NO: 611909 - DNA, 406 bp, Homo sapiens
cgtgaaacatctctgacagagatgtcttctcactctccagactgggtaggtatgatagctgcagtcagctcatactaggcggcggcggttatgtggtgtgagtgcggaaacggggcttcgaggtggtattattattaccgagcccattgacgagtactgtgtgctgtctcctcaaggaatttgatgggaagagcctggtctcatttaccaaggagggtctggtacgctgcctgaggattaggaggagaagaagaagatggaacagacgcaggcctcgtttgagtacctctgctagctcctgaaagacctcttagattcgaaggttgagaaggtgacaatctccaatagacttgtgtcttcaccttgctgctttgtgaccagcaccttcggctggacagcctatatg

SEQ ID NO: 611910 - DNA, 110 bp, Homo sapiens
gcagggcgggccgcgttggtctacgccgagtgacagagacgctcaggctgtgtttctcaggatggaccgcagtggggagacagcacgcaccagcggtggcagggagaccc

SEQ ID NO: 611911 - DNA, 214 bp, Homo sapiens
cgccgctgtcacgagcagggcatcagaactcaccatgatgaagaagtaccaggtctgaggcacgccgaactgccctgggaagacggctccatgtaccaggtcagcgagggcatagagcacagagtccagcagcagcaccctcagccccctggccacgtgatgccttgcaccacctcaggactctgttgaaagtaccgagcagcagggaaagaca

SEQ ID NO: 611912 - DNA, 763 bp, Homo sapiens
taggcccgttcaacgtcctgttacttaggcccctttgctttccggggatccatggttcccatttttcccgctcctttggatccttttccctctccagtgcattaatagccattctcgatggtggttctatgtgttctagccgctctttagtgttttcacgtgttccatcgcttgtccactaagtccatctccgtgtctagcatgtggtttcttggcaatatagctctccgtctgccacagttgcagttcagtgttgaatgtctctgctattgtgacgtttcggccaaggtttctgctcatgagtgtatatctgtgcctacatagtcccagttgcggtgtctcagttccagtccatgttcttagcatagctgttatatgagctatggcgtatgcctgtttacgcctcctgagtttttatacggctcgtgtccgtgagcacatcctaataccttgtctagagtgtctcgttcttcgctcatgctaatccctgcagcagtgtatctttttcttgagctaatgacgttttctggtattgcccgtgagtgtagttccttgatatctcattgccacagttctgcgtcccattccgttacccccgtaccctatgatttacgctatggctcacagtcccgtttagccactgctcacattacgagcttgctttgttctcggcttctctgtctcccttcctgcgcgcaagccctaaaacggaggcgcgcagtcacaatgtgtcatggtctccctcgtgccggattcctgcagc

SEQ ID NO: 611913 - DNA, 339 bp, Homo sapiens
cacagggtgggtccattctgcggctcacgttcgtgttctcatctctagactcacaacttcgtcctcctatggcgctccaccccgaacgcatagattagatagtagtgtacatctttctggcttaccaaacacgtttctagctttgccagtataaccccagccaatttacgatctctggccttcccagctagggacagtgttcacctcacaatgttaggaaccatgaggagatgatggcttaggctgatccctttttcatgaggtccggatggtgagaattacagtgatatataacagtgcttgcactcactagatgattgctgagccgggattgggctc

SEQ ID NO: 611914 - DNA, 1437 bp, Homo sapiens
  misc_feature (916)..(916): n is a, c, g, or t
caatcatttctagggggaaaattattgatggtgtcaggtttgtcataatgcatgagtacacgaaactgaagcagggacgagaagacttccgagtgccacataatgatctgacatatcaaacatgcaccccacgatttcgcatgctatttccagatgatgtcgcctgaattggtgtatcctgtagatgcgcgaatggccctcctcagatggggtcaggtggttcataatactaggattgatgcccctttggggttatatccaccagttgacccatcccatcaaggcttcattcttccagatcctatggattattctgctccaactcctatggtatctatccttgacaatggaggcaatgtcatattcatagacggttactgcgccaatgaggataactcatcatagaggcagcacggtttaaactaggtacgccaatgggaccgactttctaaaagaaacggtaggtcgcaaacctgtcttggagaacgtccgcgtaacgacattatggtgtctacctcaccggcattagccttgtagcctaaagacctagagtggttagacactttggttgggaggactaaatgtttttatacctttaaaggggcctgttgtcctccatggatgcacgctacaacggatggccctttttacttcatggctcaaacatgcttgtaggcgcgccaggcaatcctagaaataattgagaaactcagtgcactgtctcctagttaacttgaggcctgttaattttctctagagagtgcctctattctactttccatagagtaggggtacctacaattaaacttggggtcttgggaagagctaccctgcggttggggccattccatcggtggcccccaaggcttgaaatttcccaccagagggcaagcttttataagaaggaaggcggcgnaaaaatagacgctggggtaagcgccacttctggacttttgggaggacccccccgaggggtaaagcttaggcggagagaaaccacacgcacctcttggtaggtccaaaaccaattcagtcgggacatttcggaagggaacgataccccttggttttcaatttcctgatacggagcagccacttaaattggattcaaccacaacagcatctttacagatcccaaggcgccacattggtcgcgtgttcaaccagttggctcttagtaaattgcgccccgattcctttaacacttccaagggaggggccttcaaagcggccaccgggcaaggggattcggccttcggaagcccccaagtgacagagttgagaacacggtggggccagtttagagagccacacagcattctcaacggcccatattgtgaccttcgccaagactctgtggggcgcaatcaaggggaaggttgtaacacccctttggttctcggaggaacgaaagacaacgttagacagacgacgcaa

SEQ ID NO: 611915 - DNA, 140 bp, Homo sapiens
ccgccgctgccccagctgaggagaagaaagtagaagcaaagaaggaagaatctgaagaatccgaggatgacatgggctttggtctttttgactaaactgcttttgttaacatgtccaataaagagctgaacctgtgagta

SEQ ID NO: 611916 - DNA, 956 bp, Homo sapiens
gctcttttccggtggcgcctcggaggcggttcagctgcttcaagatgaaggctgaacatctccttcccagtcactggctgccagaatactcattgaagtggacgatgaaagcgcgaaacttcgtacttctctatgagaagcgtatggccacagatggttgctgctgactgctctgggtgaccgaatggaagggttatgtggtccgaatcagtgtgtgggaacgattaaacaatggtttccccatgtaacgcagggtgtcttgacccagtggctcgtgtccgtctgctaactgtacgtaaggggtcattcctgttgagcagaccaatgggagaactgtgagaagagaaacgagaaaatcagttcgtggttgcattgtggatgcaaatctgagcgtgctcaactgtggttatcgtaaacaaaaggagagaaggatattcctggactgactgatactagcagtgcctcgccgtcctggaggccctaaaagagctagcagaatccgcaaagcttttcaaatctctctaaagaacgatgatgtccgccagtatgttggtaacgaaagcccttagatcacagaaggtaagaaagctaggaccaaagctacccaagattcagcgtcttgttactccacgtgtcctgcagtcgcatacggcgggtattgctctgaagaagcagcgtaccaagacaaatacaggaagaggtctgcagaattatgctaaaacttttggccaaagagaatgaaggaggctaaggagaagccgccaggaacaacattggcgaagagacgccgaattttcctctctgcgaagcttctacttctaagttctgaatccagtcaggaactacgcatttgtggagtaacccacatcaattacacccgagtctggccaacaaaaaaacaaaacagagcaagaacaacattagggcgccctccactccacaagaagtttagacct

SEQ ID NO: 611917 - DNA, 105 bp, Homo sapiens
gatttgctggtgcagtacaactaggcttaatagggacatgatgaaatttccagatgttcactgagtgagccattggaaagtgatgaggcagacttggctaaaaaa

SEQ ID NO: 611918 - DNA, 744 bp, Homo sapiens
gacacgcgggttcaacatgcgtatcgaaaagtgtattctgttcgggggccatctatccgtggacacggcatgatgttcgtccggcaacgatggcaatggtgtgcagactatgcaaactctaaagtgtcatacatgaactttaaaagagaagcgcaatcctcgctaaagtgaggtggaccaaagcagttccggaaagcagctggtaaagagcttacagtggataagtgcagttcgaatttgatgaacgtagaattgaacctatcaagtaccagcgagagctatggaataaaagtattgatgcgatgaagagagttgaaggaaatctaaacgatgaagcgcgcaaatgctaatagtttataatcgaactagattgaagtaaatagataaacgagctgacagagaagtgtcagtgatatcatatgaagttaatgttaatagacatcccatcgttatggcgaggcacctcgttgtgaggcgaaagggaaacagttggaagagaaaatgggacagggagttacacagaggatgtggacagtggaagatgcgtccgttaacaaatctgctgtagaccgagtttgcttttactgtacagtttgaaagatgccgctttggatacttggggaactgtgtaaaattaattttatggtttgcataaggtcacttaaatgaaaagcgattatagacatctttctggattgacatctacataatatcagatatttacggatgttaggaattgggtta

SEQ ID NO: 611919 - DNA, 188 bp, Homo sapiens
cccccccccccctttttccccttttcagggggtttgggggggggttttaacccccctttccaaaacccggccccccctttatttgggggtttttttttttggggggccccccccccccgccccccctttgggtttttggggggggggggccccctttccccttggttttttttttattttttttttta

SEQ ID NO: 611920 - DNA, 638 bp, Homo sapiens
gagcaggaagtcgattatacacttccccacattgaaattgggaagaagaattatggagagcagttcaaggcataaggggctctggggaacaacataattttgctttaattctccagcttgttttcagtaagggtggaaggagaaagagaggaagtatagaatttacacacttcagctcgtactgccaagaaaagacagaaagcttgttgtaacaacccgtagacactgtgggagaactaaggagacccctggtgtagcaacagttttcctaaggaagacggattgtgaggcaggaaggtgtgaaaagaggaagtcgattatataattttggagtttctgctgaggaaacctgagtgaactcacttcagatgcatttggaatattttcataaaaaatatttgcttttggctgctccaggaactactggaagcaggaaacagtggtataattggaatacaccacactgacccattactcctcttggttactaggaggcatcagagatacatgttttgttgattttagttataaaaatgagataatcttgaatgtgaataaatttgcttccttgttcaaggagctacctcgtggataaaatagctatttaatgttaacttctttagagaataacacgattc

SEQ ID NO: 611921 - DNA, 462 bp, Homo sapiens
aatctttatgctaagggtggcatatgtgactgcttactatatctattggaataacaccattctagactcttttctgtcttaatagccccctatccaacatggtcataagtatcacagatgattccctatgtagtatagacaagggagaatactgtttaagtgcacaggtctagagtttgaatcctggctccaccatttgttgctacatatgaacttgggtagattatttaacccctttgagcttcactttcctcatctgtcagctggatacaatagcagttcttatattgagattctgtgcatgctttaagatgagataatgtgtaaagtacttactatggagatgaaaacatgtggaaagacccagtgtcaaaagaaagagcatgatctgtcactgtggtagtgcaggccctcatcattactagccaagactactgcgatgctttctccatcttcggttct

SEQ ID NO: 611922 - DNA, 428 bp, Homo sapiens
aggagtcggtagatagcagggagcgagaatagtcgggtcagggcatgagtgtggtttgagccaaaattggttctgtcctatttgcatcagtagtgcatatttggcaattcttaattcatgaagcagttcgggtgatgaaatggggataaaatagtgtcaaaccttatcccgttggtttgggtgaaacttgaaaatgaatagtatcggtggcaggtacttgttgagcaagggggagctgctgtttccctgtccctttattgatgggaaatatctagacaagttcccaaaccctctggcactggaggctggatggcacggagggttctttgtaacaccagctggggctggccttcttttaggagcttcagtgggtcctgaaaactttaatttgttggtttgtttcaggtagatgtggggtctttctgtgt

SEQ ID NO: 611923 - DNA, 191 bp, Homo sapiens
tccgtttagtgcaagtctataaatctcaatgtatgggaagcagcgtgcagtcttcactctgtggtcaaaggtcaaaagtcccaaagctgaagaacttggagtctattgtttgagggcagtaaagcaccgcagcacaggataaaagatgtaggctggaatactaagaccagtctagatttttccatgattcc

SEQ ID NO: 611924 - DNA, 955 bp, Homo sapiens
  misc_feature (1)..(1): n is a, c, g, or t
ntttcagatacacttgactctagtgactgggacagatagccactgtgtacctgcttcaaatcatcctgatcgttttctctttggaaggataagcgctgtagaaccatctcgctaccttcagcagaaatggtatcaaattaagacattaacaatgtcgcaccgtgtcagtatctatgcaaggttcagcagaggatgttttcatgatggtgtgccttactagccattaatcagaaaagatcgaagctggcgcttttcatctcaccctgctccttatattaaagcatctcctccaaattaatgtcttttgaaacttgcattgcttttgatcttaattgaatgcttactatttgtgaaccactgtaattatatgggaagaagatgtgggaaacacagtatgtgagccttgtttaaataaatttggagttggttttagggtacattgttgctcctttcgatgcaacctttgcgtttccccaataccactcaattctcgtgtgagtgtcgtatcagtctcatcctcaacacttccttatatcctcacactctactgccactattaccagttagcgagacttacgtagaactcgccatatattacgtgatatgcgccctctccgtccacccgtcgtgccctgtgccgtctctccccttttcctccggtgccattcaatctctcttcctcccttcacttctctctgtcccgtccccttcgttcgtactgagtgcttcttctcgacgtcccccggcattccctgttgactaccaacgcaccgtgcttcaaccgtgtgctctgcctctatacgctacgccgcacgcgcgccgatcgcgcggcggtggatgcgcgttgccaacacatgtcacccgctcgcgcctcgtgttactgtcgtcgtctcgccacgtgcactgctctcgcattctcttctgcgcgctcgtctccaccgccctcgcctctcct

SEQ ID NO: 611925 - DNA, 118 bp, Homo sapiens
tggaccatcgcgacgcttcatcaagtgtctcacccttctcccatgtgcacacacattcctttatgagggttaattggtctggtttgagagtctgtgctgttgatggaagcgtcgcgct

SEQ ID NO: 611926 - DNA, 202 bp, Homo sapiens
  misc_feature (22)..(22): n is a, c, g, or t
  misc_feature (40)..(40): n is a, c, g, or t
  misc_feature (83)..(83): n is a, c, g, or t
  misc_feature (97)..(97): n is a, c, g, or t
gacggtcgggagcgctcgaagnatctcggaccacccaaantgaaagtgcttaggaagttgaaaggcccagaggaggctccggnaaatggccggagcntggaccgaccatgctgctacgagaagagaatggctgttgcagtcggcgtcagagcagctccagtgctggggattcggacggagaacgctaggactcggcggctga

SEQ ID NO: 611927 - DNA, 186 bp, Homo sapiens
ttccccaaaaaaaggggagccccctgtcctgggcctgcaaaatttgggttttgcctgccagctgcactgatgttgcccctcatttttttgcccaacccttccctccccttggcaccagacccccaggacttttttaaactttgttgcaagtgcaataaatttgacccagtgccccccctggcccga

SEQ ID NO: 611928 - DNA, 304 bp, Homo sapiens
ggtaacatgacagactcttgtttagagtctcttgaaaacaaacaaaatgtaatcacagcactttgggaggccgaggcaggtgaaacgctgagcccagagtttgagaccagcctgggcaacatggcgagaccctgtctccacaagaaatacaaaaattaggcaggtgttatggtgcatgcctgtagtcccagctacttgagaggctgaagtgggaggattgcttgagcatgggaggtagaggctgcagtgagccacgatcgcaccactgcactccagcctcatcaacagagagaaacctcctctt

SEQ ID NO: 611929 - DNA, 240 bp, Homo sapiens
gggaatgggattacgggtcgccactattactggttgactaattcttatacttttataccaaatggggactaacgatatgggccagactagccttgatgtcctgacctaaagtgatctgtgcgtctgggctgcccaaagtgctggggccacatgcgggagcctacgcacgcgctgagaatgaagctgttcattaggagatagattagagtcaaacggtaggaatgctttctatgaatgtga

SEQ ID NO: 611930 - DNA, 938 bp, Homo sapiens
cgggcttgcatcctcattactattgtgcctagcaaactcaaactacgaagcgcactcacgagtcgcgatcagtaatcctctctcaaggacttcaaactctagctcccaactaatagcgtatgtgatgacttctagcaagcctcgtctgaacctcgaccgttaccccccactattaacctactgggagaaactcgtctgtgctagtaagcacgttctcctgatcaaatatcactctcctacttacaggactcatcatagctagtctacggccctatactccctctacatatttaccagagactacaatgggtggtcaactcacccaccagtagttaatcaacagtaaaaccctgcattcgacgcgagaaatacaaccctcactggtgtcagacaccgatcccgccatactccctcctaatcccctcaatccccggacatcaattaccgggattatgctctcaaagaaagaagaagaacaggaaggaaaaacacaatgtgtggcggaccgggtgtgtcaccgtggaaaaaggatttacaaaggatatcaggggggggcgcgggcccccaagagtcaacacaggggagcttgggaaaggcaggtgctcccggcaaaaaagccgggataaaaagggggaggtgatccccgacacaaaaagaaatcgccccgggcttgcccaggcgtgtgcccaacaccccggaggcggtgagcacagccaaacggggctccaacagggggccaccagggggcgaacaacatgcccgcgggggacgcaatttacggacctgcattggactggaggtaccggaatgatgtggacatagtatagacttgtgaacacaagatagcagtgtggaacatagtgtgcagcacagaaacagggcaccgccggcacaacacacgattatgcagcaagagcaagcaggaacagagacacgaa

SEQ ID NO: 611931 - DNA, 244 bp, Homo sapiens
ctgaatccatagatgtctgaatttaactcagaaatctcctccaaggccgggcacagtggctcatgcctgtaatcccagcactttgggaggatcacttgaggtcatgagtctgagaccagcctggccatcatggcaaaaccctatctctactaaaaatacaaaagttagctgggtgtggtggcgtgcacctgcattctcagcgacttgggatgctgaggcagaagaatcgcttaaacctgggagg

SEQ ID NO: 611932 - DNA, 350 bp, Homo sapiens
caccgacgaggaaaaacgccgcttatcgaagccatagtaccgttccctctactccctgtcaaaaaaagacgcccggtgcttaatgtgaaatagccgccgcccatgaactgaggctaatatcagaaaggtggcttatggttttttgctcctcatcttttatggtgaataccataacactgtgatttgtttgtttttgtttctgcttttttgagactgagacttgctctgtcgcccaggctggagtgcagcgccgccatctcggctcactgcaacctctgcctcccgggttcaagcagttctcctgcctcagcctcccgagtagctgggattacaggcgtgcgccaccatac

SEQ ID NO: 611933 - DNA, 302 bp, Homo sapiens
gcatggtggcgggcgcctgtggttccagctaactgggcggctgaggcaggagaatggcgtgggcctgggaggtggagcttgcagtgagccgagatatcgccactgcactccagcctgggtgacagagcgagactccatctcaaaaaaaaaaaaaaaaaaagaattattttgacgcggaagaatagagaggaggccttgaaggaacccagcaagtgagaaaggcccaggaaaagaaagagctgaaaatgtggagaaagccccaagagtttagaaccagtgtggattaccgggagaaaagaaac

SEQ ID NO: 611934 - DNA, 276 bp, Homo sapiens
  misc_feature (276)..(276): n is a, c, g, or t
gcaccaggcgcgcctcaacattgtggcggagtggcaacaacgccgctacaggcgagcggaaggagaaagtctagctagtttcggcttcagtgagcctctagatcgtagcgcggccagacctttcgcaggactggttgcacactctagaaagaatattagaagtccgcttggctctacgaacccatcatcgtaacaggtcttgaatgcattctcgtacttcttccactaggccttttttaattttttttcccctaaatgtaaacctgcgaacctatn

SEQ ID NO: 611935 - DNA, 403 bp, Homo sapiens
  misc_feature (172)..(172): n is a, c, g, or t
  misc_feature (219)..(219): n is a, c, g, or t
tattaaataaatatagtagtatataaaaaagctaatttattatgattaagtatgttttattactgagatataagtttggtttagtataatataaattaatatatgtgatttactatataaagaaaattaaaagcaaaagctatatgatcgtctcaatagatgcagataaagntgttgataaaatcaaacattctttcataataaatatcctcaattgantaggcattgaaggaatgtaccttaaaataataagagccatttatgagaaacccacagcaaacatcatgttgaacagacaagagctggaaccattccccttgagaacaggaacaaggcaaggacgcccactctcaccactcttattcaacatagtactggaagtcctaaccagacgaatcaggca

SEQ ID NO: 611936 - DNA, 988 bp, Homo sapiens
  misc_feature (510)..(510): n is a, c, g, or t
tccagtcctttggttttttggaaaaggggtcggtattgtttggcaaaaaaaacccgggaaaaaggcccggggggaaaccccggccttagtggtcccccgcttcactctctcaactgtagggcctcctgttgtgattgagcacagtggggcacacaccccatctccccaacctgttttccaggggtctcccgtggcgccatggggtgtggggttgtggagagtgtggagacacatgtgggcggttgggccgagcccttcgcttcttcattctccgtgatgtgtgtgagaccatctggactttcccgaggggtgttttttctcaagtattttgttgcgttgatctccggagtctcccactctcgggtcccccgcctccgccggggcccccgcgggcgtgcagaagaagccaggggaaaatcgtgcggcgcgcggcataacagagtgtgggctgtgagtatcccagtgggcggaactttcttagcgaaccaagcggtgttcggcggcgcaccnagtgccaaaaaaaccagagcggttgccgacactgtgtgacagtttgttcgtggtgcgcggcggggcgactcttctccccaacccgagaaagttccggggaacaaggaaagaattcccacgtttgtataggggcttatccccgagtggcccatagtggtctcccgtgcccaacgacgagccgccaattttccacggttgggggaaaaacactctcaagcgggccagtggtgtccccccgggatattacagaggtgctcctcccgtggctgttaacacgaggacggggtcttattgggaggccctctccccaaggccccggggggcctttgtttgccttcccaggaaaggcccattttgaggaaccccccccggcttttttgcctggccccccctcttttgtaagggggttgcgccctgcgcttggctcctttggggacgccctcgggtgcacgttgttttgcgccccaggtcttggaaa

SEQ ID NO: 611937 - DNA, 293 bp, Homo sapiens
gccatcggcccatctggagggtcttgggaaggaacagccccgtgaaagccactgtgtccactggagggatgtcatgaagacttcgttcattacacaaggcccctgggaggaacttgctgtctggtcttggtaccaagaatagctgaacttctgatcaacgggactgcttttgtctctagcagacattaatcgtgtaatagcgcatttcctctgtctgcactggctgctagaagcctttgaaccaaatctggacaaaaggcattaagggatacatttccagcctttctgaatcc

SEQ ID NO: 611938 - DNA, 132 bp, Homo sapiens
agacggcattcttgcgtgctgtctgaaggagctcatcaatttcctcttgaatttctggggctacataaggtacttggtagagcagagagaggcttgggttcctcctttcttcaatcacgtggagatgtgtca

SEQ ID NO: 611939 - DNA, 346 bp, Homo sapiens
cgctctcttacttctgatgtctgagtatccccgtcacgcccaccatggatctctgtgtcgttgacttggagtaagcctggtctcttgacctctgcaacagtgctctttcactgtgagatgccggtctatggaagctcaccttctgatctctgctaagtcactctctggctgcaattaacctattgagactgcggaaatcatccatactggtttcaaaacatttttttctttgatttcaagatatgtctgctgctatattacagatctaccaaagaaaatactgcgcggtgctgtattcccttcagatccttgacctacaacatttcagtatgagagaggccaattt

SEQ ID NO: 611940 - DNA, 349 bp, Homo sapiens
agtaaaaggacgagagtggacacatgaactcgctgatcgctcagctaccgaaatgtcatggcagaggctccgtcttggcttcactgtctcccctcagaaaagccagtctgagatcctcctcaagtcttggaccaaaggaaagacagacaggtgctgcggacgacatccctcagcctgcagtcaggcaccaggaccccgagcctctcctcgtggtgaagccgacacacagcagccgtgagggtggctgccgagaagttccccaggctgcctccaaaacccacggcctgctccaggccgtcagaccccaggcacaagacaaacgtcctgcggtagccgcgtagtcagatcg

SEQ ID NO: 611941 - DNA, 190 bp, Homo sapiens
aggcaaaccccagccctgtagtctgatctgcgcacttgggaatgcccatcccccactgtgcgggcactccagcctcacttgcgcacatctgtcttcaaaatgtggaggaatgggtttctcagcacctgtatacgcccacggctttcttatatccctgtctcctgcccttttgcatcctatatgcaacaat

SEQ ID NO: 611942 - DNA, 122 bp, Homo sapiens
cgcttcgcttctgccgcttcctgcttctgcctacgatagcccttatgaaacttaagggtcgaaggtggatttagcagtaaactgagagtagagtgcttagttgaacagcggtcttggtgagg

SEQ ID NO: 611943 - DNA, 267 bp, Homo sapiens
caaccgtgttctccagcaacatccctctcctttattttgaggttattaaagggcactgcttgggcctgtagaaccaggccagaacctccttctgtatggcagctaacagttagggctccagtatcccaggaggcccttatccacatccatcagctcataggagagtcttgcatattgagacacacacctgggcactacagtcctgtgctctctctttttccccacaagcaggacctgatacaggagtactcagccaaggtacaaaat

SEQ ID NO: 611944 - DNA, 478 bp, Homo sapiens
aatcgtgtgatgacacataagcctcatagatagttatgaagagaaggctcttttggccgagcatggtggctcatgcttgtaatcccagcattatgggaggccgaggcaggtatatcacttgaggccaggagttcgagaccagcttggccaaaatggagaaacccagtctctactaaaaatacaaaaaaaaattagctgggtgtggtggtggacacctgtaatctgagctactcaggaagctgaggcaggagaattacgtgaacctgggaggcagaggttgcagtgagctgagatggcgccactgcactccagccggggtgacaaagtgagatgccgtcttaagaaaaaaaaaagaattctcggtcttggtctcttttagggggcgggggctgtaaaggcactagaaccataaatactatgtctgtgcagccctgtcaccgtatttaggcacttgagtggaagagcactgaaactaggt

SEQ ID NO: 611945 - DNA, 188 bp, Homo sapiens
agttatcaaattatcctccaaaaattttgggcctttatctgtggggaaccaagtgacgctgctcttcagcatagacactacctttatcccatcatttagtacaaactaggtttggttcacttcttgggtgtcttattactgttcttcatctgagaatttgttgagcttaatgttcgagctatagtaag

SEQ ID NO: 611946 - DNA, 429 bp, Homo sapiens
ctggcccgcctgtgtagcatgctatcaccaagcactcgcccaagaatgcctgtcattgtcttagtcgccggtctcggtatgaaagaccggcgtcactgccattgacatcctcaccacctgtgcagcagagcatccaagcggcagaggttctggcacatgcaccgagtaaggatctgattgccgtacctggatgaagctaagtgacagcacgctcaaggaaacgctgctaaatggggtgggctacctgcatgaggggctcagccccatggagcgacgcctggtggagcagctcttcagctcaggggctatccaggtggtggtggcttctcggagtctctgctggggcatgaacgtggctgcccacctggtaatcatcatggatacccagtactacaatggcaagatccacgcctatgtggattaccccat

SEQ ID NO: 611947 - DNA, 289 bp, Homo sapiens
  misc_feature (32)..(32): n is a, c, g, or t
  misc_feature (87)..(87): n is a, c, g, or t
  misc_feature (89)..(89): n is a, c, g, or t
  misc_feature (113)..(113): n is a, c, g, or t
  misc_feature (157)..(157): n is a, c, g, or t
  misc_feature (182)..(182): n is a, c, g, or t
tggtatgaggtgaaatagtgtatagtttgttnggagaatttacttatgtttataaagagaatgttgatggtgtggtgtagaagttgntntgtatccatctaggtgtgtagagntgccagcagggagctcacagaaggggagggagcaccaggccagntgagctgcacccacagtcccgagantgggatcccccaccccaacagtgattttggaaaaaaaaatgaaagttctgttcgtttatccattgcgatctggggagccccatctcgatatttccaatcctggctac

SEQ ID NO: 611948 - DNA, 133 bp, Homo sapiens
gaaagcaaagatatcccaagttattaatgaatcagacattttttactgtggatatttctccatcctaaaaaaagtggcaaccaaggaaactatatagatgcaacttactagagtgatgatgtgaaagaaatgg

SEQ ID NO: 611949 - DNA, 297 bp, Homo sapiens
ggggcccccctggggggggaaaaattgggggttttttttggggggggggattcccagcctccggggccccccaaatcccaggggggggcttgggaagaatcatgggggggcctttaaaactttttgttttggccgggaaaggggccccccattaatccccagggaaattttttttaaacaaaggggtttttttttttcggggtttaaaaaaccccgggggtccccccgggggggaaagggggttttgacccgcaaggggcaaaccctgaaaaaaaaagggttttttttcccccccca

SEQ ID NO: 611950 - DNA, 347 bp, Homo sapiens
  misc_feature (9)..(9): n is a, c, g, or t
  misc_feature (28)..(28): n is a, c, g, or t
  misc_feature (220)..(220): n is a, c, g, or t
  misc_feature (241)..(241): n is a, c, g, or t
aggctcgtnggttttaaaaacataattnccttgctacccactaagagtcccagttctctccacgtaccaaggagtcactgctgctgattcacgtgtggccatcagagcagtggaactaggcctcatctgtgccacaggagcacagcctggaagagatacatggcctgaaaatggtaatgggagcaccaagatctccaggatgtccctgagccacgcactngcgaggtacctgaaaagagtnatctccaattatacgatgacaccgtgagcactgtatggttcacgactctcagcactttacagttcacgacttttcagccttgcagggagttttccacccttgctct

SEQ ID NO: 611951 - DNA, 694 bp, Homo sapiens
  misc_feature (112)..(112): n is a, c, g, or t
accctagacctaggcatcttaatctctgggaaggggtacacaatcaaatgtaagaaggtttctttagtatttttaaggcctgaacagtttagacactgctgtgtaagagtanaatgatcaggtgcctagtatcagcatagcgatccaactttatattatcactaggaaaataaagggttggagcctctgtgtaactttgttgaaacatctgctcctgttattagatctgtgaaacagattgaacattcggttattatcaccttaagagtgcaacacctatagattttgaaaatgtattcatttttctgtaggcatagttaaaaagattttgtaaatgttataaatcagtttcttgataagcggttttcttagataacttttgttatactgacatgattcactgattttctaaatataaatggttcagctgttagttatttttaaactaatgacctgtgttatacttcatatttgtaatgggcttgtatgatgtattaggtttttttgaatcccgtgtccttcaagtgctttctatctttgagaggaagaaattgaccacctggactatggagctgtgcgtaacagctttgagagtgtatttaaagattgagtctatacgcctttaagtcagtgaattggaaacttattacatgtatttaatgattttcctgaaatataataaattgtttccttt

SEQ ID NO: 611952 - DNA, 129 bp, Homo sapiens
ggcgcaggatagtatatcgtgagaggcaggcgcaggtatatctgggtacggtgtgcaaacgtacgctcgacacccagaggggatgacagtcctgaggcctgtcgggctagtcgggggggtaccgagctc

SEQ ID NO: 611953 - DNA, 402 bp, Homo sapiens
  misc_feature (4)..(4): n is a, c, g, or t
  misc_feature (71)..(71): n is a, c, g, or t
  misc_feature (134)..(134): n is a, c, g, or t
  misc_feature (142)..(142): n is a, c, g, or t
  misc_feature (144)..(144): n is a, c, g, or t
  misc_feature (147)..(147): n is a, c, g, or t
  misc_feature (151)..(151): n is a, c, g, or t
  misc_feature (154)..(154): n is a, c, g, or t
  misc_feature (160)..(160): n is a, c, g, or t
  misc_feature (280)..(280): n is a, c, g, or t
  misc_feature (303)..(303): n is a, c, g, or t
  misc_feature (316)..(317): n is a, c, g, or t
  misc_feature (322)..(322): n is a, c, g, or t
  misc_feature (333)..(334): n is a, c, g, or t
  misc_feature (338)..(338): n is a, c, g, or t
  misc_feature (378)..(379): n is a, c, g, or t
  misc_feature (393)..(393): n is a, c, g, or t
agcnaagtgctctatacctttatacaataccaatgtgcttgagtctcccgttaagaggctgaaaactgggntggcatatgcaagactgggtgcgagattcaatggaatgtcaaatgaaacttagaatttattantgtttttncntantttntantctttnagcaatggccccataaatatagactacaactttacatatgctaagcaatagatacttgcctttccccaccaaaatacttgggttaaaaaaaaattgacagcatttataccaccttcttcncttccactcttcttcctttttanaccattgctagtnnttttngaacatttgannttcngttttttccgggcagcttctctaccatcaccatcttgttnntgagagcttttttnaaaaggtgc

SEQ ID NO: 611954 - DNA, 668 bp, Homo sapiens
tcggaggaagagggcggcgactttgttggtgactgagcggagcccggtgacaggatggctgggcacagattggtgttggtattaggagatctgcacattccacaccagagcaccagtttgccagctaaattcaaaaaactcctgctgccaggattcagcacattctctgcacaggagacctttgcaccaaagagagctatgactatctcaagactctgcctgttgatgctcatattgcgagaggagactttcatgataatctgaattatccagatcagaaagttgcgactgttggacagttccttggcctgatccatgtacatcaagatattccatgagcagatatgctcagcttagccctgctgcagtggcattttgatgggtgcattctaatctaggaacacacacacatagttgaagcatttagacatcacaatccattctacactaatccaggttctgccacttgcgcatataatgcccttcacaccaacattattccaatatatccgttaatggacaaccagggctctacagtggtcacttatgcgattcaacctcctgcacttgacgcgacaagatgaccgctccggttctcacggacctttaaccccatgccatagttcctccactcccggctcttcttgcactcgccccgtggccccgcc

SEQ ID NO: 611955 - DNA, 429 bp, Homo sapiens
tcgctgaccagcgcgtcttcggtaatttccactgaaactgcccacgggcctggccaagaacttccaccaggcggtcgccataggcggcttcctttatgtggtgctggaaatattgatggtcatcggcagttcaaaacccaccttctgccatttctgatactggcgcacggcctgggatgccacccacacatccacgtccggcatcagcctggcgtgcgccagccattgcaggaactcccacggcgaatgcaccgtgccctggctgtcccgggcgcgcatcagcgcctcgcacccggtgcataaaccggtacgggtggagacctggggttgaaactcaagatagaactcgtaatcgctgatctgctggatgcggttcaactcagcggcctggcgggccaatgtctggtgggtggcgactcaggtggtgtg

SEQ ID NO: 611956 - DNA, 225 bp, Homo sapiens
caagagggtcttgcttcatgcaggctggagtgagtgtgtcctactcactgcagcctccttgaactccgaggctcagatgattctcctgcctcagcctcctgaggagctgggacttcaggggtacacaccatgcccagctgtttttttttttttttttttttttttttttttttttttttttttgggaaaagtgttgggggaaaaagggggggggaaaaggggggc

SEQ ID NO: 611957 - DNA, 245 bp, Homo sapiens
gagctcggtacccatccttccctcttttacgttgtggatgttgtaaacacacacacactcccccccccccccaaacttattttttttttgttgagaaaggagacactctcttttaggcttgagtgcggagggctgagcattgctcactgcaaactcaaactcctgggctcgggcgaaattttcaactcaacctcccccatggatggggttatatgcatgcgtctccatacccggctgttttttat

SEQ ID NO: 611958 - DNA, 717 bp, Homo sapiens
  misc_feature (598)..(598): n is a, c, g, or t
  misc_feature (679)..(679): n is a, c, g, or t
  misc_feature (683)..(683): n is a, c, g, or t
  misc_feature (717)..(717): n is a, c, g, or t
ccgggctgcaggaattggcacgagtcagcactggtacggcaaagctgtgtctcttctgtcactgccacattgaaaggagggcagtcttcagaggccatcagatcagcattgggttcaggtatgagatccacacgaaggtgcatgggctttggggccagatgtctctgaattaatcactggctctaccttcattagctgtgtttttagacaaatctaccagcctttccctcctcagaaagaaacgggggtgtcaaacacaatgttcagggctactatgaagaacacagcatatgcaacagtctggctcagagtaggccactgataagttgtagcatttttattagattataaattatctcttgcttctatccacccttctgcatctcatgcctggaccactgcagaatcacctgccaagtctacctgcccatagtcttggccttcccattcatcctgcaatgcagccaaagaaatgttgtccaaagcccagacacagtcatgccacttttttgcttaaatccccataatagttccaaagggccataggattcactgtgcaagagaatatgaagagatgggcaccaccagagctgagaanacctagtcttttaaatactttgcaaggacatgccctatgggctacgccaaacttgccacaatcatatcttcttacatagantctntgattcccatccattgagcacttattccagggcn

SEQ ID NO: 611959 - DNA, 345 bp, Homo sapiens
  misc_feature (9)..(9): n is a, c, g, or t
ttgattctnaggatccgtgtagatttatcgggcacagtaggaggcgagcgcctaaaggctgaccgttttgctgtgctggggtctatggagtgagctggagagacaggcgttggatcagatacggagcctggagtagctggctgcggagcttggagaatacactgtcaagattgccctcctggaataggcgtggtggcgcagggaggatgaagttgagagagtggcagtacagggacctgaagaagcccaggcatgacatggtgagagatcaccggggtactgcccctggtgatgacagcatccctcgtccccgccaccccgctgcttaacatcggcggtaccgag

SEQ ID NO: 611960 - DNA, 734 bp, Homo sapiens
  misc_feature (521)..(521): n is a, c, g, or t
gcagatgagctggatggtgagatcgacctgcgttcctgcacggatgtcactgagtacgcggtgcagcgcaactatggcttccagatccacaccaaggatgctgtctataccttgtcggccatgacctcaggcatccggcggaactggatcgaggctctgagaaagaccgtacgtccaacttcagccccagatgtaccaagctctcggactctaacaaggagaacgcgctgcacagctacagcacccagaagggccccctgaaggcaggggagcatgcgggcgggctctgaggtcgatcagccggggtggccctcggaaggcggacgggcagcgtcaggcctggagctacgtggagcgtctcgccgctgacccagagctgtccccgcagtgggcccgggaccccagcccggcactccgtgaacggctggacaagcaggaggagcttggagcgggagctggaccaggcgctcctgaggagctggtagcaacgtggtttgaggccatcatgacaagggcaggancccccaagagggtgccttgactggttgaaggggggccgttgccggggccttggggtgccccccctgactgaggaccagcaaaaccggcttagtgaggagatcgagaagaagtggcaggagctggagaagctgcccctgcgggagaataagcgggtgccctcactgccctgtcaaccaaagccgggagacggccgagggcccccaagtgaggca

SEQ ID NO: 611961 - DNA, 312 bp, Homo sapiens
  misc_feature (104)..(104): n is a, c, g, or t
ttaaggatctcgtgaggtacaaagcagacagtctggcaaaagtagatgaatcctaagaactgatcagaaaataaactagcaacgttaggaattaaaaagtgggngcaggtgcagtagcttatgcctgtaatcttaggatttgggagggcgagcgcgctgatcatctgaggttgggagtttgacaccaacctgaccaatatggagaaaccccatctcaaccgaaaatacaaaattagctgggtatggtggcgcatgcctgtaatcccagctacttgggaggctgaggcaggagaatggcatgaacctggcagg

SEQ ID NO: 611962 - DNA, 132 bp, Homo sapiens
ttgttctaactgaagttctttttaatgagaggattagagaccagattaaggaattacaggcgccattttcctacgatttggtcacaccaccaaaaaaggcccaccggttaccttcttcattggtttgggagt

SEQ ID NO: 611963 - DNA, 270 bp, Homo sapiens
  misc_feature (117)..(117): n is a, c, g, or t
  misc_feature (155)..(156): n is a, c, g, or t
  misc_feature (162)..(162): n is a, c, g, or t
  misc_feature (164)..(164): n is a, c, g, or t
  misc_feature (167)..(167): n is a, c, g, or t
  misc_feature (257)..(257): n is a, c, g, or t
tcgcagaaggaggaacggggactttccatcccctgaaccaaggcatgttaacacttggctccagcatgttgtcatcattcaaccagaaatcgcacaaatgctactgtgccggggtgnagccaattttcttaagtaagtgctgacttccttaacanntatctntnttntggctgtagggtggctcagtggaatccattttgttaacaccgacaattagttgtttcacacccagtggtaagccagaagggcatgctctngggtctgcccatt

SEQ ID NO: 611964 - DNA, 164 bp, Homo sapiens
ccactttgtcaacagacataatcacttattgctttttttggtttttgtttgtctgagacagacgtctcactctgcttaaccacggctggagtgcagtggctcagtcatggctcactgcaacctcaaactcctgggctcaagtgtttgacaaacggtgcatgtgg

SEQ ID NO: 611965 - DNA, 663 bp, Homo sapiens
  misc_feature (45)..(45): n is a, c, g, or t
  misc_feature (47)..(47): n is a, c, g, or t
  misc_feature (54)..(55): n is a, c, g, or t
  misc_feature (59)..(59): n is a, c, g, or t
  misc_feature (61)..(63): n is a, c, g, or t
  misc_feature (65)..(65): n is a, c, g, or t
  misc_feature (93)..(93): n is a, c, g, or t
  misc_feature (177)..(177): n is a, c, g, or t
  misc_feature (258)..(258): n is a, c, g, or t
  misc_feature (328)..(328): n is a, c, g, or t
tggtggtatcgcgcgtaacaatgcttacttcagagaagctcgaanantgtattnnaaancnnnancgggtgttgaccgagtggctggaagcantgttagtgtattaggcttaaagttaatcttcttcaaatgataaatctttaattaaaatatctaaaaaatataaagccaactctntgtagtctggctttatttttgcgcaaaatatatacaaattgaaatatcttttttagcacttaaatatttaaaaagtggtancttaattaataaaacaaaaagaaatgaggatcacgttatgaaaaaactaatggtgagcatttcggttgtntttttcatcttaactacaggatgtgagatgagaacaacaagtaaacagcaaccttcaaatgaacgggcgatgagtattgctggttctccggtttatgaaaaagactacaaaattcccgatttacaagccaataatcatgagcaatctaattattaattgatggatagaatgtcccacatatagcactttaaatgtactcagtgcagataagcctgcttattataaaaagtaggttagaaataaaaaagctcccaatgtagggagcttattttatgaatctagattaagaaactttatcgcaggttttgcaccgtaatctggtgaaatactgaaaa

SEQ ID NO: 611966 - DNA, 255 bp, Homo sapiens
  misc_feature (2)..(2): n is a, c, g, or t
  misc_feature (94)..(94): n is a, c, g, or t
  misc_feature (133)..(133): n is a, c, g, or t
  misc_feature (156)..(156): n is a, c, g, or t
  misc_feature (168)..(168): n is a, c, g, or t
  misc_feature (183)..(183): n is a, c, g, or t
  misc_feature (208)..(208): n is a, c, g, or t
  misc_feature (240)..(240): n is a, c, g, or t
tngagttgtctgtaataatcttgaaaggcccaagggcctgtccccatcctgacttaaaggcatctgcttccctgtttcatatcacatgtacagnagcaaacctgttctcatggcatgtaacatccctgtgcangagagcgcttgtatatgcatttngctattttcttnaattcattttaattntacaggttggaattctaattttttnaaattttattggaactcacattttaaaaaganataaaatttaaaata

SEQ ID NO: 611967 - DNA, 222 bp, Homo sapiens
aactggtgcaacagcagaatgggaatgcttaccttgaaaactaatatcccaaggctacagatggtcagcactgtttgcttaaggtgcggtgtggggtatagattccagagcatagtaaatttgccagaaaccttagcaaagagaagttaacactagtgtggggggtatggagctgctgaggctggcataagaactgcctcattcatgttattttcacctgaa

SEQ ID NO: 611968 - DNA, 247 bp, Homo sapiens
ggaagacgactccatgcagcaactactgaagaaaggaccagactttaacggggagttttgattggcccaccttgcttggactcgtgaatctggagaagagctgtagaatggatagtattgtctgtatttggagactttaatttctgtgtgagaccaaaggaggagagatttttttttttcaaaattaaatttgttgtggtcataatcttatgaacccctcttgtgagtttttttgcaacccacctag

SEQ ID NO: 611969 - DNA, 267 bp, Homo sapiens
aacaggcaaacagctcatatacatggaacatacatataacccaagaaacactccccagtgtacagatcaacacacacgcatgcacaagccaagccatatactacgcacatacgtgagcacacaaatgaacgtctagtcactcattttctcagctgcacccagaacagggctgggctcatctagggcaaggagatctccgtggttccaactggaccaggccatgatatacccactctactgttgcacccccattacctggacctctag

SEQ ID NO: 611970 - DNA, 254 bp, Homo sapiens
tgtatgccggacaagcagggtcgctgatgcctgaaggtccaggtgactatcatgcacaggctgggcagcccgggcaccagagcccgagcagccggaggcgaccagcactacctgccaactacgttgccgaccagcgccacctccctggcctcggacagcaccttcgacagcggccaagggctcctaccgtgtactcaagactcgcagaagcaagccaagcagagctggtgatgctttttttcccctttgccgga

SEQ ID NO: 611971 - DNA, 357 bp, Homo sapiens
  misc_feature (20)..(20): n is a, c, g, or t
  misc_feature (159)..(159): n is a, c, g, or t
  misc_feature (325)..(325): n is a, c, g, or t
tgagatggagtctcgatctntcacccaggctggagtgcagtggcgtggtctcagctcactgcaacctccgcctcctgggttcaagcaattcccctgcctcagcctcccgagtagctgggattacaggtgcctgccaccacgccaggctaattttttgtntttttagtagagatgggtttcaccatgttggctaggctggtcttgaacttctgaccttgtgatctgcccgcctcggcctcccaaagtgttgggattgcaggcgtgacagccgcgctggcaaatacgtactacattttaacaccagttttattattacacacaccgntaaaaaggcctggggtttacaatcacataatc

SEQ ID NO: 611972 - DNA, 272 bp, Homo sapiens
gtaaagaacaggttattaagacagccctatgggaattttcaatagatatagagtcacgactgtctaagtgtgttgaaggaatagaatatcgatgcgagccaatgagagtattgaaaggagatctcaggatgatatatctcttattttctctaaagacagaacagcagtgatgatacaagtgagaatatatgattttctcttagttaaaagttcgagagatcattaagttatctaaaacaggctggtatggtggtgatatcagtatagtgaca

SEQ ID NO: 611973 - DNA, 145 bp, Homo sapiens
tgctaggattacaggcgtaagccaccacacccagccttatttttttttaaggaacagtttatatggatttatatttgtttcaataagccacttattcttgtttatttaaacagcacacttgaattcactatgtggtactcctgaa

SEQ ID NO: 611974 - DNA, 469 bp, Homo sapiens
ctatggtctagtcgccaaggctggagtgcagtggtgtgatcacagactcactgctgccttacctcctgggctccagtgatcctcccacctcagactctagtggctaggaccacaggcatgtgccatcacgcctggctaattaacaaacaattttttttgtacgagatggggtctcactatgttgcccagactgctcttgaacaatcttcccacctcggcctcccaaaatgctgcgattacaggtgtaagccactgcgcccggtctgccagtgtttaactaatactaagacaagggttatgggtctgggaggaagagcccagtggtaaagcgccctgtcacatctgcccgtgtgacctctcggtgattgtgccagccttgacctctgggctgagacagtgggtcgggctctccactgtggagacgccttgcctagctcccaacaatgttctgtactccacttagagggtt

SEQ ID NO: 611975 - DNA, 791 bp, Homo sapiens
cctgccgcccatgctcccagcctgatggctttctcaacctgctgtcaataaaatggcctgcccctgaccctgcccccgctgcccctgcagccctgcctggacacccctgtgtgctgcatgctgatgctgggctgcatgactgtgtgcctgatgttgctgtggctgcctgtggctgctgcatgttgacctgatggtgacctgatgtgctccccatgagctgcactgtgtggcctgggctggtcctgcaagccctggcttgagatgctgctgccatggtgtgcagtgctgtgtgcttgcaaggtgtgctctgccttgtctgctgttctgactacaatgacctgagaagtattgtcatctgccaatgaacaatgaatgtgttgggcctgcttgtacctggcttgcttgcatggcctccatcctggctgtaccttggtcgtatgggttgttccttgataaagaaggtgttaccaatgactgtctgacacctcccttgcagatgtgctgtcatcaccaaatgtcaatttgtgcgtggccttcaccaacacctcggatcttgggcagcggatctgggattgtcgccgactacgtcattccagcccaggagagaacgtcttttttgttggtcaccaacctgattgtgaccccaaccagctggcagaactgtctttgtgctgagaatgaaggcattcctgatggcgcgtgctccaatgacagcgactgccacgctggggaagcggtacagctgaaaacggagtggatgaccggcgctgctgcggagagaaactttggct

SEQ ID NO: 611976 - DNA, 469 bp, Homo sapiens
tcttggtggagaacttgatagaggagagaccagacagaaacctttctttcttagcaggccttccggcactcagaacccatggaaattaggaagagttgttccgacaagaaaatgcagaggattcagttcttatgaatctgaatttctgattacgcccaatttttaaaacttggaattagttgaccttttacagcgttaacctctatttcttaatttttatcttgtgacataaaagaaaatctctaacgaattgtgagaaaaacaagcctgtgtccctaaaaaatctgaaatgtaaaaagacatgcggtattattagttgcaagctgggctaacaaacattgaaaggtcccggtttattatgcacatcgatttgtaattattatattgaaatgtcaccctaaacaagatgtattcataacttttccagacatatccttttgtataacccttttccttcaccaaaaaaaaa

SEQ ID NO: 611977 - DNA, 303 bp, Homo sapiens
  misc_feature (220)..(220): n is a, c, g, or t
ctgatcttgaactcctggcctcaagtgattctcctgcctcagactcccgaagtgctgggagtgaaggctttgcatctggcctcagaggcttttctttctgtgaaattcagaactcccagaacagtgatgtcccttggagactgttttcatccatcgtcttgcctactctttggtcctgtttatttgcaactcatgttcttcaacgctgggcatttttttnatttattgctttgatttcttcctatttgctttctctctctctctctagaattctactcttggacttttctggattggcactca

SEQ ID NO: 611978 - DNA, 1175 bp, Homo sapiens
ccactacgtgttcggccatgaaggaccgcacccaggtgctgcgcacgcgaaggaacagtgacgataaggaggaggtggtgcacgtcgaccgcgaccacttcatggatgagttcttcgagcaggaggaggagatccggggctgcattgagaagctgtcggaggacgtggagcaggtgaagaagcagcacagcgccatcttggccgcccccaaccccgatgagaggacgaagcaggagctggaggacctgacggccgacatcaagaagacggccaacaaagtgcgctccaagttgaaagccatagagcagagcattgagcaggaggagggctcaaccgctcctcggccgatcttgcgcatccgcaaaacgcagcattccaccctatcccgaaagttcgtggaggtgatgacggaatacaacgccacgcagtccaaataccgcgaccgctgcaaggaccgcatccagcggcagctcgagatcaccggccgcaccaccacgaatgaagagctggaggacatgttggagagcgggaagttgcccatcttcaccgatgatatcaaaatggactcgcagatgaccaagcaggccctgaacgaaatcgagacgcggcataacgagatcattaagctggaaacgagcatccgagagctgcacgacatgttcgtggacatggccatgcttgtggagagccagggggagatgatcgaccgcatcgagtacaacgtggagcactcggtggattacgtggaacgcgccgtatccgacaccaagaaagccgttaagtaccaaagcaaagccaggaggaagaagattatcatcatcatttgctgcgtggtgctgggggtggttttggcctcctccattgggtgcactttgggcctataggggtgtccgtccccctcccccattaatgcactaaatttaatcgacgggccccccattatttcactaattaaatgaccgtttccccccaatatcccccattttgcgctaatttatgacggacccctcccaagaccccccattttgccctaatttataaaaaaacccccccccccccagccccatagccgccccccagctctgtaacccccccccccccggtgtggtcctgtgctgtatttgctacgaaacccattggcacaaaaaatttttttttaatttaaaaacgaattc

SEQ ID NO: 611979 - DNA, 264 bp, Homo sapiens
tcgatgtgatgtatacaatctccttagatgttcctaggtgctgatgcagtggctcatgcccatcattccagcacttggggtgggccgaggtgggcaaatcacttgaggtcagaagcccgagacttgcctagccaacacggcaaaaccccgtctctaccaaaaatacaaaaattagctgggtgtggtggtgggcgcctgtaattccagctactcaggaggctgaggcaggagaatcgcttgaaccctgtttgtggaggtagcact

SEQ ID NO: 611980 - DNA, 634 bp, Homo sapiens
  misc_feature (79)..(79): n is a, c, g, or t
  misc_feature (105)..(105): n is a, c, g, or t
  misc_feature (109)..(109): n is a, c, g, or t
  misc_feature (130)..(130): n is a, c, g, or t
  misc_feature (176)..(176): n is a, c, g, or t
  misc_feature (189)..(189): n is a, c, g, or t
  misc_feature (282)..(282): n is a, c, g, or t
  misc_feature (303)..(303): n is a, c, g, or t
  misc_feature (321)..(321): n is a, c, g, or t
  misc_feature (323)..(323): n is a, c, g, or t
  misc_feature (329)..(329): n is a, c, g, or t
  misc_feature (333)..(333): n is a, c, g, or t
  misc_feature (380)..(380): n is a, c, g, or t
  misc_feature (394)..(394): n is a, c, g, or t
  misc_feature (424)..(425): n is a, c, g, or t
  misc_feature (432)..(432): n is a, c, g, or t
  misc_feature (448)..(448): n is a, c, g, or t
  misc_feature (450)..(450): n is a, c, g, or t
  misc_feature (478)..(478): n is a, c, g, or t
  misc_feature (493)..(493): n is a, c, g, or t
  misc_feature (498)..(498): n is a, c, g, or t
tgcaggtttgctttaaaatccagtagttcttaatgttaccaaataaccatataactcccaaatgcagcaaaggtgaacnttcttcatagtgcactttcacctcantganattgaagctgctccttttggntatttttccacttcaatgtgaagcagattgctgggatttcattagnggtttcattacgnggctttttaaaagaaaaaatagttttgatttcttccacagttcacagttctcagacgagactttttttttttgtaaattatacagttcagggntgttttgaaaaaccaaatgcnctttagtagatgaaatcncncaatgnaacngtaataaataagcatctacatccttagaagataaaacaaaaacattncattagacagtacngtaaatacaaacataaacaatccatttggnntgggggnggcgtaattggccttngntcccgttggggaccgttgggggggaaangacgggcctggttcngggcntttaccggcattgggccggcacggggccgggcacatggtatgtgctcaatatatatttgctaagtgctaaatgaatgtgttggttcctatgctcaaacaactctgctttcatagctaacattcacagaaattctat

SEQ ID NO: 611981 - DNA, 406 bp, Homo sapiens
taatgcaaggatgtttcaacatcataaaacacataaatgtaatccaacattatcagaatgaaagagaaaaacaattctcaatagacacacacacacaaatacactgggataaaattaaatattttagattttttaaagtcttagtaaattatgaatagaagggaatttccttatcttatttctagactcactatctagtatttttacctcaacccaactaaatcagggtataatcgtcaccatttcactgccaaatttattgggcaattattattttagtctcttagcagcatttgacatggaaaatctctcccttctttctgtaatactttcttccctggggttttgtgactctccatgcccttggtttttcctcctagatgaatagtcatccattctcattctc

SEQ ID NO: 611982 - DNA, 258 bp, Homo sapiens
tttttatttttcccaagggaaattaaaatttattttttccccctcccccccaaattaaaaggttcaaaaaataaaaaaggccccctgggcccggttttttttttattccgggccccccctaaaaaccggggggaactttttgggggggggtccccgggccgggaaaattttttcccaaaaagggaaaaaagttttttttttttttttaagggaatttcccccccccccaaaaaaaccttttttaaaggacccccccca

SEQ ID NO: 611983 - DNA, 213 bp, Homo sapiens
aaggaacacacatgtaattaccacgtgacccatgtattccacgcgtacgtatacacccaagaataatatacactccacattaaaaacgtgaacgtgaaatgttcatagtagagagttttctataaaagccacacaataaaaaccaccctagtgctgagcacggtggcgtcacgtctgtagtcctagcacctcgggaggccgaggcgggtggat

SEQ ID NO: 611984 - DNA, 293 bp, Homo sapiens
  misc_feature (267)..(267): n is a, c, g, or t
  misc_feature (277)..(277): n is a, c, g, or t
ggtcgctccaggaattgggtactaatgcttggaatctgtgcctgttatctccatgcaaagactttggaggtggggctaaagtttttggaaatgggattttcctggattatcggggtgggctttaggtgtaccccaggtaaccctttaagggaaagttggggggtgggccctgtggcccacgcctgtaatcccggccctttggggggctggggcgggtgggttgcttgggctcgggggtttgggaccgggcggggcaaattggtgggncccccccccnccccccccttttttta

SEQ ID NO: 611985 - DNA, 411 bp, Homo sapiens
ctgcctcaacctcccaaagtgctgaggttacaggcataagccacagcaccctgcctaaaatctccttaaaaacaaaaattgaaaataactttggatcatccaaagtaggtgagtagccatttacctatcctttcttaaacacattatctatctcttctccctcctttctctctgcaggttctagttgtactttaaagtctctgatgcttaacataaaaaattctgggattcaaacagatttgctagccactatgaaacagccccaccttgtgtgcctgaacaaagagaataacaatcaacaatgttcctgggtgtcctcgaatagaagaggtatttcaaattggagagaaaagcagatctagtcttctgaccttcttctaaaacaatcaccgtcattcaagtcaacccaac

SEQ ID NO: 611986 - DNA, 1038 bp, Homo sapiens
cacccaatcacaaacacacagcccgggcgggcacaccgagctgttcttgaacaaatcccagcatggcagttctgcaggtcattacactggcatctcatcaaccaggcagtccaagcgcagctcgcatcatcaaacttacgccccgacccggaggaaaaaagagaaaaaacaaaaaaaaaaaaaaaaaaaaaaaagaaaaaaaaacgaaagaagaaaaagaacaagaaaaaaaaagagaaaagaaaaaaaaaaagagagaaggaggagagacgagacacacgaggaagagagagagacaagaagagaggaggaggagaagagaggaaagaagaacaaacaagacagaagaagcagaggagaagcgagagacaaagagagacaggagcacgggagacgggaggaagcgaaggagagagagagaagaggaagcggagcgggggggagaggaggaggagggaaggaggagggaggaagggcggcgcggcaggaaccgggaggggggggagaggagcggaggaggagggcggaggcgaggggggagagagaaggaggagaagaagagagaaagagaagggacagggaagagcaagggaggaaggaaaagagaatagagacaagaagaggataagagaaagagagagagacaggagagaaaggaaggaaaaaaaagagagaggagcagaggagagagagaaaggaggaacacaagagagaaaggaaggaacagaccagaggaaaggacaacgaagcaacgagaccagcagataaagacagcaaagaacaacgaacaagcaacagagacgacacagcgggcgcgagcgcgccagaaaaaggaacgagagcacgagagacgagaagaaagacaaaggggagacagacagaaagaggaaaaagaaaacgacagacaagcggggcaggaagagaggacggagaagagcgacagaaaggcagcgaggaaagacaagagagaacgaaacagagaaagaagccggacggaccagaaggcaacgcaaaggaagcacgacgagccagcaaacc

SEQ ID NO: 611987 - DNA, 1203 bp, Homo sapiens
gcagcgggctctcgtgtactgccagcaatgaacgctgaaggctcacgcgtggacggagtcgatccacttcggcctcatcaacctgagggtagccagtacctagacggccgagagcgtccgggttcagagggtgagacgcgtccgcgcaagcacgccttgaagaatgaaatcacgatctgtgatggctgggagcaggccccctgtaccgcgggcggtgccgagctgtcggtgcgtgtgcctcgtctcgagcacaccatgaggtacagcttacacatgtgccggtcggcacaaaggagtactggcgaaccgatgaacgcatgacggacgccgtcaggaggggtggctcccagggtggccgcgaatgtgtccggttatatccatcgagtcgatgggcgccaccgaacagaccgcgatcagcattggatccgtatcggaaggattcccagtagaggcgcaagcgcaggcctgcctagcggtatcgtgtcggtggcacaccgaagggtagcgcggcccttggttgctcgcttgtccggtcggcaccgatccggggtgctaccaccgcccagtcgcgaaggaaggggatagggaacacgtttcgactagccactgggtgcgatagctaacccacctacaggggctacaaagcattgctagcggagacgcttcactcccactgtttagactgtggttgacgtaatcagagtcggacaacctttagaatgggcggacagacggggcaccaggggtcgtaacttgaacgaattctgtcccgataggaggactcagcggtaagcggtaagcccctttggggggggcggtccagacatacggacttcaaattacgaactcataccggtgggttctcccggatgtgcaacccgatgggcggctctaacaaaagaccgttgtgcagaacatctgacccggaagccttaccaggttttttcccttgacttgccagcggacagtgggcggcgttgcgtgtgggactgcagccctctggggatcgaccttggcccattgggtgactatcgagcagcatgggagggttgccctgcctccctgtggccaaggggttggaagcctttcccgagttgaccctgtgggaagggggcccgttttaccgtgggcgacctgttcgggggtgccccccagccggggaacggcttccaaagggccgtgtggccaaatgggccacccaaa

SEQ ID NO: 611988 - DNA, 1071 bp, Homo sapiens
  misc_feature (280)..(280): n is a, c, g, or t
  misc_feature (1068)..(1068): n is a, c, g, or t
  misc_feature (1071)..(1071): n is a, c, g, or t
gcacgtgacagcgtaggtgatgacagagcgagacactgtctcttaaaaaaaaaaaaaaaaaggtttcccagtttggaatttggtattggctagaagcatttttttggaaatggctatatagatgcctggtcatggtcacagtgggcccagtatcaccattttaaaaagctcactgggtagctggggcgggtttctattcctgagaaattccagaaaggcctcagaataaaattccgttagttataatccccaattttccttaccagagggatggtaggcnttagtcactcctggggaaggggccacgaggacaaattcagcagatgtcaacagaaaaaaaggcctttggctatgaaaaggtattcactacctttcatatctctggaatactggaaatggtttaattagatggccaccaataggggatccaagggagtggtggggacacgggttggcgctggatatattctttataacacggtttattaaaatgggctcaacgctggcattcagcttcacctcagctcttctggtcagccaggagcccggggtcctgggaaactggtgagcaagggttacttatttccatactggtgcatggtgtcagcccgattaaccccactgcttgaatgggccattaataagcacttattcttataaaaggggggatgtttggccttaaaatcttagtggctagggtgtatttaactttgggctggacatgctgcagacagaagcacggccgcgacagtgaggaaacattcccaacgtaaaataaccgaggggccacagaatggcatcacaagagcgggggcaacatcacaatatgcaaaatcgcgcacaaaacaacataaggaaagagagagaggaaaatgaaaagagaggactgagagcacaaggatacaccggtacaatagggagggataaaaaagaaataggcaaggaggaacaaaacaataagcgggggaacgacaacacagaggcggagcacgtgaagacacagactacacagacaatgcgacagcagctggagtcgcggcccacgtcgatttcacccgtacaagaggnggn

SEQ ID NO: 611989 - DNA, 283 bp, Homo sapiens
cagagatgatgccactgcactccagcctgggcgacagagcatgactccatctcaaaaaaaaaaaaaaaaaaggctgttgaattcgggcagcgcttttaaaatcccgggcccgggtgatttcgataactcgggggcacctgggttacggcctttcttaggcccgtgcaataaccgctcttcctcacatttagcattgggccaattgtctctaacttctccttacccaggttttacaggggccggtgtaaagagccttcacccatggggaaccatgtacaacctg

SEQ ID NO: 611990 - DNA, 827 bp, Homo sapiens
gtcacatggcaggacccgtctctacaaaaaaaaaaatacaaaaattagccaagtgtaggtaggtgtgtgccttagtcccagctactggggagagctgcagctgaaaggcattgaatagagcctgggcaacgctcaacggctgccgctgagctcatgactcactgctcacgggtactccaggccctggcacagacaaaacaccaacaatgtctacaaacaaactacacaatacacatgccacacttcatgtgagcaccactgccacgccacaaccctctcagcagctctagaacgcctcctagcgcgcactaggcgctcagcacaaccgtgccaaccttgcacactcgcccgcgggcacataacactctccacaagctacacactcgctaagagcaagacacaccaacaacacctgaggtaacacgcacatacgtacaactacacaatcaggcgcgacactaccgatataatcaccatcaatacagcttcacgcgaacaacctcagatacaccataagagcgcaccatcctctaatcacaccccactgggacccaactacctacaggagcagcagcgaagactaccacgcacaagaaacacataacaaccgtgagtctaaaccggcaggcacaactggcagcccagacggaacccttcccgaaggatacgaccttgacgcacgacgagactaaccaccataaaagcagcgacaacaggaccaattagctctaacaacaccccagcaaagttatcacactaaactcccactcgagcccacataggccactaccgcgccctactcacagccccacaccggcacgagggcc

SEQ ID NO: 611991 - DNA, 298 bp, Homo sapiens
agttaggcgtggtctgattgttcagtgggaagacataaacctccccaggaacaatgatggctatggggagacaaaaaggtctatgctgggcggcaagaaacttgccctttttaaacactatcatcctcccctaaaaatatggttcctagacttgaagatgaaggcaatgaccaacatttcccacttttaaacttctgacacgttaatagtaataccaagtatttgagcactgtatagtgaagcacagtggataggtattcctactcccatttcacccctgtgggcacacattatggag

SEQ ID NO: 611992 - DNA, 318 bp, Homo sapiens
  misc_feature (55)..(55): n is a, c, g, or t
  misc_feature (248)..(248): n is a, c, g, or t
  misc_feature (254)..(254): n is a, c, g, or t
  misc_feature (284)..(284): n is a, c, g, or t
ccttgtctctactaaaaatacaaaaattagccgggcatggtgtcacgtgtctgtnatcccagctactcgggaggctgaggcagaaaaattgcttgaacctgggaggcagaggttgcagacagctgagatcactccattgcactccagcctgggcaacaagagcaaaactttgtctacaagtcctcctacgctgacaggtcctcactcacctgaatcttttacgccagcagcgtctcttcactgacgtncttctncatgccggaaataggaccttcccttgccancgggcagtgctggctgcatgcagtcgttactttt

SEQ ID NO: 611993 - DNA, 232 bp, Homo sapiens
caggaggcagatctccgatgcttccgccagcaggagaatcctcccctgccccttggctcaaaggtggtggttctggctggtggctgttcagtgatgtgtgttgatcctctatcctggtgagcctccatgtgtctaccatgatccgggatggcacggagtgaaccagtgagctgtgcccatgctgcacctgatctggcagctcctggagcatgacacaggagcagtttggtga

SEQ ID NO: 611994 - DNA, 146 bp, Homo sapiens
cttataatgcacccgagcaattaatttagtcccttaaggagtggaataccaccaaacaaagaactaactggaaacagggagataacagccatagaggcaacacagtcacatcacctcattataaataatcaaccagccacaaataa

SEQ ID NO: 611995 - DNA, 436 bp, Homo sapiens
  misc_feature (284)..(284): n is a, c, g, or t
  misc_feature (354)..(354): n is a, c, g, or t
  misc_feature (404)..(404): n is a, c, g, or t
taagagacagggtctccccctttcacccaggctaccaggctggtgtgcagtggccgtgatcatagcttactgcggcctcaaactcctgagctcaagcaatcctaccacctcaacctcccaagtatctgagattacaggtatgcaccaccatgcctgcctaatttttaaaatttttttagagatggggtctcactgtgttgcccaaattggtctcaaactcctgggtctcaagtgatcctcccgcctcagcctcccaaaggcactggggattacagggcacgagncacggcacccagcctaaagcaatgttagggtttcaaggaaaaaccttaaggataggcccattagtttttnatgttttcctttattattattggcaattctggcaaaattttttgtatttnagccagtatttatgttcccggtttttattaaa

SEQ ID NO: 611996 - DNA, 110 bp, Homo sapiens
tagggctgtgggctgacctgtggtgagactggaaatctgccactgctgcacttctccaacctgcatgtcacaggtgtggtctggccctgctgaggcggtgcgttgctgat

SEQ ID NO: 611997 - DNA, 412 bp, Homo sapiens
tcatgcttgtaatctcagcactttaggaggccgaggcgggtggggcacctgaggtcaggagttcgagatcaccctgaccaacatggtgaaaacccgtctttactaaaaatacaattagccagatgtagtggcgcctgtaattccagctacttgggaggctgaggcaagagaatcgctagaacctgggaggaggtggttgcagtgacccgagatcgggccattgcactccagctttgggaacagagcgagacttcattttacccctcgtggagagaagtgtttatagcatgttgggcggcttggcccacggggctctagactagagcaagcttatggatgccgcccgaatatgagcgcatttgccacttagccctatagagagtcggattacaattcactggccgtaggtttc

SEQ ID NO: 611998 - DNA, 189 bp, Homo sapiens
gggttttttagccattttaccgggggggggggcccctttttttccttttcccccggttccccccccaggggaggggcaatgttttcccccccaaatcctttttgccgccccccggttccctttggtcaccccaggtttttttccgcttttggggcccgggtttccctttaaaaaaaaggggggttttta

SEQ ID NO: 611999 - DNA, 252 bp, Homo sapiens
tgagacagattgtgctgtgagctgtagtaccagctacaaggtgggaggattgcttaggctgggtgattgaggatgcaatgagctgtgattgtgccaccacactccagcctgggcaatacagcaagactgtctcaaaaaaaaaaaaaaaaacccaaaaaaattcaaaattgtattgattgatccccaatgtgccttttctaaaaaaagttggccaaattttttctctgggaatctgctgagcattgtcctctg

SEQ ID NO: 612000 - DNA, 269 bp, Homo sapiens
agaggatacaagcatagaggccacggactatgacagttgtgctactctgaagtctcgtacaacaaccagattgagacccttcttattcctgaaggtctctagaaagaacccagctcgcacatgccgctgacttagagactcagccacccagagtggagcagctggttactactggattgaccctaaccaaggatgcactagggatgctatcaaagctatactgtgatttctctactgggcgaatcctgtttccgtggcctctatgagtg

SEQ ID NO: 612001 - DNA, 145 bp, Homo sapiens
tttgtccttgtaactctatttttttgggtttactttaagttttttaacctgggtttttgcaaaggtttttgcttttaggatttttgtccgtttttttattattgccaaaaattaaaaaccaatggttggaaaattaaaaaaaaaa

SEQ ID NO: 612002 - DNA, 174 bp, Homo sapiens
ctagagtatccccacaccgcaacacccacatggattcataagctggcccggtggtgcagacgctgtaagtgtcagttccggaccgtggtatttttctcagccatgaccagtcgccgtattacccgcacagccattccccattcgcgacctggggagatctttggtccgcacgtt

SEQ ID NO: 612003 - DNA, 781 bp, Homo sapiens
gggcctcagccaggccccacagtttgggttaaaagtccagctgccatcttttctgtctataacgcatacaatggaaaaggctttgtcagatcgggtatccccagggctggggctgccagacatttttcctttaactcatgaaagacttgctgttattgggttccccattccaaaggttccggtccacgccccctttgtgacctcatacaaaggcttggctaatactgcaaagtttgggatgaacagtctacaaaaccccacagcccctgagaattccctcacctgccttctgcccttaggctccggtagattgcaaatgacctgctttctttctgttcccgggcggcatcggacccgtcggagagtaaatcccaagtaaggtacctgccgttggcagatttgagctttcttcttggacacctaatacccacacccagcctgcacatttcttaaaacctcattaaagggagtgtcctctgggccctgagggacacagtcaagggatgaattttttttataatcttagtgtgaaggtccacatatgatgcaaaataacaatggctgcatgaacgtgatcccaacttgttcccacaagggtcaggtggctaacttcataggatattctacctggctctgtctgccctcctacctagtggtgaacagagtgctggcaaatgtttaacaaccagatctccagaagcaaaaaacaaaacaaaggcctgatttgtagcatctgtcagtatctgcagtataagcactcccattgtgtccagaatttatc

SEQ ID NO: 612004 - DNA, 130 bp, Homo sapiens
cgcattacacatttatttgaaaaaagttcccccactgatgcctttgtaccattgttgtgaagcagaagtccatatatgtgtgggtctatttctagatactgttccattgatctgttatgtctgtcttgat

SEQ ID NO: 612005 - DNA, 808 bp, Homo sapiens
  misc_feature (808)..(808): n is a, c, g, or t
cagataaaattaattaaccacattatctctatattctattaatgaaacttaggaattgactctctctcatctttgccagaataataaggcattaccatgcttgaagtaactttagtggagggctacacattttcctgtttagtcttgctgccattagacaatccatatggaaaaatatttggtactgtcaagaggaagttgtcttcaagactgtgacattgtggccaccaatgggagtccactctcagctagaggaattccttaagtcatttgtgatgctggagatgatagcatgtatccatgctaaatctcacatttttttatcgacctatagggcgcacttgcctccaatatgaaacaggttattccttatacacctattttatcaaggtattctgtggattacctcatatgttatctttacatggtttaagggtatattctcctttcccacttctgttcaattttataataaaataaataaatagtcgattatgacgatctaatgccttactaatcagtacccttcttatatctatttttctccataccctaatatagtttactcacgtttgctcatcacttactataagagcacaccgcctcaatgctctttgttaacattcgtacctctctcccttttccatccatacaatgtactgatacacactgcaacttagtatttaacctgtcctcatgcctcgtcggccgtatgctcgtttagtatttccctttttgactcatccttcctgacatcttctttatactccccacatataatcatcagctccgcatctaaagatcaccn

SEQ ID NO: 612006 - DNA, 152 bp, Homo sapiens
atggaaccactctgtaatgactaattcgagggaatttagggggctatctcttaatggtttgataatttgggtttaacccatgacttaatttaacttagtgggtatactggtcccagtcccattactgatttttattccttctgtgataacat

SEQ ID NO: 612007 - DNA, 687 bp, Homo sapiens
ctacccaaagttatttgagtggaatagaccttgggattaattgacctcccaaggttacccacctgtcccagctgagaaagaggaagcacatccgggtgctgtctctctttgataaggaatagctacagggctcctggtgctgatggacttgggcatacaggtggactgctacatatgcctcggaggtgtgtggaggactccatcacggtgggcataggtgcggcaccaggggaagatcatgtaacgtcggggacgtccgcatcgtaacacagaagcatatccaggattggggaccattcgatctgatgatagagggcagtccctgcaatgacctctccatcgtaaaccctgctcccaagggtctctacgagggcactggccgtctcttctctgagttctaccgcctcctgcatgctgctcggcccaagtgagggagatgctcgccccttcttctggctctttgacaattttgtggccatgggcgttattgaccagagggacatctcacaatttctccgagttcaaccctgttatgattgttgccaaagaattgtcgctgcacacaggcccgctaattctagggtaccttcccggttttgacggccttgcatcactgtaatgatagctggactgaggatttttgggctggcggtaccaagtcagaagtgagacatatacagtcatacc

SEQ ID NO: 612008 - DNA, 184 bp, Homo sapiens
actgtccggcagttcctactgggataccagccccggggtaaacccaggatagaatatggcaacggctgactcccgagggattctggtaccgggcccaggtcttcccaaccgtgaatggactgtttagatggtttacggatcactaccaggatcctgtaccaggcatcacccctagtagtatttt

SEQ ID NO: 612009 - DNA, 959 bp, Homo sapiens
gcacaccttctacaatgagctgcgtgtggctcccgaggagcaccccgtgctgctgagcgaggtcccccctggaatgcccaagggccaatcgcgagaagatgaccgccagatcatgttagagaccttcaacagccccagctcatgtacgttgctatccaggctgtgctatctcctgctacgcctctggaccgttaccaccatggcatcgtgagtggactcccggttgactgggtcatccatcactgatgcccaatctacgagggggtatgcccatcccccatggccactccctgcgtcatgggagccatgcgactgtaccagagggaccttgaactgacttaccttcactgaagagtccttcacctgagcgcgtgatacagtgttcaccatgcacgggcgagcgggaaatgtcgtgcgtgacgggttaaggagaagctgtgctacggttctgtccttggtacttcgtagcaaggagatggccacggcttgcgttcgcatgctcctccgctgggagacagagctacgagctgcctgacggcacaggtcgatcagccacttggcaaatgagcggttcccgcatgcgcctgaggcactcttccagccttccttcctgggcactggagtcctgtggcatccacgaagactaccttgcaattcccatcatgaagctgtgactgtggtacatcccgcaaaagaccttgtactgccaacacatgtgcttgtctggcggtaccacctatgttaccgcgtggcatttgccgaccggcatggccgagggagatcactggccctgggggcccggccgatgaatgatccagatccttgctcctcctgagcgcagtctcccgtgtggatcgggcgggtccatcctgggctcggctgtccccctccagagatgttgggtctgcagccggggtatgaggattcggccctcattgtcccggaatggtttaggggga

SEQ ID NO: 612010 - DNA, 610 bp, Homo sapiens
  misc_feature (247)..(247): n is a, c, g, or t
aaagacagaagtggacggtcgttccaggggtagaggaggcatgaaggatgaccgtcgacacagatattctgcggacaaaaggggtggatttaatacctttagagacagggaaaattatgacagaggttactctagcctgcttaaaagagattttgttttttaagcggggggatgcgttaacagtgctgcagattacaccaatgggagctttgtaagttcttttgagtcagtttgtatacagaccacntctaggcctgttaatccaacaaaaaccaaccataatggttttgttagtattcagaatcccccaatgtatgaaaaaatttttaatattagcccatgccaacaggggtatgcatttcttgctaaacgcagaggcacaatccctgttttacccaccccatattttttatcgctattacccatctacacctcattcctaatcttatattctcggcggtcaatattatatatcactcaactatcaaattgttattctattccttcatcttcttacttctcattttaatgctcctattctctcacaataattctcttctcgcttctcacatctgtttacacccctctctcctgctttaattttaacaaa

SEQ ID NO: 612011 - DNA, 458 bp, Homo sapiens
tgtgatctagaggtcccggtgggagagggggtctctcgaatttcagggaatggaaatcatacagagtatggttctcggaccataacagaactaaattaaaaatcaataacaaaaagatatctgaaaaacccacaaatactgggaaataaagcacccggcctccaaataacagaagggtcaaagaagaaatcacagggaaaatgggaaaacactttaaacggaatgataacaaaaacaacatatcccagggggatgtagctaaggggatgcgggagtgaacgggcaactctaaatgtggtaaagcaaggagaagggttacgaatcatctcaatcccggcggtgaaacattaatccggtaaaataacgatttcagtagaacatgggaacaaaaaaaacaaattaccttaaaaaggggggggtgggggtgtgccaggaacgttaaggcatgaaacttagca

SEQ ID NO: 612012 - DNA, 409 bp, Homo sapiens
gtcagtaggcagagactagaggatcaggaaagtggcagaaggacaggaatgtggtctgaaggacctgggtattatctatgtgccttccctacatagacgtgctgtcatcctctggtgaccccagtgtagcggtccaagaatcctggagacccccaggtctatgcacatcctttacccttgtactactgcagaggagaaaaagagacacacacacagaatggagcccatcagttctttggctttgcatttcaactaacacagggccctctagtcctactctctcagggggtctggcctctattgtctccttctcttgaccatcagagaccttgtccttgctgaattcaccctgaaggacaatcaaggctggtatgagcacagtggaaggctgaagataggggttggcaag

SEQ ID NO: 612013 - DNA, 379 bp, Homo sapiens
aattggttatttctcactgaagtcctaaaaattcttttttaaaaattcatttgagcttagtgcctttattatcatgcattttagacttgatcatcatcagtgttccctggcacaggtatcttataatatatagaaatgaaatgattttttaaactctgtaaaaattttctttttttttttttcttttgataaggcgtcttgctcttgtcgctcaggctggagtgcaatggcgcgatctttgctcactgcaacctccgcctcccaggttccaacaattctcctgcccccacctcctgagtagctgggattacaggcaccctcccccatgctgccaagttgtagctatagctacaaataaaaaaaaaccttgttttccaga

SEQ ID NO: 612014 - DNA, 974 bp, Homo sapiens
caagctcctgcgaagggctaactcgggacgtgaacaggtggccatgactgcttgcaacggttgccgacctcgtacatagttccgcacggagtccccgagaaagccaggcatgacccgggacaacccggttcaagcaccaaggaccagcgacttgtggccacccgaccgctgccggtgcccagcaactgcccggaagccatgatcagcgtcatcgccaatccggataatgccaccatccccatcacagcagaagcttgttcaagaagcatggagtgtacaaccccaacgaaatcttcggcgtgacgaccctggacatcgtcagagccaacacctttgtctcgcagagctgaagggtttggatccgagctcgagtcaacgtccctgtcattggtggccatgctgggaagaccagtcatccccctgagtctctcagtgcacccctcaaggtggactttcctccaggaccagctgacagcactcactgggtcggatccaggagggccggcacggaggtggtcaaggctgaaacgccggagcaggctcttgccaccgctctccagtggcgtatgcgcggcgacccgctttagtcttctcccttgtggactgcaatgaactggaaaggaaggtgtatgtggaatagattccttcgttaagtcacaggaaacggaatgtacctacttctccacacacgctgctgcgttgggagaagagggcatcgagaagaaccatgggcatgcggacaaagtgctcgctgcttgttgagcgagaagactgatctcggatgccatccccgagctgaaggcctccatcaagaagggggaagtatttcgtgagagaccactgaagtgagccgctgtgacgggaggccagtttccttaatttatgaaggcatcatgtcactgcaagccgtgcagataaactttgtatttaattgctttggtgatgattactatacgacaggtcatgccttccaa

SEQ ID NO: 612015 - DNA, 437 bp, Homo sapiens
ggaggacaagagcagcccacagatgtgcaagtgaacttttctagagaacacatcactctgacaggccacatcagtctatgtagccctttctgaacacctaaaagaagtctaaactagcagtcgggaggctcagactgcataacgtaactctgatccaccaggaaagttccagaaactacttcagtagaaaggtagatcggaaaaccctctgaaacaagaacatgtacaaggagcttcggaggcaaatccccgatcacaagccagtcctccaggcggtgcagtgcagagacacgtcaaatctctcgttgagaaagcggctgcggattcgtaagcatatcctcccaagataagccgagattaggccctgataagcaggtcctatcagatagtctaatcagcatatcaccatacggctgggaacaccaatgtcatctcct

SEQ ID NO: 612016 - DNA, 680 bp, Homo sapiens
gatgtcctccttgctctcgccctactctttctggtgttagatcgagcaaccctctaaaagcagtttagagtggtaaaaaaaaaaaaaacacaccaaacgctcgcgccacaaaagggatgaaatttcttctggacatcctcctgcttctcccgttactgatcgtctgctccctagagtccttcgtgaacgctttttattcctaagaggagaacaatcacatcaccggcgaaatcgtgctgattccatgcgagctgccccatggcacatcgcggcgcactgactgcctatgaatttgctaaaccttaaaagcaacgctggttctctgggatataaatacagcactggccttgacaggaaacagctgccaaatgcaagggacctgggtgccaaggtttcatacctttggtggtaagactgcagcaaccgagaagatatttaccaggctctgcaccggacggctgacggccggaactttggcagaatgctaggtatcccagaacctacatgctgggcgtaaactaatacactccagattctgtgtgcatacaacaagacgcctccagatccgcaacgacttttgacggtcacatggtactttgccacaatttctggcactaccaccggccattccttccctgccaatggccgaagaaataccccgtgccatatcgccccagtgc

SEQ ID NO: 612017 - DNA, 115 bp, Homo sapiens
tggatgggttatcaattcacacagtaagaagcctgctctatgtgccaggttgatccctacttcttctgagtcccctgattgcctgtacctttgaaattatcaataaagtttaaaa

SEQ ID NO: 612018 - DNA, 123 bp, Homo sapiens
cttactatggaggatcagagcacagacactctcattaattgcagttaatgatgaaaagagtgcagcagtgcgcggtgctcatgcctgtaatcccagcactttgggaggccgaggcgggcggat

SEQ ID NO: 612019 - DNA, 1188 bp, Homo sapiens
tgttgttatgtgtggtgggtggggtggagaggggggggagaggggaggggggggagagtgaggagacatcgtgtgttcaaaaagagagaagagagggaggggggggggggagagagagagagatatgacagaagagagagagggggtggagaggggcggcgcgcggcagcgagaagagagcagaggcgggggaggccgcgcgaagagacgagagcaggcgcgcggggtgcgcctactctcgcgagcagagagagcgcgcgcgagagaagaggtcgtgtgtggggggaaagaaaagaagcaagtacgaagtaatctctcccacgcgcgagagagaagagagaaagagagagagagaagagagacgagagagtgatagatagcgtggaggggcggagaggagagggggaggcgggcaccagtgtgtgtggggcgacgcggccgcgaggagaagagaaacagcggtgggtggagcaaacaatagaggcgacgggaagagagagcagagagacccacactcgacaatagaaggcgtgcggagcgaaaaaaaaaaaaaacgagaacaagaactagtagagctgagacagccagagacgagacaacaaatagctgctgcgatgaagagagaggtgaaggaggaggaacaaaacaagagaggagagagatgagccgcggagcgacgagagaagaggagaaacaaggcgaggagagacgagacacgcacatcagagacgaggcacgcgcacagcgtgagccgaaaagcatacaaaacgcagcacgcgaccacaacagcagacgaagcgttgcacccaataacaagcaaagccgggcgaggaccaccacacacggagagagacacagctaaagaacgaacaaatcagacagagcgagtggcgtgagacaccaaaaacagaacagaaatgaagagcacaagaaagagaacgagaacaagaccaacacttaaaacaccaacgaactgaggagagcgaaccgcaggaggagagcaagacgacgagaaggagctgagacacggacacagaccgtcaaacaaaaacaagagtacgacaacaccagacggagacgatccaccaaccaccagcgatccgaggacaggacgaagacacaacaaccaggaggagcgaaaacagagaaacgacggagaagagagatggcggagaggaccaagagagc

SEQ ID NO: 612020 - DNA, 185 bp, Homo sapiens
gtgactccaggattacttattcgtgttgcactttccttcaagtattctcaagtcagtgtacaggtaagccctggttgctccacccactcccaggtagagcaaagagccttcatacatctcaagttgggggacaaaaaagggggaagggggggcacgaaggctcatcattcaaaataaaacaaaat

SEQ ID NO: 612021 - DNA, 355 bp, Homo sapiens
  misc_feature (22)..(22): n is a, c, g, or t
  misc_feature (129)..(129): n is a, c, g, or t
  misc_feature (132)..(132): n is a, c, g, or t
  misc_feature (210)..(210): n is a, c, g, or t
aggttcagactcttggagccanaagctacatgacccctaaacgatggagtttcgctcttgttgcccaagctggagtgcaatggtgccatctcagctcactgcaacctccacctcctgggttcaagcaantcncctgcctcagcctcccaagtagctagtattacaggcacctgccaccacagcaggctaatttttgtattttcggtaganacaggtttcaccatgctgaccaggctagtcttgaactcctgaccgggtgatctgcctgcctcggcctcaaagtgctggaattgcaggcgtgagccactgtgcctggccagttgtaactatttatcactgtctggactcataaaca

SEQ ID NO: 612022 - DNA, 1029 bp, Homo sapiens
gaatatttgctgacatgctctacaaccttagctgcaggctcttttcctcatttcagggaatgttcgtgcgtctcttgacccatccatcttgtcgtgtcgagctggtaagtctcctgcatatgtcccttctctactcactgtactgctttgaatatcgttggttcaataaaggaattgacaagtgcaccagcggtttgtcgtacacactagaaagggaagtagggccttactatcgtttgggttgggtttgcccttggattattctcacaggaagtgcaagtcctcatatatatatcaagtgagcgtagcgctttgtctctagtcctcttgcctgttattcagttattcaagcgccagatgaaggcaaagatccctggcaaacgcatatctcttccgagttgccgccttcttctccttggtggggcttcttaagcaacagagtcttccacatagacagtctacctgcagtcggacctgagcagcatctagttctgcagagaagcttcccttcaccgcatccgtcgacgtgccaaggtgaaggcttagtgcaggtcactgagtttgcctgcatccaaaggtggatgggcgggatttggcaagaagctgtgggcagcaacttttcccgtgtttcaactcccggcctgcctagggaagggaggacccggtctgccaaggggccctctgcgtattcccttctctctgatggaattgaaatttagtctctggtgcacgtgagggagaatgttcctgacaaccagtgtgtgaattttaacatcaccgtgagtctggaagacacacggtttacttgagtaatttagcattgccagtcctgtgctgagatggacacttgtttctctgggcattacctcacctgctccggctttaccctggatatggttggatcacggggttgcacagcactggcggtgaaaaacatggtggggaggtcagccgagctactagggtgtccagggctgtgcgaaacaaggcgggagagctgccaacagtcgccagcagcacacataacaa

SEQ ID NO: 612023 - DNA, 591 bp, Homo sapiens
accacagtaacaattattgggtaaatatggaaatcgcctgtcttaaagccctttaggtacaaaggccaagtgagagaaatgaaagcctctactcacacaagttatcatgattgcgcatggatatgttcagaatgagtattttcaaatccctttaacaaaagctgattgcagaacgaaaagcccaacagcagcaattaaattacgtttggaataaaatcatttggcctaattttcataacccgagatttcagagaataccaccacccatgccaggtgtaccagacaatccaattgtctgttttatccgtgtaggggccgctgtagtatacaccattcaggtttgcagagtgacacctgttaaccaccgagccagactgatcttgttctgcgcagttcccttcatagttgtcatgatctctgtcccacgtgctgaatttcattctttggtgactagcccaccgctgcacctcaggatgaaacttccccgcaagggaatctccagctgtccagaatatcccaatatcgctcgaaaatctctaatcctccttgattctcactctgtgatccgctcactctctcctcggtcaattc

SEQ ID NO: 612024 - DNA, 326 bp, Homo sapiens
  misc_feature (266)..(267): n is a, c, g, or t
  misc_feature (296)..(296): n is a, c, g, or t
actagaccacggtttggctcactgagcaaacaggtctgaaccagattgggctcaaatcttttttttctttttcttttgttgtttttggagatagggtctagctttgtagcccaggctggaatgcaggggcaggatcgcagctcacggcaaccagccaaccggggactaaactagtccagggttggctggcccgaattggaccaacccgggggctagtataggctagttaacctttcgtttatggctacaggttaatcacggcggtnnccggtgggggtgtggctaggcaaagcgtntggagctgcatggctgcgtgcttgatgctt

SEQ ID NO: 612025 - DNA, 388 bp, Homo sapiens
ggtcgacggtggaattagggctaggctgccagagaatgtgccaatgagcatcacccgtcatgtgtgagagagcagaagatggcctgtgagccagtgctctagaaaacatcatgtaggaggccggtcacggtggctcacgcctgtagtcccagcactttgggaggccgaggtggatggatcaggagatcgggaccatcctggccaacgtggtgaaattccacctctactgaaaatgcaagaattagctgggcgtggtggtgcgcgcctgtagtcctagctgctcgggaggctgaggcgggagaatcacttgaacctgggaggcagaggttgcagtgagtcacgattatgccactgtactctagcctaggcaataaagcaagactgtcac

SEQ ID NO: 612026 - DNA, 243 bp, Homo sapiens
gaagcctaatcagccccccctgttttcccctgaaaaatcctctttttttggggtttttctttcttttttttttgattttgccctgggcggtgacgtcacccctgtccaggatccccagggggggtgtccaatgcttttgaaattgtgttgaattgtatgctttttccctttttataaataaacctgtaaaaatgtttccaaaaaataattaaataaattaattcgaagaatttgtccggccca

SEQ ID NO: 612027 - DNA, 154 bp, Homo sapiens
tcgtcgaccgctgaacttgactgtctggaggaagcatataccacagaacattggctagtcaggatatacaaggtaagccaacaggaggctgcggaagcagccctggtgcttaaaaatgggccacatgtttctaacataagcggtcgacgggttc

SEQ ID NO: 612028 - DNA, 1400 bp, Homo sapiens
catgtcaagaattttctggaaattactccctttcacatggttgacacatcattaagttgacccagttctccatagctctatccactagcaatggtttgccagataccccaaaccatcactatgatcaacaatcacaatgtgcatacttttgacccatgtaatttacctcaaacagttagtcaattgcgtagcacagagtcactgccattgcacattcttggtttcaccaacctactctcagtattcccaatgcaccagtcaaccaactccaccatcaattcctatcattagtttagcaggcaaagaggcccataaatcacttctagaatccgtccggacactcaacgatacatagggaatcaacggcacacagcaacagttatcgacatggtcggatgatcagccactaacacaaaccgcaggagacgaggtgcatacacgcggacgtaggacctgacagccgacttgatgactagaccgaaaaacccaacgggaccacactacctaagagaccacaccacggcagggcatccaacaaaactccaccccatatagcgaccgtgaccacaaacctccggacgcgacccaccctccctccctacaacctcgacccacgaacaaaaccgaactcacatacaatcctccaccatgggccaccggaacaaccaagagcaccaccacgaccatagcatactccgggccacaagcacatcaaacctaataccacaaccgaacagctgcacatgcatcgcacaacgccatccaatatcccaccatgacattggcaatacataacgatcacgaaaactaggcacaaggcactcacggcacacatagggatctacccataacaatcggccgatcacttgtctacacagaatgaccacatccaactagccgcaactaacaccagagcgccgacccagctacagaatcacgaaaacaattatgcaccgcacccacagggacaaccgcccataagcgaacacgacacggaacacacatgtaaacacgaggacaccaacccaccacacgcgactaacacacaaccgacgacccacattaccgaacggctcaacaacaccagcacacaaaacaagaactggacacaacaccagtagaccatcaacgaacactggtacgccacaatgtaacgacacaagaacaagtaaacaccaaaacagacaagacacaataaccgacaacaatacacagaaaacaagtaagaacaaaaaaaataagccgagacacacacataaacgacaccaacaaaccatctcgaagcagcgacgtgacgacgacgaacacaaacacactggcataagtgtatagctgtgaagtcggccaaatgacagaagcacaaagcagcacgagcaatgtgcacgagacacacgcgcaga

SEQ ID NO: 612029 - DNA, 315 bp, Homo sapiens
  misc_feature (116)..(116): n is a, c, g, or t
  misc_feature (140)..(140): n is a, c, g, or t
  misc_feature (170)..(170): n is a, c, g, or t
  misc_feature (284)..(284): n is a, c, g, or t
  misc_feature (302)..(302): n is a, c, g, or t
  misc_feature (312)..(312): n is a, c, g, or t
gctggcggtaacgtccagcaccactaaatcatcatacggatgggcgcgcatccacaggaacaacgactcttcatcctgctcaaccgcttcatcgttgaagaaggctaacgcgcggntggcgtccagccgtcatagctcancaggctgcggcggctgtccaccacacctgncagcacaatctcaaagccggtacgtgccgaaagcgtgctctgctcacgggcgaacagttccagccaacgggaaccgatattgcccttaccgaacaataccaggccgatgcgttnttctgcgcggaagacggncttatgcagnccc

SEQ ID NO: 612030 - DNA, 210 bp, Homo sapiens
  misc_feature (162)..(162): n is a, c, g, or t
caccgaaaagcaccaatgattgaatgacatttctcaaaagaagatattccagtggccaagaaacatatgaaaaaaatggtcagcatcactaatcattaagcgaaacgcagatgagagccacaatgagataccatcttactcccacaagaatgggcattgatnaaaattcagagaaaaacatagacgttggtgtggatgcggtgcagatgg

SEQ ID NO: 612031 - DNA, 179 bp, Homo sapiens
ttggaggtggggttgagtgaactgagattgtgccactgttgtccaggctggtcttgaattcctggcctcaagagatccgctggctttggcctctccgagtgctgggattacaggtacaagccactactcgccggccagtttttttttttttttttttggaaacgggttttgcttttgtc

SEQ ID NO: 612032 - DNA, 185 bp, Homo sapiens
atcagaacagacagacagtgggatgtgagtgtggaccacatgtcagatccccttctgtagagttggacccctcgacccctcctgggccacatccagatcaacgccacaaattcctcaacgccccctacagtcctactggaaatgcctctcattggcacccctagccccacacaggctagctagga

SEQ ID NO: 612033 - DNA, 206 bp, Homo sapiens
tctgtttcatacgcagagagcggtttacttcactagaaagtgtactatgtaagcaagctagtcattaagatgtacaccaatcctttatctacatgaagtccgggagagatgttatctttaatccattcatatatcgtttgaggggatggatccaactttatttgcttcaacagtcccttgtgcaatccgaggagtgggaataagaa

SEQ ID NO: 612034 - DNA, 355 bp, Homo sapiens
cacttatctgtgagtatggtggtagcctttttattttattttattttgagagagggtctcactttgtcacccaagatggagtgcagtcatgtgatcagagctcactgaagccttcacgtactgtgctcaagcgattctcccacctcagtctcctgagtagcagggactgcaagtgcatgacaccatactagctaatttttgtaaagatggggtttcaccatgttgccctggctgatctccatctcctggactcaagagatccagcactttgggaggccgaggcggcagatcacgaggtcaggagatcgagaccatcctggctaacacagtgaaaccccgtctctactaaaaatac

SEQ ID NO: 612035 - DNA, 667 bp, Homo sapiens
  misc_feature (349)..(349): n is a, c, g, or t
tgagtcatggcacagcgtcgcactgtcgtagtcacgctgcttcattagtgagctctcaggttcagccgtgtcgacagtctgtctgtcaccgacataccgcccataagctatgcttgccgcccatattctacatgcagacgacgcagtgagcgcttgaggctgatagtcgtgcttgcagagttacgatgttgcctcgctgatgttggcgtgagtcaggctagatagaccatcgtgggtgtcctcacgtcggcacagtcaccgatggcgtagacgttgctgtggccgtccacctgcaggtgctcgttcactctcagagcaccgctgctggctagtctgctctcgcacgctntacggtaggcgaggctgttgatcgtgatgcgcgtgcatagaatcactaggttggtggccacctctgtgcctgtgtccgtctgcactctgatgtactctcgatactcattgagaggcagctcctccagattgctcaccggctcactcagcagcagctgcacgcccttccgaagcaggttctccttcacttcctgccggacggagggcaggagctccttgtcagcaatctctgctgccatctccactgcagccgagcctcctcccaccaccacgatgaaccgtgagcgctggacctcgccacccagcagcagcctcgtgc

SEQ ID NO: 612036 - DNA, 1212 bp, Homo sapiens
ggagagagagagaactagtctcgagttttttttttttcttattggcttcaaaaagctttattcccattgggtccaaggcttgtaaggatagttaaaaaagctgcctatgggcctggagggaaaggcttaggcaaaagcccatattcattttgcaaggggccctttcagaaagttcgcgtgggcctcaaaaggcttctatagctcggtgcttgagaagttgacgccttttcagaaaagaatacttgcgcccaagccccgaaacctctcggaggtccacaccgcagagcccgtgtgtggagagagtgtgtggctcagaggtgtgagctccaccccatattcttttcctgtgacactaagaagctttctccactgtctaccactcgaactcctatgagaggaaaaaagacgctgcaaaggatctacttcttcgacgaggaagcaggaacaagtcgctcccacacgacggagcaggacagctgagcagagaagtactcgccgcagtgcgacgagtgccacacgaaaaaaagccacgccaagaggagggccccatcattgacgcaagacgaatatccttccgcacaaaagaaaaaaatgacggaggcgtaaccgcccgtggcggtatcactacacgacagtcagttcttgtaatactacttatcactaccgccgcaagcaggagccccccccaagttgcgcaccaacgacgacgtcgttttacatacacaacgatcggaggcagcacgatgttactggagtagggggaggcagatgacttgcttatgtaatacaacccgacccgcccacccacgaacagcaatagcattcacttaaatcacttacttatgatttcacttacacagaacggccgctcgtgttttgtgctgggctagcttcttttcgttaacacagagattagtatcaaacaaaataagtgattcgaatactgtatcccgcacgtagggtttcgtgtcgaagacaacaacgaaacataagcaaaacgacaacttaatagtctaccgtccgggcacgcagggtgctactccgccccgacggacacgcacacatgataaatcgccaggactagtacacttagtactgaggaagaatgatattacctatacggttgtagaatgcggacaccgcaacatacatattcatcatcgcatttagatagaccagagcactcgactggaaccaaactaagactagcca

SEQ ID NO: 612037 - DNA, 131 bp, Homo sapiens
accatcgcttggttagaaaatctatcttcctctggaagaagtccttggcatcctcagcgtctcctcgtacatagtacccaggttcccacatcgatgagcacgtgttccacgatcatcgcagacttcccagg

SEQ ID NO: 612038 - DNA, 543 bp, Homo sapiens
  misc_feature (229)..(229): n is a, c, g, or t
  misc_feature (298)..(298): n is a, c, g, or t
  misc_feature (368)..(368): n is a, c, g, or t
ctgaagcaggccagcaatgttccctgactttaagaatattcctggatccatcggctaagctctattttagccccagccattgactgtaaatgttaaactctaaccaactttaatgtgatccatcatcagtcacctaaattttcagggacttctattattacattttcagaggtaactgacctcagaagagatttattctagttctaaacttgactgtaaacatttaacnaatacccaagcaagtactaggcaccatgcactgtttttgctactggggatactgtgggagaacaagacnacattcctgccatctcagagcttacattctagagaaagaggtaaaataagaaatttacttgtggtgaagngatctacatactatggagtaaaataaagctgagagggggaacagggaatgacacgtggcagtggagttatggttttcaataatgtgctcacaagaggcctcactgggcaggtgacatttcagaaagacttgtagctcaagagatacagccgtcagatgatcagttgcgctacgtc

SEQ ID NO: 612039 - DNA, 107 bp, Homo sapiens
tcgttctagaggatccctccaagctccctaccagctccagagtggtggtttccagagccagaggaggatttagaagtggaggaagtggagggaccggagggtcctga

SEQ ID NO: 612040 - DNA, 564 bp, Homo sapiens
agggccactactcccattcatggattaatgggttagtagactaatgggttatcaggagatgaaactggtggctttatgctttataagaagaggaagagatggctgggcacagtggctcatgcctgtaatcccagcactttgggaggacaaggcaggtggatcacctgaggtcaagagttcaagaccaggcaggccaacatgatgtaaccccatctctattaaaaatacaaaattagccgggtgtggcggcacacgcctgtagtcccagctacttgggagggtgagacaggagaatcgcgtgaacccaggaggcataggctgcagtgagccgagagtgctactgcactccagcctgggcgagacagagtgagacaccatctcagaaaaaaaaaaaaaaaagaagaagaagaggaagagaggcctgaactagcatgatcaacctccttgccatgttacaccccatgccacagagtccctaccagcaaagagggctggcacaaatgcggcccctcaaccttggacttttcagccctcataactgttagaaataaattctttcccttt

SEQ ID NO: 612041 - DNA, 576 bp, Homo sapiens
cacgacacggaacgagcggcgacgccgagactcgcacgacgaagcgcgcgcgagcgaccatcgaacacccttgggacacgccccagagctcgaaagacgatccgacagggccgcgcgccattgacgcgggacacgcgaattcgggcataagggtggggggaggcacagataaagatattttctacggggaggctgcgtttaacataacacgtcaacatcacccaggaaaagagcacgacggaggagacgaacagcacgcgacgaggacagccccggaagcagcagacacgcgcccacccacagaggccccccaccccacgggacgcagagcaacagtcaggcgaggcgcacacccgaggccggccacgcgcccaaagaccaacgcaagcgcgcccgagggcgcgcccccgagagcgccgacaagaacccgacacggaggaacaccgccaaggacacagcgaggcagagcaggcgccagaagcgcccggcagcgcgcgcaaccaaattatggaaacccagacgaaaagaaaccagaaacaaaggatgaaggcaagaacaacagagcgcgaccgggct

SEQ ID NO: 612042 - DNA, 110 bp, Homo sapiens
ggcaatgtggtagtttacataaactaagtgaagagcccctgattcctcatcatcattcatcctcgaaaaaagtttgatcatgatgcttcaaattccaagggaaatatgaa

SEQ ID NO: 612043 - DNA, 379 bp, Homo sapiens
gaaaaactgaacatttcaagaaataccacaataccaaaaaaagcatttggtatagtttatctcctcaccagttgtgagccttttggttgtttccaccttttgggtactgtgaatagtgttgctgtgaaggattcacaaatacacatctgtttgaatacgtggttttatttcttcactgtatattcctaggagtggaattgctgtgtcatatgataatttctctgtctttgtgaggaaacattgaactgcttttcacaaaagctgtaccattttactttcccagcggcgtatgagggttccaatttgtccacatccttgccatacttattttttgttttttttcattataggcaccctcccgccctccacccctcccaaa

SEQ ID NO: 612044 - DNA, 952 bp, Homo sapiens
agagcacccttctcatgagctcatcttcatcttcacaggtacgaaaatcgttgtcgctcttaatggttatgacatctggaaggttatcccaaggaaaatatctgaacctgggtcttccacaaagaagtgatgaagatacgtgcggctgtccatcgtttcgaggatacatggcaacgactctcctgtgctcaggaaaccaggtctggagatatgatgatactaccccatattatggatcacgagctatccgagattaactagacgaagacttcccaggaacttggtgactaaagtagatgctgtctatgagaaaaatggttatatctattttttgcaacggacccatacagttcgaatacagcatctgggaacgtaatgcgtatatgttgcgcgtacagtgccatgcatagatgccactttgtgtggtgtcaagtggtctttttgaacaacctggtgatctaaatcctgaagagcatttggggtaatacttccagaagtgcggggtaggggaagaagagctatcaggagaaagcttggttgctgtgaaccaagcttcagtaagttatctgtagaatatgtagtatctatatgactattgcgtggtggaaccgacttgaagaatgttgcgagtcactgaactggaggcctcctaaagaggcatctgatcttgctgctgtacaaaagccatggtggatgatacttccatcacccaaatgggggcctgggcgtcaagagagctattggacattttttgtcagggactacacgggctaaggagagacaggggtatgagaaatttttcacggtaacatggacaaggcctcgccgagcgcctatataaaccagcagtggaaatgcgtctcaaaataatgggggagaggaggtctccacacaaataaagaagggaaatgatgggcgtttggacacatcatatcgagagaaaggagcacat

SEQ ID NO: 612045 - DNA, 319 bp, Homo sapiens
  misc_feature (57)..(57): n is a, c, g, or t
caaaaggctaacttgaaaggtttggggccttgttccccaaagggtccccagggactntgcagtgtccttggcaaatcccccctgtactcaatgccctacatttttttttgtggtctctcccctggcttgcttcatggcccctgaaccaatccctttgtatgctatgctccccctgtgatggaaaacaaaatgagtataactttttttatatccatattcagcctatataaagaatattttatgcatttatgacgggcttactactccagggcatttgtcattagttttcatgttaatacaggccatttattttttggta

SEQ ID NO: 612046 - DNA, 241 bp, Homo sapiens
acccccctgtgcaattgagagagctcaacgtcttcatctgattgtcatatacaagttcaccccaccagctggtctaatgtctcgtgggtgcgtaaatggaaaatctgttcaccacatgtagtgtctacgtagatagtctatcctgcccagggtaagaccactcttgttcctgcaaggttccgatctagctatccccattcgctgcccgtcatactgtaggacagtgtacagacttgcgagg

SEQ ID NO: 612047 - DNA, 1209 bp, Homo sapiens
  misc_feature (747)..(747): n is a, c, g, or t
  misc_feature (750)..(750): n is a, c, g, or t
  misc_feature (756)..(757): n is a, c, g, or t
  misc_feature (763)..(764): n is a, c, g, or t
  misc_feature (793)..(793): n is a, c, g, or t
  misc_feature (797)..(797): n is a, c, g, or t
  misc_feature (806)..(806): n is a, c, g, or t
  misc_feature (817)..(817): n is a, c, g, or t
gtgcgagagttcaaacactaggctagtagaggctggtgttaatcgagaggggttggtggtcctctctcggctcctcgcggctcgcggcggccgacggttcctgggacacctgcttgcttggcccgtccggcggctcagggcttctctgctgcgctcccggttcgctggacgggaagaagggctgggccgtcccgtcccgtccccatcggaaccccaagtctgcgccgctgacccgtcgcagggcgagatgagcgcggacgcagcgtgccgtgggctgcccctgcccctggctctgctgcctggagaagggtccgaacggctacggcttccacctgcacggggagaagggcaagttgggccagtacatccggcttggtggagcccggctcgccggccgagaaggcggggctgctggcgggggaccggctggtggaggtgaacggcgaaaacgtggagaaggagacccaccagcaggtggtgagccgcatccgcgccgcactcaacgccgtgcgcctgcgtggtggtcgacccctgagacggaccgagcagttgcagaagctcggctgtccaggtccgagaggagctgcttgcgcgcccaggaagcgccggggcaggccgaagcctgccggccgtcgccgaggttgcatgggggctggcaacgaaaattgagcctcgcgaggccgacaagagccacccggagcagcgcgagcttcggcctcggctctgtaccatgaagaagggccccantgnctatgnnttcaanntgcacagcgacaattccaagccaggccanttcntccggtcantggacccagantccccggctgaggcttcaggggctccggtggcccaggatcgcattgtggaggtgaacggggtctgcattggaggggaaagcagatgggggaccgtggtgtccgcatcagggtggcgggtgacgagaaccaagctggtggtggtggacagggaaactgacgagttcttccagaacatgcagagtgatcccactctcaggagcacctgattggtccctgcctgttccttcaccaaatgcggagatacagtaaggagaacgagtaggtgaacgccttgcgaggcggcttggcagaggcccaagccaagccctgtaaatcggcttcatgacccaggagtcgttcatcccagacggccccaaaaggcatcaatgccttgttactcttctagaccgac

SEQ ID NO: 612048 - DNA, 411 bp, Homo sapiens
  misc_feature (29)..(29): n is a, c, g, or t
  misc_feature (45)..(45): n is a, c, g, or t
  misc_feature (56)..(56): n is a, c, g, or t
  misc_feature (234)..(234): n is a, c, g, or t
  misc_feature (352)..(353): n is a, c, g, or t
  misc_feature (361)..(362): n is a, c, g, or t
cccttccttaaaaaacttctttctgaaancgtggaatttaaaccnctccgcccaantcccaaagtgctgtcccggacctgcagggtagcttaacggctgaagatgtaattctcgacaaaaggtgacaccccgcgatgtagtcaagggccgaacacgttggttttcttccctggccttttgggagagtcgcagctgagggaagcgcttgatcctcggtgagatgggggttgatgncgtatttgcccctttgggagtgggaagcgagtaccggaggccgcgggggttcagcaccttggggttgcgggagaagtcatgtgcagggtgccgtcgtcgctgacggtacggacacttnnttcagggnnttgtcccacagtgtgagcagaacactcggctcatgtcagacgttgtctt

SEQ ID NO: 612049 - DNA, 606 bp, Homo sapiens
tgacggtgcttccatgtcccgcggcctgccttgcctctgtacccgtgaggggtggcaggagctgagtctccccttcctcctgtgcctcccttcccccaccaacagctgctatgggggggctaaattatctctattttgtaagaggatctatatttgtagggttcggggccagccgggtccctatgtctgtgtataaactgtacagacgtgaaaaacaaaaaaaaaaaaaaaaaaaaaaaaaaaggccaaatccggctaacccgcgtttttgttagaggggtggccccccatggggggcggcgcttaaataaagccaggccgactggcgggtgcttaaacacccggctagcacagtgggacaactgggctcgcgtgtgagcccttgtgacaaggccccccatccacctgtggtgggtgtgaccaatcctgggccagacactaccactcacggagcattttcagcgccgccagggggtgatttattagacttcacgagcgtgctataagtggtggttaccgcatacggtgactatggctgcctggcgtaaacatttgggatcatcagcgtttgccttcggacagctcttctcacggtgggcctggtac

SEQ ID NO: 612050 - DNA, 448 bp, Homo sapiens
ctctcatacaaagtcatgtgattgcagagcccgcatcctgtccatacaagcctagcaagccactcagcctctcatcctgtctcctctcaaagtggggataatcgcagccgtgcagcgttgttgaaagaatacataaaagccgggcacggtggctcacacctgtaatctcagcactttgggaggatcacttgagcccaggagttcgagaccagcctaaacaagagtgagactaacccccgatctctacaaaaaaaaaaaaacaaaaaacaaactagccaggcatggtgacagtgtggtctcatttactcgggaggctgaggcaggaggatggcttgagcccaggaggtcaaggctgcagagagccatgatggtaccactgcactccagcctgggcaacaaaacgagaccttgcctcaaaaaaaataaagcatctaggccgggcgcaaaa

SEQ ID NO: 612051 - DNA, 141 bp, Homo sapiens
  misc_feature (37)..(37): n is a, c, g, or t
ggctgatggggggtgcctgtagctgccagctacctgnaatgctgaggcgggagaatgcttgaacctgggaggcagaggctccagtgagcccaagatgcgccattgcacccagccagggcaacaagactgaaattccacgtt

SEQ ID NO: 612052 - DNA, 110 bp, Homo sapiens
gtctttttttattccccgttccggacgctgcatcccgcaatctgcggcatgacctcacgcatcagatcgagaaacttacgcaaccgcgtcggatagtagcgcgcccaggg

SEQ ID NO: 612053 - DNA, 1631 bp, Homo sapiens
ggcacgagggcttcgcgcccgccaagtgggcccagccctggctcctgcgccctgtggcggccacctccatcgccttgctttcccttcgggcactgggggtcgctcagggcgggacatgggtgaacggaagtggaagctgtgagcgtcgcagcccgaggcgccgaggcctgaggcgccgtcggggccaccgcgacgctcgcatggagagcgctgggcgctgggctgtgcaccgacggctaacctggacccacggtctctgcggggcgggagctttgcagaaccgactggccgactggggcgcgggaacatgaggcttggctaggagcccgctgcgggccaggcgcgcggtgcgcaggcatacccgggtcgcgggtgaacaccgcggagccccgggacttgcctgtcgttgctggtggcggcatggtcttctgtctgtcgagcgaggagccgcgccgcccgctgcgaagcgacatggtccacttccaggcctcggaagtccagcagctgctacacaacaagttcgtggtcatcttgggggactccattcagagggctgtgtacaaggacctggtgctcttgctccagaaagactcactgctcacagctgcccagctgaaagccaagggggagctgagctttgaacaggaccagctggtggctgggggccagctgggcgagctgcacaacgggacacagtatcgtgaggtccgccagttctgctcgggctctggccaccaccttgtgcgcttctacttcctcactcgtgtttactccgagtaccttgaggatgttctggaagagctgacatatggaccttcccaccccatgaattcttcaactataatccagtggaggacttctcgatgccaccccacttaggatgtggccctggagtgaactttgtgcctggccctctgccacctccaatccctggccctaatccccatggtcagcactggggcccagtggtccaccgggggatgccactgctttgatgtcctagacctccactttcacttccggcatgcagtacagcaccgtcatcgggatggtgtccactgggaccagcatgcacaccgccacctctcacacctgcttctgacccatgtggctgacgcctggggcgtggagctgcccaagcgtggctatccccctgacccgtggattgaggactgggcagagatgaatcatccattccagggaagccataggcagaccccagacttcggggagcacctggccttgctcccacccccaccttcttctttgcctcctcccatgccttttccctacccgcttcctcagccctcgccacctcccctcttcccacccctgccccaggataccccttttttcccaggccagcccttcccaccccatgtgcggagaatgggggggccctgcaggcagcggctcagacactcagagagactgatccacacatacaaactggacagacggcctcctgcccattcggggacatggcctgggtagactggatcttgggctgggactggatgtgccaatggcccttcagggcctgcctggcacctcaggtactgggctagggtgtctgctatgcctggtattgttcttgtccattgctgtcaccaataaaggcatggaagaac

SEQ ID NO: 612054 - DNA, 85 bp, Homo sapiens
aaaaaagttttaatgtattggagaagttttaaaaacccagaaaaacgctttttttttttaataaagaagaaatttaaaatcaaaa

SEQ ID NO: 612055 - DNA, 1926 bp, Homo sapiens
  misc_feature (443)..(443): n is a, c, g, or t
  misc_feature (446)..(446): n is a, c, g, or t
  misc_feature (456)..(457): n is a, c, g, or t
  misc_feature (482)..(483): n is a, c, g, or t
  misc_feature (491)..(491): n is a, c, g, or t
  misc_feature (501)..(502): n is a, c, g, or t
ggcacgagggcttcgcgcccgccaagtgggcccagccctggctcctgcgccctgtggcggccacctccatcgccttgctttcccttcgggcactgggggtcgctcagggcgggacatgggtgaacggaagtggaagctgtgagcgtcgcagcccgaggcgccgaggcctgaggcgccgtcggggccaccgcgacgctcgcatggagagcgctgggcgctgggctgtgcaccgacggctaacctggacccacggtctctgcggggcgggagctttgcagaaccgactggccgactggggcgcgggaacatgaggcttggctaggagcccgctgcgggccaggcgcgcggtgcgcaggcatacccgggtcgcgggtgaacaccgcggagccccgggacttggtaattggcgcgagcgggtgcgcgcatgcgcgggacggctggcnggncacgtggcgnnggcgcagggcggcgccgcgcggganngctccccnagtgccctgnnaggcctgcttggctggacggacccccttgcctctggtacccacagtgtgaccaaggtctggtggccaccatgtggctcttgctgccgtcaccatcctccctttagcattgagcagccccggaggggctagcctgagggctgacctgccagagttcgccaccatcggcgctgcttagtggctctcccttgcagcctgtcgttgctggtggcggcatggtcttctgtctgtcgagcgaggagccgcgccgcccgctgcgaagcgacatggtccacttccaggcctcggaagtccagcagctgctacacaacaagttcgtggtcatcttgggggactccattcagagggctgtgtacaaggacctggtgctcttgctccagaaagactcactgctcacagctgcccagctgaaagccaagggggagctgagctttgaacaggaccagctggtggctgggggccagctgggcgagctgcacaacgggacacagtatcgtgaggtccgccagttctgctcgggctctggccaccaccttgtgcgcttctacttcctcactcgtgtttactccgagtaccttgaggatgttctggaagagctgacatatggaccttcccaccccatgaattcttcaactataatccagtggaggacttctcgatgccaccccacttaggatgtggccctggagtgaactttgtgcctggccctctgccacctccaatccctggccctaatccccatggtcagcactggggcccagtggtccaccgggggatgccactgctttgatgtcctagacctccactttcacttccggcatgcagtacagcaccgtcatcgggatggtgtccactgggaccagcatgcacaccgccacctctcacacctgcttctgacccatgtggctgacgcctggggcgtggagctgcccaagcgtggctatccccctgacccgtggattgaggactgggcagagatgaatcatccattccagggaagccataggcagaccccagacttcggggagcacctggccttgctcccacccccaccttcttctttgcctcctcccatgccttttccctacccgcttcctcagccctcgccacctcccctcttcccacccctgccccaggataccccttttttcccaggccagcccttcccaccccatgtgcggagaatgggggggccctgcaggcagcggctcagacactcagagagactgatccacacatacaaactggacagacggcctcctgcccattcggggacatggcctgggtagactggatcttgggctgggactggatgtgccaatggcccttcagggcctgcctggcacctcaggtactgggctagggtgtctgctatgcctggtattgttcttgtccattgctgtcaccaataaaggcatggaagaac

SEQ ID NO: 612056 - DNA, 147 bp, Homo sapiens
aaaatctcgtataattatttaagacaagaaaacttccacgggtataatgtacaacgtaccttagagaccatgtgatatgtatacatagtctgaaaagtctttgtatttattcttgggaaataaggactacacactcaagggtaccga

SEQ ID NO: 612057 - DNA, 893 bp, Homo sapiens
  misc_feature (216)..(216): n is a, c, g, or t
tattggaccatcctggggtgttccccacaaagggggattgggcagggtcataggacaatagtggagggagggtcaccaaattaaccaagtgtaaacaagggctcctcgtggttttccctaggcaggaggacctcgtgccggcctctccgcaggtgtttgtggtgtctcccgtgggtatactgaagaattagggagtgtggtgagtgactctataanggagcattgcgtgccttcaagctctcgtggttctaaaaaagagccactattttgtgccaccgcccctttaaactccctattatacacccgtgagagtgtggcaccacaagccacgtagtgttctcagaagaagccacgaggggttgggggggatagaggctcaatagaactcaaaacgaggggtccccaagagggcgcagacagaagacaatattgttctctgatatgagatctacccgacgaacacacacacagaagaggtgtataaaaaagtgtcgctctctcgatgtgtctctataacagtgtacttgtctctataacgaacgagggaaccccacgaggagaacacccatctccgcgagaattttctcgcatacaagagctgcttattatcccccccacaacctattttttcgcccgccctatattatacactattaaatctccaccacagaaaaagaccccgggcaacaattggtggtctcacaactctgatgtgggggcccccccaaatattctctcaaaaatatagcaaaccccgttgagtagtgggggtgattaacaacacccgttccccacgaagagaagcaggaggcgttgttgtggagttgtcgccaccagagtagcacaagaaaggaaggggggccatacctctaatacgaaagtagtttttccgc

SEQ ID NO: 612058 - DNA, 495 bp, Homo sapiens
  misc_feature (53)..(53): n is a, c, g, or t
  misc_feature (104)..(104): n is a, c, g, or t
  misc_feature (397)..(397): n is a, c, g, or t
  misc_feature (416)..(416): n is a, c, g, or t
  misc_feature (437)..(437): n is a, c, g, or t
  misc_feature (450)..(450): n is a, c, g, or t
  misc_feature (467)..(467): n is a, c, g, or t
gtctaatgtgggagacaaatagggatcaccaggctaatggggggcgtcaagcntttctctccctcctatcttggcctgttcttttttgttttttgagacggagntacatcctgttgcccagggtggagtgcagtggcatgatcttggctcactgcaacttccacctctgggatcaagggattctcctgcctcagcctcttgagtagctgggattacaggcgcccaccaccacagcctgctaatttttgtatttttagtagagatggggtttcaccatgttggccaggctggtctcaaactcctggactcgaagtgatccgcccaccttggcctcccaaagcgttggggattataggcatgagccatgtgcctgggtccaccttgggcctgtttttgntttttcttttccttggggnttcagcaatttcaaatttctnagttggttatttnggttggaagcagttagncccaacccccagttttaggggggaaagg

SEQ ID NO: 612059 - DNA, 243 bp, Homo sapiens
gcacatgtcactactggggaggtgttcctgctctaagcttcccacggaatgaggcgccctcctttaccctatcctgatcaatcacctacctccttccgttgaagcactattatttattccttccgcttgtctgcctgcagcagtacctactgtcaacatagtgtaaatggttcctcaaaagcttaccagtgtggacttggtgttagccacgcttgtttactcatacagtacgttgtcctgttt

SEQ ID NO: 612060 - DNA, 1054 bp, Homo sapiens
  misc_feature (3)..(3): n is a, c, g, or t
  misc_feature (47)..(47): n is a, c, g, or t
  misc_feature (142)..(142): n is a, c, g, or t
  misc_feature (329)..(329): n is a, c, g, or t
  misc_feature (378)..(378): n is a, c, g, or t
  misc_feature (381)..(381): n is a, c, g, or t
  misc_feature (654)..(654): n is a, c, g, or t
  misc_feature (810)..(810): n is a, c, g, or t
  misc_feature (815)..(815): n is a, c, g, or t
  misc_feature (889)..(889): n is a, c, g, or t
  misc_feature (928)..(928): n is a, c, g, or t
  misc_feature (947)..(947): n is a, c, g, or t
  misc_feature (989)..(989): n is a, c, g, or t
aanaagagaatctccaagaagaagactcatgtgaagaaatgcacccncaatgcagtgttcaatgagctgcttgtctttgatattccttgtgagggccttgaagatataagtgttgaatttttggttttggattctgaaaggnggtcccgaaatgaggtaatcgggcagttagtcttgcgtgcagcagcagaaggaactggtggagagcactggaaagagatctgtgactaccccaggagacaaattgccaagtggcacgtgctctgtgatggttagcatcctagccgtgagttggaacttaaaggtttttactaggcaaggagaaattntctttctttctatattggattgcaagcttgggaaatcaagctacctttntgntcgtcgtgctgctgctagaaatggattgaattagtagaccagaaagtaacttcaaatgtgtattatgataatttccctatttattagaagagttggataaactttcataagatattcaatatctccttcagattaccagtgatataactaagaatagtcagacattgtatgaatactgtgccagaatcccaacatataaatgtgacaatctcattggaacatgtcacacaaaagtaatgtgattaccatttgataaacgaaaagtatgccttngccttgtgaaaacttatccacttaatcttacggttgggacaatcaactcttcgtctaaattcaaagatacttaaaaaaatgttcgtccagtttgatttattaaatctgtcatgtgcaaatgttcgcctgcatatacaatatctggtcatttcactntggtntgtgattactttgatgcatcttgttcataagaagtactcaccattcattttatatggaccgtgaaccacgttangacatatatttataaaaggcttcattttgtaacccttgngcatgaaataatacttttncgtcctcctaacgtcacaatgtgagtcaacctttcgtaaaanataacctcacatatacactattgcctcgattattcaattcctttacaaacctcaagttgactcgt

SEQ ID NO: 612061 - DNA, 262 bp, Homo sapiens
  misc_feature (171)..(171): n is a, c, g, or t
actcctgggtactctatatgatgtataccccgggggccgaattcctctgtatactggctgatcccaccacgatgacttgtatctcaatgcagcagcttctgtggctgatcaatgggaaaagagagcctacccatgccacagtatggcggaagaacttttctgcgtgtgggncacctggtgctgattgggggccctgatgatggtgttattactccctggcagtccagcttctttggtttctatgatgcaaatgagaccgtcc

SEQ ID NO: 612062 - DNA, 356 bp, Homo sapiens
  misc_feature (297)..(297): n is a, c, g, or t
cccaggctggccaacatatgctcacaggaagaacaattcctacacataagtgcttgcttcagcagcacacataaaaataaatgaaatgggccgggcacaatggctcatgcctgtaatcccagcactttgggaggccgaggtgggtggatcacctaaggttgggagttcaagatcagcctgaccaacatggagaaatcccatctctactaaaagtacaaaaattatctgggcgtggtggcgggcgcctgtattcccaactacttgggagtctgaggcaggagaatagcgtgaacctgngaggcagagcttgcagtgagcctagatcgcgtcactgcactccagcctgggcgacagag

SEQ ID NO: 612063 - DNA, 346 bp, Homo sapiens
ggagtttgagaccagcctgaccaacatggtgaaacccagtctctactaaaaaaaaaaaaaaaaaaaattaggcaagcgtggtggtgtgcatctttaatcccagttacttaggaggctgaggcaagagaatcacttgaacccaggaggcggaggttgcagtaagccgagattgtgccactgcactccaacctggtcaacaaagcaagactctgtctcaaaaaaaaaaaaaaaaaaagctacaataaagctcttgtccatgctttcccctcacttcctttgccttctgaccaatgctgctgcttcctcatgtgactctgcatggcctctcatgccccttcctcttggc

SEQ ID NO: 612064 - DNA, 535 bp, Homo sapiens
  misc_feature (36)..(36): n is a, c, g, or t
  misc_feature (65)..(65): n is a, c, g, or t
  misc_feature (428)..(428): n is a, c, g, or t
  misc_feature (452)..(452): n is a, c, g, or t
  misc_feature (456)..(456): n is a, c, g, or t
cctcaggtgatctgcctgccgtggcctcccaaagtnctgggattgtaggcctgagccaccacgcncagccaaaggttttatgacttacttcagaagataagtctgaccactttttactgtttctactgccatcctctcacctggattaatattgcctcctaattaatctcctcatctttgtttcttgatggtatgttctcaacactgagccagaatgatccttttaagaggaaaattagataatgccacttctcttcctaaaaccttccagtgccttctagctatcaaaatatagctataggcactacggaatattggctgtgatagtcaggattgagacagctaaatcataagtcctatctggattgcttatttgtggatatctccttagcttacattcttacctagtcttgcagatacttcctcanttttaccaaatctcctcatcactntctntttatgcagccctcccacttacccacccactccagtcgtctgaactttttgtccttttcctccttcgcattccatactc

SEQ ID NO: 612065 - DNA, 199 bp, Homo sapiens
gtttggttcttacgctaggaggcagtgtcctgaagcttggaaactaggcatatggtaacaaagctgtagctggtggatcctgacccttccttccagcacacccaaagaatggtgtctggtctccaagctagactaggtggtcttcgcttcgatgctctccatttgggttgccatgtactctagccgtcggctaaatttt

SEQ ID NO: 612066 - DNA, 120 bp, Homo sapiens
aacatcatactgatcctaagataagtttaccaagaaggcgttagagacaagcacggatggctcacgccatgtatcctggcactattaagaggccaaggcgggcagatcattagaggtcag

SEQ ID NO: 612067 - DNA, 1111 bp, Homo sapiens
ccacgcgtccggtccagaatattttacctttaaaaaaatgtcattggcaccataaataaggactttcacagcttttaaacagtctctcacagtccttatttatggtgccaatgagagactgtttaaaagctgtgaaagtctgaaacctataagccaaggtgttccctgcctaaacttattgctgttcccacaaaggactaagcctgttcataagttaccaaagttgccattttggagatggaaattgacgaggagggaaggtcttttattggagagtatacagtacaagcagatcattctgccttagaggtgctaattcccgaaattagaagaccctttcttttccagtaacgaagttataaatatcagcttgttcatccaagccactggctgaggtgttaggaagaggaagagggtggtagaggaggtaagacagtagggaaagacaagggcccatgctcttagtggggaaaactcttggagccgtttactttgagctttgaacactgaaaccattgttggcagggttcagtcactgacagcacaagtttcactgacattgatccaagagtttagtgatttcaaaagccttggtctcaggagaagatcaaactttcatactgggcagtggttcactttaaaaacacacacatacacacacaaaacaattttttaagaaatcctaataagtaacaatagccaaaatgcttctggtcttggagtcatgagaaccatcaggttcttgcatatggtctagacttgcatctagagctacgtggtacaattcttttagggcatgtgttacattctgggacaccttgttcacatgtcacttctcatctaatctgcaacgtaggctcttgacaaaaccactaaaattgtacaaaaaacaacacaaacagacaaactactaaaaaaaaaggactggcacacaacaactacccaggggcacaccaaccgacaccgaccgcgacaagggaccaaagcgaactaaaaaccaccacgcagcaaacacatgtgcgaacaagcggactgagacaaccctgtgaccagaaacacacagtagacgaccacaccgcagaccagcgcacgacctaaccactacaaacaa

SEQ ID NO: 612068 - DNA, 938 bp, Homo sapiens
  misc_feature (938)..(938): n is a, c, g, or t
aaagactttttactatggttgaatgtagggacataggtcagggttatttacaggaacataggcaccagtgcctgcaaccctgaagaaagtgtatctcctctcatcaaccactaactgccatagatcatcagggagggctgggggagagggctcatgagccccttcccgttcagggcaggatgtggacgggctccatcttatagagaccttgtgcagagtcacaaaggctgatgactgtggcatggccaggaaacagtgttccacagacacttcactcttcttacatcatttacccccactgttccataatgttcttagatccttgaagtgggtactgttagaagtcccacttagactgagcacttagtggtcatgtcttcttactatgactgttttaagctctagttacttctgcccacttaaaagaaggaggaggaggagtttctttgacaaaagctgactgtagcattcacctatgggcccaaaacataacaggcagtttgttgtctttttattttaatggagatttgaagttgcaaagttctgtctcctcttcaatgtggcctgtggcccccacggtttacatttgatagtgttgatgtgcactggctcatttccatttcctcttttcttcagtagttcgtgtgtctgttttaatttctatttggcgtttgttcatggatggacatatagaagttattggaattgggtacctgtcatggggctgcgaactctggtctgtgttggcgaggtttgaactggcctgtcgagagtggatttttgggcggtgaaaaggttaaagggcatatgaaggagggtcgggaaaggtgaaagggggggtccagggaaaggggggtatttgagaaaaagacgggtggtaagggggcagtacagggaaggagggggaaaaaaagggggtggtagaaaagatccacacn

SEQ ID NO: 612069 - DNA, 1086 bp, Homo sapiens
tagtgtacctcgtagcgtcgtataggagggtctgtgacaccgctaacgtgaaccgtcgagtgcttggcgcgcgtctcagagactggcgagatgtgcggttcgtaacttaagcgcagttgctgagacgtgtggctgctggggtcggtggtgtgtgccgggacgcttaacaccgggtgtggaggcaggggccggatggccgtagggagaattcgcagctgaatctggtgtccaacccgatggagacaaggcgggagtgtggcatcacgtctcattgcgttccataccagtatctggtcgacaggtcgcaatggggtacaacatcactccctggcacagaggtcgcatgctaggttccagacgtaggtcccgatgggtcctcaaccagaaattccacggaatatgagtcattagtggagtagtcgtgtgtcccattagcatctgaaggatcttgctccctattacagtgcattctatggtaggataaagcaatggttgcaagtactagttcgcttgctaagatgaagatctcagtatgttaattgctacaaggtagtcttgtgacgtgaacaagttgttattcaagcaggctcatatgtgagttgggaagtatcgaatggaaaatgaagtggtgtgcactgtgggcaatgggatattagtgggtgatgcatcgaaggatgagttggtgaaccaggtgcacaggtgaatcaacatatttgtcgaattaaagacggggattgcgggttttgcacatgagtgttccagacgcaaatgcaggctattcgacgagggcacgactggactaacagttgtaattcaatggcaatgatcgtggctgttgcataatcagcgactttcagatatcgagtatgaaggggctgtgaaagaagaacggagtgggagctcggaggatgataaacgggactggtttacgagtggccaaatagcagcctttggaaaaacgttcagactatgttcttagcgactttgttgggcctagatggacagctgtgtgttactgcggaatttcctgggttggtttccccgggaaatgggtccccccaaaattgggaagccggtaaaaatttt

SEQ ID NO: 612070 - DNA, 740 bp, Homo sapiens
cacatgattggccgagcgtacacattgacagcaggcgcggagaaagcgctggacactcacaccctctcgccagaatggaccagagtccactgtactggctgctcatcttactagggctgaggccacagaggtgaaagctggtgcagatgccctagcattatagctctaaggtgtataccttttagtcgatgctgtggccgctacaacgtggccaaagggaagaacagtgacaaatgagcagagttggtgtagtaccatagtaacaaaagatcgctgcgactggtgcaaagccaattgacttattcgatatatacagaaacattgtggctaaacttgttcatgaagatggcaatgacacacaatgaagaatgctgtgaaggacacatagcactgctagtgtactgcaacgctctatagtcacagaaggctacgagaagagaagaggggagctaacccagcgtgaagctacaaaggagcgaggatagctgatgatgccagaaccgctgaaccaaaaatgcagactatacctgagaccaaccctgatgaaatcgcacaggttcgtatcacatgagtgcaaacggacacacatgcacaggcgcccatatctgcgatgcaatgaagttggaacggctgtcagttcaagtataggatggcaacactctgagagagggattatagagtatcgaatgagtgaattagttcaagactatactgctcatacacttgtcacgtctctaggc

SEQ ID NO: 612071 - DNA, 800 bp, Homo sapiens
gaaacgatggtaggtagtactgctcctactcagtatgcccatgagctagagtactgaactacctaggagctacaaagcaatccacctagtctcagactacccaaagtagccgggattacaggtagtagagccactggcacctggcagttactacacaataactataagcacctagtagggatttaggaataggtaagcaattagaattagatatattatagatactagtacccctaataaatcctactaccctaagatataaaataagccctataatagcaaatgagaacaggattaatttccaagtaatagtaggcataagtagagtaagggggaaagggtaagcaattaaaattaggagccagaagataataggctaagaggcctacatgaatataagtggctaatatagtaaggccctaaggtaattatatatcatactatctaagaaggaaagtaaagagtagtattagagacagaaagaaataaatataaaggataccattatgaactaacatatataagaataagatatggagaaatagaatctgtaaaggagtctaaagcagaaggaacggagactacttaagtagaactaacataggtacatagaaaattgagagatagatggtaggctaaagccagggtctttaagtaatggaaattgcagaatagataataagatctgtaaagaagggagaattgataaggtaccttatggtatggatgatgaatgtaaaagaagtaaggataagaatgactctagattaagatttataataatggtatgggaaattata

SEQ ID NO: 612072 - DNA, 218 bp, Homo sapiens
ttctggctcggtacccttattaaaggtgcgaggtctctggaaagggcccgcggcatcgacgtcatggcgatggataagaccggcaccctcaccactggccggatggccgtagtcgcggtgtgggatgaatctggacgtgtggtgaacatttctgacaacccacccgcacttgctgttacagcagcgcttgaagtggggtcggagcacctgatttcgcg

SEQ ID NO: 612073 - DNA, 228 bp, Homo sapiens
  misc_feature (4)..(4): n is a, c, g, or t
ccgncccccactcttaggtatgtagagctaatctgtccctaagtaagtttcttccgctcctttgtatcttcctttctggtctttcctcctacctttgtctctggtgtttgggatttttttttttttttttttttttttttttttttttttttttttttttttttttttttttttttttttttttttttttttttttttttggtggttcccactcattttttcacaaaa

SEQ ID NO: 612074 - DNA, 336 bp, Homo sapiens
  misc_feature (57)..(57): n is a, c, g, or t
gagatggggtcttgctctgttgcctgggctggagtgcagtggcgtgaacacggctcnactgcagctttggccgcctaggctctagaaattctcccgccttgccctcccgagtatctgggaccacgggtgcatgccaccatgcccagccaagtttttaattttttttttgtagagaggaggtcttattgtgttgcccaggctggtcttgaactcctgggcttgagtgatcctcctgcttcggcttcccaaagtgctgggattataggcgtgagccaccactccagtccctgactctgtttttgatgtttaactgctgatgactcctctttttttttc

SEQ ID NO: 612075 - DNA, 1176 bp, Homo sapiens
tgggagcaatctacaaacatcttttattagcaaaaggagtaagtgcagctaggggagaaagaggggctcctccttcccctcaaaggcatcacgtgccccttcccagggggcaggccagcagggaacaagaggaccccgagggttgcaagcaggcgtggaatcagacaaaaggtgatccgggttccgggaagcatggaccgtgccagacattgtgagctcctcatattcatccagagccgccgggaacggggcggggtgtgaagccaggagattacacaggcgcgctggtctggcctcaagagagaaccgggacacttcgggccccctggagaccaggttcacgggacggggggcaaatatcacatctgggtgggtctctgagagtccaagggtggtttggcccctgggtctcctagaaagaaggagtcctgtgggacatcgtcgcattagccgtggagtggcttcattcgaaatcttactttactccaccaaatccaccattctcgagaaggtgccagaagccaggggaaagggggcaggatagccacgcagggcccgggcagacagtatagggggcatcccttcactagcccaagtctctcggccacatctccacggtatgctagctgggaaagtaactccagcacgaagaactcctgggcccacgggggcagcgtacacaccagagggacaaaagggggcatattgaaaagacaccctagaagagatacaggcgcccaccagggggtcacacacggcgagacgccggagcgacccaccacatgcgagcgacgccaccacacacgtcatgctggcgcgccccacacgagtgactactagccccacggagccgacccctatcaaacccggggggcacaacccgcagagaaaaaggggaagcagagcgaaagcatacttccccagccggtccagcgacggggtgaacccccccgggcggcgggcggcgacacccaccagaaggaacgcacaagtgaggaagaagcaacacccgcacagaagaggggcgccacaccacccacaggcggcaacgcgcacacaccggagatccaaaaccagagacgacagaccgcgagccaccgacgcgataggaccaatcagacaccaaccaacgcaacaggcgaccagcaggacgaacatacggccagcaaagacgcg

SEQ ID NO: 612076 - DNA, 853 bp, Homo sapiens
atccctcgggtcgcgcgcgcactgctcgcctgcctgctggcgtctacgctgttgtcgctgctcgtgttcccgcgcggggtcgcgcggtgccgggaccagcggggactgggactgagtgcctcccggctgccgcgctaccaccccggcgaggacgcggggcgcgtgtgccgcttcgtgacgcacgtctccgactgtgggacgctctggccacacatctccacgctggaggcggtgcgcggcggcccttcgccgacgtcctctcgctcagagacgtggcccccggagcgcgggcagcgggtgccctattatctacctgagcccgctgcagctctccgtgagcaacctgcaggagaatccatatgctacacatgaccatgactttggcacagaacaaattcgtgcaagacacatggaatttgatccacaaagtccccttttgtgttcacataatgctgtcaggaactgtgaccaacggtgaatgcaacagaaatgcatattgcacaacgcatccgaattccatacgacaccctgagatgaacaacctgggcttccagccatactaggcatctttgctacgtagcaatatagccaaatattatggggtcccaggaccaaccaattggttggaccaaagctcgttgacccagagggaatttttataatgtcacagctcaagtgacagccgaactgtggtgaacttaggcacactttttacagtttcttagcactgctcatacccacttaaacacggctaactgttctcttgcaacagtgtcccgaatttagacgtttctgcacatgctatctcttgacgtgtaattgctgcccccactagtgccattctgatccgaca

SEQ ID NO: 612077 - DNA, 234 bp, Homo sapiens
agatggtgcagccgctaattaaaggttcgattctgttcaacgatctgtacaaggtcctagcgtgatcgtgagtctgcagaccgtgagctcaagttcgcgaggtcggtcttgctcatctacttgccatacatcttcctctctcttggttcaccggcacaacggcagctaagcatgaagattagacgtgcccttatcatatctacaagacgctgtctctgttgctctctcacagat

SEQ ID NO: 612078 - DNA, 673 bp, Homo sapiens
aacaagggcttcacagacagcaggcgtcttggctgcccacaagataatggctagctccccagcacatggacctggaccacagatttctgctctcaggaagatgggggtgaagttgacaccccacaacaaggagacggtgcagcacagtgatgtgctcttcctggctgtgaagaccacacatcatccccttcatcctggatgaaataggcgccgacattgaggacagacacatatgtggtgtcctgcgcggaccggcgtcaccatcagactccattgagaagaagctgtcagcgtttcaggccagcccccagggtcatccgcatgcatgaccaacacatccagatcgtggtgcggagagggggccaccgatgtatgccacaggcacgcacgcccaggatggaggacgggaggctcatggagacagctgactgagacagacgtggagctactgacaacggaaggatggaagaggacctagattgatgccgatcacggggactcagtgagcaagagagacccgtctacggagactgcaagtaccatggactgaccaggagcaggtgtcaacagccgccatcaagaagaccatcctggacaaggtgaagctggaatccccagacagggaccgaactagaacccatactggacacaccagacagtcccccaaaactgg

SEQ ID NO: 612079 - DNA, 815 bp, Homo sapiens
  misc_feature (589)..(589): n is a, c, g, or t
aacttgaatagcccttcctctggactagcttacttgaagctccatgggtagaccctaaccttggaagttggtagccagtgccatgctctcgtctccacgcagaagttgtcatggacccagctttggcggcgcagtatgagcacgacgttagagggttgctcagacgaacctgctctcccggatgaggatgatgacctgtgagaatgaaggctggagcccagcgtcacgaagtctagttcaataggcagtgtcctgtgatgtcagcggtgcagcgtgtgtgcctagctcattattatctagctacagcggaacatgtgcttacaatctgtgtggatgctgagggagatgaggtgggcttcggaggtgaatgtggagtgttagacaatataactgcagtcgtttggacctgggatatttagctgtgtcttggaacgcagtggattccttgagtttcatatataagagtgcgtgcagtcaacatcacaatattcaggggtgaaatcttgttgtgactgtcgattcccattcctttttcggtctaagaactcacgaagtaacggtggcattcccaagggagggcaaccctggnccaacggccgaaccccaccccttgcgtccgccgccgcccgcgccaaaaagattcagaaaccatcgttgggcggacgacactcgtacagtggactactggggcgcacccctggagaacagtgcccgcgtgtgtgttttcttccaacataaccgcgcggccccagccttcccacacacgcggtgtctcggcgctccggatcaactgccccgactcatttacccccgtg

SEQ ID NO: 612080 - DNA, 347 bp, Homo sapiens
tccaaagcaaacacacagatctcgaagtcgggatcgaagcagactcaccacagccgggatcgaaacgtcatataacgcacaggagcaacagtcgggacagagcaacaagatagaaaatccaaggagaaagaaaagaggggctctgatgatcccccccgtagtgtgacgtccggtagtcgagaaaagcagagtgaagaccacaaacactgaatcgacggaaagtgatactaagaatgaggtcaaggggaccagtgaagacataaaatctgaaggtgacactcagtccaattaaaacggatctgataagacctcagatcagacagaggtaaagtgtatggtatctcact

SEQ ID NO: 612081 - DNA, 1541 bp, Homo sapiens
  misc_feature (303)..(303): n is a, c, g, or t
tatggcgcattattgactacgagaccagacagacagttggcagacgagtcgagctattgattcggggccgtggacgctgggagctagcatatagtacccctgctcctgctcctgatacgctcccgaaccggatcctccgaggcagggcgtgcttcagagtggtcgaacaaattgaccctgcgtggtcgtccaggggccgtggcgataatgtaatcaactcttctgtcatcacctgaactcactccactcagtacatcgtgaccgcattgcgacggccgtgactgaataccactctagatgatncggtgaccgcctataatcgagcggattgcccccggactagtaaggccacaaaaatacatgggtgtactcgaacttcattcatccccccctcgtgcgtacgtctcttaagcttgccatgggctcaagcgatttcctgcgtattgaggtagcaacggcctgaagagccgtattcgagcggtggatagtaggctttaactcgatcctttgttatgcaagtgccaaacgaagttaacccacactccgcttgggactgcactgcaccgtgagaaatacctgataccacaggtactctcactggtctttctattcagtcccttagtgacaccgggtagtttctgcgtctgcatagtcctttatcgcgtgtggccactcaacggaggttgtgcacttcacccttagtcaactttactgtcaccccttactgaggagagaaggctctcccttggcacattcaaagccacgagaatacgccaggcattcggccccgccgtgctttgtacagctgcctgcgacctcgttggttttcggtacaacatcgtacgttaggcgcaggtgcgcggtatagtaataactctcgttcactttttcgttccgcgaaactcccatgcaccccatcgcctgggggaactcccgcacataaacttcgttactaaagacgaagggacacgcgcggaggacgccttgcgagagcgacccagattcatgttccatattccgaaaccaccgccgcttagggcaagagaagcgccattaaacccctggattttctcaagttaagccccacggaaacgctcattctctggtggcagttccttgtccggcggatcccacccccgtggaagagagttcaacatgattggtctattccccctaggcgaaagggcgttccttggaacattggggtaggtcccccgaaaaattgggcctggaaggtgtggaccgtagcgtttcccttgggaacttcccaagagcgccccttaactccccgttaacttatccggggagagtttggggcggtccctggcacagcttggatgaaatccctccaaaattgggcgtttcccataaaagagtttccagaccggtgggtcgccagccccccacggaaaaactttgcaacgggttggagcccgaaaaatttgggtcgcgacgcggcgggccggcgctattgggcagcctgcgcgcgcccatagcagaagtgggttccctacaaataggttccccggcgggacgtatac

SEQ ID NO: 612082 - DNA, 234 bp, Homo sapiens
atcgacgggcgctctcactcagatgtcatgagaccagttgactatgatccaaagacatctgatccttgcaaggaggcgggacttaagtttgctactggggacattatccagattatcaacaagggtgacagcaattggtggcagggacgggtggaagggctcctccaaggagtcagcaggattattcccttccccttagctgcaggatggcgagtggcaagtatggctcattca

SEQ ID NO: 612083 - DNA, 443 bp, Homo sapiens
gattctggataaacagatggctgctcaccatctctgagatcctgttcctcaacaagcaggatccgctcgctgagaaagtccttcctggaaaatcgaatattgaggactactttccagcgtgcgctcggtacactactcctgaaagatgctactcccgagcccggagacgacccacgcgtgacccgagccaagtacttcattcgagatgagtttctgaggatcagcactgccagtggtgatgggcgtcactactgctactctcattacaactgagctgtggacaatgagaatatccgacgagtgtaccacgactgccgtgacatcattcagcgcatgcaccttcgtcagtacgagctgctctaagaagggaacccccaaatataattaagagccttaagcacaattaattaaaagtgaaacgtagttgtacaagcagttcatca

SEQ ID NO: 612084 - DNA, 357 bp, Homo sapiens
  misc_feature (12)..(12): n is a, c, g, or t
  misc_feature (36)..(36): n is a, c, g, or t
  misc_feature (47)..(47): n is a, c, g, or t
ttcccccagggnttttttccttgaatctttcacggncaaccaaggantcagggacacgtgtgaaggcacggggcacgtcaacagagacactcaagggacacatggggacacacattcctgcaaacacacacacagatgcccagacaggcatacgggtgaacacacagagacatggatgggtacacactcagaaatgcagacactcacagggatgcacaaacacacgggccacacacatgcaagatgacgccaacgtgcacgcaggcacatgggtagacctagagtgtgcatggacacctttgggaacaggcagacacagaccaaggccctccgacacccagaggacacacacatgca

SEQ ID NO: 612085 - DNA, 130 bp, Homo sapiens
gctgaaaagccatctttgcattgttcctcatccgcctccttgcccgccgcagtcgcctccgccgcgcgcctcctccgccgccggggactccggcaggtttaatcggcagagttccctgaactctcggttt

SEQ ID NO: 612086 - DNA, 150 bp, Homo sapiens
caggcttaagcaatccccctatcctcagtcacctaagtagctgggactacatgtgcacctcaccacacctggcaaatttactcagtctggtctgaactcctaagttcaattgatgctccttccttggccttccgaagttctggtattaca

SEQ ID NO: 612087 - DNA, 328 bp, Homo sapiens
  misc_feature (101)..(101): n is a, c, g, or t
  misc_feature (125)..(125): n is a, c, g, or t
  misc_feature (133)..(133): n is a, c, g, or t
  misc_feature (138)..(138): n is a, c, g, or t
  misc_feature (164)..(164): n is a, c, g, or t
  misc_feature (258)..(258): n is a, c, g, or t
  misc_feature (269)..(269): n is a, c, g, or t
  misc_feature (288)..(288): n is a, c, g, or t
  misc_feature (323)..(323): n is a, c, g, or t
gctactaaaaatacaaaaattagccgagcgtggtagcaggcgcctgtaatcccagatactcaggaggctgaggcaggagaatcgcttgaaattggaagatngaggttgcagtgagccaagatcanggccactncactncagcctggggcaaaagaccaaaactncatcttcaacaacaacaacaaaaaaggagccgggtgcagtggctcacgcctgttattcccagacatttagggagggccaagggcggggacaggntcattgaggtncagggagattcgaggaccntcctcggggtttaacacgggttgaaaacccccttnttttt

SEQ ID NO: 612088 - DNA, 580 bp, Homo sapiens
  misc_feature (37)..(37): n is a, c, g, or t
  misc_feature (81)..(81): n is a, c, g, or t
  misc_feature (98)..(98): n is a, c, g, or t
  misc_feature (410)..(410): n is a, c, g, or t
  misc_feature (465)..(465): n is a, c, g, or t
taaatatctgcactcatcaaagggaatatagcaaatnttgatcatctgtcagcagttttgcatgtgacacctttatatganttattttcccaattttngctctatgtaatgggtcaccataaaactgtaagacttggcaaatgctatagaaaaggttcaggtttcagtattctctctgaaggcatcattcctgggcttccggcagcatcacacgcttccagtgcctgcggggtgagggtgtgtggcacagaggcaagcagctcctctcttctgtagggagctttgggttttcagagggtgcagggaaggcagtttttacaggttaccgttaaaacagaggtttccgttccagtgttccttatgatgcctccccatttttaaaaaggaaaagaggattcttatgggaaaantggggaatgtaatgtggggttctgttcagagcttcctacagagcaccagttgccntttaagttttccttttaaaaggatggtaaaaattattggtattaattaccagttttggtcccctaccaacaattggtatttttgcccaaggctttaggtggcaatttattggtta

SEQ ID NO: 612089 - DNA, 848 bp, Homo sapiens
ccacagcgctcgagtgaccgcggtgggtgatgcgtgccccatgtgggagcccgtagtcaactggagggccacaccaagcgtgtgtgcattgtggcctggcacaccacaggccagaacgtgctgctcagtgcaggttgtagacaacgtgatcatggtgtgggacgtggtgcactggggctggccatgctgacacatggttcccagattttgcacccagacacgatctacagtgtgtgactgagagccgacgatggaggcctcatttgtacctcctgccgtgacaatgctgcgtgcgcatcatcggagccccgcaaaggcactagttctgtagctgagcaagtgaccgtaccccacgaggggacccgagaccgtgctgtagcaagtgtaacgtaggtacaggatggggcaagatcctgaccacgggaattcagcggcatgagtagagccggcaggggtggcagcctgcttgcgtgaccagaaaacggctacctggaggcagcccgcttggtcccttgaaggaagcctgggacaaccaaggcaagacgggtgtccatgatgccactaactttagaccctagaaaccaaaatccgtctaccttctggaggggccaatgggttgaactgtctacaatcgcgggtagctatgaagaattcactatccgaaggaccccctattgccttgcaggtaatcatcgtaaaatggtaaacaggagccaaaggaatgaacccagatgtggacatttggggctaacgtgtgccataacggtgagccgtggtaggatacacacatgttagaatagcagagtataaaacctggacagtcagatgtgtgacccaattgccagaag

SEQ ID NO: 612090 - DNA, 968 bp, Homo sapiens
  misc_feature (110)..(110): n is a, c, g, or t
  misc_feature (830)..(830): n is a, c, g, or t
cgtgcaccttatatttttctacagagtcttttagcttccccagtaaaaatatccttttcgctgcgctcactacaacttaatcaaatttccgctgtcacacgacccaccgnttactcttttccgtatcaattgctcttaacatacatctgcaattctcccgttcacaataacaagtattgcgtgcgccaaaatctgttggccctttattgaaaatggcctcatcgccaccccttgggatcataatcccatggcccacaacattcttggtctctgcatgtattcatcactcatcatatcttctttccgcccccaaagtgcgctgcccctctggtgaacgtaataaaaaaggggggaatcacccacaaacggacgtccccaccaatctgtggaggcgcccccgtcacgcaaaattgatgtattgtgctgtacaattctcgccgcattgtatggaactattgattgcctctgtgctacaagacaggacctgatatgaccccccgcctcctgctgtcagccgcaattctaatacggtggggaacgtgctcatgacgcccgtgcgtctaaccccctctgataagagagggcaaattgcctagcgatttctctgcggagatgtgcacacactgtaagttaaattctcttgctccggcgtgcgggacaccaacgaaccgccttgtgcaggtactcgcccttttggtgcgaagaataaccactggccgcaacagatgtgcagctctcctgagtatagacgcgagccattgacagttgtatgacgcccgccgcccagtcttgtatcaccgcacgcgagtatttcccggcccgccttctanacaaagctgtgatacaggatttgattggtcaaaagagccacgcctatttcagggaagtcggagaacgcaatggggaacacgcagtgtcctcctcatcgggacaaaaaacaaaacccccttaaaacaacaaacaaaaca

SEQ ID NO: 612091 - DNA, 514 bp, Homo sapiens
aaaaacaaaatttaagggcttctaggagaaatgtaggagggaaggtgttactgggaaatatgatagaaggttaatttttattttattttatttttagagaaagggtcttgctctatcgcctaggctggactgcagtggtgcaatcacagttaactgcagcctcaacctccagggcttgagcaatattcccatctaatttttattttgtttaagaaatgcagtcttgctcttagcaaagctaaagtgcaatggtgtgatcatagcttactacagcctcaaccttctagactcaagtgatcctccagtcttagcctccccagtagctgggactacaggtgtgcactgcaacgtgtagctcatttttttatttttatttttagtagagacaaagtgtcactatgttgaccaggttggtggtgatctcctacactcaggtagttctctcacctcagccttccaaaatgctgggattacaggtgtgagctgccacacctggctgagggggtaattttta

SEQ ID NO: 612092 - DNA, 459 bp, Homo sapiens
tcctcgtagcagttggggtagtactcgacctggtgctcgacgccacctggacgcaggcgacgtagcgcaaccagtcaacacggtgctgaaaccagctgcgatcagcagcaggtgacgcttggaaaccgccttacgggaagaaagcatagatgtgatctctgttaagtttgacttgcccagcacggcccaccgccgcctgagtcccttccaagctcgctagacagccaacgatcaagaccgctgaccgctcgctgcgagcaattccttcaagatcgttgccgggtcggcccgctgttgcttgcggtagttgccaacatggtgaacgaacagtgtcgcgcgcgtcaccgggctcttgccgagcactggcttgcgatccaactcttccttgatccgttgaaactgcgcctggatcaccgcatcggtgtagcgcgtgccggtggccaggttgtcgatgtaaat

SEQ ID NO: 612093 - DNA, 877 bp, Homo sapiens
ggagatagcatggagtttacctcgtagacttcttccgattggccgaccggacctcagcacgcttacgcattccatacgtgcgcgcggaggtatttagctcactcgggccaggaagccagctggatcccgaggataacgcacgcgactgaagcgcgctggtggaggagggaactcgctgagtgattcaggctgtgagtgaatgctctgcttccatgtggaatgacaaatctggaccttagcgatgaatggcgtagggagagtctccgcagacccttgtagcgacccaggtagagaacagaaggttccgaattcaggattcagggagtcgcgcatatccgtgcatcttaatgccttccgaggtccctagaggtaccttttgtgcaaccccactctaggcgaataagcagactggggcgtgggccgacatgcaccaggtcagaaccagttcctaaacgatgtgaagaagtcctaaagggcgaagctctcaataggccacgattgaagagacggaggcaagtgagtgaccgggaaaccctgtggcaagaagagggaacccctttgcctcccgccaacatgtgaggcgggtgaaggaacgccgcacgaaggcccaaggatggacggggaagcgaccgcgagcaggacggtgacggttaaaccacaaccgcgcgaaaaggactagaagagataggggcacatgccccttgaacagctgcagtgagtatcacaaaggagaaccccacgcagcaggaacgcgcgcaagcagttgaacgtatcggggcaaaccccatgcgccggctgggaaagctcgacacaccacggacagaaagaacgggcgaacggcgacacccccccctacgaagaagagagaacgggcaca

SEQ ID NO: 612094 - DNA, 529 bp, Homo sapiens
ttggggctcattcagggtctggggaaattccgggcttctcctaaatcagggggaacggggcctccaggatcaggtcgggagcaggcccaaatatagtccgggatctgccgggattaggtgccaaggtctgagtcggggttccagatcaactccagaccccaggcgggatctggccccattggagttctgattcccctgggagctgggctcggggcccggggccagcatctatcctggtgtggcatcggtcctgagcgggtccgggggcaccatgcatagttagtgttcttggtgggcccaccaggggggggctgtccagagcggccaggtcttaactccccaagttccaggttcttagcggggggcttctttggaatctcgggcaaggctgaggacagatcttggcaggtgggagcgggacaggaagtccttgtggcatgtcgggcccaaagaacggtgacgggatttcctagttatctttccaagttgtttcaggaaactctccaaattgccaaggcttcagggaggc

SEQ ID NO: 612095 - DNA, 785 bp, Homo sapiens
ggacgctgcttttcttgctccactgggggtgcctcttcctgtggctgccgccgcctgcatcctgctcgccctgtctgggaatggggcctgccccggtgcttgtggccggcctggctggtgccccgcgaggcgcttaccgcacccgtagtgaccgccatggtgccagccaaccccaccaggatgaatgggctggcagagtgtgggactctgggcgagcaggccccgactgaaccctgagggctgagacgccctgcaggatcaggcaagataaccagggagttcgtgccacacgctggctacactgagaccatcaatagaggggccacgtcacgcacatcgcatcgccagggcagcatcacgattgcacagccagcatcaacacatcaggcaccgggcacacagtcaacacgtttaccaagacagagaacagatcttgcctttgatacattcagcggcttatccgcccaactgagatggagcccatcggataggaatggatgcatgccttgcgcaaaagttgacgccacagaagataaccccacacaacgagcctcagaagcatagagccttacacgtggccattgcaaccccacccaggaagcaatggagggcgcattgatgcccaaccgtagtaatcgcacgctccgaatggggctcctccccggggcggctactcgaggaggcgccccaacagctggaaacgagtatgtggaccgacacgagaaatccaacagaccactccaaagcacatcgacccaccccggcagtcgagcaccgcccgaaga

SEQ ID NO: 612096 - DNA, 214 bp, Homo sapiens
tagcaagaggctagcagtgaattcattctactcatactacacacccagattatggaatgtccagagcttctcgaagcaaaataagtgactttacgaagaggtataccataatctcaagctcgctctgccctcgccacactctgcacagctcacctgcccactcatctcttacagcccagcactactgagaacttctgtctggcaacagtgggac

SEQ ID NO: 612097 - DNA, 104 bp, Homo sapiens
gtccagcggagtgttacaactcaggtgagttttagctttattgggggagggggtgctctagaaccactctttacgccggcttcgtattcacattcagggggtgt

SEQ ID NO: 612098 - DNA, 164 bp, Homo sapiens
aaaaaaaaattttcccggggggggggggggggcccattttttttttttccccccctcgggggggtgggggggggggtttttttggcccccgggggcccgggcccctgtggccccttttttttttttggctttttgggcggggcgccggggggggattttgtcca

SEQ ID NO: 612099 - DNA, 1329 bp, Homo sapiens
gttttttttttttcatggttaataaaaacatttatttggcattttatacagaacaacctgaagtctccatcatgactgtgacagttacccaggggttttacaggtggtgttccaactcaacaggtggtggttctgggacgtgggttatccacacaaacacaggcaggagtttgtggaggaaagagtgggggcacagcaggaggtgtatcttaactcctttctcaaagaaaaagaagttaaagcattctcgtgagttgtgctgaaaaccgtggtgcaaagtggggctctcgtgaaacattgtgtacgtgtgagcttctcagggaacagggaggcaaaaagaatgttgtgataaattaaggcaggccaactttcttggaaggcaggggacacgaggaagcggaggctttacttatttttttaagtgcccctcagccccgagttaccgtgaataattccagaaggggagaaccaagtgttcgcaatctttgtgaaatctcaattctcccctgtgtgtctcaaacaacagaagggtgcataatataccccccgggagggaccacaagaacctcgtgacaacatttatctcagtgcgtggctccatatccccggggagtttctctaagtggccccccaaagagcccactttatctcacacaagacaatcggggagctagagagatgagggcgcgcgcttgagccgagcaagcggtccccgacaaaagggctccacgtgcggacctgcggctaaattcaacagtgggtcgcgcaacagcttcacaacaaacacaaccgttataggattccaagcacctttaaaaggccccacgctggaatctacaaaaacccccccagactagcaccgtgggggtcccgcacacacgaacttccttggctatgaaaagaggcggtcactacctcaggactaacgcgggaccccaaaacaagggggcgagaaagggctccgcaagaaaacacttcccctcctggcccttgaaacggctgctccacacccgagggtgttgtcagcaaaaacagatctcgggccagacagaaagcgctggacaaccataactaacaccgcgcctaacaggcggccacaaccaagaagaacccctctcccgccagagcccggtaaaccttcaaaagatggacatatgcttatcaaagaccacaaaccctacccccccattggggcctcacaagcatcacaacacaaaggttcgcctagagcgctaaaggcacaccgtggcactccttaacaacaactcgtgtgcccaagcccggccacacgcataccccacaggacctctctacaggcagagcatccac

SEQ ID NO: 612100 - DNA, 116 bp, Homo sapiens
cggcacgaggtgtgtcaacttttttacaccgactgatattaacttggatttaccccacaatataatttggagaccctttgttatccaaataaaattgatgagtttctgtgcctgta

SEQ ID NO: 612101 - DNA, 348 bp, Homo sapiens
cagttttgggtgcgtttcttaatcctgaggtctagtttgattgcactgtggtctgagagacagtttgctataatttctgttcttttacatttgctgaggagtgctttacttccaactatgtggtcaattttggaataggtgcagtgtggagctgagaagaatgtatattctgttgatttggggtggagagttctgtagatgtctattaggtccggttggtgcagagctgagttcaattcccagaggtggaatctacagaggcaggcaagcctccttgagctgcgagatacctggtcatcttgttcgagttgagccacagggcacttgtactgggccgtgctgaagagg

SEQ ID NO: 612102 - DNA, 103 bp, Homo sapiens
cacctttgtttaatcacactgcaacacacatgcacactgcattaacacatgcacacacactatgcacatgcacacatcacaaactcacatgaccatgacatgc

SEQ ID NO: 612103 - DNA, 606 bp, Homo sapiens
agaacatgtcattcacaaaattgtgacctcacagcattatttacaatactgaaaatctggccaagtagcctcagatttctaacatttggcagaaggtacacgtaaatgataagactacacaataaaatatattaccagcaatatatctgtgtgaaaatctattgtaaccacacattatacttagtaaccgagcacataaatgacatgctcgtgcactagtgatcagcacaatgcaaaaaattcacacccccgaaaaagacaagatatgatatggcaatttcgtggtaaaatattcatgtatttgtgctgcatttctaatatgtccgtaactgacacatcagttttataattaggagacaaatacctttttaaagtaaagcgaacacaagattctttagcaatgttcataccatcccacaatagagtctagagagtcacaaaaacctcagcctccttcgagagtgggggagcttggtagtgaaaaaaggtcatgaatgactgggtgaagagagggatgggacaacctagtaggagggaggtagggataggcaagggaaaggtggggaccagtagtcatactggcaggccaagtaacggtgcagacga

SEQ ID NO: 612104 - DNA, 478 bp, Homo sapiens
gaaagatcaagaccctggaggtctctctaaaattaagaggccagccaggcacagtggctcatgcctgtgaccctagcactttgggaagctgaggcaggaggatcgcttgaaaccaggagtttgacatcagcctgggcaacatagtgagaccccatctctacaacaagcaaaaatgaaaaaaattacccaggtggcatgcctgtagtcccagctacttgggaggctgaggcgggaggatcaattgagcctaggagctcaaggctatggtgagctatgatcgcactactgtactccagcctgggtagcaaagtgaggacccatttttgtttttgttttttaattttaataaagccaaatgaccatgatcaggaaggtgaggtcctgagcaccccgaaggaacaggaggtggccacagaggggtgatgtgtttgtgatgtgaagaaacagtggatgatgacaaagccctcaaggaaccgag

SEQ ID NO: 612105 - DNA, 160 bp, Homo sapiens
acccatttcagttttttggttttgacaaatgtcccctggtgatgtaaaatttttcccctggggtagggtgggggaaggggaaacaggaactctttgttctatttttgcaacttttctgtaaatttaggatccttcccaaataaaagttttttttttttta

SEQ ID NO: 612106 - DNA, 339 bp, Homo sapiens
  misc_feature (6)..(6): n is a, c, g, or t
gtattngactgtctcgggtgaaatcatgtagtttaaaaattaaaaagacattaatccttcaaaacaaatagaaatcaaggaacaaacacaaactctttcaggaagctaggaaatatctacaactaacgatgaaggaccatggacggaggatagcacagggcttagcagagcagaggaatagtacagtgtactttgaccgaacgcgtgcatgcagatgtgcagaaactgctaggtggggttggttgatgccgattgtcactattatcaagcctacgtggcttgaagttgacgacggctaccgacttttttggactactcatttggtgtgattgcacatag

SEQ ID NO: 612107 - DNA, 1263 bp, Homo sapiens
agcggttcagcctgggtgacagatggtaagaccctgtctccaacaaaaaaaacaaagaaacaaaaaatttccaagctcccctacttgcgttctcgagcccttcgggggttgggataagagccaagaaatcctgggaactcctcatattatagccattcacaagaactaagaatcttgagattcagtggcaactgttgttgcgaagacttctggaagatctccgacgttagtgttacttcagatacgtcacgggctcacgtgctctttgtgcgcacgctccagaatgatcccatggcctcgaccagcccgagaaccgtggcagacagacagtttcctcagccaagggcagattgttgtgtcccttgtagactccccattgggggaccggtgttacaagggcagagcatgctgttggcgctgtggtgcgcctgggggcgtcccacgctcttgtctcgactcttatgtgctcctggcgtcttcacacctctagaaaggcctttgacagtggttcatcaccatcaggtggggccgcccagaaaaaagaaaattttctcgcctgtcgtcaaatataaacggggtgaaaacttggagacgcagccatcagcgactcaaccacggtggcggcacctttaaggggagcgcacctgtttactaatacagcctgcagatatagtgggggctaagaaacatatcagcttttacgcacacaagagaatctcttttgaacacggttaaatctttggacgcagcatcaggcgtgccaatatgggtcttcttatccgtggatgcctctttttgtgagcggcaaacgcaagttaacttctccttcagcgtcgtgcttagtgcccccgaaaagaggccgttggcgaaactgtgtccatctcgcggcgacagtttgtgactcccccggggctctccctgggtggcgaacaatccttctcttgtttgtgttctgcccccgcggttttgccagagtgtgtgacttgcttggggggccttaacagggcccgctccccgagaggtttaactcgtgggtaagcaatctgcaccggagcattgttgtttccgcccacgccgaaatctccggggggtgatacgacttctggcggctatactcggtgaggatcatacgcaagcggggcggttgttacccacccatttttttgtggcccccgggtgacgtgcgtcttcaacaggcccgtcggtgcgacccctttgttggatcatcccggcgcccgctttgtggcggcctccccccccgga

SEQ ID NO: 612108 - DNA, 326 bp, Homo sapiens
tggggggttggaagcctacacatttatagctttctctaattacacaggtaggaaattataaaatcaggtacaagggctgggcaggggcctaaagcttaagtgatgaaaaaaaaaaacaccaccccttgtggtgaacccaatagctttacgaaaaagtaaaaaaaagcgcgatgcagggggagctccggtagctccttggaggtattggagaggctgagctcaggaagagggcttgagcaccaggagtgggaggtcggtaagtgcaggtgagggtaaacggccgcgtgtactccagtcgggcaattgtagtgagacccgtgtctctc

SEQ ID NO: 612109 - DNA, 222 bp, Homo sapiens
  misc_feature (14)..(14): n is a, c, g, or t
  misc_feature (63)..(63): n is a, c, g, or t
  misc_feature (69)..(69): n is a, c, g, or t
  misc_feature (89)..(89): n is a, c, g, or t
  misc_feature (119)..(119): n is a, c, g, or t
  misc_feature (122)..(122): n is a, c, g, or t
  misc_feature (138)..(138): n is a, c, g, or t
  misc_feature (143)..(143): n is a, c, g, or t
  misc_feature (155)..(155): n is a, c, g, or t
  misc_feature (184)..(184): n is a, c, g, or t
ctgtcatgagattnggggggggggggctttttatttgtcttctgccatgggggcctcttagtnggtgtncttttccaactcccctttgnttttgaagtttgccagccctgacttcgggncangcggccgagcagagtnctganaggccggtcgtntggaagaggccatgctggcccccgccgcnccccccccccccctgctttcctgctggtggcctctctg

SEQ ID NO: 612110 - DNA, 660 bp, Homo sapiens
  misc_feature (407)..(407): n is a, c, g, or t
ttttttcagtggggaaaaaaatctttatttcaaagtaaaaggcccaaagtctcttacagcaaataaaatcattgttactgctctcagatgttaagcgttagcaacctttttggcgtatgctaattcatcatgaactcccaatagctgaactgaatggcttttaagtacagctataaggtctcatggcataattccttttgttgatgccagtgacaggattttaaaagctacattccattaaaaattaaaaatacagcagcttttccaggggaactagatcccaaaattgtacccagaactcttgttaagatattaagttaaatatcttgcatgtatatatcattatagtaaatcagtattcttgacaaccacagtgtaagaaattaaactttggctaattgtttccncatcatgaaatcagccttttgctgcttcataaaaaattatgaccaaacattcaaatacttatacatgttactgattacagagatatttaataatcagacttaccagtttcatagttttgtcctttaattttaagcatataaccccggtacaaaagtttttaagtaatcaggataaaactgggctaaggttaattccttggaatgaaaaaaattgaatttgaaattggtttcaggtttgaaaattaaagaattt

SEQ ID NO: 612111 - DNA, 207 bp, Homo sapiens
gaagataggtctctccggtttcatgtcaccttccacctattgcgggaggttagcccattgaggtcctctcacatgtctcgtcctgtcgttcctgtcgtggatgtcggagtcgtcgtgggactgcgactcgtttcgtctgatgctctttgttgtttcagatgcggacgcttcatgggtagtcccggactcgagcgggcagtgtttctc

SEQ ID NO: 612112 - DNA, 379 bp, Homo sapiens
ctcccggcaatacattctgtcttttttggcaccatggcagacagaaggctttttagcgcgccaacactcagggtaatctgctataataggcccgaatctccaatgtatatttcattcacagcttgcgtatttctccttcggtgttttaggattacgcgattaggccttcgggtgcttcttctgggggagcaatgcccatactgcaagtcagccaattatgcagcagcgcaccaaggagagccaatagcccacgcccctctatcttgtgaccctagcgaacctggtattgctttcagggtctggtacccgtatcaagtgtgcaggtatgctgcatttgcgcgatgcggtgcacacgctctaaagctccatcttgcacagc

SEQ ID NO: 612113 - DNA, 190 bp, Homo sapiens
ggtgcggagcgtaggagaggtaagtatgagttagtggggtggtgagtgtcaggaagaagggcataaaggactaggcagcagataaggaaaatgagaatgagggcgtgatcaggaaaggtgataagcgcgactaggataggggaagtagcgtagggtagtcccacgtacagatcgacaaggggatccacaa

SEQ ID NO: 612114 - DNA, 234 bp, Homo sapiens
cgtcgacatcttgacagccaatgaaaaaaatattatctcaaaagcttgggacaaccgctacggggttcttatggtgagtgagctagcagaagctctttcaggccaaaaactcggaaatgaactctatcttggctctaacgtccaagaagaggttggtctccgtggtgctcatacttccacaaccaagtttgatccagaagttttcctagcagtagactgttcaccagtcgacgc

SEQ ID NO: 612115 - DNA, 470 bp, Homo sapiens
  misc_feature (51)..(51): n is a, c, g, or t
  misc_feature (85)..(85): n is a, c, g, or t
  misc_feature (132)..(132): n is a, c, g, or t
  misc_feature (142)..(142): n is a, c, g, or t
  misc_feature (149)..(149): n is a, c, g, or t
  misc_feature (176)..(176): n is a, c, g, or t
  misc_feature (196)..(196): n is a, c, g, or t
  misc_feature (203)..(203): n is a, c, g, or t
  misc_feature (230)..(230): n is a, c, g, or t
  misc_feature (333)..(333): n is a, c, g, or t
gctgcgtccgtacctgtcaggttggagggcttcaccagccaggaggacagnagatgctgaccgcatcgagagcactcaagcgccngccattggcccccaggtgtctgagcacagctcatcaggattcaccancagaataccngagcacnccatccacaaggtgctgcagctcatgntgtcggcgcggcgagatccncatcgcntgcagcgcaggttctctaccgcctcantgagtcgcgccgcctcatggatcatggactcgcccagcctcgcccctctgccgctgcctgccattgacaatgttgctgggacctctgcctccccatgcagccntcgaacttcccaggcaccctcctttctgccccagaggaaggagctgtagtgtcctgctgcctctgggcgcccgcctctagcgcggttctgggaagtgtgcggcatccgttaataataaagccacggtgtgttcaggg

SEQ ID NO: 612116 - DNA, 192 bp, Homo sapiens
gggggggggggggttatgcttctcccccaccccgtgtttttttttttggattccttttgggaaccgggggtttagggtgaggggggggtggggtgccccaatttttttcccccctttccttcccccccccagggtttaaaaaaaggggaaggggtggtaaccggaaataaaaacctccgattttccgcccca

SEQ ID NO: 612117 - DNA, 206 bp, Homo sapiens
tggtgcctgggccccagcttccggccgccacccggccctgttgagtgcggcctccagactcgagtccagaatctgtttttgtcaagtcagttgtccccagctgcacacggggactgttgagcgctgcgctctcccgggtttgttccggacaaagggtggcaggggtgagccctgatccctttcaaaaaataccagcttcccaggga

SEQ ID NO: 612118 - DNA, 577 bp, Homo sapiens
gccgtaaggctgccagtgcataacggcgaatcgacgacatagaaggctcctgaaattctggggtgttggcttttttcttatagttgcgggtcttgcaatcgaatcgccgatcttgctcagctcggtttattgcccggattctgcaaacggaatttttctttgcgttcgatctgtactacctgggcgttgtgcacagtgatttccaccgcaccaaaccgcagatcgcgcagggcgctctggatctcgcgcaaaatggctgcttcgtcctggccgtcaacgctacgtagagatgcgctcatggtcgtgctcctgaaatgagaagtgcctcgcagtggcggcactgcttgcggcgtgagggcgatagtagataagcgcggatattcttaaaaatactatttaagaatgtttatataaccagaaagaattttctggtgggacgtggggttgcgagaggttttgcgggccgacccgtgaaataaagccgtgtggagatccaaatgtgggagcgggcttgctcgcgaaggcggcgtgtcagtcaatacataggttggctgatccaccgtattcgcgagcaagc

SEQ ID NO: 612119 - DNA, 332 bp, Homo sapiens
  misc_feature (250)..(250): n is a, c, g, or t
tttttttttctgaggagtttcactgttgctgcccaggctgcagcgcagtgctgggatctcggttcactgcatcctccaccccgccagttcaagtgattctcctgccttagcctcctgagtagctgggattacaggcacccaccaccatacccggccaattttttgtgttcttagtacacatggggtttcaccatgttggccaggatggtctcgaacttcagacctcaggtgatccgcccaccttggcctnccaaagtgctgggattacaggcatgagccaccgcacccagccagttaatgtttctattaactaagacctaattaagattgag

SEQ ID NO: 612120 - DNA, 164 bp, Homo sapiens
tcatacgagggaagagcagcaacacgttggaggggaggcaagagcggtcaggttctgcggccaagtagaggagagatccgattagatctaaggtgactggatggaagcagggaagtcaagttgggtcaccaggtgagaggtgacgatggctttgactagagtgg

SEQ ID NO: 612121 - DNA, 142 bp, Homo sapiens
taggagtggacagcacagcacagaggaggatactccggggctttgtgcgccaagagatgagtcagcaccgtgcctgccagggccagttcatcgcatctggatcacgacccctccctagttatgctgcagacactgccggctc

SEQ ID NO: 612122 - DNA, 794 bp, Homo sapiens
gatctactgcaacgtaaaggccgaagtggacgtgtcttgggatattgctgttctttcacttctcaggcgtctccgagagctcagtatccaggactgagactctgtaccattgggaccagatggaagctgttgcatctgttgacatgtattcccaaagtcctggggtcatacatgctgctgtcagactaccaatagtctgggtggacagaacatgcggtagtatctcggaaattgcctaaaggccgtggatcagatggatagagagatgagattggtagacgccttaaagtagctggagactccaggcactatggagagctcaggcaggccgaaacaagaatgggctttctaaaggaacatgggggaatacagagaaaatccctaagtgatagcagagtgtttcgcaaggaagctcaagggctcacgtgaaatatgtggtttggccatttctactgagaatccgaccattcaggttgtaaaatattagatcggacgatctggcaatattgtccaagaatagacctcgtagaccaagatatgggaaggtgactgtggataacgcacctgtgtccgctggtgagaggacctggtatctaatagtcatttcccacggctagcactgttacagatgggaacccactaggatcatgttgtggggtcagtgacctaggaaataccgatgaaattacccaaggaaattgaaatggaggacgcgtactccgggatttcaataccgggaacttatgggcccctttaacgaaaaaattgacaatccatctgcagaatccgggaat

SEQ ID NO: 612123 - DNA, 390 bp, Homo sapiens
acgaggttccccctcggtatctctctcagcccttcagctctcttgtctacagcgcgtgtctctgtcataacttgaggcctggcccgcgctggggctcgctccaggcttgatgcgtgactttgcgtccgttaccatactttgaccctggctcctccagttctctggttccctcagtggctggctgtggtggtgactgggctcaactcctcaggggatgtccactcttgggacagccctgctcaggaaatgggacgccagtgctgcgggacttgccttgctgagaaaccggaggcatattgaggtaatatcctttagattaaaacttcagaaacttcaggaagattcagttcagaatgattattattattaagcttaaactggggttaccag

SEQ ID NO: 612124 - DNA, 184 bp, Homo sapiens
agtagatatctgtgctgcagtgctgcactgccgatcgggtaatcgcactaagttcgtcatcaatatggtgagctcccgagagcggaggaccaccaggttgcctaaggaggagtagaggcaaccgagtagaggcaaccggcagtaagtagaggcaaacggcagtaagtagaggcaaccggcagta

SEQ ID NO: 612125 - DNA, 453 bp, Homo sapiens
  misc_feature (358)..(358): n is a, c, g, or t
aaaaaaagatccataggagtagctgggattacaggcacccgccaccacacctggctaattttggtattttgggtagagacagggtttcaccatgtgggccaggctggtctgcaactcctgacctcaggtgatctgcccacctgggcctcccaaagtgctgggattacaggcatgagctactgtgcctggccagaatctattatttattgagaacttcctcttaatatggtctgatcagctaaagacgggtgagtactcttcttcactggtagtatgaggaagcagaagtgaacagcactgcggctcagctgcagttgcttccataggctggctagaagcaccagaagtctcccacggngcaccagaatcttggggtggtgtgccatcaggtcttattccatatatggaatattatggctcctcaaaagaaaaacatgtggagacagcatatca

SEQ ID NO: 612126 - DNA, 154 bp, Homo sapiens
  misc_feature (15)..(16): n is a, c, g, or t
cgttctggtcgtcanncttcgctctggtgcaggtgtccgaccgagaccaaggcgagaacggggtggtccctgcaccgtggtggcgacgtgctttcgagctcaagcgagccagcgacaccggggtaccggaccaggaaaaggtccttcttgaccc

SEQ ID NO: 612127 - DNA, 155 bp, Homo sapiens
gcatctcaggtgactagaggatccccctacagactggccgtccaagtcaccatgagctggccctcagttcaggcctctgtccctgtggctgcatgctggtaaaaggacgcacagtgcccgccctggtaggactcccgtggacaagcccaggatag

SEQ ID NO: 612128 - DNA, 243 bp, Homo sapiens
gaccgtagagctacctcaggctcagaatattgggagtcggagaatcgtcaagtatccctgcatacacagtcggggtccgtgtagggtattgctggtagacactcgctgcatctgctctcttgcctgtcctcgtgttgtctctagtctctccagcggccttctctggctgcagatcaggtcgagcatctcttgctcagctgcggtgagaataaggggccgcactatgccgggtagggtaagggc

SEQ ID NO: 612129 - DNA, 901 bp, Homo sapiens
ggtcgcgtgtgcacctcgctgctccaggctctggggcgcattccagccttccagcctgcgagctgcgagagaaaaggaatattactgtattcattctgtgcccgcatgacattaccgttgaggcagagcgaacaaaaattcaaattttaacgcatgagggaaatcgtgcacatccaggctggtcagtgtggcaaccgagatcggtgccaagttctggggaggtgatcagtgatgaacatggcagtcgaccccgatcggctacctaccacggggacagcgaccatggagctggacgcgcgatctctgtgtactacaagtgaagccacaggtggcaaatatgtgcctcgtgccatcctggtggatcgtagaacctgggaccatggactctgttcgttcaggtcctttcggccagatctttagacctagacaacttttgtatctggtcagtctggggcaggtaacaagtgggccaaaggccacgtacactagagggcgccgagctggtagattctgtcctggatgtggtacggaaggaggcagagagctgtgactgcctgctggggttccagctgacccaatcgctgggcgggggcacaggctctggaatgggcactctccttatcagcaagatccgagaagaataccctgatcgcatcatgaataccttcagtgtggtgccttcaccaagagtgtctgacaccgtggtcgagccctacaatgccaacctctccgtccatcagtggtagagaatactgatgatacctattgcttgacaacgaggccctctatgatagtctgttccgcagctctgaagctgacaaaacaaactacgggatctgaagcagcctgtgtcagcacccatgagtggtggtcaccactgcctccgtttccctggcaagta

SEQ ID NO: 612130 - DNA, 426 bp, Homo sapiens
  misc_feature (322)..(322): n is a, c, g, or t
atgagataccatgtcacacccgttagaatggcaatcattaaaaagtcaggaaacaacagtgctggagtggatatggagaaataggaacacttttacactgttgggagtgtaaattagttcaaccattgtggaaaacagtgtggcaattcctcaaggatctagaactagaaataacatttgaccaattccattactgagtatatacctaaaggattataaatcattctatgataaagacacatgcacacgtctgtttattgtggcactattcacaatagcaaagacttgaaaccaacccaaatgtccatcttgtttcacactngtcacattcttgttttaagtgcctttagttttaacagttcactttttacagtgctatttactgaagttatttattaaatatgcctaaaatacttaaaaaaaaaa

SEQ ID NO: 612131 - DNA, 370 bp, Homo sapiens
atcgctgctcacaaacatcttgaaattctgtggcaaatccaaatggaacctggtttctccactttgaacagactctgcttttctagagtcatccccatcataaatactctccagggccaacaattcaccctcctgagcttctctgtcttctgacaacatttaattttctgaggaactgttaataacaatcagaagaaagagatattaacactgcaatctctgtttcagttcagagtggagttcatgcaaatcccatttattctccagctggtggagctgggactgctgaagctggatatgctggcctgtaacatttctgctgtgaagtctgctgatggaagttcccttttgtgtgaaaagtttctttctc

SEQ ID NO: 612132 - DNA, 316 bp, Homo sapiens
aggaagggtcccacgctggggagagccccaagttgagaacaagtaagcgaacaattagttgtactgaagccacttgttacggatgactagctgagatcacaaacaacctgtgtgtaaaatgtatttccctacaaacgtagcacccttcagcaggaccctataaaactttcctccagcccttgcctctttgcaggtagccccttctctgctgagctgcccactgcaacatattttcacaatttctctaataaatctgcccttcttacctacaactatcttggtaaatggctttaccacctgcaaaactgaccctagg

SEQ ID NO: 612133 - DNA, 1036 bp, Homo sapiens
cctgactgtcttgagttgagaggacggggcacaaaccctaccatgaccccccacaggctggtgcaccgtgctgctgctgtagctctgctgctctgtgccagcccaggatggcgccttgggcggtgcccaggctgcgggcaaggggtgcaggcgggttgtccagggtggcttgcggtggagtaagcgaggatgcgggggtcagccagccggatgggctacgctgagaagcctgagtgaggctcgtctcaaggacgagcagggggcagagagtgcggagtacatacacccctctaactttgctagccccaatctgaaattgccatgttgccatccagacccaaaagagaccgactgaggcgccctatagacaggagacggcagtgaaatttagcatacagtagccgcagaagtggctcgatatattgaacattatcacagaagcacctcagaatagcagccatagattgacattgatcagcaaagtaaagtggagaagtaaaacatcacattaaaaggaggacgtgagcggtcagaagacccacccgaaaagggcaaggagcaaaccgtagtccaacgggcacccaaaacaaaaggaggaaagtatgtcgaagacaccacagcaagaagtacggacactccaaaagtaacaggcaatgaggcatcaatccaccgaagcggcacacatcatctttcacttacagcccaaataacgatgcacacgactttccgacagaatgacacacgacacaaaaattaatccatatggcaggtgcgtgatttgaatacaccatgaggaggaacaacagacgattgatgaccgatatattagtgtgggaaccacgacgacattgcacccgcgaatgaaagacaagccagatatactgtgaggggacaagccattactgaaggatatgtacacttgtgcaagaacacgacgaaacagacttagcacacagagaaaacctttgacagtgcgaattgcattatcaccgagcgaaaagatgtagcgagcacagcaccaacacgaatccagaga

SEQ ID NO: 612134 - DNA, 280 bp, Homo sapiens
cggctctgattagagtcataccaagggcatagctccctgatacattgggaaatacagaaagaaaagaaaaaatacaaggcattagttctgcagcatgtccatgaagatcaagcataagaacacatggatctgaggcttaagcatggctagcctatgttctacatacatcagtgactacagggataccaaagatggtctgagcgcctcataagtgtttagtaccaaatatccagcattttcggtaagttctagtctttgactctttctcagaatctatatg

SEQ ID NO: 612135 - DNA, 242 bp, Homo sapiens
gtctgcattgtatatttatgcatctcagctctcttttcttcttttcatttatatattttaaatttaattttaagataggttcactttgtcgctagctgagtgcagtgcatggtcaggtcgagctcaggctatatgcactcactgtacaatgtacctgctctataaaaatcaaaaaaaaaactgggtctctgacgcgggcatgattcacggggctcagtagttacaatgctagtagtgataat

SEQ ID NO: 612136 - DNA, 221 bp, Homo sapiens
tctagaggatccttctgtatccgggagtcccggggaggtgtacccaacagctcattgagaacgggccatgatgacgatggcggttttgtcgaatagaaaagggggaaatgtggggaaaagatagagaagtcagattgctgctgtgtctgtgtagaaagaagtagacataggagactccattttgttctgtactaagaagaattgttctccccgggatacag

SEQ ID NO: 612137 - DNA, 649 bp, Homo sapiens
agcggaggtgttccgtgtgtgtgtgtgtgtgtgtgtgtgtgtgtgtgtgtgtgtgtgtgcatatgtgtgtggggatgggggagaagaagtagggggagaagtaatatattatgaagatagcgccgtgacatatataaaaacgaaaacaagtcagctctcctattatcaccatattatacgaaaggtgtacactccgtagtgaacttcgtgtgcacagatcaatcacaccatacatataacttccaaaagggtgtgcagcatgaggagtgtgtagacaagatatattttaattatattaaaacgcagggatgagaagaggaagtgcagggatatttctataacacaatcatagtgtgtgcttaattacacaaaaatctacgtgtgtggtaaacgagagaggtattagtagctcccatcaaagagatgaagagaaaaacaaaaagcaaaaaaccaaacaaggataatgtagaccatagtttgtgatagtgcatcttcaaattaagccaagaagcagagcagagtagtgcatctttatatactgctcctttattacttgaaggtttgagatgtgctcctttaacaaaaggggtgagacgaaaccaaagaacgacgcttctagaacagtgaagcactctcattatgtatacga

SEQ ID NO: 612138 - DNA, 356 bp, Homo sapiens
ttagcacagtcccacttacatgatacaagcactaatataagtaagcaaaccaaccacaactcttgataatttactcataaaactgtcaccggttcataactgtaatcaaaagactagatttagagctaaatagattgatacgaatcctggcatatataaaccaagagctgcaggagacataactgtgtcactcaatcttactgtcctcatctctaaaaagatgggcagtaagtccagttgtggtgacccacgcctataatcccagcactttgggaggccgagttgggcggatcacctaaggtcaggagttcgagaccagcctgcccaacatggcgaaaccctgtctctactaaaaa

SEQ ID NO: 612139 - DNA, 112 bp, Homo sapiens
attcgatctctacaggatctttaggctatccaccagaggaatgagagaaagtttccggtcgctgagttttaaagtgtggtatcacgagtggtatggctggtatagaggtacc

SEQ ID NO: 612140 - DNA, 113 bp, Homo sapiens
tcgagcgcggtaccgtatgcggtgtactcgtaggtcagtaccattggtggtcaactgatttgatggtcagggagggatcgttgacctcgtctgttatgtgaggctcatgtgta

SEQ ID NO: 612141 - DNA, 165 bp, Homo sapiens
ctgagtgtagcaaagcatcaggagcccgggtaagacccgctctcccccaggcctatagaagaatagtaataacaactccccattttaacagataagacaactagacgcccagaaatttccaagaaggtagatgccactagcctatacttattataggataaacaa

SEQ ID NO: 612142 - DNA, 384 bp, Homo sapiens
cttttttttgtgctctaagcatcagcaaccccagctccaggtgcaaaagccatttacacttgcaaaaaccaggaagataccaagaggcccaattcaatcatcctgttacttgaattgccactgttggagatatagtactttgtattatggtctcattttttcttattttagtgcaaaatgaccagcttaatatggggaggtcatttttaaccatggataccttcaagtaggttacattatatttcatatgcattcatttgtaacctcttgacataagtctacacatcaaagagacacacagagaaagaaatgactttttaaaaataagtataggccaggcatggtcgcacgcctgtaatgtgagcactctgggaggccgaaacc

SEQ ID NO: 612143 - DNA, 466 bp, Homo sapiens
atctcaaatttgggacatcaagagtgtttacctgagccaggtcagggtttctgagcagccacacaaatgagacaacagaccaggatgacttgcctccctaaccaaaaatgtaccctctctgcatgaggatagcagaaggctaatcttgatgggacccaaagggccagaccccaaacacagtcacttcacctcaagtaagcattattataagtgataatgacaacccaaaactgagtcgtggctgctgttttgcaacatgatttcatccaaattctgtggctcgatcctccaggagccttgaaggtgggtactgtccattcactggcttgcctgagatcatatggcacatggcagagtctgaattcagactcagtccttctcatgactcccaggccaccagtgacatctctcccaaagccccaaaaaagttaagggtgttggatgttgccatgaaaatgcaaaaaaa

SEQ ID NO: 612144 - DNA, 657 bp, Homo sapiens
  misc_feature (526)..(526): n is a, c, g, or t
gtcagagatccccggatgggacattcaaaaaaaaaatagtaaaagaaagctcggttggatcggaatcagtttaaaaccgggttctcggattataagcttggtgacttggtggcctcagcttccttatgggtaagcacgtaagtgggtttaaagatggagtaataacatgtacatcagtaaaaatatggccggtaaattatatatagatatggaaatgggtcggccaatcgggggatgggcgaccatgtccacaagtggtggaaaatagccatttttctgggctggctctttccaactccttagtgggatcccattaagacaggtatctagcaaaccaccgggaaaaacacgggtgattcatatgccacccttggtccctcttagaagtggtaggtctatatcgggccgggtcgcgggggctcacacctataaatcccagcaactgggcaggcggaggcaggagaatcattggaaccggggaggccgaggttgcggtgagccgagatggcgccatggcactcaatcntgggcaacagcaacattaaaaagcgggcaatatagaggggaaaagttaaccggtttgggaggagcagagggttacataaattacatgtgggctgtggggctgatgtaggtttgtccttcctagttcttcct

SEQ ID NO: 612145 - DNA, 419 bp, Homo sapiens
ctcattacaatcccatattccagactaggataaggtcgtgcaggaagaaaacgctatccagcatctagcttatactccatcagggtcacagacacaaattgaaaccaaaaatcatagggtaaacataatagatgagctaaaggcagcaagtatgactactagcgatggaaagaaggaggaaactcaaagaaaccttaaaaaaactagaagaggtttggaaattcataccctcaaaaaaacattgtaatttgccctcattactaataacacatagacattaccaaaatcttggtattttttaactattctgataataagcaaactcttgctatttgagaacattattaaatttacaaaataaataccacaagtatgtatgattttgtgaaatattgataaatgggatttagatttagagg

SEQ ID NO: 612146 - DNA, 182 bp, Homo sapiens
tagaacggagctgaactgacacagtgctcagggctgggagaggccgtgcatctgtagcttgtcactgcttccctgttctgtgagggaggtttgtgccggacagaaggcagggcctcagagggttcatcagctcttgttctttgtcctttgactaataagaattgtattgtgggccccgctgg

SEQ ID NO: 612147 - DNA, 1160 bp, Homo sapiens
  misc_feature (565)..(565): n is a, c, g, or t
  misc_feature (633)..(633): n is a, c, g, or t
gtctcaaaaaaaaaaaaaaaaaaaaaaaaaagaaagaaagaaagaaatcctgattctgtcactggggcctcagtttcatctgtgaaatgggttgaatgcgggcgcttcccactgaaaagggaactgccacatgtggttgggttcccggggttcagggccccatttcttcttgcctttcccccctttcaggaccgtgttttcttctcgaccttcgaccttccctgtgggtggctcctgcgtctttctcttcttcgtggaatctcagattcaacttgtgggcggcgacttccgaaggctgaggaccttgccaaacacccttgtgtggccttaccaaattataccaaaaccaaccttctccgtgtggccgtggagagaaccttgtctcccgtggggccccagggaaaaattgttaccaacacccttctctgtgcccctccttgtgaacctccgtggctgtgcacctgtgtctcttgtgggccagtctccgccgctggtgctctcatctccaaggtcttctcctatagaaaaaggctctccttctgtgtgtggggcctctctgtgtctncctgtggagacgccgccgtggggtctccgtctctgtgcgcggggggagaaccccccagggagaatgtntctcccaggggtgtcgcccccagcaccaaaaagggtgtcgcaagtggggcgctctccatctctatagcggccggccatgacacgcgcgtgtgcgtctcgtggggggagtgcgggggcacgtattttatttctctgtgcgcccctttatacctgtgtccccctgtgtcttttacaccacgcgggctccaaaggtctcccccgtgcccgtgcctttttctctttaccctttgagagagaagcgctttaccccctctcttttctgtcacaccacttgtgagtctcccccgggggtgtgcccggtgaaccctttttcacggggggcctctccgggtgctgcagaatttttctctttttttcccccccttttgggccccccttatctctcctgtggggtctctgtggcccaattcttcccagaggcgttttccccccgttggctttacaccggcactcttctcccgtgaattcccggccttccttaaaggccttggcgggccccaattctccggggggccagtcggttccaa

SEQ ID NO: 612148 - DNA, 1031 bp, Homo sapiens
agaaagtgccctttgctctgtcccgctgctgtggacgtgaatacaacgcttgcggcagcaagacttggcgtgcgccatcttcgaatcgtcagcttgagagatgacgaagccactgcaccgcttggcccagctagtagaccatagggctgacacacgctcaccggcagcagccctccagcgcggaggatcatacgctacaagtgctagcggcgacgcttagaggtgacgatctctagggagctcaaaccgcaactaagtattccctatctctgaccagcttatgcttcgagccacaaacattgtatgcgtatgttcccataagccaagcgttgtcgtagccgcagacagataccccgtgtatgcgcatctacacatctactgcgcacgtaggtgacgtgaccgtactcacactcgcggaatcgagatggccatccgtcgtagcgacgtgtccacttcattattcattgagagatgaccacagggaggaaaaagataagcgtctatggttagggctcgctcaaaggaaagtgcaggctccatgaagttggcccgcgacgcccactaaggttgcgttgagagttgagcgtaaaacttccctagtaacatgtggacacatacgggcgcctcgtcccgagccggtcgataggtggggccatgaaacaggatagggtgctaagtccccgagctgttggacgacgtagtgccgtagtcctcggatataagcataaaatggctccatatatgtggacgtagaagaaccaaggacaactgcagttaacaaaaggcatctaccggagatggctattcgccatacaggacttaaaaacaatccaaagaaatctaaccagcaaaaaaacactatccaagcgataagtagaaaagaactaacgaaaaccctgaccccctatgaaccgccaaaacaacaattggtaacaacattgggcttatataaggactacacataatcccagatggaatacattaagtagatacaaacagaacaagattgtagaaaatggaaggaagagaag

SEQ ID NO: 612149 - DNA, 361 bp, Homo sapiens
  misc_feature (331)..(331): n is a, c, g, or t
  misc_feature (335)..(335): n is a, c, g, or t
taatgttgctagtgtagtgaagaagataatgatttagtttttcttctttctttttttttttgagatggagtttcgcccttgttgcccaggctagagtgcaatggtgcgatctcagctcaccaaaacctctgcctcccgggttcaagtgattctcctgcctcggcttcccgagtagctgggattataggctcatgtcaccacgcctgggctggttttgtatttttggtagagacggggtttctccatgttggtcaggctggtcgcgaactcccgatcttaggtgatctgcctactttgggcctcccaaagtgctggggattacagggcgtgnaacncggcacctgacaaatgatgtagtttt

SEQ ID NO: 612150 - DNA, 120 bp, Homo sapiens
cactctagagatcccctgcttgtctgctctggaaggttatttacttcggctaagatttcagaaactgcgtacctgcaatatctgatggtacaggcacggttggtccactttcaggtgacg

SEQ ID NO: 612151 - DNA, 104 bp, Homo sapiens
ctctacttcccctgttaaatttactgttagtccaacagcaggaacagctctttgtgacactaagaaaagaaaccttgtagagagagtaaaaaatttaacacccg

SEQ ID NO: 612152 - DNA, 110 bp, Homo sapiens
tggcgactctcgaggatccctccctgtcccccaagatacaggctgtctggacagcagatatatattaatatattagtctggtctttttggttaaactttaggcaccactt

SEQ ID NO: 612153 - DNA, 344 bp, Homo sapiens
ggatcctcgtggtcgatcactgtactgagtaaattatgatatgtgaaatgtctcattgtatacaaaaaaaaaaaggtttaaaaagttacttccttacaaaatcatgccttatttaacacttatataatgctctgcccttagcagggggcttaaacttgacatttctcatattacatcctccataattatcatgtgagggcaaccagagtagggaccatgctctttgggaaaaaaaagaaacatgatgtccagatgaggccacagttccggctagcaattaaagcacccagagcccagatcgaaccacaattaactcaatagatccggggtcaaaaatggggtcc

SEQ ID NO: 612154 - DNA, 1112 bp, Homo sapiens
  misc_feature (1112)..(1112): n is a, c, g, or t
cggagctgcgtccccgcgccggcaccctgcgcgccgctgctccgcacggcgctgcctccctcgacccgtggctccccctcgcaacttggcgggcctcctcacttttgtcctagcccggtccggccgccgtcgtcccccacgcgcctggcgccgagctcccgtggtccccggtgccaggctgtcggtgccggcatggactgcggagggtggcgggggccgaggatcgtcaccccagcggatgagctgccgccggacggaggcgcggggcggacgattggaacttccacgattcctggaagcaccggggctgcaaagtttgcccaagacgtcgccaagagaagagttatcccgaatgtttccaactaacggggaccttgaatcaaaaccttggccctatccatggtaactacaaaagaaccaagggtgcaaagggtatcattaccaaggtcatgggacctttgaatgaaccaaccatgcaagtgtgataattataacagcacgtaatacaaatagggatcagaaactgcacgagaaacgggaaatttccctaagacatgacttgtgcccccatacacatacaagaaaagacaacccttgcacatgggttgagcacggtgaattggtgccaacccctgtggcatgtggaacccctataggaaacccaggataagggtatggatcacaccagaggactcaggaatatgaaacaaatagcattatcgccaaacaccaaagaagattcccccaaaggacgcaaataattagcgatgcgaagttggaaacaccaaaagagaataatacgagcgccaaaaaggggctaacaaagtgagcaaaatatagaggagccgcgcccccaacacatgggggcagatatgaagaaacccccaaggagaaaagaagcaaactattaaattaccgcaggcgagatgaacgaaaaccaattacgacccaataggagagccacaacaaaggtataaaaatcaccaaaaaaaacagaaggcgaaccagagtatacgaacagacaccagaacgagcgacagaaaccactaacaaagagacagagggaaaccacgaggaggcgcagatatagaggaacaagaacgccacacagn

SEQ ID NO: 612155 - DNA, 154 bp, Homo sapiens
gtctctagaggttccccagcgagcgcacggtatgtgtccatagaccctcgcgccgccgcaggtcaccctctgccttcaccacgctgcttgtggagggtgtggagatatccacccctagtcctcagaggatgggcagtttgtctccctttcagag

SEQ ID NO: 612156 - DNA, 316 bp, Homo sapiens
acgggtgaggtacagcatcctacaagtggcagtaagggtagaagaaatcagttattagcgaatcgtggtctaagttactgggttagtccaattctgaatacacaagtaatattctagcctcttttcaggaggagactgatgtacagtagtcatgggcaggccatggaacaaagttccattgctggcctacagtggattggagggttgctccgcagagagtcgtaactgagagaatatatgagagcccacaaacccactgctcctggctgtccaaggccaaaggcatcttcttcctggagagctgtacctcacccgt

SEQ ID NO: 612157 - DNA, 277 bp, Homo sapiens
gagcccaagctcagacctatcatgtcagcttcgagactttggccgaggtggacggatcacctgaggttgggagttcgagaccagtctgaccagcatggtgaaaccctgtctctactaaaatacaaaagattagctgggtgtggtggcatgcacctgtagtcccagctactcggaaggctgaggcaggcgaatcgcttgaatccgggaggtagaggttgcagtgagccgacatcgcgccactgcactccagcctgatgacagagcaagactctgtctc

SEQ ID NO: 612158 - DNA, 221 bp, Homo sapiens
cgagcttcccacgataaaactactcacggctacgcttggatctcactgactaaaacacaggactcaatactgagctccttctgtgtggatctaatattcatgccttggtcgctatattggataatctctggggtagtcctcctggtacgcgccatgatactcatcagggtattctggctgataatcactatcactgatttccgacccatttgttcctgttc

SEQ ID NO: 612159 - DNA, 1449 bp, Homo sapiens
gtgaactgcacgataaaggaactcagagcgcctctctcttagttgatagattaagttgatatctactgaagttatgcagtgtttgatagtggtgtatttacctaatagtatggtagcctatgtttaatgggtcgtgacactaactagatttttggctactcaatattacacatcattcagctagtatcctagtataatataatagacacgtgcatacagtgcacatgataagatacatataatactaagtgactcttgcaaattaacgaatagtataaatgattgctaataggctaaaacataccacaggcacaaaatacgcctaggatttgaatgctgcaacagctgcacagctgcacaaaccacgccgcgaaaacactaaactaccagctaacggcaggtctccatactctaccaaacacgcggcgactaatataccactatccgcactcctcatcaccacggcggcggccagtgggcttaccaacgcggcacacgcacacccgcacacccgcgattgcgaaccgttatctgtaccaccgtatagctcaacgtatcatgctcccaccaggaacatacggattctggcattacaaaccaacatcccgttatacaacatctctctcctaagcacacaaattgtccatacatggcgtttggctcacacgtgtgaaaaaccaccacatctcaaccctatggctctccctcattgaacccttcgtcccaaccatgcatgcttctccaccttccaacttcctacccaaactgccttactactgggctcaaaccgcccccttgcccatcaaccctcgcactcccttagccgcccctacccctcaccaccaaccacctctgcctacaaaccctccccaactaaacctacccacatccacaacaccccactacacctccctctaacctccccccgcacaaccccgccccaaccccccgcgcctccccgaccaccccaccccacccacaccaccccccgccgcccacaccatcacctctcccccaccccccccccacgcgccccctcgcccccccccaactcaaccgcacacccatacaggccccccacgcctcacactccacccctgcccccccaacccccccccgccccacgcacacccaccccgccccccacgcgccaacgcccccatacgcaacaagccctccccaccccctcaccacacacaccacacgccacaccatcaacaccccaaccacctcccgcccgccccccccccccccccccctcccaccccccaggccctccccaccccttgccccccacccccccccccccccccctcccccacccctccaccaccccccacccgccgacccccccactctcacccacctcccacccccccccccccccccccccccccccccccccctcaccccccccccccactccccctccctccccccacctcccct

SEQ ID NO: 612160 - DNA, 127 bp, Homo sapiens
tgtgctgaggtgactctcagaggattcgcccaggtagattaaaggtgagaaaagagccagccatttgaaaagccttaagaatgctttaaacagccgggcacagtggctcacacctgtaatcccagca

SEQ ID NO: 612161 - DNA, 331 bp, Homo sapiens
acccaccaacacacacacacacacacacacacacacacacacacacacatatatataaatcgcacccttagcaccagtgctatctttgtgtgattcctaccatgaaagtctgcactttaaaaagcaggaaaatgtgaaatctacagatgtggatcacactcaaacttgtattgggacacaagaacttctccctctcaggccacagtatgtacagagagatgtcgcccatgtgtggtagagacattgcgtgagagagaggtggtgattaggaaaaatgtgtctacaagagttcctggggagggtgatagtgagactgtgtagacatttgtgt

SEQ ID NO: 612162 - DNA, 210 bp, Homo sapiens
gtctctacaggatccccgcgtgatggagactgcctggatctctcacgccctaggacagagaattaagggactggggacctggtgacatttcttctctctgaaatagataggaaagacaggcagtttccctttatatttcccttgcttcaggtttcacagtgtaacttcagctggcactggcagaagcagaagggaggggcatctcccctg

SEQ ID NO: 612163 - DNA, 186 bp, Homo sapiens
agacccagtttccccaaaaaataaaataaattagttgggtgtggtggtgtgttttcgtagtcctatctccttgggaggccgaggcaaaagaaccttgagcccagtagtttgaggctgcagtgagctataattgtgcccctgtactccagcctgggtaacaaagcaaaactccatttatttatttta

SEQ ID NO: 612164 - DNA, 236 bp, Homo sapiens
cgatggggtagaactagaccaatgaaaagcttttcccaccaccttgacgagcaagacctgttgctcttcagaagaaggatactagtatggttgtgtaacattaatggccatggcacatatgttgagtcaatctgatactaaaagctcactcctcgtactcaaattgatcacattcactcacaggaaatgaggaggaatgattccttatcccttccatccagtatcagtttaccttt

SEQ ID NO: 612165 - DNA, 359 bp, Homo sapiens
aacatcccgcataagcagcgacactggaaggcaggctggctcagacagcacaccgagcacgaaagtaagtgccctagaacacaacagctctagcataaacaagacatcaaatcaaaacaccgaaaagccctatcagttttagtcacttgtcttaagcccgtaatggtctcttacatagtcaaggtcactgattcaattaggttccttccaaaaggaaagagggctcaaattgttacagtcaccaggtccacccactctaggactcatgctctgaacacacacatggcagtcctcccagaccactgtctgctactgcatactggacacagtccacagtcttctcttatttgagtcgacgc

SEQ ID NO: 612166 - DNA, 382 bp, Homo sapiens
ctaaaaaatacaaaaaattaattagctgggggtggtgacaggcacctgtagtcccagctacctgggaggccaaggcaggagaattgcttgaacccaggaggcgaggttgcagtgagtcaagatcatgccactgcactccagcctgagcgacagagcaagactatctaaaaaaaataaataaagcttctcagtgataccagtgctgcttttctagggaccagctattgaatggttctactatagactgaacaaagatttgccagcctatgggtcataaggtttgaatttatctggtgtgctattagatatgtataaatgcccccatgtagatctgccttgacgtgaacaatgcttcaaaagtgtcatcaactacaaaggagaa

SEQ ID NO: 612167 - DNA, 248 bp, Homo sapiens
cctgaggtgtgatatacatacagccaagggcccaggttttagatatacagctcagtgaagcttcagaaatgcatgcatgcatgtagccctgactcagatcaagatacggaagagcccagccctccccgatggtccctcatgcccccttgcagaaaaaactgcctcctccagtaaaccctattttgatgtccctatagattagttttgcctttttgtggactttggataaatagaactggaccatatga

SEQ ID NO: 612168 - DNA, 394 bp, Homo sapiens
  misc_feature (20)..(20): n is a, c, g, or t
caagaggaactgacaccacnatttcccttttctgtggaagagccccccgtaggtgaggcctttatactagcccccttttttgtaaccaaagggaaaaaaaaagttcctttggctggctgcaaagtcccaaagggcccgtttaaaaaaccaaaaaaattttaactaacccgtaatgggcatgttatttggaagggctcctttaccccctttaaaccccctaaaaatgccctttccattgtccaaacgggaatggattgtggtttccgttttaatgaaacccatatggaatttccagtgggggccaaaattttttttttttaaaaaaaaccaattccaacccaaactttttggggtcccgggtttttaaattccctttaaaatgttaattacccca

SEQ ID NO: 612169 - DNA, 935 bp, Homo sapiens
tactctgagtgttagtgaatatcgagcgtggggtggcgtgggtggggcacgccgatgtggcattggtgatagaaatggatctgtgatacctgggtacaggttcattctgttcagacgacagcagaaaggctctgagatggcagcagtggtctatcgtcatgatcaagtcacagggttacccagacaggtgatgtcacaggtagttgtcactctattgatcagcgagtattggaagatcctggacgtagacggatataagccggtcgcatacaaggcagatcttccttacttaactaacattccaaacattcaatacgtctgcggagcactcgttcgtgctagggcttccatggtaagatttcctacaaaagtgatgtgcgctgtatcgccatgtagggaagatttggcgttatctaacgttaggaattcctacggagagtacaaacccacaggtgtttgggagcaattaattgactgtgccagagatatgaaagccctagggttgtgaattctaacccgagctctttagaggccctaggttccacaaacagggttggttacggaacgtgggtccttttacccacaaacatggagatccaggggcacaaggcccaaggatccttatagtggggtccttagagaatttttacaagggccctaagtgaggttcaacggggggccatgatttcaaagggaaaccttctgggagagaatgagggtagaaggtgagcgggatcgaacagtttgggggataacacagggcgaccaatcgagtggccacatatacggaccccgggtcagctattttcccccccctataagaaggttatgcacaagttccgtgttatgctcccccagagaaggatggcgaatggacaatattggggtggaggcagagatgaccgagagcagttggaatttggctttccgaatta

SEQ ID NO: 612170 - DNA, 893 bp, Homo sapiens
catggtggcacacgcctgtagtcccagctacttgggaggctgaggcaggagaatcgctcgaacctgggaggcagaacttgcagtgagccgagatcacgccactgcactccagcctgggcgatagagtgagactgcgtcttaaaaaaaaaaaaagaggggaagaaaaaattggtccaaattggtttaaaattgtttggttgcagggcaatggaggctcaaaccttgtaatcccagacatttgggaacgccaaggggggggaaaattcacaaaggtcaggctattggaggaaccaggatgccaacatagtgaaacctttgtttctactaaaattaaaaaaaatgagctaggattgggtggtgcatgcttgtaatcccacttattcggagggctgaggaggagaatggctggaacctggaggcggaaggtttgcagttgagctgagatggcaccaatgtgactcaagctgcgcgacagagtgagattctgtctcagaaaaaaataaacaaaaaaaaaaaatgtggggcggatcgggctaaaaaatttataacaattgttggggggggggggccaagtagggtaagggaacggtccagacggtcccagagagacccggccgcgaggagtcgggcttccccccaaaaaaaagaccgggggggcacgcgaggtcggaacaacccgaggggcctgcggccacagggcttcacagcgtccagcgacgtaatacccccccggcgacagcggtagaaaacagacagagcccgcaaccaagagaagacagagaggaacgcaagcctggatccgcacaaacacgccccgccaacacgcaactgaacgcgagactccggacaacgaggcccacccgcggagcgacgaaccaacagagcagacccaa

SEQ ID NO: 612171 - DNA, 1541 bp, Homo sapiens
tgactgatggcccgaggccccgcctgcccctggtgccccatcagaccttaaacccctgccattgtccccccagaacatgctagcgtagatggtgtggcttacctcgcccctcatctgtggtgtgggtgtaggggtgtggagtggacattgcccacgcctctcaccatctagcacttacattttagtagctagccactcctagcacccatacactacagtacctccctacatcaccactatcctacctactactgtgtagcctacagttctgccttgcccggcaagcaaatagggtctagagccctgaaacgggacgggcatcgacgtaggacggaacacgggcgccgaacggcgcgggggcccctaggcaggtttgggcgatccccacaaaaagctacccaccgcccccgccaaaagcccaagccaccgcggaaacgaccaccacaccaagagcacaccaaagggcgacaacaacgagcaccagagaacgcaacggcgcctaccagggcgaggacgaccagtcacagctggccaccccgagtccaacccaggcagctgacgccctgatgcgctcgccaggacccaaaccgcaagctacgacgaggaccaccagaacgcccaccagccgcacccccacacccaggacacaggctaacacacccactgcacacacgcgaaaacgacaacgggccgacacgaaacccgcccaacagcccgaccaaaaagacacgaacgagagagtccagagacatgccaacccccagtagcagacaacgacgcccacccgacccagccaacgaacacacaacacaaacacgacccacggcaacaagaaccaagacacataacccaccacagcgcgacaaatacacaccgacacaacgccgaacaccaggaaaaccgacagcaccgacaacacacacgcagagcaagagaccacgaaccacagaaaacaccgaaagacaagcaccgacgccaggcccgcgctacaggcgacagccacagcccaccacgaccgcagccaccagccggccgcgccggccacaaagcacacagcccaccccgcacccacggagcgccagcatgcaggcgaaccaccacccaacgacgcggcagcccacaggcgacaacgaacacagccaacgaggcagcacgcgcgccggagacggaacacgcacccaacgagccacgccacaagacgacccaacccgcggacgcaccacgccgagcgccgccacgccggccgacaccaccgagcaccacgacgactagaagcgagaccggcgaccaggacaggacaggaagcagccgacacacgcgccacgctcacacgcgcacacaaggccaaccggcacgcgaccgaccgctcaggccccagacgccaggaccgcacagtaagacgaccactcgacgacgaaccccccagctccagcgcacgacagccgcacggactacacgcaccgcgactcgagaacgccgagcacacaacgccgacaccgaaagacacacacaccgcgagccgacgaaggcgaccaacgacc

SEQ ID NO: 612172 - DNA, 328 bp, Homo sapiens
caaatggaatcctgtagtgaaccgagtctaccagaaaacaggctacaatctgtgaccacacaatgatgtggactggatggcagctagaatgttatgattcagatggggacttttcttccccttccctgcctagtttccttttgttccttgagtccacgcagaattccattctctggtcagcagacaggtttatgctaaagtattgactctattctgtaaagggctgtacatagttcccaagcttctgcagggggtgatttttgctcttgtcctgagaaataacagtgctgtttaaaaaaacatttgaaatatgtaccgcacacaaaga

SEQ ID NO: 612173 - DNA, 377 bp, Homo sapiens
tttaagtgagcgtcgtgttataacggaaaggcttaaacagaagcagtgttgctgctggcggttcagctggtgcatgagccggtgatccaccagaggcgccacctaaaccctggagtgttacagtagccttgcctctcgagtagcagagcacaaacagcacagacacaccgcacactgatcatggtacagttcagatagactttgacacttacacgttcagatagcaacacagatgctgctgctgaggagacaggtgtcagcaccttttcctgccctctccagaggcgagggcccatgagccccagcacacagaagcccaggctttcttcatagcaacccctggccaagatttcttgggtctctcgccatggcggcgg

SEQ ID NO: 612174 - DNA, 174 bp, Homo sapiens
cacgaggggacctgtcagatgggccggcatgtcgccttgagctcttcggagagggcgccgtatgtggtctcggaagtgagaatctgctccgggcttgacatatctctcaagtaggcggtcaagttcacggtatcgtcagagatgtcccactcctcttccatcaaatccccgtaa

SEQ ID NO: 612175 - DNA, 377 bp, Homo sapiens
  misc_feature (316)..(316): n is a, c, g, or t
cgggaggccaggcaggaagatcacgagccccaggagtttgaaaccgcccaggcaacatagtgagaccttatctctacaaaaagaaaaaatagccaggtacagtggctcatgtctatgatcctagcactctgggaggccaaagtgcacagatcacttgagtccaacagtttgagaccagcctggacaacatgatgaaaccccgcctttacaaaaaataacaaaaaaattagccggctgtggtgttgcacgcctgtagtcccagctactagggaggctgaggtgggtggatcacttgggctcaggaggtcaaggttgncagtgagctgtgatcacaccactgcactccagcctgggcaacagagcaagaccctgcctcc

SEQ ID NO: 612176 - DNA, 158 bp, Homo sapiens
ggagagaagaaggcagcaggggccacttcaagcttccctgcttcctaagcttaggttgtcagaagcctttttaagagaatacatttttagcaaagggagcaatagtgtggtagcagtttactacttgcttctttttttttggtttgtttcagagtatt

SEQ ID NO: 612177 - DNA, 287 bp, Homo sapiens
cggggaaaacaaccgccatggaatgcgtaagcattcgctttgccttttcctcggggaaaaccaacggccgaataaccgctcgtcttggccgccctacttcatgagggccaacctcaagaaacttttgaacaagaccaacaagaaggcagttgagtcctgaaggccccgtgctccccacctctcaaggagtctcatgccgcaggttgctcagaaactggttctgttcccccagccccttggctcacctgaagtcctatcactgccgctctgcccctccccatgagcca

SEQ ID NO: 612178 - DNA, 92 bp, Homo sapiens
cctcctccaggcaatgagcaccagggggggtccagcccttgcttgggaggacttcaatagtccagttgctctgccgcgagtgggtgagtgag

SEQ ID NO: 612179 - DNA, 160 bp, Homo sapiens
cgacttggtaggtgaaatgtggttggagcagctgtcagcttggggaaaatcactcattcaggtagtcagcccgaagtgaggctgcccttcagcctggacaaacactgcattccacacagggaacaagcgggtgctttccctgtcccttccccttaggggc

SEQ ID NO: 612180 - DNA, 445 bp, Homo sapiens
agccacatgtattctttccacatctgaccactctggaccagtggcaggatttcaggtcatacaaagtggtggagactgttgtaacagtactgtacagtctcagtcggtaggatctgctttgacctggagttcagtcactgcgtggtgagcgctggagcagtctgtccgtagatacatgcgcttgagatagtctcgagttcagattctagtaagtgattatccttccaagcgtggatgatccaagtgttgaggatcatgtcgtctgataagatctacagcctgttatcaacggggatccttaactaccatttgtacatctgagacgtaagaggctataaccaggctatggtcaaatgcgcagtaaatacattcgaaaaatggtttgactagttcggctggtaggattaaggctgctacgtgcagttgaaatcgtgccgaattcctg

SEQ ID NO: 612181 - DNA, 186 bp, Homo sapiens
ctgtggtcccagctactcaggaggctgaggcgggaggattgcttgagcccaggagttggatgttgcagtgagccaagatcgcaccattgccctccactctgggccacggagcaataccctgtctcagaaaacaaacaacaaaaagcagaaacgctgaaggtgtcggtttacgggaaaaccgcctgt

SEQ ID NO: 612182 - DNA, 405 bp, Homo sapiens
agctctctaggtgtgaggcagtacagagcatctggctcctggtgaggagggtcctcactcggtgaccacactgcctgggttcacagcatggagggctcacccatgcagggacacgggtggacacccactgcttcacatgccttattcacattagaaagcatgttacagcctttcagtctgtgcaattaaagagatcctgtatgaaatccactcattccttgggagggaagctggactccggaggcacgctcaggttgacgggtgacgcacagtcctccagggcccgcattagcatccatgacacagacacacgtgaacacccagcccgccggtcctatcagccacctgtggggtggatgttatggatagaaatggatgactgaattcaggggtgggaagaacttc

SEQ ID NO: 612183 - DNA, 481 bp, Homo sapiens
  misc_feature (71)..(71): n is a, c, g, or t
tgacttatttaggctgttgaaggtaaaaggatcaaggaggaattctatattccataaaactatccttcaangatgaatgaggaattaagacattcccagataaacaaaagctgaggggatttattgccagtagacctgcccacaagaaatgctaaagggagtcctttaggctgaaatgaaaggaaactagacagtaactagaagccatatgaaaaaataacaccaatggaggtaactacatatgctgatgtcaaagccagtattattgtatttttggtttgtatctcccatttttcctatatgacttaaaagacaaatgtataaaacaatgattataaatatatgctagtgtgcacatactgtataaagatgtaacttgtgacaataataacataaagggggaggacagagttatatattatttatatactgtatgtatattttgcatactattaaagctaagttgctattaatttgaact

SEQ ID NO: 612184 - DNA, 873 bp, Homo sapiens
  misc_feature (59)..(59): n is a, c, g, or t
  misc_feature (61)..(61): n is a, c, g, or t
atcatagctactacttcattgcaactttattactgaccagatcagacatcatgctaaananctgggcggcactgcgcccggcgctcgcgtccgtccgcccgtccgcccgcccagccatgactgcgccggtccccgcgccgcggatcctgttgccgttgctgttgctgctgctgctaacgccgcctccgggtgcacgtggtgaggtgtgtatggcttcccgtggactcagcctcttccccgagtcctgtccagatttctgctgtggtacctgtgatgaccaatactgctgctctgacgtgctgaagaaatcgtgtggagcgaggaaaggtgtgctgtgcctgaggccaggtgcctgccagtgtagagccggtggagcagctgggctcggcgcatgaggttcgccctggatacaacgaccccatgtcagggttcggagcgacattggccagttggcctgacatctatgtgctgactgtcgtcactatcatcatctgttcacctgctcctgtgctgcctttacaagacgtgccgcgaccacgtccggttgtcaccaccaccaatccacactgtggtgcatgccccttatcctcagcctccaagtgttgcgccaggaacctggaccagataccaggctaccaacaccatgcgctcagcagggaatgccggacagacgctaccaatgaggaacccaccaaccttaccaggcaggccagggccaccggctacacgaaacctgtggaggggagcggcgcaacccggcggcagctctgaacccgctctgtcccgaggggcagagagatcatggattcagcgcacaggaggagggacacagaaaaggagcaaccaggaggggcacgggcaccaggggcggca

SEQ ID NO: 612185 - DNA, 375 bp, Homo sapiens
  misc_feature (19)..(19): n is a, c, g, or t
  misc_feature (162)..(162): n is a, c, g, or t
  misc_feature (292)..(292): n is a, c, g, or t
  misc_feature (337)..(337): n is a, c, g, or t
tgaacttaagtcctttatntctgtatgttctcaaatggctagatccattccaaaaaattctggagccaattatttaagttcccagataacaaggccgggcactgtggctcatacctataatcccagcactttgagaggctgaggcagatggatcgcttgagnccaggaattcaaggccagctttgacaaaatagtgagaccccatctttacaaaaacaaacaaattagctgggatgatggtgcacacctctagtggctactcaggaggctgaggcaggaagattgcttgagnccaggagttggaggctgcagtgagctatgatgataccaccacacntccaccctgggtgacaaagcaagaccccatatctttta

SEQ ID NO: 612186 - DNA, 101 bp, Homo sapiens
tgatgaagggatgaccgctggttctcacgctgtcatatttcaggatagaggacaggagctggtagatgggctcaaagtctgcctgcaagcggctctgaggg

SEQ ID NO: 612187 - DNA, 321 bp, Homo sapiens
  misc_feature (59)..(59): n is a, c, g, or t
  misc_feature (61)..(61): n is a, c, g, or t
  misc_feature (214)..(214): n is a, c, g, or t
atcatagctactacttcattgcaactttattactgaccagatcagacatcatgctaaananctgggcggcactgcgcccggcgctcgcgtccgtccgcccgtccgcccgcccagccatgactgcgccggtccccgcgccgcggatcctgttgccgttgctgttgctgctgctgctaacgccgcctccgggtggtgagccgggggtgggggcggnccgtcctgccctgggaccgggcagacacttccccgcgctgcctctccaacgagccgggcagcaccagccccactatgccccccactgacccctgattgccccgaggc

SEQ ID NO: 612188 - DNA, 170 bp, Homo sapiens
  misc_feature (3)..(3): n is a, c, g, or t
  misc_feature (170)..(170): n is a, c, g, or t
atnctgtaaacaatacctttgatactttttagaaagagattatggccaggcgtagtggctcacgtctgtaatcccagaactttgggaggccgaggtgggcagaccacctgaactcaggaatttgagaccatcctgggcaacatggtgaaacccatctctactaaatacgn

SEQ ID NO: 612189 - DNA, 255 bp, Homo sapiens
taagcttctcaacgtgaactaatggctgcatttacaaatgaacaattggtattttcgggataatttttctttctgaactgtgctacttctaccattgcacgtctgtcactccagatttcttcggctctgttcatgtgaaacgcaatcgggaaaagaatgatggcttttttggttttttgagccaattcataagcccaaggtaaatatttgtcccactttttctcgttcatcctgagccagaatcaaaaaaaaaaa

SEQ ID NO: 612190 - DNA, 141 bp, Homo sapiens
gtctaggtggaaggggagtgagcagacactcgggaggtgtcttgagattatcatccgctgagggtggaaggggatagagcaggcactcggcaggtgtcttgagattatcatcctgctgagggtagagcttgagggtggaag

SEQ ID NO: 612191 - DNA, 1234 bp, Homo sapiens
  misc_feature (201)..(201): n is a, c, g, or t
  misc_feature (310)..(310): n is a, c, g, or t
atggcagcaagaaggcggctggtgggtgcaagatggcggtcctggggtagaggttggcaagacttcctgactaagcgtaggtcgacgtaactatatcggggtcactcggcgtccagacctcaacctaacctcttacctggcacgatgccggctatggcgaacaggaactggatgccatactctgcccttatggagatagcnaccaagagggcctaggatctaggccacaacattggatgcaaccagtgtagaagccagttgtagcggacctttctcctagacttttccctagaagtatccgattcccctnattctgtcatccaatacctgcattccttagaaggttaagactgatcgtttttcttcgaggatggtgtggagagataatttttccgtgtaggggctagttgctggtggcttaaaagttatactccgaagcacacagtggaggaaaacgagttggggacgaatgagtgtctgaagatgtgggagtgaactctgtcgcaagaggacactttctctctagtgcactctccatgaagtgagagtgattccttggtggggcgagagatgccagtcgaggccgtgcgcggtatgctaggtgaaagtctgggcatcgacattaagttcgctgaagagggaatgaaatgctgcaatcgattagtaatttcgtgcagagtgtaggatttcactattggatcactggtaaggaagtatgaaagctaggtggatgaagggtggcgttgcaaaactttgcttcttgccacgagttccgaaaggcatttaagctggtgggggaattctgggagacaagaatccccggttggaaactggactccgaggggtgttaagcgagacacccaggtacgactggaagctacaagttgggtaacccattcctaacaggacattgcccccatggatgcagccttgggtatccagatggacgtcaggttttaaaaccaagcggggtcagatctatacggtgcccacaagggtcctgggcggtctgccacccgtgcaacccctggctggccgggggaaccatgggggcgatacacccacaccagaatcagccgcggatggcgcaccgcaagcaaagcaccacgagcggagcacaaacccgcccacgaggcagacaaagcaaaacgcacaacacggagaacacacacgcagaggccaccacagagacaaggagggccaccagagccgccacaaacccgaagaccacaca

SEQ ID NO: 612192 - DNA, 2794 bp, Homo sapiens
tttcagactccgactaactacgcggggactccgaggcgctcagaaaaatgaagccgacccggccctgccccgagggacgctccaagagggcggaggtgcagggagggccccgccacaattcgcggtaacgcaagccaggctcgggcggaagggcggccggagccgatcaaaggctggctccgggcaggggcagcgagggagcgagggggagctctccgcaggccggtgtcccggaggaggcataattggagcagggcttccaaggtcacggagagacgccgggcaagacctcttaaggatcctcttccgggcttgaaaggcaggcgtcctcccgaaccgcgcgacccagccaagaagagccggggcggggccggggccggggccgggggccgactcgggaatcttcggccgaggctcggcaatccccccatcctccgtccggggcctccagcccggggccgatccggaaacagccgagcggatccggaaacagccgagaggacccggaagcggtgcgctccgtcaccagggagtgcgggaatccgccgtttgcgctgaggcaatggcggcagctgcgccggtggccgcggacgacgatgagcggcggcggcggccgggggctgcactggaggactcccggtcccaggaaggggcaaatggtgaggccgagtcaggtgagctcagccggcttcgggctgagctggcaggcgccctggcagaaatggaaaccatgaaggctgtggcagaggtgagcgagagcacgaaggccgaggctgtggctgcggtgcagcggcagtgccaagaggaggtggcctcgctgcaggccatcctgaaagactccatcagcagctatgaagcccagatcaccgccctgaagcaggagcgacagcagcagcagcaggactgtgaggagaaggagcgggagctgggccgcctgaagcagctgctgtcccgggcctaccccctggactccctggagaagcagatggaaaaggcccacgaggactcggagaagctgcgggagatcgtactgcccatggaaaaggagatcgaggagctgaaggcgaagctgctgagggccgaggagctgattcaggagatccagagacgtccccggcatgccccttccctgcacggctccacggagttgctgcccctgtcccgggatccatcgcccccgctggagcctctggaggagctgagcggagatgggggtccagccgctgaggccttcgctcacaactgcgatgacagcgcctccatctcctccttctcccttggcggtggggtcggcagcagctcctccctgccccaaagccgccagggcctgagccctgaacaggaagagacggcctcgctggtgtctacgggcaccctggttcccgagggcatctacctgccccctcctggctaccagctcgtcccagacactcagtgggagcagctgcagacagagggccgacagctgcagaaggacctggagagcgtcagtcgcgagcgggacgagctccaagagggcctgagacggagcaatgaggactgtgccaagcagatgcaggtgctcctggcccaggtccagaactcagagcagctgctgcggaccctgcaagggaccgtgagccaggcccaggagcgggtgcagctgcagatggcggagctggtcaccacccacaagtgcctgcaccatgaggtaaagcggttgaatgaggaaaaccaagggctccgggccgagcagctgccatcctcagccccccagggctcgcagcaggagcagggcgaggaggaatcactgcccagctctgtgccagagctgcagcagctgctgtgctgcacgcggcaagaggcgagggcccggctgcaggcccaggagcacggggccgagcgcctgcggatcgagatcgtgacgctgcgggaggctctggaggaggagacagtggccagggccagcctggaggggcagctgagggtgcagcgggaggagacagaggtgctggaggcctccctgtgcagcctgaggacagagatggagcgggtgcagcaggaacagagcaaggcccagctcccagacctcctctcagaacagagggccaaggtgctgcggctgcaggcagagctggagaccagtgagcaggtgcagagggatttcgtgcgactgtcccaggccctgcaggtgcgcctagagcggatccgccaggctgagaccctggagcaagtgcgcagcatcatggatgaggcgccactcacggacgtcagggacatcaaggacacctgaggggtcaggatatccccacccccaccctgggaaagacgcctttccccactcctgaaccatgaggcctcgctctggggtcttggatggcttttccaccgtccctgagactggggttgaggggactgacgggggccaccaccgccccgccctccagcgcctcctcccagggtggctgggcctcctgttctcagggatcacacctgggtgaggggcccaagcccctcccggaaccaaaggtgcaggctcaggcctgcggctttctggctgctgtgctgcctcctgggctccagccctcccctgcccccagcccgtcccctgcccagggcacagcggagccatgggggctgggagtccccatcagaggcagtgaggtgggccccggccctgggacaggcagctgccttctggtctgcatgacactaagacgcttgtccacagcggcgacccaggcctccaagcttgcacagaggcaaggccagacttttccgtcgtttattttcaataaataagcagctcagcgca

SEQ ID NO: 612193 - DNA, 259 bp, Homo sapiens
  misc_feature (258)..(258): n is a, c, g, or t
cccttttcccgggggggcccccccccttttttttggtttcacgggtaagcaaaaattggggaaagatttccggttttttggaattttttcccaaccccccttttttttggaataaaccctttttgaaccggcgggtttgggttttttggatccgggggccggggggccccccccctccccccggtaaaggccggccaattgaaattaaaccttttgttccccaaagttttttttaaaaaaaagactttggaatgcccna

SEQ ID NO: 612194 - DNA, 104 bp, Homo sapiens
acccactactggctactactggcctctggttggtcgagttgtcggaagccgaacgccttcagggagattagttatcactgatgtggagcaggctgaaggactgg

SEQ ID NO: 612195 - DNA, 462 bp, Homo sapiens
  misc_feature (129)..(129): n is a, c, g, or t
accccaaggtcccctgactcccgggcaaatgtttgcattgaggagaacatgtcccggaggagctcagtgaagaagatttaaaaaataaaggagaaggggaggagagaggaggacgcgaatcacacccgntgctgcgcgccagcccgccccgtctgtacaatgggatgctcgggactcggacgggaggatccagtgactgcgagccccgcattcgcccgatcccagcctcacacccccagccagcccccagagaccctcccacacttacgaaggaaatgcatgcggccaggaggagaatccgcaccaggaggtacccaggaaaaagaagaaaaggacagattcatttggggttcagcctcatgccccccacacccaagactttgtggctaagagaatcaggccaccttgaggttcatcaagttcatcccattaaaacctcccaaaactctggaaaaaaaaaaa

SEQ ID NO: 612196 - DNA, 108 bp, Homo sapiens
  misc_feature (55)..(55): n is a, c, g, or t
cgctgggacctgggattacaggggtgagccaccacaccagccctcacaaaccttntgaggtagaaaatattaccatgtccttttttacagtcagtgcaggttcccggt

SEQ ID NO: 612197 - DNA, 521 bp, Homo sapiens
  misc_feature (129)..(129): n is a, c, g, or t
accccaaggtcccctgactcccgggcaaatgtttgcattgaggagaacatgtcccggaggagctcagtgaagaagatttaaaaaataaaggagaaggggaggagagaggaggacgcgaatcacacccgntgctgcgcgccagcccgccccgtctgtacaatgggatgctcgggactcggacgggaggatccagtgactgcgagccccgcattcgcccgatcccagcctcacacccccagccagcccccagagaccctcccacacttacgaaggaaatgcatgcggccaggaggagaatccgcaccaggaggtcttcaaactgctctatcaccagctcccacagggtcttcccttcctcagcagggagctctacccaggaaaaagaagaaaaggacagattcatttggggttcagcctcatgccccccacacccaagactttgtggctaagagaatcaggccaccttgaggttcatcaagttcatcccattaaaacctcccaaaactctggaaaaaaaaaaa

SEQ ID NO: 612198 - DNA, 791 bp, Homo sapiens
  misc_feature (39)..(41): n is a, c, g, or t
  misc_feature (46)..(46): n is a, c, g, or t
  misc_feature (200)..(200): n is a, c, g, or t
  misc_feature (202)..(202): n is a, c, g, or t
  misc_feature (537)..(537): n is a, c, g, or t
  misc_feature (602)..(602): n is a, c, g, or t
  misc_feature (619)..(619): n is a, c, g, or t
  misc_feature (623)..(623): n is a, c, g, or t
  misc_feature (625)..(625): n is a, c, g, or t
  misc_feature (634)..(634): n is a, c, g, or t
  misc_feature (686)..(686): n is a, c, g, or t
  misc_feature (693)..(693): n is a, c, g, or t
  misc_feature (696)..(697): n is a, c, g, or t
  misc_feature (701)..(701): n is a, c, g, or t
  misc_feature (705)..(705): n is a, c, g, or t
  misc_feature (709)..(709): n is a, c, g, or t
  misc_feature (715)..(716): n is a, c, g, or t
  misc_feature (719)..(719): n is a, c, g, or t
  misc_feature (723)..(723): n is a, c, g, or t
  misc_feature (725)..(726): n is a, c, g, or t
  misc_feature (741)..(741): n is a, c, g, or t
  misc_feature (748)..(748): n is a, c, g, or t
  misc_feature (758)..(758): n is a, c, g, or t
  misc_feature (761)..(761): n is a, c, g, or t
agatatatcaacttaacagtctatttgatcattactctnnntcagngataaatgttaatactaatattgaggagaaggaagaggaagtgactgaagcaataagggaaacaaagtcatcaaaaaatgaattacattctctatcaaaaatgctggaagatttgagaagagtttatgaccaactaacctggaagcaaaaaagncntgaaaatcagtatctggaagcagttaatgatttttatgctgcaaaaaaaacatgggatattgagctttctgatgttgcaaaagatttttcagctatttctttggcatgtacaaaactgacggaagacaataaaaaacttgagattgatattaacaaaataacagaaaaaaccaatgaaagcatacggaaaaaatcaaaatacgaatctgaaataaaatatttgacaataatgaagttaaagaatgataaacatctcaagaacatctataaggaggcttatcgcattggtactcttttccacctaaccaaacacaagacagatgaaatggaagatnaaatagcagaagtgagaagaaagttcaagggtagagaagaattcctgaaaaactcactcaagtgnagtggctgctgaatggncttnanaaaaacttnttccatttacaagtccggcacttaagcggaagagctataaaaatagagcatntgtgccntgnnctgnaganctcnggaccnntgnttantnnagatgaactgaagancagaagncaacaagacntcngttgctaatacctattgtcaaagatctatt

SEQ ID NO: 612199 - DNA, 115 bp, Homo sapiens
  misc_feature (48)..(48): n is a, c, g, or t
acggctaccagtggaagatgctcaacaccttcgccttgctggtgctgntgaacgagcagtttaactgggtgtccgtgctgtcatacctcacgcaaggcgaagaccagtactatct

SEQ ID NO: 612200 - DNA, 565 bp, Homo sapiens
ctctctgctgattgctgcggcgttgtgtactcctctgcgggggggagtcgcttgtttggttcgctgcttttttttttctctccgcgtgtgtggagcgccgtggcctgtctccctccgccgggtgtgcgcccccccctcctttgctatcgcgaccgccggagggtgtttgttcttcttctggtgaggggtggttcctctctgccgctcccgcttcggtcggagtgcagaggtcgtgttcttctccactcgtgtgtcgcgccccctctctcgtctgttttccgctctcctgggggtgggtggcgaggacccagcgcctcatcaccacctcttctctttctctcccgccagacaggagctccctctctatctctcgcgcgcctccgcccatttaacttcgcccgccgccgcgtcgcgtcgtcgcttggttgcttggttcgttgtcgtctgcgtgtgagatccctcactcctcctccctaacttacttctctcttctctctctctctcatccataaacaagtgtgtgctgtgtcacaaaaaaagaaaaacaacaagaaacaataagata

SEQ ID NO: 612201 - DNA, 426 bp, Homo sapiens
  misc_feature (103)..(103): n is a, c, g, or t
agtcagctgaggagacagaggtgctggagggtgagtgtgtgctggaggtatcttggggatcgcccaccctggctgggctaggtggggaaagggagagggcatngccctgacgtctccccctgccctgacttcccagcctccctgtgcagcctgaggacagagatggagcgggtgcagcaggaacagagcaaggcccagctcccagacctcctctcagaacagagggccaaggtgctgcggctgcaggcagagctggagaccagtgagcaggtgcagagggatttcgtgcgacgacaggcagctgccttctggtctgcatgacactaagacgcttgtccacagcggcgacccaggcctccaagcttgcacagaggcaaggccagacttttccgtcgtttattttcaataaataagcagctcagcgca

SEQ ID NO: 612202 - DNA, 567 bp, Homo sapiens
aatcactgtatgctgttgggcgaattatgtactcccatctctgatggccttgtctaatgatatcatcaatgagtgtctgacaatgcacaagatgtcaattttaaatatggcttcaaccttagctgacttatccttttcatggactcatgtctattaggatgatgttagtaaatgtgtcgcttggtgagcgaggtatcgtcctcgtgttctacaccagagtctagagtgcagctgggtgcaatcgttggcatcacctgcgaacgcttccatcgctcctggtgttcaagtcatatgctcctgacctcatccatccgtgagtagactggagacatagcagcgtcagtatgcacacgcaagaccccagctaattttgtgtatttgtagtagacgacggggtttcaccatgtggccaggatggtctcgatctcttcacctcgtgagccacctgacttggctcccaaagtgctgggattaccaggcgtgagccatgcgccctgacattttggtgtgtccatcaaaggagcaaaactgaggtaattcagattctgtctttgtgatcttctagga

SEQ ID NO: 612203 - DNA, 404 bp, Homo sapiens
  misc_feature (18)..(18): n is a, c, g, or t
tcataggttcgcaggganagaggtgtctgaagagctctggtagcaaaaagtgctccttccttgcttaggaacagagagggtatgggctctcttgctgtcagtctgggaggagggttcaaggaggtttggcctcctagggactggagacgccctgtcctcttcattgccttatactaactgtctgtccataggcggagctggtcaccacccacaagtgcctgcaccatgaggtaaagcggttgaatgaggaaaaccaagggctccgggccgagcagctgccatcctcagccccccagggctcgcagcaggagcagggcgaggaggaatcactgcccagctctgtgccagtaagctgaagtgtgggcactgagaacctggaagccacccgtgaaggccccttcttt

SEQ ID NO: 612204 - DNA, 6215 bp, Homo sapiens
tttcagactccgactaactacgcggggactccgaggcgctcagaaaaatgaagccgacccggccctgccccgagggacgctccaagagggcggaggtgcagggagggccccgccacaattcgcggtaacgcaagccaggctcgggcggaagggcggccggagccgatcaaaggctggctccgggcaggggcagcgagggagcgagggggagctctccgcaggccggtgtcccggaggaggcataattggagcagggcttccaaggtcacggagagacgccgggcaagacctcttaaggatcctcttccgggcttgaaaggcaggcgtcctcccgaaccgcgcgacccagccaagaagagccggggcggggccggggccggggccgggggccgactcgggaatcttcggccgaggctcggcaatccccccatcctccgtccggggcctccagcccggggccgatccggaaacagccgagcggatccggaaacagccgagaggacccggaagcggtgcgctccgtcaccagggagtgcgggaatccgccgtttgcgctgaggcaatggcggcagctgcgccggtggccgcggacgacgatgagcggcggcggcggccgggggctgcactggaggactcccggtcccaggaaggggcaaatggtgaggccgagtcaggtgagctcagccggcttcgggctgagctggcaggcgccctggcagaaatggaaaccatgaaggctgtggcagaggtgagcgagagcacgaaggccgaggctgtggctgcggtgcagcggcagtgccaagaggaggtggcctcgctgcaggccatcctgaaagactccatcagcagctatgaagcccagatcaccgccctgaagcaggagcgacagcagcagcagcaggactgtgaggagaaggagcgggagctgggccgcctgaagcagctgctgtcccgggcctaccccctggactccctggagaagcagatggaaaaggcccacgaggactcggagaagctgcgggagatcgtactgcccatggaaaaggagatcgaggagctgaaggcgaagctgctgagggccgaggagctgattcaggagatccagagacgtccccggcatgccccttccctgcacggctccacggagttgctgcccctgtcccgggatccatcgcccccgctggagcctctggaggagctgagcggagatgggggtccagccgctgaggccttcgctcacaactgcgatgacagcgcctccatctcctccttctcccttggcggtggggtcggcagcagctcctccctgccccaaagccgccagggcctgagccctgaacaggaagagacggcctcgctggtgtctacgggcaccctggttcccgagggcatctacctgccccctcctggctaccagctcgtcccagacactcagtgggagcagctgcagacagagggccgacagctgcagaaggacctggagagcgtcagtcgcgagcgggacgagctccaagagggcctgagacggagcaatgaggactgtgccaagcagatgcaggtgctcctggcccaggtccagaactcagagcagctgctgcggaccctgcaagggaccgtgagccaggcccaggagcgggtgcagctgcagatggcggagctggtcaccacccacaagtgcctgcaccatgaggtaaagcggttgaatgaggaaaaccaagggctccgggccgagcagctgccatcctcagccccccagggctcgcagcaggagcagggcgaggaggaatcactgcccagctctgtgccagagctgcagcagctgctgtgctgcacgcggcaagaggcgagggcccggctgcaggcccaggagcacggggccgagcgcctgcggatcgagatcgtgacgctgcgggaggctctggaggaggagacagtggccagggccagcctggaggggcagctgagggtgcagcgggaggagacagaggtgctggaggcctccctgtgcagcctgaggacagagatggagcgggtgcagcaggaacagagcaaggcccagctcccagacctcctctcagaacagagggccaaggtgctgcggctgcaggcagagctggagaccagtgagcaggtgcagagggatttcgtgcgactgtcccaggccctgcaggtgcgcctagagcggatccgccaggctgagaccctggagcaagtgcgcagcatcatggatgaggcgccactcacggacgtcagggacatcaaggacacctgaggggtcaggatatccccacccccaccctgggaaagacgcctttccccactcctgaaccatgaggcctcgctctggggtcttggatggcttttccaccgtccctgagactggggttgaggggactgacgggggccaccaccgccccgccctccagcgcctcctcccagggtggctgggcctcctgttctcagggatcacacctgggtgaggggcccaagcccctcccggaaccaaaggtgcaggctcaggcctgcggctttctggctgctgtgctgcctcctgggctccagccctcccctgcccccagcccgtcccctgcccagggcacagcggagccatgggggctgggagtccccatcagaggcagtgaggtgggccccggccctgggacaggcagctgccttctggtctgcatgacactaagacgcttgtccacagcggcgacccaggcctccaagcttgcacagaggcaaggccagacttttccgtcgtttattttcaataaataagcagctcagcgcagtcggtcgccttgtccctgcaagcccctcggggttgggaaggggaatttacaaggttgagagggaggcgggtggccgagggggaaggaaagggaaggggacatgtttataaacagacacatgacacgggtgtgggggacaggacgggggtctgtgccacagctctgcctgaagatgtgtcactatcggggtggggaggacagagcaaaaggatgctcacttccttctttcatcttctggatctgtgacacgggctcagagatggaggagggggaacagttatccctctaggtagttccgagcaacgaacttgaggatttcgtcgagcccaatgactggcagtgagatcttgaggaccatgagccactgggtgaggtccagggcccggagcttgaagatcatcggcagggggtcaacatagaggatgaggaagtgcagggacatggagaggcagatggagcccagcagccagatgttcacccagggtggcatccgcagcagggactggttctcggacaggctgttcagtgcattgcacatctcgatggtcaccagcacggacagggccatggtcatgggctcgggggcctcgaagacctcacagtctatgccctcaaagtgggtgttgtcctcggtgcactgcatgaagtgagtcagctggctgtagttgacatgaggcccatcctcagcgtacaggaaccaccaggcagctgctcccacggtggctgcacccacatagcccccgattgccatgtagcggaagaagagccagccactgatgaggggctccttggggctccggggggggcggtccatgatgtccaggtctggtgggttgaagcccagggctgtggctgggagcccgtcggtcaccaagttcacccatagcagctgcaccgggatcagggcctcaggcagccccagggcagcggtcaggaagatacagaccacctcgcccacgttggaggaaatgaggtagcggatgaactgcttcatgttgttgtagatggcgcggccctcctccacagcagctacgatggtggagaagttgtcgtcagccagcaccatctcagaggcagtcttggccacggcagtgccagatcccatggcaatgccaatctcagccttcttcagggcaggggcgtcattgacgccatcacctgtcatggctgtgatctcatcgtaggactgcaggtactccacaatcttggacttgtgcgagggctccacacgggcgaagcagcaggcacgtcggcaggcttcccgctgttcagccaggggcaggtcgtcgaactctcggcccgtgtaggcgcgatcggccacctcctcgttctccccaaagatgccaattcgccggcagatggcaatggctgtgcccttgttgtccccagtgatcatgatcacccggatcccggcgtcacggcacagctggatggagcccgtgacctccttgcgcggagggtccagcatgcccactacacccacgaatgtcaggtccgtctcatactccaggaacctggcagagtcatccaggaccatttcctctcgcttcgggggggtgtcccgggtggccagggccaagcagcgcagggtgtcccggccagtgccccactccttgatcaccgccatgatcttttccttcaccggccccgtcagtggcacccgggtggtgccaactcgcacatagttacagcggtcgatgacgccctcaggggcacccttgacaaacatcttgttgcccacagcagcccgggaagatttggctggggagcaatagacagacatggactttctgtctcgggagaactccagggtgaattccttcttcattagctggcggatcaccgagttgcaggcgttggctctctccaccttcgagaggcttctcacatccgtgttgaacacattcatcttctccaccagggtggtgagtgctgtctcggtggcctcgccgaccttctcatagacacctttggcctcgttgaagtccaaggaggagtcattgcagagggcacagatggtggccagctccaccagcccgtcatactgccctggccggactggcttatcattcttcaagacctctccctctggagcgtaagtggagccggtgatggagaactcattcaggaggcagatgtccccatccaccttgtcaatgataaacatcttgcagacagacatctggttggtggtgagggtgcctgtcttgtcggaacagatgacagaggtgcagcccagggtctctacggagggcaagcttcttacaatggcattcttctttgccatccgacgggtacccagggccaggcaggtggtgatgactgcaggaagaccttcggggatggcagccacagccaaggccacggcaatcttaaagtagtagatggccccgcggaaccaggagcccccatggacggggtcgttgaagtggccaatgttgataagccagacagccacacagatgagggagatgaccttggagagctgctccccaaactcatccagcttctgctgcaagggggtcttgtcctgttctgtggcagccatttggtctcggatcttcccaatctcggtgcccacaccagtggtggccacgatgcccaaggccttgccggctgcaatgttggtgcccgagaaaagcatgttcttcttgtcctggttgacagctcgggggtcaggaacgggctccgtgtgtttgatgacagatacagactcgcctgtcaggatggactggtcaacccgcagcgtggtggatttgatggcgaggattcggatgtctgcagggactttgtcccccacagccacctccacgatgtccccagggacgatgtcccgagccttgatcctttgcactgacttgcggtcagcccggtagaccttccccatctctggctcatactccttcagggcctcgatggcgttctctgcgttccgctcctgccaaacccccacgatggcattggcaatgaggatcaagaggatgacaaagggttcaacaaaggcagtgatggtctcttcaccttcctcaaaccaggccagcacgaaggaaatgcatgcggccaggaggagaatccgcaccaggaggtcttcaaactgctctatcaccagctcccacagggtcttcccttcctcagcagggagctcattgaggccgtatttctccagattccgcttaacttggtccggggtgaggcccgtggtctcactcaccccaaaataggccaaacattcctccgtggttttagcatgagcggcctccattgtgctcccttcctgggggccggggccggtgtgttccttccagggggttcccactcgtggggggtcttcctcagtgtgtccaactgcctgtctgcctgggtttcttctttttactctcctgccccctccaggtttttcttccctccacaaagctctga

SEQ ID NO: 612205 - DNA, 6017 bp, Homo sapiens
tttcagactccgactaactacgcggggactccgaggcgctcagaaaaatgaagccgacccggccctgccccgagggacgctccaagagggcggaggtgcagggagggccccgccacaattcgcggtaacgcaagccaggctcgggcggaagggcggccggagccgatcaaaggctggctccgggcaggggcagcgagggagcgagggggagctctccgcaggccggtgtcccggaggaggcataattggagcagggcttccaaggtcacggagagacgccgggcaagacctcttaaggatcctcttccgggcttgaaaggcaggcgtcctcccgaaccgcgcgacccagccaagaagagccggggcggggccggggccggggccgggggccgactcgggaatcttcggccgaggctcggcaatccccccatcctccgtccggggcctccagcccggggccgatccggaaacagccgagcggatccggaaacagccgagaggacccggaagcggtgcgctccgtcaccagggagtgcgggaatccgccgtttgcgctgaggcaatggcggcagctgcgccggtggccgcggacgacgatgagcggcggcggcggccgggggctcaggccatcctgaaagactccatcagcagctatgaagcccagatcaccgccctgaagcaggagcgacagcagcagcagcaggactgtgaggagaaggagcgggagctgggccgcctgaagcagctgctgtcccgggcctaccccctggactccctggagaagcagatggaaaaggcccacgaggactcggagaagctgcgggagatcgtactgcccatggaaaaggagatcgaggagctgaaggcgaagctgctgagggccgaggagctgattcaggagatccagagacgtccccggcatgccccttccctgcacggctccacggagttgctgcccctgtcccgggatccatcgcccccgctggagcctctggaggagctgagcggagatgggggtccagccgctgaggccttcgctcacaactgcgatgacagcgcctccatctcctccttctcccttggcggtggggtcggcagcagctcctccctgccccaaagccgccagggcctgagccctgaacaggaagagacggcctcgctggtgtctacgggcaccctggttcccgagggcatctacctgccccctcctggctaccagctcgtcccagacactcagtgggagcagctgcagacagagggccgacagctgcagaaggacctggagagcgtcagtcgcgagcgggacgagctccaagagggcctgagacggagcaatgaggactgtgccaagcagatgcaggtgctcctggcccaggtccagaactcagagcagctgctgcggaccctgcaagggaccgtgagccaggcccaggagcgggtgcagctgcagatggcggagctggtcaccacccacaagtgcctgcaccatgaggtaaagcggttgaatgaggaaaaccaagggctccgggccgagcagctgccatcctcagccccccagggctcgcagcaggagcagggcgaggaggaatcactgcccagctctgtgccagagctgcagcagctgctgtgctgcacgcggcaagaggcgagggcccggctgcaggcccaggagcacggggccgagcgcctgcggatcgagatcgtgacgctgcgggaggctctggaggaggagacagtggccagggccagcctggaggggcagctgagggtgcagcgggaggagacagaggtgctggaggcctccctgtgcagcctgaggacagagatggagcgggtgcagcaggaacagagcaaggcccagctcccagacctcctctcagaacagagggccaaggtgctgcggctgcaggcagagctggagaccagtgagcaggtgcagagggatttcgtgcgactgtcccaggccctgcaggtgcgcctagagcggatccgccaggctgagaccctggagcaagtgcgcagcatcatggatgaggcgccactcacggacgtcagggacatcaaggacacctgaggggtcaggatatccccacccccaccctgggaaagacgcctttccccactcctgaaccatgaggcctcgctctggggtcttggatggcttttccaccgtccctgagactggggttgaggggactgacgggggccaccaccgccccgccctccagcgcctcctcccagggtggctgggcctcctgttctcagggatcacacctgggtgaggggcccaagcccctcccggaaccaaaggtgcaggctcaggcctgcggctttctggctgctgtgctgcctcctgggctccagccctcccctgcccccagcccgtcccctgcccagggcacagcggagccatgggggctgggagtccccatcagaggcagtgaggtgggccccggccctgggacaggcagctgccttctggtctgcatgacactaagacgcttgtccacagcggcgacccaggcctccaagcttgcacagaggcaaggccagacttttccgtcgtttattttcaataaataagcagctcagcgcagtcggtcgccttgtccctgcaagcccctcggggttgggaaggggaatttacaaggttgagagggaggcgggtggccgagggggaaggaaagggaaggggacatgtttataaacagacacatgacacgggtgtgggggacaggacgggggtctgtgccacagctctgcctgaagatgtgtcactatcggggtggggaggacagagcaaaaggatgctcacttccttctttcatcttctggatctgtgacacgggctcagagatggaggagggggaacagttatccctctaggtagttccgagcaacgaacttgaggatttcgtcgagcccaatgactggcagtgagatcttgaggaccatgagccactgggtgaggtccagggcccggagcttgaagatcatcggcagggggtcaacatagaggatgaggaagtgcagggacatggagaggcagatggagcccagcagccagatgttcacccagggtggcatccgcagcagggactggttctcggacaggctgttcagtgcattgcacatctcgatggtcaccagcacggacagggccatggtcatgggctcgggggcctcgaagacctcacagtctatgccctcaaagtgggtgttgtcctcggtgcactgcatgaagtgagtcagctggctgtagttgacatgaggcccatcctcagcgtacaggaaccaccaggcagctgctcccacggtggctgcacccacatagcccccgattgccatgtagcggaagaagagccagccactgatgaggggctccttggggctccggggggggcggtccatgatgtccaggtctggtgggttgaagcccagggctgtggctgggagcccgtcggtcaccaagttcacccatagcagctgcaccgggatcagggcctcaggcagccccagggcagcggtcaggaagatacagaccacctcgcccacgttggaggaaatgaggtagcggatgaactgcttcatgttgttgtagatggcgcggccctcctccacagcagctacgatggtggagaagttgtcgtcagccagcaccatctcagaggcagtcttggccacggcagtgccagatcccatggcaatgccaatctcagccttcttcagggcaggggcgtcattgacgccatcacctgtcatggctgtgatctcatcgtaggactgcaggtactccacaatcttggacttgtgcgagggctccacacgggcgaagcagcaggcacgtcggcaggcttcccgctgttcagccaggggcaggtcgtcgaactctcggcccgtgtaggcgcgatcggccacctcctcgttctccccaaagatgccaattcgccggcagatggcaatggctgtgcccttgttgtccccagtgatcatgatcacccggatcccggcgtcacggcacagctggatggagcccgtgacctccttgcgcggagggtccagcatgcccactacacccacgaatgtcaggtccgtctcatactccaggaacctggcagagtcatccaggaccatttcctctcgcttcgggggggtgtcccgggtggccagggccaagcagcgcagggtgtcccggccagtgccccactccttgatcaccgccatgatcttttccttcaccggccccgtcagtggcacccgggtggtgccaactcgcacatagttacagcggtcgatgacgccctcaggggcacccttgacaaacatcttgttgcccacagcagcccgggaagatttggctggggagcaatagacagacatggactttctgtctcgggagaactccagggtgaattccttcttcattagctggcggatcaccgagttgcaggcgttggctctctccaccttcgagaggcttctcacatccgtgttgaacacattcatcttctccaccagggtggtgagtgctgtctcggtggcctcgccgaccttctcatagacacctttggcctcgttgaagtccaaggaggagtcattgcagagggcacagatggtggccagctccaccagcccgtcatactgccctggccggactggcttatcattcttcaagacctctccctctggagcgtaagtggagccggtgatggagaactcattcaggaggcagatgtccccatccaccttgtcaatgataaacatcttgcagacagacatctggttggtggtgagggtgcctgtcttgtcggaacagatgacagaggtgcagcccagggtctctacggagggcaagcttcttacaatggcattcttctttgccatccgacgggtacccagggccaggcaggtggtgatgactgcaggaagaccttcggggatggcagccacagccaaggccacggcaatcttaaagtagtagatggccccgcggaaccaggagcccccatggacggggtcgttgaagtggccaatgttgataagccagacagccacacagatgagggagatgaccttggagagctgctccccaaactcatccagcttctgctgcaagggggtcttgtcctgttctgtggcagccatttggtctcggatcttcccaatctcggtgcccacaccagtggtggccacgatgcccaaggccttgccggctgcaatgttggtgcccgagaaaagcatgttcttcttgtcctggttgacagctcgggggtcaggaacgggctccgtgtgtttgatgacagatacagactcgcctgtcaggatggactggtcaacccgcagcgtggtggatttgatggcgaggattcggatgtctgcagggactttgtcccccacagccacctccacgatgtccccagggacgatgtcccgagccttgatcctttgcactgacttgcggtcagcccggtagaccttccccatctctggctcatactccttcagggcctcgatggcgttctctgcgttccgctcctgccaaacccccacgatggcattggcaatgaggatcaagaggatgacaaagggttcaacaaaggcagtgatggtctcttcaccttcctcaaaccaggccagcacgaaggaaatgcatgcggccaggaggagaatccgcaccaggaggtcttcaaactgctctatcaccagctcccacagggtcttcccttcctcagcagggagctcattgaggccgtatttctccagattccgcttaacttggtccggggtgaggcccgtggtctcactcaccccaaaataggccaaacattcctccgtggttttagcatgagcggcctccattgtgctcccttcctgggggccggggccggtgtgttccttccagggggttcccactcgtggggggtcttcctcagtgtgtccaactgcctgtctgcctgggtttcttctttttactctcctgccccctccaggtttttcttccctccacaaagctctga

SEQ ID NO: 612206 - DNA, 255 bp, Homo sapiens
atcccctgtgggagacgggggtctcacctggttgagcatggatgggtcttgatctcctgaccttgtgatccgcctacctcggcctcccaaaggtgctgggattgcaggcgtgagccactgggcccggcctatatggtgaattttcatgagagagaataaaagaaactgtgcacgttgatcgaaagatatggtggtataagacgaggaataccaggcatgtggtttccctctctgattcatgatttctgtgtcaac

SEQ ID NO: 612207 - DNA, 5934 bp, Homo sapiens
  misc_feature (2)..(2): n is a, c, g, or t
  misc_feature (321)..(321): n is a, c, g, or t
  misc_feature (369)..(369): n is a, c, g, or t
  misc_feature (488)..(488): n is a, c, g, or t
  misc_feature (527)..(527): n is a, c, g, or t
tntccccgtgtgtagtccagtgtgtagtgtgtcgtgtgtaagtccgcgcgtgtgtgtgtcgtcgtgtagtgtcagagtgtgtcgtgtcagcgtgtgcgtcgcgtgtgtgtgtcgcgtcgtgtatcgtagcgtagtgtagtcgtgtcgtgtcggtgcgtgtccgtgtgtgtgtcgtgtcagcgtgtgtagtgtatcgtcccgcgtgtgtcctcagtgtacagtgtgtgtcatagagtgtgtgtgtagtgtctcgtatgtgtccatgtgtgtgtatgtcgtccatgtcgcgtgtgcgtgtcgtgtgtcgtgtagtcgtgtgtncacgtgtcgtcctcgtgtgtcatgtatacacgtgtgtcatatcgcacntgtacagtgtcgtgtgtgtgtccatgtatgtgtgtgtatgtccgtatgtacgtcatccgtatagtgtccccgtatgtgtccgtgtgtgtgtccgtgtcgtgtgtgtcacgccgtgtgcnatgtgtgtctcacatgtatgtgtatgtgtgtgtgtctcntccgtccgtgtccaggccatcctgaaagactccatcagcagctatgaagcccagatcaccgccctgaagcaggagcgacagcagcagcagcaggactgtgaggagaaggagcgggagctgggccgcctgaagcagctgctgtcccgggcctaccccctggactccctggagaagcagatggaaaaggcccacgaggactcggagaagctgcgggagatcgtactgcccatggaaaaggagatcgaggagctgaaggcgaagctgctgagggccgaggagctgattcaggagatccagagacgtccccggcatgccccttccctgcacggctccacggagttgctgcccctgtcccgggatccatcgcccccgctggagcctctggaggagctgagcggagatgggggtccagccgctgaggccttcgctcacaactgcgatgacagcgcctccatctcctccttctcccttggcggtggggtcggcagcagctcctccctgccccaaagccgccagggcctgagccctgaacaggaagagacggcctcgctggtgtctacgggcaccctggttcccgagggcatctacctgccccctcctggctaccagctcgtcccagacactcagtgggagcagctgcagacagagggccgacagctgcagaaggacctggagagcgtcagtcgcgagcgggacgagctccaagagggcctgagacggagcaatgaggactgtgccaagcagatgcaggtgctcctggcccaggtccagaactcagagcagctgctgcggaccctgcaagggaccgtgagccaggcccaggagcgggtgcagctgcagatggcggagctggtcaccacccacaagtgcctgcaccatgaggtaaagcggttgaatgaggaaaaccaagggctccgggccgagcagctgccatcctcagccccccagggctcgcagcaggagcagggcgaggaggaatcactgcccagctctgtgccagagctgcagcagctgctgtgctgcacgcggcaagaggcgagggcccggctgcaggcccaggagcacggggccgagcgcctgcggatcgagatcgtgacgctgcgggaggctctggaggaggagacagtggccagggccagcctggaggggcagctgagggtgcagcgggaggagacagaggtgctggaggcctccctgtgcagcctgaggacagagatggagcgggtgcagcaggaacagagcaaggcccagctcccagacctcctctcagaacagagggccaaggtgctgcggctgcaggcagagctggagaccagtgagcaggtgcagagggatttcgtgcgactgtcccaggccctgcaggtgcgcctagagcggatccgccaggctgagaccctggagcaagtgcgcagcatcatggatgaggcgccactcacggacgtcagggacatcaaggacacctgaggggtcaggatatccccacccccaccctgggaaagacgcctttccccactcctgaaccatgaggcctcgctctggggtcttggatggcttttccaccgtccctgagactggggttgaggggactgacgggggccaccaccgccccgccctccagcgcctcctcccagggtggctgggcctcctgttctcagggatcacacctgggtgaggggcccaagcccctcccggaaccaaaggtgcaggctcaggcctgcggctttctggctgctgtgctgcctcctgggctccagccctcccctgcccccagcccgtcccctgcccagggcacagcggagccatgggggctgggagtccccatcagaggcagtgaggtgggccccggccctgggacaggcagctgccttctggtctgcatgacactaagacgcttgtccacagcggcgacccaggcctccaagcttgcacagaggcaaggccagacttttccgtcgtttattttcaataaataagcagctcagcgcagtcggtcgccttgtccctgcaagcccctcggggttgggaaggggaatttacaaggttgagagggaggcgggtggccgagggggaaggaaagggaaggggacatgtttataaacagacacatgacacgggtgtgggggacaggacgggggtctgtgccacagctctgcctgaagatgtgtcactatcggggtggggaggacagagcaaaaggatgctcacttccttctttcatcttctggatctgtgacacgggctcagagatggaggagggggaacagttatccctctaggtagttccgagcaacgaacttgaggatttcgtcgagcccaatgactggcagtgagatcttgaggaccatgagccactgggtgaggtccagggcccggagcttgaagatcatcggcagggggtcaacatagaggatgaggaagtgcagggacatggagaggcagatggagcccagcagccagatgttcacccagggtggcatccgcagcagggactggttctcggacaggctgttcagtgcattgcacatctcgatggtcaccagcacggacagggccatggtcatgggctcgggggcctcgaagacctcacagtctatgccctcaaagtgggtgttgtcctcggtgcactgcatgaagtgagtcagctggctgtagttgacatgaggcccatcctcagcgtacaggaaccaccaggcagctgctcccacggtggctgcacccacatagcccccgattgccatgtagcggaagaagagccagccactgatgaggggctccttggggctccggggggggcggtccatgatgtccaggtctggtgggttgaagcccagggctgtggctgggagcccgtcggtcaccaagttcacccatagcagctgcaccgggatcagggcctcaggcagccccagggcagcggtcaggaagatacagaccacctcgcccacgttggaggaaatgaggtagcggatgaactgcttcatgttgttgtagatggcgcggccctcctccacagcagctacgatggtggagaagttgtcgtcagccagcaccatctcagaggcagtcttggccacggcagtgccagatcccatggcaatgccaatctcagccttcttcagggcaggggcgtcattgacgccatcacctgtcatggctgtgatctcatcgtaggactgcaggtactccacaatcttggacttgtgcgagggctccacacgggcgaagcagcaggcacgtcggcaggcttcccgctgttcagccaggggcaggtcgtcgaactctcggcccgtgtaggcgcgatcggccacctcctcgttctccccaaagatgccaattcgccggcagatggcaatggctgtgcccttgttgtccccagtgatcatgatcacccggatcccggcgtcacggcacagctggatggagcccgtgacctccttgcgcggagggtccagcatgcccactacacccacgaatgtcaggtccgtctcatactccaggaacctggcagagtcatccaggaccatttcctctcgcttcgggggggtgtcccgggtggccagggccaagcagcgcagggtgtcccggccagtgccccactccttgatcaccgccatgatcttttccttcaccggccccgtcagtggcacccgggtggtgccaactcgcacatagttacagcggtcgatgacgccctcaggggcacccttgacaaacatcttgttgcccacagcagcccgggaagatttggctggggagcaatagacagacatggactttctgtctcgggagaactccagggtgaattccttcttcattagctggcggatcaccgagttgcaggcgttggctctctccaccttcgagaggcttctcacatccgtgttgaacacattcatcttctccaccagggtggtgagtgctgtctcggtggcctcgccgaccttctcatagacacctttggcctcgttgaagtccaaggaggagtcattgcagagggcacagatggtggccagctccaccagcccgtcatactgccctggccggactggcttatcattcttcaagacctctccctctggagcgtaagtggagccggtgatggagaactcattcaggaggcagatgtccccatccaccttgtcaatgataaacatcttgcagacagacatctggttggtggtgagggtgcctgtcttgtcggaacagatgacagaggtgcagcccagggtctctacggagggcaagcttcttacaatggcattcttctttgccatccgacgggtacccagggccaggcaggtggtgatgactgcaggaagaccttcggggatggcagccacagccaaggccacggcaatcttaaagtagtagatggccccgcggaaccaggagcccccatggacggggtcgttgaagtggccaatgttgataagccagacagccacacagatgagggagatgaccttggagagctgctccccaaactcatccagcttctgctgcaagggggtcttgtcctgttctgtggcagccatttggtctcggatcttcccaatctcggtgcccacaccagtggtggccacgatgcccaaggccttgccggctgcaatgttggtgcccgagaaaagcatgttcttcttgtcctggttgacagctcgggggtcaggaacgggctccgtgtgtttgatgacagatacagactcgcctgtcaggatggactggtcaacccgcagcgtggtggatttgatggcgaggattcggatgtctgcagggactttgtcccccacagccacctccacgatgtccccagggacgatgtcccgagccttgatcctttgcactgacttgcggtcagcccggtagaccttccccatctctggctcatactccttcagggcctcgatggcgttctctgcgttccgctcctgccaaacccccacgatggcattggcaatgaggatcaagaggatgacaaagggttcaacaaaggcagtgatggtctcttcaccttcctcaaaccaggccagcacgaaggaaatgcatgcggccaggaggagaatccgcaccaggaggtcttcaaactgctctatcaccagctcccacagggtcttcccttcctcagcagggagctcattgaggccgtatttctccagattccgcttaacttggtccggggtgaggcccgtggtctcactcaccccaaaataggccaaacattcctccgtggttttagcatgagcggcctccattgtgctcccttcctgggggccggggccggtgtgttccttccagggggttcccactcgtggggggtcttcctcagtgtgtccaactgcctgtctgcctgggtttcttctttttactctcctgccccctccaggtttttcttccctccacaaagctctga

SEQ ID NO: 612208 - DNA, 1010 bp, Homo sapiens
  misc_feature (345)..(345): n is a, c, g, or t
  misc_feature (369)..(369): n is a, c, g, or t
  misc_feature (378)..(378): n is a, c, g, or t
  misc_feature (381)..(381): n is a, c, g, or t
  misc_feature (387)..(387): n is a, c, g, or t
  misc_feature (444)..(444): n is a, c, g, or t
  misc_feature (454)..(454): n is a, c, g, or t
  misc_feature (460)..(460): n is a, c, g, or t
  misc_feature (481)..(481): n is a, c, g, or t
  misc_feature (494)..(495): n is a, c, g, or t
  misc_feature (554)..(554): n is a, c, g, or t
  misc_feature (597)..(597): n is a, c, g, or t
  misc_feature (677)..(677): n is a, c, g, or t
  misc_feature (681)..(681): n is a, c, g, or t
gatgatgcatcaatgctgccgatggatcatggagactggggctatatcatgactgacccagtcacctttaatgtaggtggacgcttgctatatcgtacgtcgtctcaccacattgtacggtcagttgaccccaattctcgccatgccctttgtgaatgcgtcacttgttatatggagtgtgaggtatcttcccgcaatcacgtcctcaggagaaactccatccaataaagggcgacaatttatctatgtaattatttgggatacgaacgtagtcggacgcgtccatgttattcaacgagtgatgatcgcccgtccggaacgttgccgtgtaaagagatctttccnaggaagaggtgttgatcccttgtnacacagctntgngaaatnttgataacgcgagaatttcgcattcgtcgactggtgccgtgtggagaaggcaaagangtaacatgcngaattnttcctccttatccacaacganaactttgtgaagnnccacctttggtaggtttacatgaatgtgttgctgcaccatttgtaatatcccataaggnactcgttttgtgtagtacacgcatgtggtgagttacctttttntagaaagaaaagggtatagttgagtatgccatgaatcttaagaataccttccgttggaaagggcctttcatctataatgntctncttacacaacacgcacatggtggacttggtgcatatttcacttacactggctaagcgttaatacccctagttctagccgagttaagaagggtgcgcatatttcccttgaacttaaggcaagggcttatcctcccattaatatgatttccttacaccgaacggtcgaggatatataccagccttccaatttgtaaatgagaacgacaccgcatgcatgaacatggcccgaaggggtcttgcgcctttttacctttctttcgtggaacacacatcgtgtagttatgcaccccagtgaaaagttttcttccattaagcggctcccacccttg

SEQ ID NO: 612209 - DNA, 448 bp, Homo sapiens
  misc_feature (12)..(12): n is a, c, g, or t
ccctccctaagngacgatggatgcagaattccgacatgactcaggtgtttaagttcatcatcaaaaattggtgttctgtgcagatgtatgtgggttcaaacaaaggcccaatcattggactcatggtgggcggtgttgtcatagcgacagtgatcgtcatcaccttggtgatgctgaagaagaaacagtacacatccattcatcatggtgtggtggaggttgacgccgctgtcaccccagaggagcgccacctgtccaagatgcagcagaacggctacgaaaatccaacctacaagttctttgagcagatgcagaactagacccccgccacagcagcctgtgaagttggacagcaaaaccattgcttcactacccattggtgtccatttatagaataatgtgggaagaaacaaacccgttttatgatttactcattatcgcacttaga

SEQ ID NO: 612210 - DNA, 5459 bp, Homo sapiens
gctggagagtagcgaacagaagcgagctgtgctgcgtgcacgcagtgcaagagaggtgctcgctcaggccatcctgaaagactccatcagcagctatgaagcccagatcaccgccctgaagcaggagcgacagcagcagcagcaggactgtgaggagaaggagcgggagctgggccgcctgaagcagctgctgtcccgggcctaccccctggactccctggagaagcagatggaaaaggcccacgaggactcggagaagctgcgggagatcgtactgcccatggaaaaggagatcgaggagctgaaggcgaagctgctgagggccgaggagctgattcaggagatccagagacgtccccggcatgccccttccctgcacggctccacggagttgctgcccctgtcccgggatccatcgcccccgctggagcctctggaggagctgagcggagatgggggtccagccgctgaggccttcgctcacaactgcgatgacagcgcctccatctcctccttctcccttggcggtggggtcggcagcagctcctccctgccccaaagccgccagggcctgagccctgaacaggaagagacggcctcgctggtgtctacgggcaccctggttcccgagggcatctacctgccccctcctggctaccagctcgtcccagacactcagtgggagcagctgcagacagagggccgacagctgcagaaggacctggagagcgtcagtcgcgagcgggacgagctccaagagggcctgagacggagcaatgaggactgtgccaagcagatgcaggtgctcctggcccaggtccagaactcagagcagctgctgcggaccctgcaagggaccgtgagccaggcccaggagcgggtgcagctgcagatggcggagctggtcaccacccacaagtgcctgcaccatgaggtaaagcggttgaatgaggaaaaccaagggctccgggccgagcagctgccatcctcagccccccagggctcgcagcaggagcagggcgaggaggaatcactgcccagctctgtgccagagctgcagcagctgctgtgctgcacgcggcaagaggcgagggcccggctgcaggcccaggagcacggggccgagcgcctgcggatcgagatcgtgacgctgcgggaggctctggaggaggagacagtggccagggccagcctggaggggcagctgagggtgcagcgggaggagacagaggtgctggaggcctccctgtgcagcctgaggacagagatggagcgggtgcagcaggaacagagcaaggcccagctcccagacctcctctcagaacagagggccaaggtgctgcggctgcaggcagagctggagaccagtgagcaggtgcagagggatttcgtgcgactgtcccaggccctgcaggtgcgcctagagcggatccgccaggctgagaccctggagcaagtgcgcagcatcatggatgaggcgccactcacggacgtcagggacatcaaggacacctgaggggtcaggatatccccacccccaccctgggaaagacgcctttccccactcctgaaccatgaggcctcgctctggggtcttggatggcttttccaccgtccctgagactggggttgaggggactgacgggggccaccaccgccccgccctccagcgcctcctcccagggtggctgggcctcctgttctcagggatcacacctgggtgaggggcccaagcccctcccggaaccaaaggtgcaggctcaggcctgcggctttctggctgctgtgctgcctcctgggctccagccctcccctgcccccagcccgtcccctgcccagggcacagcggagccatgggggctgggagtccccatcagaggcagtgaggtgggccccggccctgggacaggcagctgccttctggtctgcatgacactaagacgcttgtccacagcggcgacccaggcctccaagcttgcacagaggcaaggccagacttttccgtcgtttattttcaataaataagcagctcagcgcagtcggtcgccttgtccctgcaagcccctcggggttgggaaggggaatttacaaggttgagagggaggcgggtggccgagggggaaggaaagggaaggggacatgtttataaacagacacatgacacgggtgtgggggacaggacgggggtctgtgccacagctctgcctgaagatgtgtcactatcggggtggggaggacagagcaaaaggatgctcacttccttctttcatcttctggatctgtgacacgggctcagagatggaggagggggaacagttatccctctaggtagttccgagcaacgaacttgaggatttcgtcgagcccaatgactggcagtgagatcttgaggaccatgagccactgggtgaggtccagggcccggagcttgaagatcatcggcagggggtcaacatagaggatgaggaagtgcagggacatggagaggcagatggagcccagcagccagatgttcacccagggtggcatccgcagcagggactggttctcggacaggctgttcagtgcattgcacatctcgatggtcaccagcacggacagggccatggtcatgggctcgggggcctcgaagacctcacagtctatgccctcaaagtgggtgttgtcctcggtgcactgcatgaagtgagtcagctggctgtagttgacatgaggcccatcctcagcgtacaggaaccaccaggcagctgctcccacggtggctgcacccacatagcccccgattgccatgtagcggaagaagagccagccactgatgaggggctccttggggctccggggggggcggtccatgatgtccaggtctggtgggttgaagcccagggctgtggctgggagcccgtcggtcaccaagttcacccatagcagctgcaccgggatcagggcctcaggcagccccagggcagcggtcaggaagatacagaccacctcgcccacgttggaggaaatgaggtagcggatgaactgcttcatgttgttgtagatggcgcggccctcctccacagcagctacgatggtggagaagttgtcgtcagccagcaccatctcagaggcagtcttggccacggcagtgccagatcccatggcaatgccaatctcagccttcttcagggcaggggcgtcattgacgccatcacctgtcatggctgtgatctcatcgtaggactgcaggtactccacaatcttggacttgtgcgagggctccacacgggcgaagcagcaggcacgtcggcaggcttcccgctgttcagccaggggcaggtcgtcgaactctcggcccgtgtaggcgcgatcggccacctcctcgttctccccaaagatgccaattcgccggcagatggcaatggctgtgcccttgttgtccccagtgatcatgatcacccggatcccggcgtcacggcacagctggatggagcccgtgacctccttgcgcggagggtccagcatgcccactacacccacgaatgtcaggtccgtctcatactccaggaacctggcagagtcatccaggaccatttcctctcgcttcgggggggtgtcccgggtggccagggccaagcagcgcagggtgtcccggccagtgccccactccttgatcaccgccatgatcttttccttcaccggccccgtcagtggcacccgggtggtgccaactcgcacatagttacagcggtcgatgacgccctcaggggcacccttgacaaacatcttgttgcccacagcagcccgggaagatttggctggggagcaatagacagacatggactttctgtctcgggagaactccagggtgaattccttcttcattagctggcggatcaccgagttgcaggcgttggctctctccaccttcgagaggcttctcacatccgtgttgaacacattcatcttctccaccagggtggtgagtgctgtctcggtggcctcgccgaccttctcatagacacctttggcctcgttgaagtccaaggaggagtcattgcagagggcacagatggtggccagctccaccagcccgtcatactgccctggccggactggcttatcattcttcaagacctctccctctggagcgtaagtggagccggtgatggagaactcattcaggaggcagatgtccccatccaccttgtcaatgataaacatcttgcagacagacatctggttggtggtgagggtgcctgtcttgtcggaacagatgacagaggtgcagcccagggtctctacggagggcaagcttcttacaatggcattcttctttgccatccgacgggtacccagggccaggcaggtggtgatgactgcaggaagaccttcggggatggcagccacagccaaggccacggcaatcttaaagtagtagatggccccgcggaaccaggagcccccatggacggggtcgttgaagtggccaatgttgataagccagacagccacacagatgagggagatgaccttggagagctgctccccaaactcatccagcttctgctgcaagggggtcttgtcctgttctgtggcagccatttggtctcggatcttcccaatctcggtgcccacaccagtggtggccacgatgcccaaggccttgccggctgcaatgttggtgcccgagaaaagcatgttcttcttgtcctggttgacagctcgggggtcaggaacgggctccgtgtgtttgatgacagatacagactcgcctgtcaggatggactggtcaacccgcagcgtggtggatttgatggcgaggattcggatgtctgcagggactttgtcccccacagccacctccacgatgtccccagggacgatgtcccgagccttgatcctttgcactgacttgcggtcagcccggtagaccttccccatctctggctcatactccttcagggcctcgatggcgttctctgcgttccgctcctgccaaacccccacgatggcattggcaatgaggatcaagaggatgacaaagggttcaacaaaggcagtgatggtctcttcaccttcctcaaaccaggccagcacgaaggaaatgcatgcggccaggaggagaatccgcaccaggaggtcttcaaactgctctatcaccagctcccacagggtcttcccttcctcagcagggagctcattgaggccgtatttctccagattccgcttaacttggtccggggtgaggcccgtggtctcactcaccccaaaataggccaaacattcctccgtggttttagcatgagcggcctccattgtgctcccttcctgggggccggggccggtgtgttccttccagggggttcccactcgtggggggtcttcctcagtgtgtccaactgcctgtctgcctgggtttcttctttttactctcctgccccctccaggtttttcttccctccacaaagctctga

SEQ ID NO: 612211 - DNA, 5084 bp, Homo sapiens
gggacggagtgttagcgctggagatggagaaaaaggggcacattctggaatagtcagcacattggaagtagagtttacgggacttgcaggaggacacgtagaatcaaggacttccaggttcctggcgtgtcctttacagagggatttgagggcgttgggaggaggaaaggggggccagcaggaagcggtgactggcctgagccctgaacaggaagagacggcctcgctggtgtctacgggcaccctggttcccgagggcatctacctgccccctcctggctaccagctcgtcccagacactcagtgggagcagctgcagacagagggccgacagctgcagaaggacctggagagcgtcagtcgcgagcgggacgagctccaagagggcctgagacggagcaatgaggactgtgccaagcagatgcaggtgctcctggcccaggtccagaactcagagcagctgctgcggaccctgcaagggaccgtgagccaggcccaggagcgggtgcagctgcagatggcggagctggtcaccacccacaagtgcctgcaccatgaggtaaagcggttgaatgaggaaaaccaagggctccgggccgagcagctgccatcctcagccccccagggctcgcagcaggagcagggcgaggaggaatcactgcccagctctgtgccagagctgcagcagctgctgtgctgcacgcggcaagaggcgagggcccggctgcaggcccaggagcacggggccgagcgcctgcggatcgagatcgtgacgctgcgggaggctctggaggaggagacagtggccagggccagcctggaggggcagctgagggtgcagcgggaggagacagaggtgctggaggcctccctgtgcagcctgaggacagagatggagcgggtgcagcaggaacagagcaaggcccagctcccagacctcctctcagaacagagggccaaggtgctgcggctgcaggcagagctggagaccagtgagcaggtgcagagggatttcgtgcgactgtcccaggccctgcaggtgcgcctagagcggatccgccaggctgagaccctggagcaagtgcgcagcatcatggatgaggcgccactcacggacgtcagggacatcaaggacacctgaggggtcaggatatccccacccccaccctgggaaagacgcctttccccactcctgaaccatgaggcctcgctctggggtcttggatggcttttccaccgtccctgagactggggttgaggggactgacgggggccaccaccgccccgccctccagcgcctcctcccagggtggctgggcctcctgttctcagggatcacacctgggtgaggggcccaagcccctcccggaaccaaaggtgcaggctcaggcctgcggctttctggctgctgtgctgcctcctgggctccagccctcccctgcccccagcccgtcccctgcccagggcacagcggagccatgggggctgggagtccccatcagaggcagtgaggtgggccccggccctgggacaggcagctgccttctggtctgcatgacactaagacgcttgtccacagcggcgacccaggcctccaagcttgcacagaggcaaggccagacttttccgtcgtttattttcaataaataagcagctcagcgcagtcggtcgccttgtccctgcaagcccctcggggttgggaaggggaatttacaaggttgagagggaggcgggtggccgagggggaaggaaagggaaggggacatgtttataaacagacacatgacacgggtgtgggggacaggacgggggtctgtgccacagctctgcctgaagatgtgtcactatcggggtggggaggacagagcaaaaggatgctcacttccttctttcatcttctggatctgtgacacgggctcagagatggaggagggggaacagttatccctctaggtagttccgagcaacgaacttgaggatttcgtcgagcccaatgactggcagtgagatcttgaggaccatgagccactgggtgaggtccagggcccggagcttgaagatcatcggcagggggtcaacatagaggatgaggaagtgcagggacatggagaggcagatggagcccagcagccagatgttcacccagggtggcatccgcagcagggactggttctcggacaggctgttcagtgcattgcacatctcgatggtcaccagcacggacagggccatggtcatgggctcgggggcctcgaagacctcacagtctatgccctcaaagtgggtgttgtcctcggtgcactgcatgaagtgagtcagctggctgtagttgacatgaggcccatcctcagcgtacaggaaccaccaggcagctgctcccacggtggctgcacccacatagcccccgattgccatgtagcggaagaagagccagccactgatgaggggctccttggggctccggggggggcggtccatgatgtccaggtctggtgggttgaagcccagggctgtggctgggagcccgtcggtcaccaagttcacccatagcagctgcaccgggatcagggcctcaggcagccccagggcagcggtcaggaagatacagaccacctcgcccacgttggaggaaatgaggtagcggatgaactgcttcatgttgttgtagatggcgcggccctcctccacagcagctacgatggtggagaagttgtcgtcagccagcaccatctcagaggcagtcttggccacggcagtgccagatcccatggcaatgccaatctcagccttcttcagggcaggggcgtcattgacgccatcacctgtcatggctgtgatctcatcgtaggactgcaggtactccacaatcttggacttgtgcgagggctccacacgggcgaagcagcaggcacgtcggcaggcttcccgctgttcagccaggggcaggtcgtcgaactctcggcccgtgtaggcgcgatcggccacctcctcgttctccccaaagatgccaattcgccggcagatggcaatggctgtgcccttgttgtccccagtgatcatgatcacccggatcccggcgtcacggcacagctggatggagcccgtgacctccttgcgcggagggtccagcatgcccactacacccacgaatgtcaggtccgtctcatactccaggaacctggcagagtcatccaggaccatttcctctcgcttcgggggggtgtcccgggtggccagggccaagcagcgcagggtgtcccggccagtgccccactccttgatcaccgccatgatcttttccttcaccggccccgtcagtggcacccgggtggtgccaactcgcacatagttacagcggtcgatgacgccctcaggggcacccttgacaaacatcttgttgcccacagcagcccgggaagatttggctggggagcaatagacagacatggactttctgtctcgggagaactccagggtgaattccttcttcattagctggcggatcaccgagttgcaggcgttggctctctccaccttcgagaggcttctcacatccgtgttgaacacattcatcttctccaccagggtggtgagtgctgtctcggtggcctcgccgaccttctcatagacacctttggcctcgttgaagtccaaggaggagtcattgcagagggcacagatggtggccagctccaccagcccgtcatactgccctggccggactggcttatcattcttcaagacctctccctctggagcgtaagtggagccggtgatggagaactcattcaggaggcagatgtccccatccaccttgtcaatgataaacatcttgcagacagacatctggttggtggtgagggtgcctgtcttgtcggaacagatgacagaggtgcagcccagggtctctacggagggcaagcttcttacaatggcattcttctttgccatccgacgggtacccagggccaggcaggtggtgatgactgcaggaagaccttcggggatggcagccacagccaaggccacggcaatcttaaagtagtagatggccccgcggaaccaggagcccccatggacggggtcgttgaagtggccaatgttgataagccagacagccacacagatgagggagatgaccttggagagctgctccccaaactcatccagcttctgctgcaagggggtcttgtcctgttctgtggcagccatttggtctcggatcttcccaatctcggtgcccacaccagtggtggccacgatgcccaaggccttgccggctgcaatgttggtgcccgagaaaagcatgttcttcttgtcctggttgacagctcgggggtcaggaacgggctccgtgtgtttgatgacagatacagactcgcctgtcaggatggactggtcaacccgcagcgtggtggatttgatggcgaggattcggatgtctgcagggactttgtcccccacagccacctccacgatgtccccagggacgatgtcccgagccttgatcctttgcactgacttgcggtcagcccggtagaccttccccatctctggctcatactccttcagggcctcgatggcgttctctgcgttccgctcctgccaaacccccacgatggcattggcaatgaggatcaagaggatgacaaagggttcaacaaaggcagtgatggtctcttcaccttcctcaaaccaggccagcacgaaggaaatgcatgcggccaggaggagaatccgcaccaggaggtcttcaaactgctctatcaccagctcccacagggtcttcccttcctcagcagggagctcattgaggccgtatttctccagattccgcttaacttggtccggggtgaggcccgtggtctcactcaccccaaaataggccaaacattcctccgtggttttagcatgagcggcctccattgtgctcccttcctgggggccggggccggtgtgttccttccagggggttcccactcgtggggggtcttcctcagtgtgtccaactgcctgtctgcctgggtttcttctttttactctcctgccccctccaggtttttcttccctccacaaagctctga

SEQ ID NO: 612212 - DNA, 299 bp, Homo sapiens
  misc_feature (198)..(198): n is a, c, g, or t
  misc_feature (221)..(221): n is a, c, g, or t
  misc_feature (229)..(229): n is a, c, g, or t
  misc_feature (281)..(281): n is a, c, g, or t
ccagtgttagcttaattttaatgtctggggtttgtcatggtgaaattataactattacagtgttggagaacacaaaaaatgttttttgaatgagcctttgggctttttgtcatgttaagcagtgaactatttttaaggtttaatcagggattatttttccagccccgggtttttttaaggaattatttcacacccggnccatttttagcagtttcctcagngatggaanatcatgaatgtgagtcattatgtagctgttggacattgagcaaataaacttncagatttgacgccagtga

SEQ ID NO: 612213 - DNA, 247 bp, Homo sapiens
gtactcagctcatagcgtatataagtgtgcagtaaaagctcgtagtggatctgggagcgggcggcggcagcgtgaggagagcaccgcctgccctgcccttgctctcgggccccctcgatgtcttagttgagtgcccgcgggcccgaagcgttactttgaaaaaatgagagtgtcaaagcaggcccgagccggctggataccgcagctaggaataatggaataggaccgcggacctagtggtgtgggt

SEQ ID NO: 612214 - DNA, 590 bp, Homo sapiens
  misc_feature (471)..(471): n is a, c, g, or t
cgccaccccccctcctggtcttaaagtttgaagcctgcatttgtcttgtctgagttcttgccacaggaaatcaacgagttgaaactcaccagatcactgcatccagacaatgagatgccaaacccctcatccctcctgatttccttatccctccctaattcctttgaccaactcctcttccttacctctccctaactctggttttcccacatgtagttacatttcttccctgctgtataaccccctgattttagttgactagggagatggatttgagactgatccccattttccttggctaaagcactcaattaaagccttcttcccaggcagtactcattgtcttggtgattggctttctgtgcagtgagcaacgggacctagactggagccctggcatttcagtaacagattttggttccctacctgagaacacattgcttgtggctcagctgctgcagactgggactntcagaagccccctgtccagctgtctgacctttttttggctggaggtgggtttccatctttttttctttggctctgctgctgccagccccaattgtattgctgattgcctaggaagacag

SEQ ID NO: 612215 - DNA, 712 bp, Homo sapiens
gggacgggcggtcagcgctctctctatggccgacggtacacggtcatgcagggatcactgacggaccccgggccatcaaatcagggaaggatacagcgggaggccccgcctcccaatccaaggcggtgctcactggggtacctggaccggggcagatgtcaccaccctgcctgctcagttcctggggtccgacgatgctagggacgctccgagttgagggagagtggctagtgagggccaggtctcctgaaaggcgggagatgcagaccgtccgcccccccagcccagagcaagcatctggggcaccagtgacccaggacgggaagaagccagtccacagccgtccactgtcaccgggctcctcgtgtccaggcgcataccgctggtcatgggcgggagctattcaccaatggtgaactgggtatcactgtcagatattccatggctcagggcctgggttgagggagccttagggagacggatcgtccgatcgtgggtgcttgtcctccagtgttgctggctggcttactccgtctacgccaccagtgacctcagcagagaggccctcgtggccacgccatgctcatgtggtgtccccaccgcccacgttgtttgatgtcactgacctgtctacatgtatttatattcttgagattttctaccctcactagaatgtaaactcatgaaggacagacttttcttttctcgtcga

SEQ ID NO: 612216 - DNA, 274 bp, Homo sapiens
cccccacatttacatacattttgacttatgcctaacatcacacacaaaacaccataaacaaaattaaaagataagccttagactgagaaaagagattgtacaaatctatatctgtaaaaacttttttatttatactatattatgtacctgagattaattaagaatgcatgaagatcaatgcatactatggcaaataaccatacaatgccagtgggccacggattacaaccggcaactcccatcagaggaaaatggattatgaacttgtaaaaat

SEQ ID NO: 612217 - DNA, 299 bp, Homo sapiens
tccagggcttccactggcaaaacactaaagatccaaaagggccttcagggccccagcaggccggatcggtacggtatcaagtcagggcaggtacagtaggataagccactcggtcccttccggggcaaagaagaaccggaggggagggaattctcccttaagacttacttttggtaaaattgtccccgagggtactttacttccccactggatgggaccagggggttcccaagtcatggagcggtaagactggacttggtttggtctccgaatcccaatggttttggaaactcaagtat

SEQ ID NO: 612218 - DNA, 839 bp, Homo sapiens
  misc_feature (276)..(276): n is a, c, g, or t
gaagaatagcccgcatcagggtgcggggtgcaggtgcgggcgtccgaggggccgatggtggaggagcaagggccgggtgaaactgggactcggttcccaaagcctgtcaggatgcatgttccatccaatcccaagaccatggtgcgtgggcaggtgcattgagctgagatggtgtagggatgcaggtgcttggcgcgtgcaggcgctgcggtgtgtaatcgtgaagatactggtctagcggcacttactgaccacgggccgcatcggtgtcggcgnagagtccgcagagtctactcaggtgcagtctagtggccggtgggactagtggcaagcctgtcgtatggatcgtggggtctggggctgtcctgtggagccagacgttcgtgagcctggggtgcgcgttggtcttgtcctggacgctctatcgtgctgtctcctgcgtccgacgatggagttcgacggtggtatgtgtgcgacctaggtgtctgcttgtatcccggtggtcaggctggttatacggcggcaggactgatcctattgagcgtgtcaactgtccgcatgatctgcttcatcatcgaagatgagatactcaggttaaagtggctattactagggccccaagttgactgcatagaggaaatagaccacgggcatggccagagcttgcacttcgttaagtcgagccaggcctaggttcaacaggttggcgggatgattacaggggaagaattctgaggtcccctggtgtcaccatagaatcctggaatgtgcttctatcccatcttttaaaaatgtcaccagcatttgagtccaggttgttccttgaaaaaggctggtgc

SEQ ID NO: 612219 - DNA, 395 bp, Homo sapiens
ttgatgcttgtggtgactctagacggatcccctccttgtagtcagaagctaggggctcttaacgggaggtgagagggagtcatctgtccatctagctgcttctgtgctggaaagctgaccacaaggcgtggtgccaccatggatgactctcccccaagggacttgagcagctctctgtgggccagctccatatccttgagcctgtttagctttaaagtgagctgctctttggtacggcagactctgcccacgtcccttagggcctggcctggaggagagcggctggggcgtcttggctcatcgttgcctccctgtagctgaggctgacgctctgtctgtcctgcagggaggctgtctggctgagggggtctcatgggttcctctgcagtggtcgg

SEQ ID NO: 612220 - DNA, 915 bp, Homo sapiens
agcggattcttgtacagggccgcggcacatgggtcgagccggagtgcgctagagctccgtgcgctgctggggccgcgagagcgctggggagcagcggacgccggctgctggggaggggggtggggtggtgacggacgcacacgtgcttcctgtgatgctgtgcacataagtgggcgtggtggtctggctgacgtgttgttcatatcatgacgccgtatcttgacttatgaccgttacagatccattttctattgtatccttatcattctgtgtattccaaattatgacacccagttatgtagcaaaaaccggatgtggagtatctgcacggtccaggatagaaggcaagcaagtccatgcctactggttcttgcacgtggggcaagcccgcgtcaggggacatcttttggcctgactgcttcatccatgggagactcggtacgtgcgactggaaacatcacctgaaaggtttttccatgtacaatatactattgtttagtggcaagtagtgctattaagtgaaaaggattatacaggtacatggtctatatatgacatataccactatgtgaccttccggctcgtcgcttttgtagaatgccagaagctagcgttctttgggtcaaaccggagcggacgcggatagaggcttcacgccacacatgaaaggtggggcgagttggttttactctggtccctcatcttgattgtccctatttcttcaaatggcggggtaaactaagacttttcagaggttgcgattacggtagaatagggaagaacaaatagttcgccggaacccggtgcacccgctaggaaataccctaggccttataattccccgcacatcggctaaccgagacgtcgctccatggttcccatgatctgggagaaaccccgggtagaaagctaccc

SEQ ID NO: 612221 - DNA, 128 bp, Homo sapiens
tataggagagagaactggggagctggagggtattgtgagccgggtcatgcactgtgttccagcctgggcaactagatggcgatgatcctgtcttaaaagtaaataagcaagtaaataaataagcaaag

SEQ ID NO: 612222 - DNA, 1007 bp, Homo sapiens
  misc_feature (5)..(5): n is a, c, g, or t
  misc_feature (82)..(82): n is a, c, g, or t
  misc_feature (86)..(86): n is a, c, g, or t
  misc_feature (145)..(145): n is a, c, g, or t
  misc_feature (172)..(172): n is a, c, g, or t
  misc_feature (174)..(174): n is a, c, g, or t
  misc_feature (652)..(652): n is a, c, g, or t
  misc_feature (655)..(655): n is a, c, g, or t
  misc_feature (676)..(676): n is a, c, g, or t
  misc_feature (678)..(678): n is a, c, g, or t
  misc_feature (702)..(702): n is a, c, g, or t
  misc_feature (819)..(819): n is a, c, g, or t
  misc_feature (886)..(886): n is a, c, g, or t
  misc_feature (908)..(908): n is a, c, g, or t
  misc_feature (913)..(913): n is a, c, g, or t
  misc_feature (939)..(939): n is a, c, g, or t
  misc_feature (974)..(974): n is a, c, g, or t
  misc_feature (999)..(999): n is a, c, g, or t
  misc_feature (1001)..(1001): n is a, c, g, or t
  misc_feature (1005)..(1005): n is a, c, g, or t
ttccngcgcttacccagcttttcactctctccgcctttctgctggacggcatccaactcagccagggcgagctttagctttncctnaaagacattctttaaggaagtcatttcctcttagagcagagcatcagagtgtcctttcntaaggcgctcctgaaaagattcaaatngncttcgggttgtgctccatctccaggtgcttatgatggtaaaacttgagaagcaaactctccatgaatataatttttgtgatcatgatgattttgtttttaaattggattcttttccagggtcagcaacaacaaaacctcctgaaaaataagcactactccagaaaagtagtattctttccccctgtcacggcaagcctagaaagcctttgaggataaaatctttataggctggtcataattaaaaattctcttaggggcagcatttctttgctggattccttttgggattggccttagaaagaagaataggtggcttttctgttgcttactgtatgtgagaaaagtggtcaattgtagaaaacagtgacctttcctaaaatggcaagatccatatttctatttagctcctaacagcacactgcttaagacagtttaagaagtggctttccaattatggtacatgaaccttttaaaatnatnatggtgattgaaacccctatncnaggcaagcagtctgccactgagtnatgtacccagccccaagtgaatatttgaaattgaaaatttgagcaaggaaagtatatattcatgtgtttgtataggcttgacttttgttgttcttttagacagtcttagtccaggcnggccttaaactttgtttgcccaagataaacttgaactgatcttcatgcctctacctcctaaagagcngagattacagtcctgtgacacngtgcntggctcagaaattctttatcaaaganatgcaagtgtttcttaagggatgcagaagatattntgccgttagtctgctgcaaaccctnancttntt

SEQ ID NO: 612223 - DNA, 149 bp, Homo sapiens
ggttggggataatgggggcagcgtctgtgtgaatcacatccacaaacttggcatcgctggggtccactcggactaattcaggtgtgccttgaaagcaaggttcagctggatccagccctaaaagagataggatgtgtcatgttagtatc

SEQ ID NO: 612224 - DNA, 563 bp, Homo sapiens
tactgaaaaacttgggtactggagctgagtagtacctatagggctgaaaaattacctactaggtactgtgctcaccacctgggagacaggatcattcatgccccaaacttcagcatcatacagtatacccatgtaacaaacctgcacatgtgcccctgaatctaaaataaaaattgaaatgataaaatgtttttgccaggcacggtggctcacgcctgtaatctcggcactttgggagaccgaggtggggggatcacctgaggtcaggagttcgagaccagcctgaccaacatggagaaaccctgtctctactaaaaatacaaaattaccgggcatggtggcacatgacttggtagtcccagctacttgggaggctgaggcaggagaatcgcttgagcccaggaggtggaggtgcggtgagccgagatcgcgccattgctctccagcctgggcaacaaaagcgaaactctgtctcagaaaaataaaccgaaaaaatcttttattgccaaattgagagcttcgttatacctaccatcagaggtcgaacttttaatttatattca

SEQ ID NO: 612225 - DNA, 107 bp, Homo sapiens
ctctagagtatcaccttatctgaccatccccctcgacgctcgcgttcgcatttggcggctccctaccggtccaagcccagtcctcagtcatggtatgcccccttgga

SEQ ID NO: 612226 - DNA, 245 bp, Homo sapiens
  misc_feature (43)..(43): n is a, c, g, or t
aaaagtgggtgcccccggccccaaaaaagccaaaaaacccccnaacttgtaaagccaagccgggcaaggcattcaaagcccaaaaaggccaaacccagtaaacccaaagcaaagtccagtgccaaaagggccggcaaaaaaaagtgccaatgaagtcttttcttggggacacctccctcctgtctcctattttctgtaaataattttctccttttttctctcttgatgctcccccccccctttta

SEQ ID NO: 612227 - DNA, 507 bp, Homo sapiens
cgggtgtgcatgcaggatgcgaccaaccccgacccgggttaaaactcccagggactcttctgctgctgccacctcttgttctctcccccgttcccactcgtgggtctccctcagggcctgggaggcacaggtgtccctgcttgctgatggggctggatgtactgcatccgcaggttccctgcggaacttgggtggctgccctgctgcagcccctgtgctgccctgcagaagacttgtgtttgcctcctgcagcctcaaccctggatgggcagctgatgggcctaaccacacatgatcactggtgtgtatcagcattgcggcttgtggaccccatgtgggctgtcctgacctcgctgtgcgtactgcctgcaccagcggcagggtggccctgtgccgagctgcaggaggccgatggccagtgtccggtcgaccgaagaccttgctgaagttgaacaattggtgcaggtcgtgtctcgaacacggggctcgcgagtcctctcaagccgc

SEQ ID NO: 612228 - DNA, 359 bp, Homo sapiens
cttgatgattaccaggaccgaatgaccaaaggggaaaggcttaatcaggatcagctggatgccgtttctaagtaccaggaggtacacaattaatttggagtttgcaaaggatttacagaggagtttcatggcactaggtcaggtatattcagaaaccattaaggaggcacagcacgtcggggagcagcttatgagagaggaggctgaccagaaccgtttaaaaactgtacttgagctacagtatgttttgggccaaattgggggatgttgaagtccggacttacctgcaaacaaggtttgattggggtgcccaattttttccccagggggattgttcatgttggatgattttttaggct

SEQ ID NO: 612229 - DNA, 255 bp, Homo sapiens
ctggaccctatttgagggtggaatgtggggggagggtaagaatccccctcacggcggcggttttttggcggcagcgctttcccccgcccgccaaccccgagcgccgccttcccgccctttcgggtttgaattgcccgcccgcagggaggggagggaaggggccctcgcgatgggggagggggcacggggcgggggcggcgagcccgaggagagcgggataaacagccgccaacatggctcctcccgccgcggccg

SEQ ID NO: 612230 - DNA, 1156 bp, Homo sapiens
  misc_feature (346)..(346): n is a, c, g, or t
gtatcaacgcagagtggctattacggccgggggttttaatacctgctttgcatattcacacatggtcaactgggacatgttaaactttgatttgtcaaaattttatggccttggtggtgggaaataacttaaacttaattattgttattttaaaccttaagttttaaattattttcacatttttggggggacaaaatctctttttctacatctttctcagtgactgagcgtgtatattattattattatcgctaaatactcttatgattatcacgagaaatatttaaattttttccgaaaaaggttaaccttttgaaaacaaaatatctcaagacgcactattgtnggtttcatttaaaccccttttggccttcccccttttttggggaggcctagatattttgggggtggggctacccattattaccgaaatgtttcgttcaaaggggatggggagcattctttatgatttacgcaaaaaagagaagaacgagtttcgttaaacagttttaaagaaaagccgagtgggaaaagttttgtttgtataaagcacgaaaaaggtttttatgttaatatacacgatataatatattgtccccgacaaaaagagtgtggggggtagcaccacgtttttttaaaaagtctttttatcaaacacggtttcttttcaatgttgtgatatataaaaaaagagcccgccgattatttttatataattattgagaaagattaaagcatagtagaagatgtaaaagaacaacaaaactagccaggacagaaaacgattttttttttggtgggggggcaccacccaatgattttttttctatctgggggggggagaaaaaaaaacaggggggggaaggaatatttatttattactatagatagatattatagtatcacgcaaacacaccgagagcccaaccagaagaagaaggtggtctttttaggacggattgaggggtgatcgcgggctgataagagcgcgagagcgagggtgatacggatgtgaaaaagacgcgttttttttttccccgcggtgttttttttttcaatagaggataataagtcgataagaaagagagagccccagcgacgatgttttctttatctaccacccggggtggtgggcacaaaaacagaggggggcaaa

SEQ ID NO: 612231 - DNA, 834 bp, Homo sapiens
taacacatttactcggttttatttacccttctctgatttttgaaatctaaataaaggttttggctaccaaacaaaagggaaattaaaaaaacccagggccccgattaatgtggattgcagataacgggttgtataaggccccatccggggaagggtgtacatcttcgtgggaacaggctagcgtgtgtggcccagggagctagcaaccgtggttagaaaacagcaagtaagccacgagctcaagaagttctgaggctgggaacacagaaaagagctccttcctgcttccacccgaatctggttcgcatggccttggaaaagtagcaaacagcagcccgtgtgataagcagttcgtggatcatgccctctttaatgtatacgcttcgtaagggccgagaaatgacgccctcctcgtccaacgaaaagcggtggttgtgcaccatgttgcaccggccctcatttaaggcatgtggtgcacacatcttaataatttcacaacagctcaaggaccagtgcgtcgttgaattgcagggacctctatgggcaggctcagtgatattcaaccccagaagccaaggtgtgtgaaagctcactctttagcagactcacgaagggtctcctgcagaggcggggggtgctaaccatccccagggacctggcaggggaagactctgaatctctgtttcccctcggttgtggacgggaacttctattgacgcactggggcaccagcggggcccatctagggagggcccagttgcccgttcttggaaatgacaccgaatttggcttgctcttagaagccttcgtggaaaactccaattccggagtccg

SEQ ID NO: 612232 - DNA, 294 bp, Homo sapiens
  misc_feature (242)..(242): n is a, c, g, or t
ccccggctaactcagagtgggccaatgctcgtgggaccttgctggcttcaaacaatgttaaccagcttttccagcccatttgcacaacgtaacgtttctgacaatttccatttaagcttccatctttccaaacacatggatgaaacacacaagcaaagcagaatgggtgcgagcttcaaggcagaacaggagaatgaaggggggaggctgtcacgtggcagcgttcatccacagggaacccngctcacttctaagtcaggctttaagaagagccaactctgtgaggatccagaa

SEQ ID NO: 612233 - DNA, 797 bp, Homo sapiens
ggggctgatacagagtttatggaattagatttttctatttacaacgtgagaatcacatctacatactatttggctagtctacagtgggtacattattcccaacaagcttaagacttaccagtgaagtgggctcattcatacaaaaacacactcacactaattctttaaaaacagtaggtgcatactttatacctcctccatataaagccaactttggattaaaaaccactagttttcaaagcctcagtcctcgtgatttggaagatgaaccaagatatacgccatagtgatcctacaatctatttaagtcatttggtacagcgtgctatcttatgggactacagtaaatattttttaaagggacaccaatgtgaggggcaccatcgggggttaaccttaaccagaaagcgggtttcctcctcctcacccccaaaaaaaaaaaaaaaaaaaaaaaaataaaaaaaaaaaaaaaaaaaaaaaaaaaaaaaaaagggggggggggcacaaaaatacccccggaggggccacaaaaccggccacaccaaattttgtaaacaggggcccaaaggaggacaataaagcgagaaaggcggcgtaaaccaggtggaacgggaaaccactgaccgaggaacccggagaaagacccaacacggggggcgaacaaggtgggcaaacacccaaggagttaaagccccaggggaaaaatacacccagcggaacaggtgaaccccagcacaaaatctcggcataaaattgcccacgaagatcaaaaaagcggcacagcaaaacacgaaagt

SEQ ID NO: 612234 - DNA, 421 bp, Homo sapiens
cgagttttgagttttcaggtccatcaggtcgtttaagacatttacatgtgttggttattctagttatacattcgtgtaaattggaagcaaagttttcaacttctttgcctttggtttgaatttcctactgtagctcagagtagtttgatcgtctgaagccttcttctctcaactcgtcgaagtcattctccatccagctttcttccattgctggtgaggaactgcgttcctttggaggaggagaggtgctctgctttttagagtttccagtttttctgctctgttttttccccatctttgtggttatatctactttgggtctttgatgatggtgacatacagatgggtttctggtgtggatgtcctttgtgtttgttagttttccttctaacagacaggagcctcagctgcaggtctgttg

SEQ ID NO: 612235 - DNA, 299 bp, Homo sapiens
gtgctcacttcatatccactcctccagtgatgacacacaacagagagcagctattttattatttctaaatcatgcaaataaaagtgtacgtgaatattaaatataaatggccctacttcaggtaaagaaaactactaggataaacttcaactacatttatgacgaagaatttcaaattctgaatcataaattctgaaacctcctgattgtattgtgttttctttccactgtttatcacaaccaagtaatcttaattatcttacaacttcaataaatgactgactttctatgctggctgt

SEQ ID NO: 612236 - DNA, 207 bp, Homo sapiens
gcagcatcagcatcagcacattagcagcatgaccttagcaggaccacattggcaacaccatttgcatggcattgggcattggcaaaggcaatttgcaaagcagcagtagcaaagcatttgcaaaagccaaagcagcatgagcaccggcattgcagttgcagtagtagcatgagcagaagcaaggcagttgttgcaccagcagttgca

SEQ ID NO: 612237 - DNA, 231 bp, Homo sapiens
cagggaaccgtctataacgtggaggtcagtgtcatactagaggagagtctttttataggtcccgagtcttctgtgctagtgagtatctgcctagtctcggagctgagcgatggtaacgatcttgcctttctctcctcttccaccctcattctgcactcggccgccctgggcagccaggatccgctcagacactaccaccacgaggggagtccgaggcagacctgtaaccag

SEQ ID NO: 612238 - DNA, 335 bp, Homo sapiens
ctcgatgtcaggcagagagaagatgacatcaatatgtgagaccttcaacaccccggccagatacagtggacatccaggccgtgctgtcccatctacgcctctgggcgcaccactggcatcgtcatggacatctgagagaaggggtcacccaaaacggatgcccatctacgagggctacgccctcccacacagaccatcctgcgtctggaactggctggccgggacctgaccgactacctcatgaagatcctcactgagacgaggctacaagcttcaccaccacggacgagacgggaaatcgtgcgcgacatcaaggagaagctgtgctacgtcgc

SEQ ID NO: 612239 - DNA, 1225 bp, Homo sapiens
  misc_feature (891)..(891): n is a, c, g, or t
  misc_feature (1225)..(1225): n is a, c, g, or t
gcaccaaatggcggatgacgccggtgcagccggggtggcccgggggccctggtggccctgggatcggtgtgtgacacctgcggtggcttccgcgggcagtgtttcgggcagtaggcatcctggggccggggtcgctggcctgtgtgcactgcgtggccaggggcctgaggcctgcggcagctctgctggagtgcaaggtcggaggagtacgtgagtggatgcccagtcagacgagagattggtgccgcgtatggtcgaaaggacgagttggaagatcaacgtccgctggacggagagtcgtatcgtctgtctccctgtcgccattaagggaatcagaggctcattgagtttcttccttggtggcgcctcgtctcgaaggcatcgaggttctctgaagcattatgccatagtgcgagaagccaggacccgtgccaggtcgagcgcaccgaggttaaaggccatttgtcgcgtaatcggggactacgagtggccacggtcggtctgggtgttaagttgctccaatggaggtggccacctgccatccgtgggtgccatcatcctgtgccaagctctccatcgtccccgtgcgcagaggctactgtggggaacaagatcggcaagccccacacttgtcccttgcaaggttgacatggccgctgcggctcttgtgctggtacgcctcatccctggacccagggtgcactggaatcgtcatcgcaccttgtgcctaaagaagctgctcattgatgcgtggtatccgatgactgctacaccttcaggccggggctagacttgacaccctgtggcaactttcgcgcaaagggcaacttttgatgccatttctaagaactacaggtaacttgaccccgaactttgtgaaggagatggttntaccaaggtctccctattagggagttacctgagcacctgtaagagcccaacaagagttcgtgacaggaccaggtccccgtgcgtgtctacacccatagcgttttataccgcagacaaaaggagttacggcttgaaaaaaaacaaagaaccgggccatattctgtgcggaaacgacaaacaagacgagggacagcacttcgtgcacgcccttaaaggagagagagcgaccatgagaatgccgaagaaaatagcacaagaaaagcaatagagaaacacacaaagcgagacagatgacacgacatcaagcatactaactatctgactatataatgan

SEQ ID NO: 612240 - DNA, 656 bp, Homo sapiens
tgaggaccgcacactgggtcgagttcgtgaccaaatactcaaagacagacagtcaaaaaggatgaactgtttctgcgctagtgaaccagtgtgtttctgaatgcccactgggaaaagcaaaacccctgtatgagagtttcttgagatcagaactgagactgtgtcaggccccggggtaggcaataggaatacatctctgatgatgaacactttgcccattcaaacaggaaaacacctcatagcacaacctgcattccaagctttcattatgtatgcgggaataggtcatttccaaaaccacttccctgcatacctctctacacaaactcagcagaagctggacacaaacaagaaggtccaaggaacacttaaggaactcaatgccctgccccacccaacaacagccaattaatgttgcacagcctgttttagtcttggagggctattctgtatctattgcaatgactcaattctgccactttattgcaaaagcagtcacagacaatatataaacaaataggtgtggctatgtgccaataaaacgttatttatgaaaacagacattatttacgaaaagaggaggtggacaggatttggccatgagccacagcatgctggctcctgctttactacaaatagatcccttggaaatcgag

SEQ ID NO: 612241 - DNA, 111 bp, Homo sapiens
caaaaatgcttataccacatttcaagtaccaaacttaaagcatagaaacacaacgacgattatatactctattctacaatcaacgggatattcgacaaagagcagagaaag

SEQ ID NO: 612242 - DNA, 116 bp, Homo sapiens
ctgaactgaactttatttactcattcaaaagaaagtggccctcactctaagcaaatatatcttgtgctttatcttctggcatactgagatactttctaaagtggtttccaattcca

SEQ ID NO: 612243 - DNA, 442 bp, Homo sapiens
ctgaagtcataagcactgcacctgtgaaattgccaactgcagagagcacaggtatgacacctgagaaggtgccagtttcagaggtcatgggtaccacactggcagagatgtcaactccagaggctacaggtatgacacctgcagaggtatcaattgtggtgctttctggaaccacagctgcacaggtaacaactacagagtgggtggagaaaaaagatagagagataaatataaatgagaatgaaggtaaagatgaaagataaataatgtataaggaaagtattaaaggttaaatgggccccctgctggatggtacagccaccttaaggctggtgaagagacaagtccccctggattgtgttcatgtatcgatatggttccttttccgtcaccctggacattgtcagggtattgaaagtgccgagatcctgcaggctgtgcg

SEQ ID NO: 612244 - DNA, 572 bp, Homo sapiens
  misc_feature (294)..(294): n is a, c, g, or t
tttttatctttcattttggtccccttagcccaagtaaaaagaatagtaattccgccgaggagggggaatggcttgttgggagcccatcagggccctgggagcccataaagattcacccatggttgttgaacttagagtcattctccggcttttctttataattcccccatatacgcaaagaagatatgttcttgttaccctgggaccacacaaagcccccaatatagtaaggtttttcttagataatcctagatgaaatgttagagatgctatattatccccctgtggccctgntttaggaaaggggctcccccccaaagattgggttgctctcccgggggcccaacccaaaaaggtttggcaaaatcgggctcagggaaactttgcccttctgcaacccccggggggggccccccctgcataaagcttccctttaaaacaaaggggtttcaaaacattttgcccccccattagcttttttttttttttttacctttttggggggaaaaggattttttaaaagtttgtcttccaagggttttataaaaaggaaaaaaagtttttccccttta

SEQ ID NO: 612245 - DNA, 872 bp, Homo sapiens
ggattggtgcagttctaatccctaaatcataatcttaaaatcaggaatgtgtggagaacagagccatgtcatatcactttgctcttaccattccttttgatcagcctcaattcagcgctcattgtgtagtatgttttttctttcctatgaaataattcaacagaaagcatttcattttactttggctattgttgcaatatatgtttaataatgaccaaaggtgcattctgagtttttacaaggaatgtaatactggatgccttaagaacatatcttagtttctcatgtgataagttaggctttgtctgatgtattttccttctctctattgtctaatgttgaggttgtgtgaaggaagtgtatgttcttagtaaagcattttttcaaatataaggtacatgccgtatacagaacttaacatttgccacagaatatatcactagtatattttcgagaaagaaaagtacggggtgagttctgttaggaaataagagatgagacgtatgtatctcacaaaaaatcttatttcagaatggacaatctttttgagaaaagtagctgagtatactggtttaagaaaaatgcttgctttcagaattgacggttaactctacagtcgggaggtgactctattacgtcccgttattacttctccacggttgcttaatcctctgtcgcactttgtccgggggcagccgggcatatcaaggcaacggctggtacaacttcaaacttacggcacatgtccaggaccatggtgcgctgaagaccgagggaaacgaaggggcacactacataaggggacacaagccttgtggacgcgcacattgttgacaaaaaaattcgtcaaaaaaagcgccaaaaagggaaaa

SEQ ID NO: 612246 - DNA, 134 bp, Homo sapiens
cccaagatcaggtgggggaccatcccatcatagtccatcccaggatttcatggcaaggttcttctcactcattcagcacttttcgcttcgcaagcgcacagcttctccaaatccatggaggtcaccgcagctcg

SEQ ID NO: 612247 - DNA, 761 bp, Homo sapiens
tggccgttcggggccatcgcgcgcggggccggctgtcgccacggttctccgtccgtggggctccttcttcctgcccagggccggccgccatcgctgcagcctcccctctgtttgcttgctgagggtcatccctagctcgtcggtccgggtgccgtggtcctgggcctcgatcatggctcttagtgggctgcttggacgtgacctgatgtcggtcccggctccagcgcctcgcacactgggtccatcggagccttcctgcagtctcgtgtcgtgctgctcggccgtgcggccctcctctgcatttctcatgcattatgtctgtctgctcggagaccaatgcgcaatgctcctgtcccgacggtgctctcgggatcggggagtctgtgtcgccggccttgccctgctagcggcatgccaccccactacccgcttgtgaccacgtcccgtcttgcttgccactccctcaaccctgcctcttctgagcggcctctgagtaaccctggtcgggatggtctggcccacacagaaatggtggtcaagaagatcagggaatgactgatgtagggaagtgccagggctgcccagaagtctacagaggcacctacacgccagccatctgcaggagagtctcagagggccagtccccatcactgcctccatccctgctgcatttgcattcacttccataggccagagctcaggggaacagggagagagctccacactgtaaccactgggtctgggctccatcctgcgcccaa

SEQ ID NO: 612248 - DNA, 339 bp, Homo sapiens
gtataacttttcttctagagtagactgaggttctacattatggagaggagaccccagaagtgatggatccttctcagtgcatcatatacaagtgggcatctcatgtcaaaatatcttgtaactggtgatgttagtcgtcggttacacttgaagttaacgtgtggagaggtggcaactgatggtttactcttctgtactaaagtatctgttttctccattataatataattagtatcttatggggagatactatgagactatatcaatatcctgtgtctcatcatgctttcctccattgatatttattatgcattgtctatgagacaattccttactcaa

SEQ ID NO: 612249 - DNA, 550 bp, Homo sapiens
agaaggtgtgatcgcagaacttaaggtataaaccgtttgttttagaaaaattatacgttaaggtcaggggatacatgtgcagagagtgtgcaggttggttacataggtgtacatgtgccatgggggttgatgagccgatcaacctgtcaactacattaggtattgctttaaaggctgggtcaaatggtatttctggctctagatccttgaggaattgccacactgtcttccacaagggttgaactaatttaccctcccgccaacagtgtacaagtgtttctgtttctccacatcctctctagcatttgtggtttcctggctttttaatgatcaccattctaactggcatgagatggtatctcatggtggttttgatttccataatgaccagtgatgatgagctttttttcatatgtttgttggctacataaacgtgttcttttgagaagtgtctgttcatatccttcgcccactttttgatggggttgtttgtttttttcttgtaaatttgtttaagttccttgtagattctggataacacgttcgcgag

SEQ ID NO: 612250 - DNA, 173 bp, Homo sapiens
tccattttggacaaaaatgtatttctgggacttcccaaagtacagacattttcccaggccccagggggtaaagcaatgaggggtgaagtctgccagggtctggccggggccgcttagcgtgggaaggaagggaaccccccttttcaccacaattggagagctgggggaacaac

SEQ ID NO: 612251 - DNA, 196 bp, Homo sapiens
gttgactctagcaggatcctcctcgccctgtacagattagcgtgaagaactatgaaccccagaaggacaagcgcttctcggcgcaccgctaggtcgtaagtccactccccgcgctcagtactctgtgtgtgtcctgacacccccgccgtacggtaacgaggcgaaggcggcaggatattccccatatggacctaga

SEQ ID NO: 612252 - DNA, 629 bp, Homo sapiens
tttgtttaatcattcacctatgtggacattgggtcattttcagtttctaaagtggttgtaagccctagtaattcatgtcatacacagtataaaaccctttcatcatttgtccaactgtaaggagttctctgatctcttaggaaaacagtacatcagataatcttcaaatatttattttatatttttgcatgattactgaaaaatatttgaagatatttccaacatttggtagaactatgatttagtatataacatgttatgtttgccttccctttttttctcccaggtatgcaataagagagagcaacagcattgtaaagatatttaagaactttaaggaaaaaaaatcatttaaaccagatttggagcagaaagtgagtgtgatctacatatgatacatttttaaattctttgtaatggctcaaaaatgcctaagcaaaactctttttatgttccctttaggtatctacggcggcttcttattgggagtcagatctgtaaatggcttagccttctatgactgggacaatacagaactcatacgaagaattgaaattcagccaaacatgtgagtttcccctccattgtgttggaatattatccgtgatgagtctggggtcctaaggcag

SEQ ID NO: 612253 - DNA, 201 bp, Homo sapiens
caaaagcgggatcgaagcagctgtagctgtcggcctacaccagagccacagcaacgcgggatccgagccacgtctgcaacctacacgcacagttcatggcaactccggatccttagcccactgaggaaggccagggatggaacccgcaacctcatggttcctagtcggattcgttaaccactgagccaccgcttttgtgtt

SEQ ID NO: 612254 - DNA, 350 bp, Homo sapiens
  misc_feature (51)..(51): n is a, c, g, or t
  misc_feature (79)..(79): n is a, c, g, or t
  misc_feature (86)..(86): n is a, c, g, or t
  misc_feature (93)..(95): n is a, c, g, or t
  misc_feature (97)..(97): n is a, c, g, or t
  misc_feature (106)..(106): n is a, c, g, or t
  misc_feature (116)..(117): n is a, c, g, or t
  misc_feature (124)..(124): n is a, c, g, or t
  misc_feature (138)..(138): n is a, c, g, or t
  misc_feature (140)..(140): n is a, c, g, or t
  misc_feature (143)..(143): n is a, c, g, or t
  misc_feature (146)..(146): n is a, c, g, or t
  misc_feature (156)..(156): n is a, c, g, or t
  misc_feature (159)..(159): n is a, c, g, or t
  misc_feature (161)..(161): n is a, c, g, or t
  misc_feature (165)..(166): n is a, c, g, or t
  misc_feature (204)..(204): n is a, c, g, or t
  misc_feature (208)..(209): n is a, c, g, or t
  misc_feature (213)..(213): n is a, c, g, or t
  misc_feature (231)..(231): n is a, c, g, or t
  misc_feature (233)..(233): n is a, c, g, or t
  misc_feature (236)..(236): n is a, c, g, or t
  misc_feature (240)..(240): n is a, c, g, or t
  misc_feature (244)..(245): n is a, c, g, or t
  misc_feature (297)..(297): n is a, c, g, or t
  misc_feature (307)..(307): n is a, c, g, or t
  misc_feature (309)..(309): n is a, c, g, or t
  misc_feature (345)..(345): n is a, c, g, or t
tccaggtcttttaaagacgactagtcccaaatgttatttcttggcataggnggtcttcttagcttggggcggtgtgttnttgtgtnccgtgtnnngngtccctggngtgctccggnntgggcgnctttttctgattgngnganagnggtgtggtgngtncntggnntcgggggttcttgcttggggcggggggactggttaggngggnngggngggatgatctcattggtntnttntggngggnngttagggggtggggtatggtttggggggtgatcggggggctgggggtttggngttgggtttncntgggtttttgctgggtttggggttccctggccaggnttttt

SEQ ID NO: 612255 - DNA, 254 bp, Homo sapiens
atcttacctggccagataaaaccagcgctgtataggcggcgatcagcacgaggacgatgacggcaatcgtaacagggcgcttcctggattttttggtttcaataccagcatgcgccattgaaaaagcctctttcaatcagatacttgtttgaggtgacaaagcgaagggcatttacaacccgaacaatcatcatctgttctgctgttcccaacaggtggctatattatggcaggattgagtcttgtgaagttcg

SEQ ID NO: 612256 - DNA, 213 bp, Homo sapiens
caagaaaactctttttaaatacatttaggccaggcgcagtggctcatgcctgtaatgccagcactttgggagattgaggtgggtgcatcacttgagcccaggaatttgagaccagcttcagaaatacagtgagaaccccatctctacaaaaacaaaacaggcaggtgtggtggtacgtgcctgtagtcccaactattcaggaggctgaagcgg

SEQ ID NO: 612257 - DNA, 1087 bp, Homo sapiens
caagagggagactgggggcaaggaggagtcgtccctcatggaccttgctagacgtcttcacggccccagactcctgccccgagcacagaccccgtgggggggcccgagcaccgcatggcgtgctgccagataccaaacaggaatgacacaccaagcatcaggacgcccatgggagcgagaccacgccatgtcgcactcgcatgctgcatgtactcacacatggaggcgaggtcccatgccacgcacgactgacctgcgaacactactcggggagagccccttgcgcaggacacttgccttagccacccatgcgaaggaaccacataacagtattgaccccatatgacgagctagaggaacacacaccagaaccaccacatggccaacgccagagcgagagcaagccggccagcccaacaagaccaacgttgacgtccccctctagggagggaaacactatctccccgacgatgagattggggcgagtcccccaggggaccacgcctgagagaccacaatcacaagccccatcgcgaaactcaccccatggagaccacccgggggacaccccgagccaccgacaatccacaggaactaccccatgtcgacaacgcgggtcaccccgctggccccaacaggccccccaggcagccgcacgcggggcgcaccaccacacggaccggcccgggccgggcacctcccggcgcccccgcgagggcacccgactgcggaagctatcatccatgacacccatattgaccccggaaacgcccccgacccaccgcgggcacctggtgcaacggcacaacttccccgcgcgacagacaccacggccaaagggacaccacaccattggcagggccatgggccaagagcaccgaggcaaacacggctagaccacgggacgccccgcggaggccccacctggcgagcagcgagatccaggccccaagcatgacaggcggggcgtctacaacgggggccgcagaccccacccggcgacgtgcgacgcggccatggagaaggcgaccagcaccccaccacacaagaccctggtgaccagcgccacgaaccccagaactcaccc

SEQ ID NO: 612258 - DNA, 1360 bp, Homo sapiens
gaatggccgaatctctccggataccagaaggccctattgatcaggggccagctataggaagagtacgcgttttagaagagcagcttgttaaggccaaagaacagattgaaaattacaagaaacagaccagaaatggtctggggaaggatcatgaaatcctgaggaggaggattgaaaatggagctaaagagctctggtttttcctacagagtgaattgaagaaattaaagaacttagaaggaaatgaactccaaagacatgcagatgaatttcttttggatttaggacatcatgaaaggtctataatgacggatctatactacctcagtcagacagatggagcaggtgattggcgggaaaaagaggccaaagatctgacagaactggttcagcggagaataacatatcttcagaatcccaaggactgcagcaaagccaaaaagctggtgtgtaatatcaacaaaggctgtggctatggctgtcagctccatcatgtggtctactgcttcatgattgcatatggcacccagcgaacactcatcttggaatctcagaattggcgctatgctactggtggatgggagactgtatttaggcctgtaagtgagacatgcacagacagatctggcatctccactggacactggtcaggtaccccaattatgaatttattagtgataactctatttcctggtcagctggactgcacaatcgatacacagaaaattcacttcgtggagtgataactctatttcctggtcagctggactgcacaatcgatacacagaaaattcacttcgtggagtgatcctggatatacattttctctctcaggcagacttcctagtgtgtactttttcatcccaggtctgtcgagttgcttatgaaattatgcaaacactacatcctgatgcctctgcaaacttccattctttagatgacatctactattttgggggccagaatgcccacaatcaaattgccatttatgctcaccaaccccgaactgcagatgaaattcccatggaacctggagatatcattggtgtggctggaaatcattgggatggctattctaaaggtgtcaacaggaaattgggaaggacgggcctatatccctcctacaaagttcgagagaagatagaaacggtcaagtaccccacatatcctgaggctgagaaataaagctcagatggaagagataaacgaccaaactcagttcgaccaaactcagttcaaaccatttcagccaaactgtagatgaagagggctctgatctaacaaaataaggttatatgagtagatactctcagcaccaagagcagctgggaactgacataggcttcaattggtggaattc

SEQ ID NO: 612259 - DNA, 434 bp, Homo sapiens
  misc_feature (32)..(32): n is a, c, g, or t
  misc_feature (174)..(174): n is a, c, g, or t
  misc_feature (176)..(177): n is a, c, g, or t
  misc_feature (181)..(181): n is a, c, g, or t
  misc_feature (269)..(269): n is a, c, g, or t
  misc_feature (287)..(287): n is a, c, g, or t
  misc_feature (307)..(307): n is a, c, g, or t
  misc_feature (316)..(316): n is a, c, g, or t
  misc_feature (318)..(318): n is a, c, g, or t
  misc_feature (336)..(337): n is a, c, g, or t
  misc_feature (348)..(348): n is a, c, g, or t
  misc_feature (350)..(350): n is a, c, g, or t
  misc_feature (354)..(354): n is a, c, g, or t
  misc_feature (375)..(375): n is a, c, g, or t
  misc_feature (388)..(391): n is a, c, g, or t
  misc_feature (420)..(420): n is a, c, g, or t
  misc_feature (432)..(432): n is a, c, g, or t
  misc_feature (434)..(434): n is a, c, g, or t
tatactttttttagttgtttcttttggcttanactgaccatttccccccttctttttgagttttccatgattaaacttgcccaaataaaaacataacaatccttatgcaagcatatctgccaccacctcccactgcttcctgggccgcaaacagtaaaataaacagtgattaananncatnccaaagtgaaggtttctctttcttctatcacaacatagttgggtagttcccttaaagtacatcattgctataagttggtatcactgcnaatctcaagtcccaaatnatctctttttctggataganagttattcngnagggggcacaaaagggcnngctttggggcntnctgncaaacacttcattggttagangagtttaattttnnnngtcaaataaaattgaggctggcatagggngtacagtttatntn

SEQ ID NO: 612260 - DNA, 1275 bp, Homo sapiens
tcttatccaaccatttataatctttattctattaatttctccaccaggtgctagaatttttcttctcccaaagtggccctcaattctcggacacgtgaattaaacgcataagtgaatttttttaaagcgtggtgcttaaattattaaacaaaattaaaccgcttaagtttttctctgtggctctccaagcacgccattattgaagcaggccaatgtgttcactttatgtgtgtgcccgtgtattcacatttcgaggcaaaggtgttctttcacttttaaattacctcctgtgtgtgttctccattatattgtgtttaagttaaaactccttattctcaaaagtgccttgggataacgagaagaaaaccgccgtggtagcacaacaactctttgtgcacaaggtgcattggatttaggtggtctttcgtggtgaatgttcagaatttccccaatgtggggctttgtttgtggaaagcatttcttctccgtgaatatgtgaaagttccacctggtgcaattatccattgtaaaatttatgggtctttgtttaaacctccgagttttcgagatcagaagccgagcaattggggcctgtgtgtgtgcccttttcaagggacacgagggacacaacaaaattacgggggttttagcgggaattttccattacaggcccaagggtgtgcaccaaattaaacacattgttaacacacagaagctccgaagtttgttggggccccaagggctatttcgagaacgcttttcgacactctaaatcttatgaggacctatcaagtgctcggaactctatgtgggtatattatttatagcccacgcgtgaactgcgcttattcctgtgggtcttaaacgcggtcttattaaaggggggccacttaaagaagaccttcagcgtaaacaattcattattcctgagacattatttttttagtttccgctgaaaaacaaacaacagattctttccaaaagggtgctgtcgtttttcccagctaagctcctgtgctcttttgtcttacccagggttacaagcaagctgatttggtcccagagagttagaacggggaaacgggccttagacacatggtcttgagactttgaggacattcatgaaggacaggaatacactatttattgtgaaggatctatcctaccggagctcaatgggagggataacccatccaaccattggatccacttcctaggatataaaatcgtctcccacattgtgcagtaacaagttgtcataccacagagaatatt

SEQ ID NO: 612261 - DNA, 338 bp, Homo sapiens
tggagaaagaaacccagaaggactttacccgggaaaaatgaccatgactccctggcaaggagtgccccatgcccagttcttagagacccttgaaagccccaaaaaaaaagggggccgccgtggtacaaagaagggggccaccaaaaaggtccctcccttttttgggagaaaaaatgggtttctttcctccccctccacaaggggggggggggggggggggaaaaaaaaaaacccccccccccccccccgcggccctgcaggacatcgtgtaccgcaccatggagatcttccagctcctgaggaacatgcagctgccaaatggtgtcacttacccacac

SEQ ID NO: 612262 - DNA, 129 bp, Homo sapiens
gagtaccaaatgatcccaaaataaatggctataaaacaacatacactgaagccaggtgcagtggcacatacctgtagtaccagcaacttgggagtgcggcggcaggaggatagcttcagcctgggagtt

SEQ ID NO: 612263 - DNA, 219 bp, Homo sapiens
gtcgagccagaacggctgcatagcgaggagatcggctaccagggccgcttcccgggcagccaggccaacctggatgtgcgcgcctaccgcgagcgcatgagcaccatcatccgcaacaccgcgtatgactcgccgtcggaccctgacggactcaaggacttcaccaatgcgcccggcttcgaactggtgggcattgaggcgcagttgcgctggcggccc

SEQ ID NO: 612264 - DNA, 318 bp, Homo sapiens
  misc_feature (3)..(3): n is a, c, g, or t
  misc_feature (7)..(7): n is a, c, g, or t
  misc_feature (11)..(11): n is a, c, g, or t
  misc_feature (50)..(50): n is a, c, g, or t
tgngacncgtntttatttgcctcttaatgataacggactggggggctgtnttgcggtggctcatgcctgtaatcccaacactttgggaggccaaggcgggaagatcacctgaggtcgggagtttgcgaccagcctgaccaacatggagaaaccccatctctactaaaaatacaaaattagccggatatggtggcgcatgcctgtaataccagctactcaggaggctgaggcaggagaatcgcttgaacctggggaagttgggggttgcagtgagccaagaatcgtgccattgcactccagcctgggcaacaagagtga

SEQ ID NO: 612265 - DNA, 258 bp, Homo sapiens
gttgaacaatagcttttccgctgtgttaaggtggttctcagcttcaagtgatgttttccagggcagcttaaattagtgcttgcatattccaaagggagagtgaattggaggtgggatcctgagaaacttgctcaaaggtcactcaaggtcgagttagaggtagaatgataggctgagacactgggcattacagtcaggagaatcagagggagcgacgggtgcagtgcccggtttaaagcagggagcctttataccttc

SEQ ID NO: 612266 - DNA, 117 bp, Homo sapiens
ttttcagccagcctgcccagggtatgccttgtggaagtgtcagtagcaggttccagcaccaggccaagcacactgcactccactccctctcccaccatactcctctttggtacagat

SEQ ID NO: 612267 - DNA, 440 bp, Homo sapiens
cgtcttggttttcctatcagtctttccacatactggtctagggctagataaatgtcagctggatgatgagaagactggaacctaagaagtttagcgaagacgtgtacgattcgagtggtcttcagatcacaccacgcttgatgttggtaccaaattctttccaaaaagtatcactgtattctatcatcagcaatcttcttgatcatgtccagcgttttacgaacaagcttcttccgtaatcaccttaagcagtttatgttgctgaagagtctcgcgggaaacgattcaaggggagatcatctgagtccaccacacccttgacaaaattgaggtatttaggcatcatatcatggaagtcgtctgtgatgaatacacggcgcacatcgagcttagtgtaatcgctctattaagatccatattcgtgaaacagaccacgtgga

SEQ ID NO: 612268 - DNA, 387 bp, Homo sapiens
atcccacctatgatcacatgcttgctagcacccccaattaagtctgccaagaagaacccgagaccctacaccactcaagcacttaacagccagatatagaccgacgggaaaaaattcttcttcaaacaacagtgtttagctgctcggtccccctgaggtttaggtgagtctacctactgctgccctccctaacacatcagcttcatgtgagtcccagagaaagcccagcctaccagataccctgggaatgaccagatagcaagctcagagtgaagcacagagccaggagcggcaacctgtcctaatgcaatatgttgctgatcaagcctcaggccaagaatcactaccatctgcaggcaccaggtgtcaaagggatgatgacaagcc

SEQ ID NO: 612269 - DNA, 912 bp, Homo sapiens
gcctgcggcggggcggggatgcgatgagtgggccgctggagtgccggccttcgggctccatggactgggcgccgcgcccctgcacagcccgccgcagagtgtacgtgcctggggcagtggtgcgcggggccaccgcgggccctgcggggtggcctgctccacctgcggtgggcgcgtgacctgtaaggctggcctctctgcagtcagagtgtctgagctctgccatggggataggggtgtctttattacttgcagttttctctaacacctgggggctaccggagtgtgggccgaagcaggcgctgcagccgcggaagtatccccaggaacatccccaagatgtgagctggaaaaagcctcatccccagctctgcagtctccagggtagagtctggcctttgctgtgctcccaaagcacgccacaacacgtgagtgcacggtgcgtacccataccacgtggggaacgtgaaatggcctattctcatatcctgggggtcttcccttgtgcacagttcttgacactgggacatgcgtgacctaatgtgtaccctgagaagagagcagttgcggctctaggtgacatatagcacgtgagtgtgtctgggagcgctgttgagccatgtccacaagaagtggggcccataatgggcagccgtaaactggtctttcctatcccgtccgtttcagcgtgaaggtagggctcctgtgcagtgacagtccatgtgcgcgtacgcccgtgttagtcctgtggtcaaacgagacgcttgagtacaatgtatggcaacaaccatgggtgacagcgataggagggatggacctcgtggccaggtgagactgggcattggatgacagtcctctattacagcgcgcccctatgtaatttgccgcgcataattctacaggacacctgaa

SEQ ID NO: 612270 - DNA, 110 bp, Homo sapiens
ctgtggtgatgagaggcctttgtcccggcccacccggggtcaccaggaaaggatctgaataaagaggacccttcctaaaagaaaaacaatgaaatcctttcaggcattga

SEQ ID NO: 612271 - DNA, 4175 bp, Homo sapiens
ggcacgaggctttcacccccccccccccggccattaccgaagcggatgaaaacaaacactaacgatggcggcgccgggaagcgaccggctgctgggcttaaggcgggagtgaccgcttaaccagtgagggaagcactgaagagcgccagtcgacgtgggtgcgacaactcgcggagtcttaggagcaaaacgtctggggcctgcgagccaggacccttctgaagccttaggtgtctatcggcgacgtgtacggtcactgcagctccggagcgcggaaccctcagccaggaggcgcggctggtcggtcccaggtcccggcctccgtaatgagagcccggaaccactctttgtgccgcagcttcgcaggtgagggtgactgttgactagtgaaaaaagggacccatggttcacgactgtcttcttactggcagtggaacgacctgtggaaacctgtgatccattctcattaaataaatctctgcagcatcttggactcaagtgattctcctgcctcagcctcctgagtagctgggactacagattcctataggcaatggaaactgatctcaattcccaggacagaaaggacctggacaagtttattaaattttttgccctcaagactgtccaagtgattgtccaggctcggcttggtgaaaagatttgcactcgttcatcatcttctccaacgggttcagattggttcaacttagcaatcaaagacatcccagaggttacacatgaagcaaagaaggcactggcaggacagctgcctgcagtcgggaggtccatgtgtgtggagatttcacttaagacttctgagggagattccatggagctggaaatatggtgtcttgaaatgaatgaaaagtgtgataaagaaatcaaagtttcctacacggtgtacaacagactgtcattgctgctgaagtcccttcttgctataactagggtgacaccagcctataggctctccaggaaacaagggcatgaatatgtcatattatacaggatatattttggagaagttcagctgagtggcttaggagaaggcttccagacagttcgtgttgggacagtgggcacccctgtgggcaccatcactctttcttgtgcttacagaattaacttggcattcatgtctaccaggcaatttgagaggaccccacctatcatggggattattattgatcactttgtggaccgtccctatcccagctcctctcccatgcacccctgcaattacagaactgctggtgaggacactggagtaatatacccgtctgtagaagactctcaagaagtgtgtaccacctctttttccacctccccaccatcccagctgatggttcctgggaaggaaggtggggtaccccttgctcccaaccagcctgtccatggtacccaggctgaccaggagagactggcaacctgcaccccttctgacagaacccactgtgctgccacaccctccagtagtgaggatactgaaaccgtatcaaacagcagtgagggacgggcctcccctcacgatgtcttggagaccatctttgtccgaaaagtgggggcttttgtcaacaaacccattaaccaggtgaccctgacgagtttggatataccctttgccatgtttgctcccaagaatttggagctggaggataccgatccaatggtgaatcctccagattccccagagactgaatctcctctccagggcagcctgcactcagatggctccagcgggggcagcagtggcaatacccatgatgactttgttatgatagactttaaaccagctttttctaaagatgacattcttccgatggacctggggaccttctatcgggagtttcagaacccacctcagctgagcagcctctccatagatattggagcacagtccatggctgaagacttggactcattaccagagaagctggctgtgcatgagaagaatgtccgcgagtttgatgcctttgtggaaaccctgcagtaaaagtatccttgagtcccagcagcaccccctttttgtggccccagggcataagcagcctcccatgcatcagctgctcccacccctcatcctgctctgagccaggtggaagggaggctggcttctcccatggggacccagaagtccctactcttggacctcctggagactccgtggcggcagtcaagcccagtgcccagttggagaagactcacgtgctggccttggagatgggaagaaccttcgtacgaaaaagccctcagcagggccatctgtgtgccctgcccatcaccaactgcttcccaagggtgtcatcctgttcctcctgctgccggcctcctgcctgggcctgccttgcagctggccccttccctgcctgctgtcaccatccactgtttgacattccagctggtggccaagagattggtgtggaggcagaaagaggaaggagacagtgccaggaggaagaaggaaggagtcccttagctctcttcattgtcccctttacttcctgctatcttcttctcctcttcttctctctcttgcctctatgcctgtatttctggcaatatgacaggcctgcctacccaagatcagaactccaaaaccactcccacccctgaaggtcgggagggtctgagcagccctggtggctgcctgtgctcaggtcctcagctccatgggaaataaaaatggcaccctgaatctctaggattttgtcacttggagtcacagcaaagttctcttcctcttgtccccccgttgctgctccttggttatagaacatggtaaatatttattactttcagagaaaccagatattttatagaggaaatatgtttgaggtgagttgtttttcacttggagaaggcggagggctcttcctgggacggagacctcctcctccggaggttattgagaatccgggctgctgctttgaggatcttcccaccatacagacagcgagatccaagaagagggctggccgggggcaaagtcacctcccagtgtggctgcactggaactgactaaaggctttaccttggatagttgcgtattcctggtgagagccttacatctcccacagtttctgcagagtgactgactccattctggcagcccaggaagtcctgggtgctaaatgtgatggccacatgtagtggttaggggatgttgtgtgtgtcccccaactgcctgggtacttgttcctgatccctggggctgtcctgtggagcttttcctcctgcttgggcctagctaccatctccctctaatcccaggttctctacactgccctggggtttaccagctggattggcttctggttgagaaatcaaagctgggcgtatgattgacttaacccttcaggtattgttacttgaataagtcaagtgcctagcctcacccacctatgatctgtcctttcccagcctcgctggtagtcctggtcaaggagatctaggtctactccattcctcctggcccacctggggcattcactggcagcagctgtgcttcagtggagcaggtggttctcagctgcttgttagtatactgcatgtgacactgttcccacatacaaggctgacttctgaggattggagcaggctctggcggggaccagagctctgcgtgctgctgctgccaccaagaagtgttagcagaagcagtagcagccaactggccctcctgactttggcccagagcacatgcgtggcttgctgaacccaggctcaggtttatccccaaggccccagctttgagaagggggaaggcccctggtaagttattgatgcccccatatttcagctactgctctctttccaaggccttgcatggaaaggcctagccattgtctgaggcagcaatctttggcatctacaggtggcagcagcctttcaccagggctccatctgtgaagagtctcagccatgactttgagctgagcttgggagaagtaaagcaactgttaaggccagcccttgcccctcagacctgccatgaaaggaatgagccctagactgactcctgcagcacccccgggacaggctgggaccagctgtttgtctccaggtgtcagagtccctcctcctcctccaacctctccaacctactttgtttggaaataccgagctacacttcaaaatgtattcaagggatttccaataaatttttttctgta

SEQ ID NO: 612272 - DNA, 111 bp, Homo sapiens
  misc_feature (14)..(14): n is a, c, g, or t
taatcgagctcggntacctattgctttgatcaccagaaatcaatacaagggcagcctggatagaacagtgaccagcaggtggacttccaggagtatgctgttttcctggca

SEQ ID NO: 612273 - DNA, 4124 bp, Homo sapiens
ggcacgaggctttcacccccccccccccggccattaccgaagcggatgaaaacaaacactaacgatggcggcgccgggaagcgaccggctgctgggcttaaggcgggagtgaccgcttaaccagtgagggaagcactgaagagcgccagtcgacgtgggtgcgacaactcgcggagtcttaggagcaaaacgtctggggcctgcgagccaggacccttctgaagccttaggtgtctatcggcgacgtgtacggtcactgcagctccggagcgcggaaccctcagccaggaggcgcggctggtcggtcccaggtcccggcctccgtaatgagagcccggaaccactctttgtgccgcagcttcgcagcatcttggactcaagtgattctcctgcctcagcctcctgagtagctgggactacagattcctataggcaatggaaactgatctcaattcccaggacagaaaggacctggacaagtttattaaattttttgccctcaagactgtccaagtgattgtccaggctcggcttggtgaaaagatttgcactcgttcatcatcttctccaacgggttcagattggttcaacttagcaatcaaagacatcccagaggttacacatgaagcaaagaaggcactggcaggacagctgcctgcagtcgggaggtccatgtgtgtggagatttcacttaagacttctgagggagattccatggagctggaaatatggtgtcttgaaatgaatgaaaagtgtgataaagaaatcaaagtttcctacacggtgtacaacagactgtcattgctgctgaagtcccttcttgctataactagggtgacaccagcctataggctctccaggaaacaagggcatgaatatgtcatattatacaggatatattttggagaagttcagctgagtggcttaggagaaggcttccagacagttcgtgttgggacagtgggcacccctgtgggcaccatcactctttcttgtgcttacagaattaacttggcattcatgtctaccaggcaatttgagaggaccccacctatcatggggattattattgatcactttgtggaccgtccctatcccagctcctctcccatgcacccctgcaattacagaactgctggtgaggacactggagtaatatacccgtctgtagaagactctcaagaagtgtgtaccacctctttttccacctccccaccatcccagctgatggttcctgggaaggaaggtggggtaccccttgctcccaaccagcctgtccatggtacccaggctgaccaggagagactggcaacctgcaccccttctgacagaacccactgtgctgccacaccctccagtagtgaggatactgaaaccgtatcaaacagcagtgagggacgggcctcccctcacgatgtcttggagaccatctttgtccgaaaagtgggggcttttgtcaacaaacccattaaccaggtgaccctgacgagtttggatataccctttgccatgtttgctcccaagaatttggagctggaggataccgatccaatggtgaatcctccagattccccagagactgaatctcctctccagggcagcctgcactcagatggctccagcgggggcagcagtggcaatacccatgatgactttgttatgatagactttaaaccagctttttctaaagatgacattcttccgatggacctggggaccttctatcgggagtttcagaacccacctcagctgagcagcctctccatagatattggagcacagtccatggctgaagacttggactcattaccagagaagctggctgtgcatgagaagaatgtccgcgagtttgatgcctttgtggaaaccctgcagtaaaagtatccttgagtcccagcagcaccccctttttgtggccccagggcataagcagcctcccatgcatcagctgctcccacccctcatcctgctctgagccaggtggaagggaggctggcttctcccatggggacccagaagtccctactcttggacctcctggagactccgtggcggcagtcaagcccagtgcccagttggagaagactcacgtgctggccttggagatgggaagaaccttcgtacgaaaaagccctcagcagggccatctgtgtgccctgcccatcaccaactgcttcccaagggtgtcatcctgttcctcctgctgccggcctcctgcctgggcctgccttgcagctggccccttccctgcctgctgtcaccatccactgtttgacattccagctggtggccaagagattggtgtggaggcagaaagaggaaggagacagtgccaggaggaagaaggaaggagtcccttagctctcttcattgtcccctttacttcctgctatcttcttctcctcttcttctctctcttgcctctatgcctgtatttctggcaatatgacaggcctgcctacccaagatcagaactccaaaaccactcccacccctgaaggtcgggagggtctgagcagccctggtggctgcctgtgctcaggtcctcagctccatgggaaataaaaatggcaccctgaatctctaggattttgtcacttggagtcacagcaaagttctcttcctcttgtccccccgttgctgctccttggttatagaacatggtaaatatttattactttcagagaaaccagatattttatagaggaaatatgtttgaggtgagttgtttttcacttggagaaggcggagggctcttcctgggacggagacctcctcctccggaggttattgagaatccgggctgctgctttgaggatcttcccaccatacagacagcgagatccaagaagagggctggccgggggcaaagtcacctcccagtgtggctgcactggaactgactaaaggctttaccttggatagttgcgtattcctggtgagagccttacatctcccacagtttctgcagagtgactgactccattctggcagcccaggaagtcctgggtgctaaatgtgatggccacatgtagtggttaggggatgttgtgtgtgtcccccaactgcctgggtacttgttcctgatccctggggctgtcctgtggagcttttcctcctgcttgggcctagctaccatctccctctaatcccaggttctctacactgccctggggtttaccagctggattggcttctggttgagaaatcaaagctgggcgtatgattgacttaacccttcaggtattgttacttgaataagtcaagtgcctagcctcacccacctatgatctgtcctttcccagcctcgctggtagtcctggtcaaggagatctaggtctactccattcctcctggcccacctggggcattcactggcagcagctgtgcttcagtggagcaggtggttctcagctgcttgttagtatactgcatgtgacactgttcccacatacaaggctgacttctgaggattggagcaggctctggcggggaccagagctctgcgtgctgctgctgccaccaagaagtgttagcagaagcagtagcagccaactggccctcctgactttggcccagagcacatgcgtggcttgctgaacccaggctcaggtttatccccaaggccccagctttgagaagggggaaggcccctggtaagttattgatgcccccatatttcagctactgctctctttccaaggccttgcatggaaaggcctagccattgtctgaggcagcaatctttggcatctacaggtggcagcagcctttcaccagggctccatctgtgaagagtctcagccatgactttgagctgagcttgggagaagtaaagcaactgttaaggccagcccttgcccctcagacctgccatgaaaggaatgagccctagactgactcctgcagcacccccgggacaggctgggaccagctgtttgtctccaggtgtcagagtccctcctcctcctccaacctctccaacctactttgtttggaaataccgagctacacttcaaaatgtattcaagggatttccaataaatttttttctgtaaaaaaacacgacagcacaaacaagcaggagagagacaaaaagcaacgaggcaacacacactacacga

SEQ ID NO: 612274 - DNA, 3870 bp, Homo sapiens
agcggagtggttagtttccaggcccaaaaccagaggtctctcagacatttgtttcaaacggctgattgagggagttcaggggttgggggttggcggttcttgcccagtttagcttgggatcaacagctccaacaacgtgtccaatcaacaacagcttgattgtaaaaagtcctgaatctgctggatgatgaaataattttgaatggataattaaagctcaaagtttcagaatcagattcctataggcaatggaaactgatctcaattcccaggacagaaaggacctggacaagtttattaaattttttgccctcaagactgtccaagtgattgtccaggctcggcttggtgaaaagatttgcactcgttcatcatcttctccaacgggttcagattggttcaacttagcaatcaaagacatcccagaggttacacatgaagcaaagaaggcactggcaggacagctgcctgcagtcgggaggtccatgtgtgtggagatttcacttaagacttctgagggagattccatggagctggaaatatggtgtcttgaaatgaatgaaaagtgtgataaagaaatcaaagtttcctacacggtgtacaacagactgtcattgctgctgaagtcccttcttgctataactagggtgacaccagcctataggctctccaggaaacaagggcatgaatatgtcatattatacaggatatattttggagaagttcagctgagtggcttaggagaaggcttccagacagttcgtgttgggacagtgggcacccctgtgggcaccatcactctttcttgtgcttacagaattaacttggcattcatgtctaccaggcaatttgagaggaccccacctatcatggggattattattgatcactttgtggaccgtccctatcccagctcctctcccatgcacccctgcaattacagaactgctggtgaggacactggagtaatatacccgtctgtagaagactctcaagaagtgtgtaccacctctttttccacctccccaccatcccagctgatggttcctgggaaggaaggtggggtaccccttgctcccaaccagcctgtccatggtacccaggctgaccaggagagactggcaacctgcaccccttctgacagaacccactgtgctgccacaccctccagtagtgaggatactgaaaccgtatcaaacagcagtgagggacgggcctcccctcacgatgtcttggagaccatctttgtccgaaaagtgggggcttttgtcaacaaacccattaaccaggtgaccctgacgagtttggatataccctttgccatgtttgctcccaagaatttggagctggaggataccgatccaatggtgaatcctccagattccccagagactgaatctcctctccagggcagcctgcactcagatggctccagcgggggcagcagtggcaatacccatgatgactttgttatgatagactttaaaccagctttttctaaagatgacattcttccgatggacctggggaccttctatcgggagtttcagaacccacctcagctgagcagcctctccatagatattggagcacagtccatggctgaagacttggactcattaccagagaagctggctgtgcatgagaagaatgtccgcgagtttgatgcctttgtggaaaccctgcagtaaaagtatccttgagtcccagcagcaccccctttttgtggccccagggcataagcagcctcccatgcatcagctgctcccacccctcatcctgctctgagccaggtggaagggaggctggcttctcccatggggacccagaagtccctactcttggacctcctggagactccgtggcggcagtcaagcccagtgcccagttggagaagactcacgtgctggccttggagatgggaagaaccttcgtacgaaaaagccctcagcagggccatctgtgtgccctgcccatcaccaactgcttcccaagggtgtcatcctgttcctcctgctgccggcctcctgcctgggcctgccttgcagctggccccttccctgcctgctgtcaccatccactgtttgacattccagctggtggccaagagattggtgtggaggcagaaagaggaaggagacagtgccaggaggaagaaggaaggagtcccttagctctcttcattgtcccctttacttcctgctatcttcttctcctcttcttctctctcttgcctctatgcctgtatttctggcaatatgacaggcctgcctacccaagatcagaactccaaaaccactcccacccctgaaggtcgggagggtctgagcagccctggtggctgcctgtgctcaggtcctcagctccatgggaaataaaaatggcaccctgaatctctaggattttgtcacttggagtcacagcaaagttctcttcctcttgtccccccgttgctgctccttggttatagaacatggtaaatatttattactttcagagaaaccagatattttatagaggaaatatgtttgaggtgagttgtttttcacttggagaaggcggagggctcttcctgggacggagacctcctcctccggaggttattgagaatccgggctgctgctttgaggatcttcccaccatacagacagcgagatccaagaagagggctggccgggggcaaagtcacctcccagtgtggctgcactggaactgactaaaggctttaccttggatagttgcgtattcctggtgagagccttacatctcccacagtttctgcagagtgactgactccattctggcagcccaggaagtcctgggtgctaaatgtgatggccacatgtagtggttaggggatgttgtgtgtgtcccccaactgcctgggtacttgttcctgatccctggggctgtcctgtggagcttttcctcctgcttgggcctagctaccatctccctctaatcccaggttctctacactgccctggggtttaccagctggattggcttctggttgagaaatcaaagctgggcgtatgattgacttaacccttcaggtattgttacttgaataagtcaagtgcctagcctcacccacctatgatctgtcctttcccagcctcgctggtagtcctggtcaaggagatctaggtctactccattcctcctggcccacctggggcattcactggcagcagctgtgcttcagtggagcaggtggttctcagctgcttgttagtatactgcatgtgacactgttcccacatacaaggctgacttctgaggattggagcaggctctggcggggaccagagctctgcgtgctgctgctgccaccaagaagtgttagcagaagcagtagcagccaactggccctcctgactttggcccagagcacatgcgtggcttgctgaacccaggctcaggtttatccccaaggccccagctttgagaagggggaaggcccctggtaagttattgatgcccccatatttcagctactgctctctttccaaggccttgcatggaaaggcctagccattgtctgaggcagcaatctttggcatctacaggtggcagcagcctttcaccagggctccatctgtgaagagtctcagccatgactttgagctgagcttgggagaagtaaagcaactgttaaggccagcccttgcccctcagacctgccatgaaaggaatgagccctagactgactcctgcagcacccccgggacaggctgggaccagctgtttgtctccaggtgtcagagtccctcctcctcctccaacctctccaacctactttgtttggaaataccgagctacacttcaaaatgtattcaagggatttccaataaatttttttctgta

SEQ ID NO: 612275 - DNA, 4119 bp, Homo sapiens
ggcacgaggctttcacccccccccccccggccattaccgaagcggatgaaaacaaacactaacgatggcggcgccgggaagcgaccggctgctgggcttaaggcgggagtgaccgcttaaccagtgagggaagcactgaagagcgccagtcgacgtgggtgcgacaactcgcggagtcttaggagcaaaacgtctggggcctgcgagccaggacccttctgaagccttaggtgtctatcggcgacgtgtacggtcactgcagctccggagcgcggaaccctcagccaggaggcgcggctggtcggtcccaggtcccggcctccgtaatgagagcccggaaccactctttgtgccgcagcttcgcaggtgagggtgactgttgactagtgaaaaaagggacccatggttcacgactgtcttcttactggcagtggaacgacctgtggaaacctgtgatccattctcattaaataaatctctgcagattcctataggcaatggaaactgatctcaattcccaggacagaaaggacctggacaagtttattaaattttttgccctcaagactgtccaagtgattgtccaggctcggcttggtgaaaagatttgcactcgttcatcatcttctccaacgggttcagattggttcaacttagcaatcaaagacatcccagaggttacacatgaagcaaagaaggcactggcaggacagctgcctgcagtcgggaggtccatgtgtgtggagatttcacttaagacttctgagggagattccatggagctggaaatatggtgtcttgaaatgaatgaaaagtgtgataaagaaatcaaagtttcctacacggtgtacaacagactgtcattgctgctgaagtcccttcttgctataactagggtgacaccagcctataggctctccaggaaacaagggcatgaatatgtcatattatacaggatatattttggagaagttcagctgagtggcttaggagaaggcttccagacagttcgtgttgggacagtgggcacccctgtgggcaccatcactctttcttgtgcttacagaattaacttggcattcatgtctaccaggcaatttgagaggaccccacctatcatggggattattattgatcactttgtggaccgtccctatcccagctcctctcccatgcacccctgcaattacagaactgctggtgaggacactggagtaatatacccgtctgtagaagactctcaagaagtgtgtaccacctctttttccacctccccaccatcccagctgatggttcctgggaaggaaggtggggtaccccttgctcccaaccagcctgtccatggtacccaggctgaccaggagagactggcaacctgcaccccttctgacagaacccactgtgctgccacaccctccagtagtgaggatactgaaaccgtatcaaacagcagtgagggacgggcctcccctcacgatgtcttggagaccatctttgtccgaaaagtgggggcttttgtcaacaaacccattaaccaggtgaccctgacgagtttggatataccctttgccatgtttgctcccaagaatttggagctggaggataccgatccaatggtgaatcctccagattccccagagactgaatctcctctccagggcagcctgcactcagatggctccagcgggggcagcagtggcaatacccatgatgactttgttatgatagactttaaaccagctttttctaaagatgacattcttccgatggacctggggaccttctatcgggagtttcagaacccacctcagctgagcagcctctccatagatattggagcacagtccatggctgaagacttggactcattaccagagaagctggctgtgcatgagaagaatgtccgcgagtttgatgcctttgtggaaaccctgcagtaaaagtatccttgagtcccagcagcaccccctttttgtggccccagggcataagcagcctcccatgcatcagctgctcccacccctcatcctgctctgagccaggtggaagggaggctggcttctcccatggggacccagaagtccctactcttggacctcctggagactccgtggcggcagtcaagcccagtgcccagttggagaagactcacgtgctggccttggagatgggaagaaccttcgtacgaaaaagccctcagcagggccatctgtgtgccctgcccatcaccaactgcttcccaagggtgtcatcctgttcctcctgctgccggcctcctgcctgggcctgccttgcagctggccccttccctgcctgctgtcaccatccactgtttgacattccagctggtggccaagagattggtgtggaggcagaaagaggaaggagacagtgccaggaggaagaaggaaggagtcccttagctctcttcattgtcccctttacttcctgctatcttcttctcctcttcttctctctcttgcctctatgcctgtatttctggcaatatgacaggcctgcctacccaagatcagaactccaaaaccactcccacccctgaaggtcgggagggtctgagcagccctggtggctgcctgtgctcaggtcctcagctccatgggaaataaaaatggcaccctgaatctctaggattttgtcacttggagtcacagcaaagttctcttcctcttgtccccccgttgctgctccttggttatagaacatggtaaatatttattactttcagagaaaccagatattttatagaggaaatatgtttgaggtgagttgtttttcacttggagaaggcggagggctcttcctgggacggagacctcctcctccggaggttattgagaatccgggctgctgctttgaggatcttcccaccatacagacagcgagatccaagaagagggctggccgggggcaaagtcacctcccagtgtggctgcactggaactgactaaaggctttaccttggatagttgcgtattcctggtgagagccttacatctcccacagtttctgcagagtgactgactccattctggcagcccaggaagtcctgggtgctaaatgtgatggccacatgtagtggttaggggatgttgtgtgtgtcccccaactgcctgggtacttgttcctgatccctggggctgtcctgtggagcttttcctcctgcttgggcctagctaccatctccctctaatcccaggttctctacactgccctggggtttaccagctggattggcttctggttgagaaatcaaagctgggcgtatgattgacttaacccttcaggtattgttacttgaataagtcaagtgcctagcctcacccacctatgatctgtcctttcccagcctcgctggtagtcctggtcaaggagatctaggtctactccattcctcctggcccacctggggcattcactggcagcagctgtgcttcagtggagcaggtggttctcagctgcttgttagtatactgcatgtgacactgttcccacatacaaggctgacttctgaggattggagcaggctctggcggggaccagagctctgcgtgctgctgctgccaccaagaagtgttagcagaagcagtagcagccaactggccctcctgactttggcccagagcacatgcgtggcttgctgaacccaggctcaggtttatccccaaggccccagctttgagaagggggaaggcccctggtaagttattgatgcccccatatttcagctactgctctctttccaaggccttgcatggaaaggcctagccattgtctgaggcagcaatctttggcatctacaggtggcagcagcctttcaccagggctccatctgtgaagagtctcagccatgactttgagctgagcttgggagaagtaaagcaactgttaaggccagcccttgcccctcagacctgccatgaaaggaatgagccctagactgactcctgcagcacccccgggacaggctgggaccagctgtttgtctccaggtgtcagagtccctcctcctcctccaacctctccaacctactttgtttggaaataccgagctacacttcaaaatgtattcaagggatttccaataaatttttttctgta

SEQ ID NO: 612276 - DNA, 156 bp, Homo sapiens
ttagtctgggctcagtgatctcggtctgaagaggtgacagaatcttcgagagcttcaaagattacagatgcctgggacctagagtttctgattcggtaggctaggatgatctccaggtgattataatgcatactcaatatttgtgaccctattcca

SEQ ID NO: 612277 - DNA, 4110 bp, Homo sapiens
ggcacgaggctttcacccccccccccccggccattaccgaagcggatgaaaacaaacactaacgatggcggcgccgggaagcgaccggctgctgggcttaaggcgggagtgaccgcttaaccagtgagggaagcactgaagagcgccagtcgacgtgggtgcgacaactcgcggagtcttaggagcaaaacgtctggggcctgcgagccaggacccttctgaagccttaggtgtctatcggcgacgtgtacggtcactgcagctccggagcgcggaaccctcagccaggaggcgcggctggtcggtcccaggtcccggcctccgtaatgagagcccggaaccactctttgtgccgcagcttcgcagtggaacgacctgtggaaacctgtgatccattctcattaaataaatctctgcagcatcttggactcaagtgattctcctgcctcagcctcctgagtagctgggactacagattcctataggcaatggaaactgatctcaattcccaggacagaaaggacctggacaagtttattaaattttttgccctcaagactgtccaagtgattgtccaggctcggcttggtgaaaagatttgcactcgttcatcatcttctccaacgggttcagattggttcaacttagcaatcaaagacatcccagaggttacacatgaagcaaagaaggcactggcaggacagctgcctgcagtcgggaggtccatgtgtgtggagatttcacttaagacttctgagggagattccatggagctggaaatatggtgtcttgaaatgaatgaaaagtgtgataaagaaatcaaagtttcctacacggtgtacaacagactgtcattgctgctgaagtcccttcttgctataactagggtgacaccagcctataggctctccaggaaacaagggcatgaatatgtcatattatacaggatatattttggagaagttcagctgagtggcttaggagaaggcttccagacagttcgtgttgggacagtgggcacccctgtgggcaccatcactctttcttgtgcttacagaattaacttggcattcatgtctaccaggcaatttgagaggaccccacctatcatggggattattattgatcactttgtggaccgtccctatcccagctcctctcccatgcacccctgcaattacagaactgctggtgaggacactggagtaatatacccgtctgtagaagactctcaagaagtgtgtaccacctctttttccacctccccaccatcccagctgatggttcctgggaaggaaggtggggtaccccttgctcccaaccagcctgtccatggtacccaggctgaccaggagagactggcaacctgcaccccttctgacagaacccactgtgctgccacaccctccagtagtgaggatactgaaaccgtatcaaacagcagtgagggacgggcctcccctcacgatgtcttggagaccatctttgtccgaaaagtgggggcttttgtcaacaaacccattaaccaggtgaccctgacgagtttggatataccctttgccatgtttgctcccaagaatttggagctggaggataccgatccaatggtgaatcctccagattccccagagactgaatctcctctccagggcagcctgcactcagatggctccagcgggggcagcagtggcaatacccatgatgactttgttatgatagactttaaaccagctttttctaaagatgacattcttccgatggacctggggaccttctatcgggagtttcagaacccacctcagctgagcagcctctccatagatattggagcacagtccatggctgaagacttggactcattaccagagaagctggctgtgcatgagaagaatgtccgcgagtttgatgcctttgtggaaaccctgcagtaaaagtatccttgagtcccagcagcaccccctttttgtggccccagggcataagcagcctcccatgcatcagctgctcccacccctcatcctgctctgagccaggtggaagggaggctggcttctcccatggggacccagaagtccctactcttggacctcctggagactccgtggcggcagtcaagcccagtgcccagttggagaagactcacgtgctggccttggagatgggaagaaccttcgtacgaaaaagccctcagcagggccatctgtgtgccctgcccatcaccaactgcttcccaagggtgtcatcctgttcctcctgctgccggcctcctgcctgggcctgccttgcagctggccccttccctgcctgctgtcaccatccactgtttgacattccagctggtggccaagagattggtgtggaggcagaaagaggaaggagacagtgccaggaggaagaaggaaggagtcccttagctctcttcattgtcccctttacttcctgctatcttcttctcctcttcttctctctcttgcctctatgcctgtatttctggcaatatgacaggcctgcctacccaagatcagaactccaaaaccactcccacccctgaaggtcgggagggtctgagcagccctggtggctgcctgtgctcaggtcctcagctccatgggaaataaaaatggcaccctgaatctctaggattttgtcacttggagtcacagcaaagttctcttcctcttgtccccccgttgctgctccttggttatagaacatggtaaatatttattactttcagagaaaccagatattttatagaggaaatatgtttgaggtgagttgtttttcacttggagaaggcggagggctcttcctgggacggagacctcctcctccggaggttattgagaatccgggctgctgctttgaggatcttcccaccatacagacagcgagatccaagaagagggctggccgggggcaaagtcacctcccagtgtggctgcactggaactgactaaaggctttaccttggatagttgcgtattcctggtgagagccttacatctcccacagtttctgcagagtgactgactccattctggcagcccaggaagtcctgggtgctaaatgtgatggccacatgtagtggttaggggatgttgtgtgtgtcccccaactgcctgggtacttgttcctgatccctggggctgtcctgtggagcttttcctcctgcttgggcctagctaccatctccctctaatcccaggttctctacactgccctggggtttaccagctggattggcttctggttgagaaatcaaagctgggcgtatgattgacttaacccttcaggtattgttacttgaataagtcaagtgcctagcctcacccacctatgatctgtcctttcccagcctcgctggtagtcctggtcaaggagatctaggtctactccattcctcctggcccacctggggcattcactggcagcagctgtgcttcagtggagcaggtggttctcagctgcttgttagtatactgcatgtgacactgttcccacatacaaggctgacttctgaggattggagcaggctctggcggggaccagagctctgcgtgctgctgctgccaccaagaagtgttagcagaagcagtagcagccaactggccctcctgactttggcccagagcacatgcgtggcttgctgaacccaggctcaggtttatccccaaggccccagctttgagaagggggaaggcccctggtaagttattgatgcccccatatttcagctactgctctctttccaaggccttgcatggaaaggcctagccattgtctgaggcagcaatctttggcatctacaggtggcagcagcctttcaccagggctccatctgtgaagagtctcagccatgactttgagctgagcttgggagaagtaaagcaactgttaaggccagcccttgcccctcagacctgccatgaaaggaatgagccctagactgactcctgcagcacccccgggacaggctgggaccagctgtttgtctccaggtgtcagagtccctcctcctcctccaacctctccaacctactttgtttggaaataccgagctacacttcaaaatgtattcaagggatttccaataaatttttttctgta

SEQ ID NO: 612278 - DNA, 4311 bp, Homo sapiens
ggcacgaggctttcacccccccccccccggccattaccgaagcggatgaaaacaaacactaacgatggcggcgccgggaagcgaccggctgctgggcttaaggcgggagtgaccgcttaaccagtgagggaagcactgaagagcgccagtcgacgtgggtgcgacaactcgcggagtcttaggagcaaaacgtctggggcctgcgagccaggacccttctgaagccttaggtgtctatcggcgacgtgtacggtcactgcagctccggagcgcggaaccctcagccaggaggcgcggctggtcggtcccaggtcccggcctccgtaatgagagcccggaaccactctttgtgccgcagcttcgcaggtgagggtgactgttgactagtgaaaaaagggacccatggttcacgactgtcttcttactggcagtggaacgacctgtggaaacctgtgatccattctcattaaataaatctctgggctgtgtcgtcccaaagatactaagtaacaggcagaattggatatggcacaaatttctgtttaaagagatgcggtctcgctctgttgcccaggctgttgtgcagtggtattcacagtcatgatcatatttctctacagcatcttggactcaagtgattctcctgcctcagcctcctgagtagctgggactacagattcctataggcaatggaaactgatctcaattcccaggacagaaaggacctggacaagtttattaaattttttgccctcaagactgtccaagtgattgtccaggctcggcttggtgaaaagatttgcactcgttcatcatcttctccaacgggttcagattggttcaacttagcaatcaaagacatcccagaggttacacatgaagcaaagaaggcactggcaggacagctgcctgcagtcgggaggtccatgtgtgtggagatttcacttaagacttctgagggagattccatggagctggaaatatggtgtcttgaaatgaatgaaaagtgtgataaagaaatcaaagtttcctacacggtgtacaacagactgtcattgctgctgaagtcccttcttgctataactagggtgacaccagcctataggctctccaggaaacaagggcatgaatatgtcatattatacaggatatattttggagaagttcagctgagtggcttaggagaaggcttccagacagttcgtgttgggacagtgggcacccctgtgggcaccatcactctttcttgtgcttacagaattaacttggcattcatgtctaccaggcaatttgagaggaccccacctatcatggggattattattgatcactttgtggaccgtccctatcccagctcctctcccatgcacccctgcaattacagaactgctggtgaggacactggagtaatatacccgtctgtagaagactctcaagaagtgtgtaccacctctttttccacctccccaccatcccagctgatggttcctgggaaggaaggtggggtaccccttgctcccaaccagcctgtccatggtacccaggctgaccaggagagactggcaacctgcaccccttctgacagaacccactgtgctgccacaccctccagtagtgaggatactgaaaccgtatcaaacagcagtgagggacgggcctcccctcacgatgtcttggagaccatctttgtccgaaaagtgggggcttttgtcaacaaacccattaaccaggtgaccctgacgagtttggatataccctttgccatgtttgctcccaagaatttggagctggaggataccgatccaatggtgaatcctccagattccccagagactgaatctcctctccagggcagcctgcactcagatggctccagcgggggcagcagtggcaatacccatgatgactttgttatgatagactttaaaccagctttttctaaagatgacattcttccgatggacctggggaccttctatcgggagtttcagaacccacctcagctgagcagcctctccatagatattggagcacagtccatggctgaagacttggactcattaccagagaagctggctgtgcatgagaagaatgtccgcgagtttgatgcctttgtggaaaccctgcagtaaaagtatccttgagtcccagcagcaccccctttttgtggccccagggcataagcagcctcccatgcatcagctgctcccacccctcatcctgctctgagccaggtggaagggaggctggcttctcccatggggacccagaagtccctactcttggacctcctggagactccgtggcggcagtcaagcccagtgcccagttggagaagactcacgtgctggccttggagatgggaagaaccttcgtacgaaaaagccctcagcagggccatctgtgtgccctgcccatcaccaactgcttcccaagggtgtcatcctgttcctcctgctgccggcctcctgcctgggcctgccttgcagctggccccttccctgcctgctgtcaccatccactgtttgacattccagctggtggccaagagattggtgtggaggcagaaagaggaaggagacagtgccaggaggaagaaggaaggagtcccttagctctcttcattgtcccctttacttcctgctatcttcttctcctcttcttctctctcttgcctctatgcctgtatttctggcaatatgacaggcctgcctacccaagatcagaactccaaaaccactcccacccctgaaggtcgggagggtctgagcagccctggtggctgcctgtgctcaggtcctcagctccatgggaaataaaaatggcaccctgaatctctaggattttgtcacttggagtcacagcaaagttctcttcctcttgtccccccgttgctgctccttggttatagaacatggtaaatatttattactttcagagaaaccagatattttatagaggaaatatgtttgaggtgagttgtttttcacttggagaaggcggagggctcttcctgggacggagacctcctcctccggaggttattgagaatccgggctgctgctttgaggatcttcccaccatacagacagcgagatccaagaagagggctggccgggggcaaagtcacctcccagtgtggctgcactggaactgactaaaggctttaccttggatagttgcgtattcctggtgagagccttacatctcccacagtttctgcagagtgactgactccattctggcagcccaggaagtcctgggtgctaaatgtgatggccacatgtagtggttaggggatgttgtgtgtgtcccccaactgcctgggtacttgttcctgatccctggggctgtcctgtggagcttttcctcctgcttgggcctagctaccatctccctctaatcccaggttctctacactgccctggggtttaccagctggattggcttctggttgagaaatcaaagctgggcgtatgattgacttaacccttcaggtattgttacttgaataagtcaagtgcctagcctcacccacctatgatctgtcctttcccagcctcgctggtagtcctggtcaaggagatctaggtctactccattcctcctggcccacctggggcattcactggcagcagctgtgcttcagtggagcaggtggttctcagctgcttgttagtatactgcatgtgacactgttcccacatacaaggctgacttctgaggattggagcaggctctggcggggaccagagctctgcgtgctgctgctgccaccaagaagtgttagcagaagcagtagcagccaactggccctcctgactttggcccagagcacatgcgtggcttgctgaacccaggctcaggtttatccccaaggccccagctttgagaagggggaaggcccctggtaagttattgatgcccccatatttcagctactgctctctttccaaggccttgcatggaaaggcctagccattgtctgaggcagcaatctttggcatctacaggtggcagcagcctttcaccagggctccatctgtgaagagtctcagccatgactttgagctgagcttgggagaagtaaagcaactgttaaggccagcccttgcccctcagacctgccatgaaaggaatgagccctagactgactcctgcagcacccccgggacaggctgggaccagctgtttgtctccaggtgtcagagtccctcctcctcctccaacctctccaacctactttgtttggaaataccgagctacacttcaaaatgtattcaagggatttccaataaatttttttctgta

SEQ ID NO: 612279 - DNA, 522 bp, Homo sapiens
caccatgctcagctaattttaagaattatttattccttattatttcttttgttttctttgggggagagacagcgtcttcctctgttgcccaggctggaaggcagtggtacaatctcggctcactgcaacctccacctcctgggttcaagtgattcttctgcctcagcttcctgagtagctgggattacaggtgcccaccaccatgcgcggctaatatttgtacttttagtagagatggggtttcaccgtgttagccaggatggtcttaatctcctgacctcgtgatccgccccgctcagcctcccaaaatgctgggattacaggcgtgaaccagcgcacctggccagtagtctttccttctttaacaaaaagcaaataatcactttgcttaaaatccttcagtgtcttcctgttgcacttcaaaacaaaatataactcagtgtatggtctatacctttctgtcattcttctcttttattttattacgctctttcaagccgtttcgcatcatttttctacatg

SEQ ID NO: 612280 - DNA, 281 bp, Homo sapiens
agtagtggtataaccgtgctactctcaacccccgggcacatgttgccaagagtacagtagagttaccaacggctactcctatgctacgactaatcgtcccaacaatgatatcactactcactgacgtgactgtccaaaaaagacataatgtgaatcaacacaagcacccacagcctagttattagcatcatccctctactattttttaaccaaatcaacagacaacctatttagctgttccccaaccttttcctccgaccccatgatgagcgttactgctg

SEQ ID NO: 612281 - DNA, 4174 bp, Homo sapiens
ggcacgaggctttcacccccccccccccggccattaccgaagcggatgaaaacaaacactaacgatggcggcgccgggaagcgaccggctgctgggcttaaggcgggagtgaccgcttaaccagtgagggaagcactgaagagcgccagtcgacgtgggtgcgacaactcgcggagtcttaggagcaaaacgtctggggcctgcgagccaggacccttctgaagccttaggtgtctatcggcgacgtgtacggtcactgcagctccggagcgcggaaccctcagccaggaggcgcggctggtcggtcccaggtcccggcctccgtaatgagagcccggaaccactctttgtgccgcagcttcgcagggttttgctttgtcacccaggctggagtgcaatgacatgatcacagctcactgcagccatacctcctgggttcgagtgatcttcccacatcagcctcctgagtagctgggactacagcatcttggactcaagtgattctcctgcctcagcctcctgagtagctgggactacagattcctataggcaatggaaactgatctcaattcccaggacagaaaggacctggacaagtttattaaattttttgccctcaagactgtccaagtgattgtccaggctcggcttggtgaaaagatttgcactcgttcatcatcttctccaacgggttcagattggttcaacttagcaatcaaagacatcccagaggttacacatgaagcaaagaaggcactggcaggacagctgcctgcagtcgggaggtccatgtgtgtggagatttcacttaagacttctgagggagattccatggagctggaaatatggtgtcttgaaatgaatgaaaagtgtgataaagaaatcaaagtttcctacacggtgtacaacagactgtcattgctgctgaagtcccttcttgctataactagggtgacaccagcctataggctctccaggaaacaagggcatgaatatgtcatattatacaggatatattttggagaagttcagctgagtggcttaggagaaggcttccagacagttcgtgttgggacagtgggcacccctgtgggcaccatcactctttcttgtgcttacagaattaacttggcattcatgtctaccaggcaatttgagaggaccccacctatcatggggattattattgatcactttgtggaccgtccctatcccagctcctctcccatgcacccctgcaattacagaactgctggtgaggacactggagtaatatacccgtctgtagaagactctcaagaagtgtgtaccacctctttttccacctccccaccatcccagctgatggttcctgggaaggaaggtggggtaccccttgctcccaaccagcctgtccatggtacccaggctgaccaggagagactggcaacctgcaccccttctgacagaacccactgtgctgccacaccctccagtagtgaggatactgaaaccgtatcaaacagcagtgagggacgggcctcccctcacgatgtcttggagaccatctttgtccgaaaagtgggggcttttgtcaacaaacccattaaccaggtgaccctgacgagtttggatataccctttgccatgtttgctcccaagaatttggagctggaggataccgatccaatggtgaatcctccagattccccagagactgaatctcctctccagggcagcctgcactcagatggctccagcgggggcagcagtggcaatacccatgatgactttgttatgatagactttaaaccagctttttctaaagatgacattcttccgatggacctggggaccttctatcgggagtttcagaacccacctcagctgagcagcctctccatagatattggagcacagtccatggctgaagacttggactcattaccagagaagctggctgtgcatgagaagaatgtccgcgagtttgatgcctttgtggaaaccctgcagtaaaagtatccttgagtcccagcagcaccccctttttgtggccccagggcataagcagcctcccatgcatcagctgctcccacccctcatcctgctctgagccaggtggaagggaggctggcttctcccatggggacccagaagtccctactcttggacctcctggagactccgtggcggcagtcaagcccagtgcccagttggagaagactcacgtgctggccttggagatgggaagaaccttcgtacgaaaaagccctcagcagggccatctgtgtgccctgcccatcaccaactgcttcccaagggtgtcatcctgttcctcctgctgccggcctcctgcctgggcctgccttgcagctggccccttccctgcctgctgtcaccatccactgtttgacattccagctggtggccaagagattggtgtggaggcagaaagaggaaggagacagtgccaggaggaagaaggaaggagtcccttagctctcttcattgtcccctttacttcctgctatcttcttctcctcttcttctctctcttgcctctatgcctgtatttctggcaatatgacaggcctgcctacccaagatcagaactccaaaaccactcccacccctgaaggtcgggagggtctgagcagccctggtggctgcctgtgctcaggtcctcagctccatgggaaataaaaatggcaccctgaatctctaggattttgtcacttggagtcacagcaaagttctcttcctcttgtccccccgttgctgctccttggttatagaacatggtaaatatttattactttcagagaaaccagatattttatagaggaaatatgtttgaggtgagttgtttttcacttggagaaggcggagggctcttcctgggacggagacctcctcctccggaggttattgagaatccgggctgctgctttgaggatcttcccaccatacagacagcgagatccaagaagagggctggccgggggcaaagtcacctcccagtgtggctgcactggaactgactaaaggctttaccttggatagttgcgtattcctggtgagagccttacatctcccacagtttctgcagagtgactgactccattctggcagcccaggaagtcctgggtgctaaatgtgatggccacatgtagtggttaggggatgttgtgtgtgtcccccaactgcctgggtacttgttcctgatccctggggctgtcctgtggagcttttcctcctgcttgggcctagctaccatctccctctaatcccaggttctctacactgccctggggtttaccagctggattggcttctggttgagaaatcaaagctgggcgtatgattgacttaacccttcaggtattgttacttgaataagtcaagtgcctagcctcacccacctatgatctgtcctttcccagcctcgctggtagtcctggtcaaggagatctaggtctactccattcctcctggcccacctggggcattcactggcagcagctgtgcttcagtggagcaggtggttctcagctgcttgttagtatactgcatgtgacactgttcccacatacaaggctgacttctgaggattggagcaggctctggcggggaccagagctctgcgtgctgctgctgccaccaagaagtgttagcagaagcagtagcagccaactggccctcctgactttggcccagagcacatgcgtggcttgctgaacccaggctcaggtttatccccaaggccccagctttgagaagggggaaggcccctggtaagttattgatgcccccatatttcagctactgctctctttccaaggccttgcatggaaaggcctagccattgtctgaggcagcaatctttggcatctacaggtggcagcagcctttcaccagggctccatctgtgaagagtctcagccatgactttgagctgagcttgggagaagtaaagcaactgttaaggccagcccttgcccctcagacctgccatgaaaggaatgagccctagactgactcctgcagcacccccgggacaggctgggaccagctgtttgtctccaggtgtcagagtccctcctcctcctccaacctctccaacctactttgtttggaaataccgagctacacttcaaaatgtattcaagggatttccaataaatttttttctgta

SEQ ID NO: 612282 - DNA, 271 bp, Homo sapiens
tcagccaaacttgtctgctttggattttttttttaaagtataagtggtctatatttttgtttcacctttttaaagtgtaaatgtgttttaaaaagtaagcattttatgtgtgtgttcccataacgtgacattcgtgatgtgcagaccttcatttctcttccccctctttcatacccttcctctttttcccccttttctacatatactcttgggtattggggtctctaaatataagagtgggtgtgctttctacaaaaaaaacaaaaaagag

SEQ ID NO: 612283 - DNA, 359 bp, Homo sapiens
tcatggagggattaatgaccttataaaagagactccagaaagctagcttgtcctatttctgccatgtgaggacacaacaagacagtagtcatgtgcagcccagaagagggtccgcaccagaacccaaccatgctgggaccctgatctcaaactggcaacctgcagaactctaagaaatgcctcctgtttataagccaccagtttatgggactttgttataagcagcccaagctaaggcatatgggcaatgaaaatatcagaattgtttgaaactttaatctattgtaataactcctttcacattgtgtataatacgtcggtttaacaatatgtaataaaattttaaaacaaggcaaaaa

SEQ ID NO: 612284 - DNA, 4364 bp, Homo sapiens
ggcacgaggctttcacccccccccccccggccattaccgaagcggatgaaaacaaacactaacgatggcggcgccgggaagcgaccggctgctgggcttaaggcgggagtgaccgcttaaccagtgagggaagcactgaagagcgccagtcgacgtgggtgcgacaactcgcggagtcttaggagcaaaacgtctggggcctgcgagccaggacccttctgaagccttaggtgtctatcggcgacgtgtacggtcactgcagctccggagcgcggaaccctcagccaggaggcgcggctggtcggtcccaggtcccggcctccgtaatgagagcccggaaccactctttgtgccgcagcttcgcagcatcttggactcaagtgattctcctgcctcagcctcctgagtagctgggactacagattcctataggcaatggaaactgatctcaattcccaggacagaaaggacctggacaagtttattaaattttttgccctcaagactgtccaagtgattgtccaggctcggcttggtgaaaagatttgcactcgttcatcatcttctccaacgggttcagattggttcaacttagcaatcaaagacatcccagaggttacacatgaagcaaagaaggcactggcaggacagctgcctgcagtcgggaggtccatgtgtgtggagatttcacttaagacttctgagggagattccatggagctggaaatatggtgtcttgaaatgaatgaaaagtgtgataaagaaatcaaagtttcctacacggtgtacaacagactgtcattgctgctgaagtcccttcttgctataactagggtgacaccagcctataggctctccaggaaacaagggcatgaatatgtcatattatacaggatatattttggagaagttcagctgagtggcttaggagaaggcttccagacagttcgtgttgggacagtgggcacccctgtgggcaccatcactctttcttgtgcttacagaattaacttggcattcatgtctaccaggcaatttgagaggaccccacctatcatggggattattattgatcactttgtggaccgtccctatcccagctcctctcccatgcacccctgcaattacagaactgctggtgaggacactggagtaatatacccgtctgtagaagactctcaagaagtgtgtaccacctctttttccacctccccaccatcccagctgatggttcctgggaaggaaggtggggtaccccttgctcccaaccagcctgtccatggtacccaggctgaccaggagagactggcaacctgcaccccttctgacagaacccactgtgctgccacaccctccagtagtgaggatactgaaaccgtatcaaacagcagtgagggacgggcctcccctcacgatgtcttggagaccatctttgtccgaaaagtgggggcttttgtcaacaaacccattaaccaggtgaccctgacgagtttggatataccctttgccatgtttgctcccaagaatttggagctggaggataccgatccaatggtgaatcctccagattccccagagactgaatctcctctccagggcagcctgcactcagatggctccagcgggggcagcagtggcaatacccatgatgactttgttatgatagactttaaaccagctttttctaaagatgacattcttccgatggacctggggaccttctatcgggagtttcagaacccacctcagctgagcagcctctccatagatattggagcacagtccatggctgaagacttggactcattaccagagaagctggctgtgcatgagaagaatgtccgcgagtttgatgcctttgtggaaaccctgcagtaaaagtatccttgagtcccagcagcaccccctttttgtggccccagggcataagcagcctcccatgcatcagctgctcccacccctcatcctgctctgagccaggtggaagggaggctggcttctcccatggggacccagaagtccctactcttggacctcctggagactccgtggcggcagtcaagcccagtgcccagttggagaagactcacgtgctggccttggagatgggaagaaccttcgtacgaaaaagccctcagcagggccatctgtgtgccctgcccatcaccaactgcttcccaagggtgtcatcctgttcctcctgctgccggcctcctgcctgggcctgccttgcagctggccccttccctgcctgctgtcaccatccactgtttgacattccagctggtggccaagagattggtgtggaggcagaaagaggaaggagacagtgccaggaggaagaaggaaggagtcccttagctctcttcattgtcccctttacttcctgctatcttcttctcctcttcttctctctcttgcctctatgcctgtatttctggcaatatgacaggcctgcctacccaagatcagaactccaaaaccactcccacccctgaaggtcgggagggtctgagcagccctggtggctgcctgtgctcaggtcctcagctccatgggaaataaaaatggcaccctgaatctctaggattttgtcacttggagtcacagcaaagttctcttcctcttgtccccccgttgctgctccttggttatagaacatggtaaatatttattactttcagagaaaccagatattttatagaggaaatatgtttgaggtgagttgtttttcacttggagaaggcggagggctcttcctgggacggagacctcctcctccggaggttattgagaatccgggctgctgctttgaggatcttcccaccatacagacagcgagatccaagaagagggctggccgggggcaaagtcacctcccagtgtggctgcactggaactgactaaaggctttaccttggatagttgcgtattcctggtgagagccttacatctcccacagtttctgcagagtgactgactccattctggcagcccaggaagtcctgggtgctaaatgtgatggccacatgtagtggttaggggatgttgtgtgtgtcccccaactgcctgggtacttgttcctgatccctggggctgtcctgtggagcttttcctcctgcttgggcctagctaccatctccctctaatcccaggttctctacactgccctggggtttaccagctggattggcttctggttgagaaatcaaagctgggcgtatgattgacttaacccttcaggtattgttacttgaataagtcaagtgcctagcctcacccacctatgatctgtcctttcccagcctcgctggtagtcctggtcaaggagatctaggtctactccattcctcctggcccacctggggcattcactggcagcagctgtgcttcagtggagcaggtggttctcagctgcttgttagtatactgcatgtgacactgttcccacatacaaggctgacttctgaggattggagcaggctctggcggggaccagagctctgcgtgctgctgctgccaccaagaagtgttagcagaagcagtagcagccaactggccctcctgactttggcccagagcacatgcgtggcttgctgaacccaggctcaggtttatccccaaggccccagctttgagaagggggaaggcccctggtaagttattgatgcccccatatttcagctactgctctctttccaaggccttgcatggaaaggcctagccattgtctgaggcagcaatctttggcatctacaggtggcagcagcctttcaccagggctccatctgtgaagagtctcagccatgactttgagctgagcttgggagaagtaaagcaactgttaaggccagcccttgcccctcagacctgccatgaaaggaatgagccctagactgactcctgcagcacccccgggacaggctgggaccagctgtttgtctccaggtgtcagagtccctcctcctcctccaacctctccaacctactttgtttggaaataccgagctacacttcaaaatgtattcaagggatttccaataaatttttttctgtactttacagcctcctgtcctgtaggttgtctgaagacctcgtaaccccttccccacccctgccccagtgcaggtctgggaaaggggagagtggtgcgttgtgaagcgcagaaagacctcaagtgtctggcaagcctgttttgagtcgggtgtggcctcttaggggctgtataccctggggtttcctgggtcaggaaacttcttagtatttctctttccctggtcccctatcaggggcttgaatttgaatattcagttggagaatgcatttaaaatacacccatagtaaaatctccataaaatgcaaaa

SEQ ID NO: 612285 - DNA, 258 bp, Homo sapiens
tagaggcttagtgggtttttctttctagcggaagaacatgtgtgtcactcgtgtgtgtgtgtgtgtgtgtgtgctgtgtgtgtgtgtgtgtggaccgagcgcgcgagcgagagacagggcgcggacatagggacgcgggagcgaagatgagagctgagagattatatctcccagactataatattctgggggaaatattatgtgctgctcacctgactgtatcgagagggcaccgcgcgtcgaatacgcacgcctgga

SEQ ID NO: 612286 - DNA, 4006 bp, Homo sapiens
ggcacgaggctttcacccccccccccccggccattaccgaagcggatgaaaacaaacactaacgatggcggcgccgggaagcgaccggctgctgggcttaaggcgggagtgaccgcttaaccagtgagggaagcactgaagagcgccagtcgacgtgggtgcgacaactcgcggagtcttaggagcaaaacgtctggggcctgcgagccaggacccttctgaagccttaggtgtctatcggcgacgtgtacggtcactgcagctccggagcgcggaaccctcagccaggaggcgcggctggtcggtcccaggtcccggcctccgtaatgagagcccggaaccactctttgtgccgcagcttcgcagcatcttggactcaagtgattctcctgcctcagcctcctgagtagctgggactacagattcctataggcaatggaaactgatctcaattcccaggacagaaaggacctggacaagtttattaaattttttgccctcaagactgtccaagtgattgtccaggctcggcttggtgaaaagatttgcactcgttcatcatcttctccaacgggttcagattggttcaacttagcaatcaaagacatcccagaggttacacatgaagcaaagaaggcactggcaggacagctgcctgcagtcgggaggtccatgtgtgtggagatttcacttaagacttctgagggagattccatggagctggaaatatggtgtcttgaaatgaatgaaaagtgtgataaagaaatcaaagtttcctacacggtgtacaacagactgtcattgctgctgaagtcccttcttgctataactagggtgacaccagcctataggctctccaggaaacaagggcatgaatatgtcatattatacaggatatattttggagaagttcagctgagtggcttaggagaaggcttccagacagttcgtgttgggacagtgggcacccctgtgggcaccatcactctttcttgtgcttacagaattaacttggcattcatgtctaccaggcaatttgagaggaccccacctatcatggggattattattgatcactttgtggaccgtccctatcccagctcctctcccatgcacccctgcaattacagaactgctggtgaggacactggagtaatatacccgtctgtagaagactctcaagaagtgtgtaccacctctttttccacctccccaccatcccagctgatggttcctgggaaggaaggtggggtaccccttgctcccaaccagcctgtccatggtacccaggctgaccaggagagactggcaacctgcaccccttctgacagaacccactgtgctgccacaccctccagtagtgaggatactgaaaccgtatcaaacagcagtgagggacgggcctcccctcacgatgtcttggagaccatctttgtccgaaaagtgggggcttttgtcaacaaacccattaaccaggtgaccctgacgagtttggatataccctttgccatgtttgctcccaagaatttggagctggaggataccgatccaatggactcagatggctccagcgggggcagcagtggcaatacccatgatgactttgttatgatagactttaaaccagctttttctaaagatgacattcttccgatggacctggggaccttctatcgggagtttcagaacccacctcagctgagcagcctctccatagatattggagcacagtccatggctgaagacttggactcattaccagagaagctggctgtgcatgagaagaatgtccgcgagtttgatgcctttgtggaaaccctgcagtaaaagtatccttgagtcccagcagcaccccctttttgtggccccagggcataagcagcctcccatgcatcagctgctcccacccctcatcctgctctgagccaggtggaagggaggctggcttctcccatggggacccagaagtccctactcttggacctcctggagactccgtggcggcagtcaagcccagtgcccagttggagaagactcacgtgctggccttggagatgggaagaaccttcgtacgaaaaagccctcagcagggccatctgtgtgccctgcccatcaccaactgcttcccaagggtgtcatcctgttcctcctgctgccggcctcctgcctgggcctgccttgcagctggccccttccctgcctgctgtcaccatccactgtttgacattccagctggtggccaagagattggtgtggaggcagaaagaggaaggagacagtgccaggaggaagaaggaaggagtcccttagctctcttcattgtcccctttacttcctgctatcttcttctcctcttcttctctctcttgcctctatgcctgtatttctggcaatatgacaggcctgcctacccaagatcagaactccaaaaccactcccacccctgaaggtcgggagggtctgagcagccctggtggctgcctgtgctcaggtcctcagctccatgggaaataaaaatggcaccctgaatctctaggattttgtcacttggagtcacagcaaagttctcttcctcttgtccccccgttgctgctccttggttatagaacatggtaaatatttattactttcagagaaaccagatattttatagaggaaatatgtttgaggtgagttgtttttcacttggagaaggcggagggctcttcctgggacggagacctcctcctccggaggttattgagaatccgggctgctgctttgaggatcttcccaccatacagacagcgagatccaagaagagggctggccgggggcaaagtcacctcccagtgtggctgcactggaactgactaaaggctttaccttggatagttgcgtattcctggtgagagccttacatctcccacagtttctgcagagtgactgactccattctggcagcccaggaagtcctgggtgctaaatgtgatggccacatgtagtggttaggggatgttgtgtgtgtcccccaactgcctgggtacttgttcctgatccctggggctgtcctgtggagcttttcctcctgcttgggcctagctaccatctccctctaatcccaggttctctacactgccctggggtttaccagctggattggcttctggttgagaaatcaaagctgggcgtatgattgacttaacccttcaggtattgttacttgaataagtcaagtgcctagcctcacccacctatgatctgtcctttcccagcctcgctggtagtcctggtcaaggagatctaggtctactccattcctcctggcccacctggggcattcactggcagcagctgtgcttcagtggagcaggtggttctcagctgcttgttagtatactgcatgtgacactgttcccacatacaaggctgacttctgaggattggagcaggctctggcggggaccagagctctgcgtgctgctgctgccaccaagaagtgttagcagaagcagtagcagccaactggccctcctgactttggcccagagcacatgcgtggcttgctgaacccaggctcaggtttatccccaaggccccagctttgagaagggggaaggcccctggtaagttattgatgcccccatatttcagctactgctctctttccaaggccttgcatggaaaggcctagccattgtctgaggcagcaatctttggcatctacaggtggcagcagcctttcaccagggctccatctgtgaagagtctcagccatgactttgagctgagcttgggagaagtaaagcaactgttaaggccagcccttgcccctcagacctgccatgaaaggaatgagccctagactgactcctgcagcacccccgggacaggctgggaccagctgtttgtctccaggtgtcagagtccctcctcctcctccaacctctccaacctactttgtttggaaataccgagctacacttcaaaatgtattcaagggatttccaataaatttttttctgta

SEQ ID NO: 612287 - DNA, 4140 bp, Homo sapiens
ggcacgaggctttcacccccccccccccggccattaccgaagcggatgaaaacaaacactaacgatggcggcgccgggaagcgaccggctgctgggcttaaggcgggagtgaccgcttaaccagtgagggaagcactgaagagcgccagtcgacgtgggtgcgacaactcgcggagtcttaggagcaaaacgtctggggcctgcgagccaggacccttctgaagccttaggtgtctatcggcgacgtgtacggtcactgcagctccggagcgcggaaccctcagccaggaggcgcggctggtcggtcccaggtcccggcctccgtaatgagagcccggaaccactctttgtgccgcagcttcgcagcatcttggactcaagtgattctcctgcctcagcctcctgagtagctgggactacagattcctataggcaatggaaactgatctcaattcccaggacagaaaggacctggacaagtttattaaattttttgccctcaagactgtccaagtgattgtccaggctcggcttggtgaaaagatttgcactcgttcatcatcttctccaacgggttcagattggttcaacttagcaatcaaagacatcccagaggttacacatgaagcaaagaaggcactggcaggacagctgcctgcagtcgggaggtccatgtgtgtggagatttcacttaagacttctgagggagattccatggagctggaaatatggtgtcttgaaatgaatgaaaagtgtgataaagaaatcaaagtttcctacacggtgtacaacagactgtcattgctgctgaagtcccttcttgctataactagggtgacaccagcctataggctctccaggaaacaagggcatgaatatgtcatattatacaggatatattttggagaagttcagctgagtggcttaggagaaggcttccagacagttcgtgttgggacagtgggcacccctgtgggcaccatcactctttcttgtgcttacagaattaacttggcattcatgtctaccaggcaatttgagaggaccccacctatcatggggattattattgatcactttgtggaccgtccctatcccagctcctctcccatgcacccctgcaattacagaactgctggtgaggacactggagtaatatacccgtctgtagaagactctcaagaagtgtgtaccacctctttttccacctccccaccatccagcctgctgccctgggcgttggatcagctgacctggcttatccagtagtgtttgctgctggcttaaatgctacacaccctcaccagctgatggttcctgggaaggaaggtggggtaccccttgctcccaaccagcctgtccatggtacccaggctgaccaggagagactggcaacctgcaccccttctgacagaacccactgtgctgccacaccctccagtagtgaggatactgaaaccgtatcaaacagcagtgagggacgggcctcccctcacgatgtcttggagaccatctttgtccgaaaagtgggggcttttgtcaacaaacccattaaccaggtgaccctgacgagtttggatataccctttgccatgtttgctcccaagaatttggagctggaggataccgatccaatggtgaatcctccagattccccagagactgaatctcctctccagggcagcctgcactcagatggctccagcgggggcagcagtggcaatacccatgatgactttgttatgatagactttaaaccagctttttctaaagatgacattcttccgatggacctggggaccttctatcgggagtttcagaacccacctcagctgagcagcctctccatagatattggagcacagtccatggctgaagacttggactcattaccagagaagctggctgtgcatgagaagaatgtccgcgagtttgatgcctttgtggaaaccctgcagtaaaagtatccttgagtcccagcagcaccccctttttgtggccccagggcataagcagcctcccatgcatcagctgctcccacccctcatcctgctctgagccaggtggaagggaggctggcttctcccatggggacccagaagtccctactcttggacctcctggagactccgtggcggcagtcaagcccagtgcccagttggagaagactcacgtgctggccttggagatgggaagaaccttcgtacgaaaaagccctcagcagggccatctgtgtgccctgcccatcaccaactgcttcccaagggtgtcatcctgttcctcctgctgccggcctcctgcctgggcctgccttgcagctggccccttccctgcctgctgtcaccatccactgtttgacattccagctggtggccaagagattggtgtggaggcagaaagaggaaggagacagtgccaggaggaagaaggaaggagtcccttagctctcttcattgtcccctttacttcctgctatcttcttctcctcttcttctctctcttgcctctatgcctgtatttctggcaatatgacaggcctgcctacccaagatcagaactccaaaaccactcccacccctgaaggtcgggagggtctgagcagccctggtggctgcctgtgctcaggtcctcagctccatgggaaataaaaatggcaccctgaatctctaggattttgtcacttggagtcacagcaaagttctcttcctcttgtccccccgttgctgctccttggttatagaacatggtaaatatttattactttcagagaaaccagatattttatagaggaaatatgtttgaggtgagttgtttttcacttggagaaggcggagggctcttcctgggacggagacctcctcctccggaggttattgagaatccgggctgctgctttgaggatcttcccaccatacagacagcgagatccaagaagagggctggccgggggcaaagtcacctcccagtgtggctgcactggaactgactaaaggctttaccttggatagttgcgtattcctggtgagagccttacatctcccacagtttctgcagagtgactgactccattctggcagcccaggaagtcctgggtgctaaatgtgatggccacatgtagtggttaggggatgttgtgtgtgtcccccaactgcctgggtacttgttcctgatccctggggctgtcctgtggagcttttcctcctgcttgggcctagctaccatctccctctaatcccaggttctctacactgccctggggtttaccagctggattggcttctggttgagaaatcaaagctgggcgtatgattgacttaacccttcaggtattgttacttgaataagtcaagtgcctagcctcacccacctatgatctgtcctttcccagcctcgctggtagtcctggtcaaggagatctaggtctactccattcctcctggcccacctggggcattcactggcagcagctgtgcttcagtggagcaggtggttctcagctgcttgttagtatactgcatgtgacactgttcccacatacaaggctgacttctgaggattggagcaggctctggcggggaccagagctctgcgtgctgctgctgccaccaagaagtgttagcagaagcagtagcagccaactggccctcctgactttggcccagagcacatgcgtggcttgctgaacccaggctcaggtttatccccaaggccccagctttgagaagggggaaggcccctggtaagttattgatgcccccatatttcagctactgctctctttccaaggccttgcatggaaaggcctagccattgtctgaggcagcaatctttggcatctacaggtggcagcagcctttcaccagggctccatctgtgaagagtctcagccatgactttgagctgagcttgggagaagtaaagcaactgttaaggccagcccttgcccctcagacctgccatgaaaggaatgagccctagactgactcctgcagcacccccgggacaggctgggaccagctgtttgtctccaggtgtcagagtccctcctcctcctccaacctctccaacctactttgtttggaaataccgagctacacttcaaaatgtattcaagggatttccaataaatttttttctgta

SEQ ID NO: 612288 - DNA, 785 bp, Homo sapiens
  misc_feature (3)..(3): n is a, c, g, or t
  misc_feature (66)..(67): n is a, c, g, or t
  misc_feature (80)..(80): n is a, c, g, or t
  misc_feature (93)..(93): n is a, c, g, or t
  misc_feature (98)..(98): n is a, c, g, or t
  misc_feature (100)..(100): n is a, c, g, or t
  misc_feature (113)..(113): n is a, c, g, or t
  misc_feature (164)..(164): n is a, c, g, or t
  misc_feature (177)..(177): n is a, c, g, or t
  misc_feature (195)..(195): n is a, c, g, or t
  misc_feature (229)..(229): n is a, c, g, or t
  misc_feature (236)..(236): n is a, c, g, or t
  misc_feature (239)..(239): n is a, c, g, or t
  misc_feature (248)..(248): n is a, c, g, or t
  misc_feature (263)..(263): n is a, c, g, or t
  misc_feature (267)..(269): n is a, c, g, or t
  misc_feature (272)..(272): n is a, c, g, or t
  misc_feature (279)..(280): n is a, c, g, or t
  misc_feature (282)..(283): n is a, c, g, or t
  misc_feature (285)..(285): n is a, c, g, or t
  misc_feature (291)..(291): n is a, c, g, or t
  misc_feature (295)..(295): n is a, c, g, or t
  misc_feature (308)..(309): n is a, c, g, or t
  misc_feature (311)..(312): n is a, c, g, or t
  misc_feature (321)..(321): n is a, c, g, or t
  misc_feature (325)..(325): n is a, c, g, or t
  misc_feature (327)..(327): n is a, c, g, or t
  misc_feature (329)..(329): n is a, c, g, or t
  misc_feature (331)..(332): n is a, c, g, or t
  misc_feature (336)..(336): n is a, c, g, or t
  misc_feature (343)..(343): n is a, c, g, or t
  misc_feature (348)..(348): n is a, c, g, or t
  misc_feature (353)..(353): n is a, c, g, or t
  misc_feature (385)..(385): n is a, c, g, or t
  misc_feature (426)..(426): n is a, c, g, or t
  misc_feature (492)..(492): n is a, c, g, or t
  misc_feature (508)..(508): n is a, c, g, or t
  misc_feature (516)..(517): n is a, c, g, or t
  misc_feature (530)..(530): n is a, c, g, or t
  misc_feature (547)..(547): n is a, c, g, or t
  misc_feature (568)..(568): n is a, c, g, or t
  misc_feature (584)..(584): n is a, c, g, or t
  misc_feature (657)..(657): n is a, c, g, or t
  misc_feature (661)..(661): n is a, c, g, or t
  misc_feature (714)..(714): n is a, c, g, or t
  misc_feature (742)..(742): n is a, c, g, or t
atnctaagtataagctctcttccttcttggtctggtggtttgttttggagctactcgatatttatnnctttttttttgtnccggtcttttttngtctngngttttggtttgtncaacaaagtaaacaattttttgctgtgtggcagtttcttttttttgaaaanactgagctaaaantcggattgtgtttttgtntgggtgtgggccggatcttttgtgatcccaactnccctgangancactgatgncattttgggggcatntttnnnggnttttttnntnntngttgtntttntcttagtgtttgnngnnggttttttntttntntngnntgtngcgtttnattcnggggntgcccagagtttaaattacaccatagtttttntttctttctgcaaatcattctttctgatttgcagttttttncgaacgagaggccatgttagtggaacaaaagtttgatgttcatgcccaacaagctctgatattttntggatacatttgtatnaagcaagnntttttgctctgtnccctgggtggccacagntggtttgtgggggcgtggttnttggatgctgagaganagtagcatacttaaacccacagtacagataatcaggaggcaagcaaaaacaaagctataacttggcagtggtnttcnccaccacttattccaaaaacatattttgcttattaaataagggaaatatggtncagttttgcaatgttaatagctgccagnctctcatattttttataaatatcatttcctgactagcaatgag

SEQ ID NO: 612289 - DNA, 489 bp, Homo sapiens
  misc_feature (110)..(110): n is a, c, g, or t
  misc_feature (187)..(187): n is a, c, g, or t
caattgtttttgtaagtagatatacctctaaatattcattagtgtaagattctctatgttaccatttagcttttgtagaaatatcaactagaattctttacaataaatgnatgcgccggctaaaagttgtccgcctaatccccgaatccttggtaacggtatttccgccctaagcgttttaacgccngcccctatatcttttatccgactctcctatttgcgacttactctcccccacccacccagccagcccctgattcattgtcctcggaacggcccccatacttttgcttatcacacactaaaccgagttatcctctgccggtcacgacaatctcccggaatctcgtcctactctcccgcttatatgccaatttaattctttcctctcgcttttgggaccggggtccgaaaaaaacccggaaccgacccctttaaaaagcccgttttaaaaataaggggcccggaaataaaaaactttagggtcca

SEQ ID NO: 612290 - DNA, 373 bp, Homo sapiens
acccgtattcacattattaaccattaaggaaatacaaactagaatcacaatgtattaccaccacatgcctattaaaatggcatttaaaaaaaaatgcggcagggcgcggtggctcatgcctgtaatcccagcaatctgggaggccgaggcaggagaatcacgaggtcaggaattcaagaccagcctggccaacatggtgaaactccgtctccaccaaaaaatacaaaaattggccaggcgcggtggctcacgtctataatcccagtacttgggaggctgaggtgggaggattacttgagcccaggagttagggttacagtaagctatgatggttccactgcactctagcttgggtgacagagagagactctgt

SEQ ID NO: 612291 - DNA, 170 bp, Homo sapiens
  misc_feature (20)..(20): n is a, c, g, or t
  misc_feature (160)..(160): n is a, c, g, or t
atgagcgtagctcgtgtcgnggaccaagaggcgggtgcgtgtactcagcgcaggcggatcacttgaggtcaggagctcaagaccagcctggtcgatgtggtaaaaccccatctctactagaaatacaaaaattagccaggtgtggtggcgcacacctgtnatcccagcta

SEQ ID NO: 612292 - DNA, 163 bp, Homo sapiens
  misc_feature (34)..(34): n is a, c, g, or t
catagactcaaggatgagggggttctgttggtanagtccacttcgggtctcaagggaaggtacagggattttagtgattgactgcaggccacccccttttgtgggttttttttaagatggagttttgctcgttacccaggctggcatgcaattgcgcaatctc

SEQ ID NO: 612293 - DNA, 552 bp, Homo sapiens
ggggtctcaccctgtgggtggctggcaccatcccatccatcttagacttcttattctgggcttcggaggagatctggtggcttccccattaacctcttctcccaatctggctcattccttggcttcgaaatgggatgtcgaccacacccgggcatttttccaagacttttctccagctacggtggtcatcgtttttttctccaggtgaattcctagagaaggggtatccaagaagatgaagaaagagagccatggaaatcggggcatcccgggcagcataaattaccgggtcctctgtgagagtctcagcatcccagtggctgcaacgaagtagatgggactggtcagggggaaagttcaaaacagtctcagcgagggacttcaggctaagcccattacagagcaattggtttctcggccgcatggctaggtatcggaggtccaggcaccccctaagaaggaggccataatcctgcagaagcttgctggcatcttctgagcatcccactccaactttcaagctggtgcctctggaaaatatcccataacggc

SEQ ID NO: 612294 - DNA, 209 bp, Homo sapiens
ggtaaccagcgtgactcgcccgccagaaggatattaaaaagcagagcccctcggttaagggaaagcgccggagatgacggctttctgctgccgcccgaaagatagagggactcggagatcatgcagcagaagcaggaccaggctgccagacgaaggagcacccacgtagctttgtggcttcgtgtcaaccctcttgatctgcgactgta

SEQ ID NO: 612295 - DNA, 145 bp, Homo sapiens
caagatcttaaaacacgcaatctactcttcccttacggatatcgtttggataagtactttatcataaacatccgatgaaggaggtccatcctctgtgagaggtggtcaggaaagtaagctagatctatagaactcaggcatcgtg

SEQ ID NO: 612296 - DNA, 537 bp, Homo sapiens
tgcaaatgttttccatcactagttgccatgatttaaaaatcaaatgctttcccttaaacatctgaatatgtacaaattaccactgtctgaaattttttggaagatttattaatagatggtctagcagtagtgggcctgcattccacatggcacaggaaatggggtatgtgggcccctgttgccatggtctcacctggtctaccccatacactgactttgctttcctatccttataggcttgggctggaggtagtggggccagtgacttgcttactttcatttgtttcctgtttggtcagcagtggtcccagtgatgaccgccttactatctcattaacccttttcctttctgaggtgattttccattccaaactctttagacacaaaactgctctggagccaggcatggtagctcactcctcaggaggctgaggcaggaggatcgtttgagcccaggagttcgaggctacagtgagctatgatcataccactgtactctggcctgggcaacagaatgagaccctgtctctttaaaaa

SEQ ID NO: 612297 - DNA, 778 bp, Homo sapiens
ggccgccagaacacaggtgtcgtgaaaactacccctgtgagccaaaacgtgggaccggaacaggatcatatcagcagttgtcgtccatctggacagcgtagattacgggcaaggtccacactactactggccatctgatctagtatagattgctggagggcactcgacaaaagaaccatatgcaaaaactcttgaggaaggaggcgtgctgagatgggaaagggcgtccttcaaagtatgcctggggtctgtggatacaactgaaccagctgagtcgtgcaacggtggtatcaccatgtgcatatctcctggtggaagatttgagaccaagcaaggtactatgtgactatcatggatgccccaggacacgaagagacttaactcaaaagacatgattacatgggacatcgtcaggctgactgtgctgtcctagattggttgctgctaggtgttaggagaatttcgaagctggtatctccaagaatgggcagacaccagagagcatgccctatctggcttacacactggagtgtgaagacaactcaatagtacggatagttaacacaaagtggcattccactgagccgaccctacagccagcaagagatcatgaggacactagtaaaaggaacgtcaagcaactcaccctacaagacaacaatgagcaaacaagccccggaccaacagaacagactaagcagcaaataaccagaatcaagccatgggagacaagatgacaggagccaaagcgcaaacatgcccagagaacaacggatga

SEQ ID NO: 612298 - DNA, 165 bp, Homo sapiens
acatcactgcgcccgctcataaggggatgatgaggctattgtctttttgtgaacttcttcgatactgtcccatttgggtccaaaagccggttagcgggggcaggcctcctatgaagaggcgggtggatggaattaagggtgttagtcatgttagattgtttcagg

SEQ ID NO: 612299 - DNA, 398 bp, Homo sapiens
  misc_feature (5)..(5): n is a, c, g, or t
tgtantgcgcgtcttcatgtgaaatggtggcgtccggggttcctctccagcactcacatgtcgcactgcctcttcatgtgaaatggtggcgtccgggggggcctctccagacactcgcatagtcacctggctcttccatgtgaaatggtggcgtccggggttcctcctcagcactcgcgtgtcgcctgcctcttcatgtgaaatggtggcgtccggggtacctctccagcactgccatttcgcctggcgtcttcatgtgagatggtgggctccggggtacctctccaggactcgcatttcgactgcgtcttccatgtgaaatggtggcgtccgggggtcctctccagaactcgcttgtcgcctggcctctcctgtgaaaatggtgggactccggggac

SEQ ID NO: 612300 - DNA, 615 bp, Homo sapiens
actgggccggattggatatgactgcaggggggtgtgtgtgtgcagcaattcccaattttttttccttttggcctcctccaaagtcttcaaaaaaaaaatttgccaatctttccaacttttattttttatgatgacaatcaaagccgggccttaaaaccactattttgtacttttttaaacgattagtgatgtccttaaaatgtggtctgccaatctggacaaaatggtcctatttttgtaaagagggccataagataaaatgatgttatccatccatatggatatatggatttccatatagacttggagaattctgccaaaacatttatgacaagctgtatcaccgccttcgtttatatttttttaactgtgataatccccacaggcacattaactgttgcacttttgaatgtccaaaatttattttttagaaataattaaaagaaagattcttacatgttcccaaaacaatggtgtggtgaatgtgttaaaaaaactaacttgatagggtctaccaattcaaaatgtatttcgaatgcccctgttcatgtttttgttttaaaacgtgtaaatgaagctctttacctttcaatgactggtataacattttaagtt

SEQ ID NO: 612301 - DNA, 1046 bp, Homo sapiens
gacgttggtgtgcctctagtcagcggctctgtcgccggtgattctcactctctgtcttttgggttagtgttcaatcgggttccctgtctcggtttgaccgtgccctctcctccttgaccctttccgcgctctcttgtgctccccccaatttgttgggttatcgctttgccacggcccccactgttgtggacccctcgcgggtttacacctcctgtttgcccgtatctttctccacaggggccgctttatcccgcccgttgtcctctccctgtgtatttccgccctgtcctgtggtttacacgtcggtttgtattgcgtgtgtggccccctctcccctttcccatcccccctgcgcaaccttcaacttaggcctcctattttatttacccacctgtaccctaccccgttttactcaaatcctctggatccagggttgagcatcaaagtccaattacccccctgatcggcccactgcgagcagttgccccaccaatcgtcatatgaagtcaccccttgccatcattctactatcaacattactaataagtggctcctttaacctctccgcccttttccccaccccaggacacctctgattactcctgccatcatgacccttggccataatatgatttatctcccccctagcacgagacccaccgaacccccttcgaccttgccgaaggggagtccgaactagttctcaggcttcaacactcgaataccccccaggccccttcgccctattcttcatagccgaataccccacaccattattataattaaccaccctctacccactccaatcttcctagggcaccaacatatgacgcactttcccctgaactttacaccaacaatattttgtcacccagaccctacttctaacctccctgttcttatgaattcgaacagcatacccccgattccgctacgacccactcatacacctcctatgaaaaaacttcctaccactcaccctagcattacttatatgatatgtctccataccccttaccatctccagcattccccctcaaacctta

SEQ ID NO: 612302 - DNA, 256 bp, Homo sapiens
gctctgtaccccgcccgatgttgcgctctgaattacccttcgtatcaccgtcaccctatgcagcttcgggctctggatcaggctctttcacacagatctttttctgcgaggactgataggcgcaagccttgtcagtaaggttgttctctatctaccacagcacctggctgaaccctttcatcttgctgggctcgccaaacttctgcttgaatttctcgaaagggaagaggtgtttgcggcccaggaatgccgtctc

SEQ ID NO: 612303 - DNA, 105 bp, Homo sapiens
tcaatgttaagatggccccttgaccattgagattgccaccctaccaggaagctgctggaaggcgaggagagcaggatttctctgccctcttccccaactttttcc

SEQ ID NO: 612304 - DNA, 4100 bp, Homo sapiens
ggcacgaggctttcacccccccccccccggccattaccgaagcggatgaaaacaaacactaacgatggcggcgccgggaagcgaccggctgctgggcttaaggcgggagtgaccgcttaaccagtgagggaagcactgaagagcgccagtcgacgtgggtgcgacaactcgcggagtcttaggagcaaaacgtctggggcctgcgagccaggacccttctgaagccttaggtgtctatcggcgacgtgtacggtcactgcagctccggagcgcggaaccctcagccaggaggcgcggctggtcggtcccaggtcccggcctccgtaatgagagcccggaaccactctttgtgccgcagcttcgcagcatcttggactcaagtgattctcctgcctcagcctcctgagtagctgggactacagattcctataggcaatggaaactgatctcaattcccaggacagaaaggacctggacaagtttattaaattttttgccctcaagactgtccaagtgattgtccaggctcggcttggtgaaaagatttgcactcgttcatcatcttctccaacgggttcagattggttcaacttagcaatcaaagacatcccagaggttacacatgaagcaaagaaggcactggcaggacagctgcctgcagtcgggaggtccatgtgtgtggagatttcacttaagacttctgagggagattccatggagctggaaatatggtgtcttgaaatgaatgaaaagtgtgataaagaaatcaaagtttcctacacggtgtacaacagactgtcattgctgctgaagtcccttcttgctataactagggtgacaccagcctataggctctccaggaaacaagggcatgaatatgtcatattatacaggatatattttggagaagttcagctgagtggcttaggagaaggcttccagacagttcgtgttgggacagtgggcacccctgtgggcaccatcactctttcttgtgcttacagaattaacttggcattcatgtctaccaggcaatttgagaggaccccacctatcatggggattattattgatcactttgtggaccgtccctatcccagctcctctcccatgcacccctgcaattacagaactgctggtgaggacactggagtaatatacccgtctgtagaagactctcaagaagtgtgtaccacctctttttccacctccccaccatcccagctgatggttcctgggaaggaaggtggggtaccccttgctcccaaccagcctgtccatggtacccccccccaaaagggggggggccctttgggaaaccaccaagcggcaggctgaccaggagagactggcaacctgcaccccttctgacagaacccactgtgctgccacaccctccagtagtgaggatactgaaaccgtatcaaacagcagtgagggacgggcctcccctcacgatgtcttggagaccatctttgtccgaaaagtgggggcttttgtcaacaaacccattaaccaggtgaccctgacgagtttggatataccctttgccatgtttgctcccaagaatttggagctggaggataccgatccaatggtgaatcctccagattccccagagactgaatctcctctccagggcagcctgcactcagatggctccagcgggggcagcagtggcaatacccatgatgactttgttatgatagactttaaaccagctttttctaaagatgacattcttccgatggacctggggaccttctatcgggagtttcagaacccacctcagctgagcagcctctccatagatattggagcacagtccatggctgaagacttggactcattaccagagaagctggctgtgcatgagaagaatgtccgcgagtttgatgcctttgtggaaaccctgcagtaaaagtatccttgagtcccagcagcaccccctttttgtggccccagggcataagcagcctcccatgcatcagctgctcccacccctcatcctgctctgagccaggtggaagggaggctggcttctcccatggggacccagaagtccctactcttggacctcctggagactccgtggcggcagtcaagcccagtgcccagttggagaagactcacgtgctggccttggagatgggaagaaccttcgtacgaaaaagccctcagcagggccatctgtgtgccctgcccatcaccaactgcttcccaagggtgtcatcctgttcctcctgctgccggcctcctgcctgggcctgccttgcagctggccccttccctgcctgctgtcaccatccactgtttgacattccagctggtggccaagagattggtgtggaggcagaaagaggaaggagacagtgccaggaggaagaaggaaggagtcccttagctctcttcattgtcccctttacttcctgctatcttcttctcctcttcttctctctcttgcctctatgcctgtatttctggcaatatgacaggcctgcctacccaagatcagaactccaaaaccactcccacccctgaaggtcgggagggtctgagcagccctggtggctgcctgtgctcaggtcctcagctccatgggaaataaaaatggcaccctgaatctctaggattttgtcacttggagtcacagcaaagttctcttcctcttgtccccccgttgctgctccttggttatagaacatggtaaatatttattactttcagagaaaccagatattttatagaggaaatatgtttgaggtgagttgtttttcacttggagaaggcggagggctcttcctgggacggagacctcctcctccggaggttattgagaatccgggctgctgctttgaggatcttcccaccatacagacagcgagatccaagaagagggctggccgggggcaaagtcacctcccagtgtggctgcactggaactgactaaaggctttaccttggatagttgcgtattcctggtgagagccttacatctcccacagtttctgcagagtgactgactccattctggcagcccaggaagtcctgggtgctaaatgtgatggccacatgtagtggttaggggatgttgtgtgtgtcccccaactgcctgggtacttgttcctgatccctggggctgtcctgtggagcttttcctcctgcttgggcctagctaccatctccctctaatcccaggttctctacactgccctggggtttaccagctggattggcttctggttgagaaatcaaagctgggcgtatgattgacttaacccttcaggtattgttacttgaataagtcaagtgcctagcctcacccacctatgatctgtcctttcccagcctcgctggtagtcctggtcaaggagatctaggtctactccattcctcctggcccacctggggcattcactggcagcagctgtgcttcagtggagcaggtggttctcagctgcttgttagtatactgcatgtgacactgttcccacatacaaggctgacttctgaggattggagcaggctctggcggggaccagagctctgcgtgctgctgctgccaccaagaagtgttagcagaagcagtagcagccaactggccctcctgactttggcccagagcacatgcgtggcttgctgaacccaggctcaggtttatccccaaggccccagctttgagaagggggaaggcccctggtaagttattgatgcccccatatttcagctactgctctctttccaaggccttgcatggaaaggcctagccattgtctgaggcagcaatctttggcatctacaggtggcagcagcctttcaccagggctccatctgtgaagagtctcagccatgactttgagctgagcttgggagaagtaaagcaactgttaaggccagcccttgcccctcagacctgccatgaaaggaatgagccctagactgactcctgcagcacccccgggacaggctgggaccagctgtttgtctccaggtgtcagagtccctcctcctcctccaacctctccaacctactttgtttggaaataccgagctacacttcaaaatgtattcaagggatttccaataaatttttttctgta

SEQ ID NO: 612305 - DNA, 461 bp, Homo sapiens
tggttgtaaacagaaggctaacatgatactggtccgcgagtcagttacatgtaagccagaggagtccgtggacagtgagcccatacccagccaccgacagtccggtggaggcgtgtgactgagatgcttcggaccctctcatttgggatccagcgatccctgaggccaggactgagagctgcagggcagaaggccagttggcgtctgatgtgcaaactggtgcagtgtgcagacctgcgctctccacagcacagggcaggagcaaggcaggcatccacactgtcctgcccaccaccatcccgcagctcaggaaatcacacagttgctaggcttggcagaactgggacttgttttacctgagatgtcagcactgaaattctcgttgggcctcttccccgtcagaaactccacttcagaggtctcggtggagacagagctggccatgccattgggcgccgcag

SEQ ID NO: 612306 - DNA, 4171 bp, Homo sapiens
ggcacgaggctttcacccccccccccccggccattaccgaagcggatgaaaacaaacactaacgatggcggcgccgggaagcgaccggctgctgggcttaaggcgggagtgaccgcttaaccagtgagggaagcactgaagagcgccagtcgacgtgggtgcgacaactcgcggagtcttaggagcaaaacgtctggggcctgcgagccaggacccttctgaagccttaggtgtctatcggcgacgtgtacggtcactgcagctccggagcgcggaaccctcagccaggaggcgcggctggtcggtcccaggtcccggcctccgtaatgagagcccggaaccactctttgtgccgcagcttcgcagcatcttggactcaagtgattctcctgcctcagcctcctgagtagctgggactacagattcctataggcaatggaaactgatctcaattcccaggacagaaaggacctggacaagtttattaaattttttgccctcaagactgtccaagtgattgtccaggctcggcttggtgaaaagatttgcactcgttcatcatcttctccaacgggttcagattggttcaacttagcaatcaaagacatcccagaggttacacatgaagcaaagaaggcactggcaggacagctgcctgcagtcgggaggtccatgtgtgtggagatttcacttaagacttctgagggagattccatggagctggaaatatggtgtcttgaaatgaatgaaaagtgtgataaagaaatcaaagtttcctacacggtgtacaacagactgtcattgctgctgaagtcccttcttgctataactagggtgacaccagcctataggctctccaggaaacaagggcatgaatatgtcatattatacaggatatattttggagaagttcagctgagtggcttaggagaaggcttccagacagttcgtgttgggacagtgggcacccctgtgggcaccatcactctttcttgtgcttacagaattaacttggcattcatgtctaccaggcaatttgagaggaccccacctatcatggggattattattgatcactttgtggaccgtccctatcccagctcctctcccatgcacccctgcaattacagaactgctggtgaggacactggagtaatatacccgtctgtagaagactctcaagaagtgtgtaccacctctttttccacctccccaccatcccagctgatggttcctgggaaggaaggtggggtaccccttgctcccaaccagcctgtccatggtacccaggctgaccaggagagactggcaacctgcaccccttctgacagaacccactgtgctgccacaccctccagtagtgaggatactgaaaccgtatcaaacagcagtgagggacgggcctcccctcacgatgtcttggagaccatctttgtccgaaaagtgggggcttttgtcaacaaacccattaaccaggtgaccctgacgagtttggatataccctttgccatgtttgctcccaagaatttggagctggaggataccgatccaatggtgagcccaccgttgactacgagttcccagtagatggtgcgctagtcattgttcttcctgagccagagtcactaatcccccacagactataaaccatggcccctcggcttacgggtgaatcctccagattccccagagactgaatctcctctccagggcagcctgcactcagatggctccagcgggggcagcagtggcaatacccatgatgactttgttatgatagactttaaaccagctttttctaaagatgacattcttccgatggacctggggaccttctatcgggagtttcagaacccacctcagctgagcagcctctccatagatattggagcacagtccatggctgaagacttggactcattaccagagaagctggctgtgcatgagaagaatgtccgcgagtttgatgcctttgtggaaaccctgcagtaaaagtatccttgagtcccagcagcaccccctttttgtggccccagggcataagcagcctcccatgcatcagctgctcccacccctcatcctgctctgagccaggtggaagggaggctggcttctcccatggggacccagaagtccctactcttggacctcctggagactccgtggcggcagtcaagcccagtgcccagttggagaagactcacgtgctggccttggagatgggaagaaccttcgtacgaaaaagccctcagcagggccatctgtgtgccctgcccatcaccaactgcttcccaagggtgtcatcctgttcctcctgctgccggcctcctgcctgggcctgccttgcagctggccccttccctgcctgctgtcaccatccactgtttgacattccagctggtggccaagagattggtgtggaggcagaaagaggaaggagacagtgccaggaggaagaaggaaggagtcccttagctctcttcattgtcccctttacttcctgctatcttcttctcctcttcttctctctcttgcctctatgcctgtatttctggcaatatgacaggcctgcctacccaagatcagaactccaaaaccactcccacccctgaaggtcgggagggtctgagcagccctggtggctgcctgtgctcaggtcctcagctccatgggaaataaaaatggcaccctgaatctctaggattttgtcacttggagtcacagcaaagttctcttcctcttgtccccccgttgctgctccttggttatagaacatggtaaatatttattactttcagagaaaccagatattttatagaggaaatatgtttgaggtgagttgtttttcacttggagaaggcggagggctcttcctgggacggagacctcctcctccggaggttattgagaatccgggctgctgctttgaggatcttcccaccatacagacagcgagatccaagaagagggctggccgggggcaaagtcacctcccagtgtggctgcactggaactgactaaaggctttaccttggatagttgcgtattcctggtgagagccttacatctcccacagtttctgcagagtgactgactccattctggcagcccaggaagtcctgggtgctaaatgtgatggccacatgtagtggttaggggatgttgtgtgtgtcccccaactgcctgggtacttgttcctgatccctggggctgtcctgtggagcttttcctcctgcttgggcctagctaccatctccctctaatcccaggttctctacactgccctggggtttaccagctggattggcttctggttgagaaatcaaagctgggcgtatgattgacttaacccttcaggtattgttacttgaataagtcaagtgcctagcctcacccacctatgatctgtcctttcccagcctcgctggtagtcctggtcaaggagatctaggtctactccattcctcctggcccacctggggcattcactggcagcagctgtgcttcagtggagcaggtggttctcagctgcttgttagtatactgcatgtgacactgttcccacatacaaggctgacttctgaggattggagcaggctctggcggggaccagagctctgcgtgctgctgctgccaccaagaagtgttagcagaagcagtagcagccaactggccctcctgactttggcccagagcacatgcgtggcttgctgaacccaggctcaggtttatccccaaggccccagctttgagaagggggaaggcccctggtaagttattgatgcccccatatttcagctactgctctctttccaaggccttgcatggaaaggcctagccattgtctgaggcagcaatctttggcatctacaggtggcagcagcctttcaccagggctccatctgtgaagagtctcagccatgactttgagctgagcttgggagaagtaaagcaactgttaaggccagcccttgcccctcagacctgccatgaaaggaatgagccctagactgactcctgcagcacccccgggacaggctgggaccagctgtttgtctccaggtgtcagagtccctcctcctcctccaacctctccaacctactttgtttggaaataccgagctacacttcaaaatgtattcaagggatttccaataaatttttttctgta

SEQ ID NO: 612307 - DNA, 443 bp, Homo sapiens
gggaattaaatacatttaagaactgtgttggcttggttcagaaaggtgggaaaacctaaagtgggggcttccaggctataggtaaatttaaacattttgtggctgacaattgggtgagtttatttgaagacctgggattaatggcaaggaatgttcaggttaaggtaaagctttgtggagaccaagttttattgtgcaccggtatctctcagacaccagacgtcagagagagagcaggttgtaaaatatgtcttagacctaaaagggtatgtggctcttagttgattgtctcctggatctgggaaggaaggaaagaaaacaaagaggaaatggggttctttatagaatgtggatttttcctacaagagacttttcagggcaatttcaaggtatggcggtatatttttgggtcattttgattttcttcttgttatgccaggtct

SEQ ID NO: 612308 - DNA, 3918 bp, Homo sapiens
ggcacgaggctttcacccccccccccccggccattaccgaagcggatgaaaacaaacactaacgatggcggcgccgggaagcgaccggctgctgggcttaaggcgggagtgaccgcttaaccagtgagggaagcactgaagagcgccagtcgacgtgggtgcgacaactcgcggagtcttaggagcaaaacgtctggggcctgcgagccaggacccttctgaagccttaggtgtctatcggcgacgtgtacggtcactgcagctccggagcgcggaaccctcagccaggaggcgcggctggtcggtcccaggtcccggcctccgtaatgagagcccggaaccactctttgtgccgcagcttcgcagcatcttggactcaagtgattctcctgcctcagcctcctgagtagctgggactacagattcctataggcaatggaaactgatctcaattcccaggacagaaaggacctggacaagtttattaaattttttgccctcaagactgtccaagtgattgtccaggctcggcttggtgaaaagatttgcactcgttcatcatcttctccaacgggttcagattggttcaacttagcaatcaaagacatcccagaggttacacatgaagcaaagaaggcactggcaggacagctgcctgcagtcgggaggtccatgtgtgtggagatttcacttaagacttctgagggagattccatggagctggaaatatggtgtcttgaaatgaatgaaaagtgtgataaagaaatcaaagtttcctacacggtgtacaacagactgtcattgctgctgaagtcccttcttgctataactagggtgacaccagcctataggctctccaggaaacaagggcatgaatatgtcatattatacaggatatattttggagaagttcagctgagtggcttaggagaaggcttccagacagttcgtgttgggacagtgggcacccctgtgggcaccatcactctttcttgtgcttacagaattaacttggcattcatgtctaccaggcaatttgagaggaccccacctatcatggggattattattgatcactttgtggaccgtccctatcccagctcctctcccatgcacccctgcaattacagaactgctggtgaggacactggagtaatatacccgtctgtagaagactctcaagaagtgtgtaccacctctttttccacctccccaccatcagtgaggatactgaaaccgtatcaaacagcagtgagggacgggcctcccctcacgatgtcttggagaccatctttgtccgaaaagtgggggcttttgtcaacaaacccattaaccaggtgaccctgacgagtttggatataccctttgccatgtttgctcccaagaatttggagctggaggataccgatccaatggtgaatcctccagattccccagagactgaatctcctctccagggcagcctgcactcagatggctccagcgggggcagcagtggcaatacccatgatgactttgttatgatagactttaaaccagctttttctaaagatgacattcttccgatggacctggggaccttctatcgggagtttcagaacccacctcagctgagcagcctctccatagatattggagcacagtccatggctgaagacttggactcattaccagagaagctggctgtgcatgagaagaatgtccgcgagtttgatgcctttgtggaaaccctgcagtaaaagtatccttgagtcccagcagcaccccctttttgtggccccagggcataagcagcctcccatgcatcagctgctcccacccctcatcctgctctgagccaggtggaagggaggctggcttctcccatggggacccagaagtccctactcttggacctcctggagactccgtggcggcagtcaagcccagtgcccagttggagaagactcacgtgctggccttggagatgggaagaaccttcgtacgaaaaagccctcagcagggccatctgtgtgccctgcccatcaccaactgcttcccaagggtgtcatcctgttcctcctgctgccggcctcctgcctgggcctgccttgcagctggccccttccctgcctgctgtcaccatccactgtttgacattccagctggtggccaagagattggtgtggaggcagaaagaggaaggagacagtgccaggaggaagaaggaaggagtcccttagctctcttcattgtcccctttacttcctgctatcttcttctcctcttcttctctctcttgcctctatgcctgtatttctggcaatatgacaggcctgcctacccaagatcagaactccaaaaccactcccacccctgaaggtcgggagggtctgagcagccctggtggctgcctgtgctcaggtcctcagctccatgggaaataaaaatggcaccctgaatctctaggattttgtcacttggagtcacagcaaagttctcttcctcttgtccccccgttgctgctccttggttatagaacatggtaaatatttattactttcagagaaaccagatattttatagaggaaatatgtttgaggtgagttgtttttcacttggagaaggcggagggctcttcctgggacggagacctcctcctccggaggttattgagaatccgggctgctgctttgaggatcttcccaccatacagacagcgagatccaagaagagggctggccgggggcaaagtcacctcccagtgtggctgcactggaactgactaaaggctttaccttggatagttgcgtattcctggtgagagccttacatctcccacagtttctgcagagtgactgactccattctggcagcccaggaagtcctgggtgctaaatgtgatggccacatgtagtggttaggggatgttgtgtgtgtcccccaactgcctgggtacttgttcctgatccctggggctgtcctgtggagcttttcctcctgcttgggcctagctaccatctccctctaatcccaggttctctacactgccctggggtttaccagctggattggcttctggttgagaaatcaaagctgggcgtatgattgacttaacccttcaggtattgttacttgaataagtcaagtgcctagcctcacccacctatgatctgtcctttcccagcctcgctggtagtcctggtcaaggagatctaggtctactccattcctcctggcccacctggggcattcactggcagcagctgtgcttcagtggagcaggtggttctcagctgcttgttagtatactgcatgtgacactgttcccacatacaaggctgacttctgaggattggagcaggctctggcggggaccagagctctgcgtgctgctgctgccaccaagaagtgttagcagaagcagtagcagccaactggccctcctgactttggcccagagcacatgcgtggcttgctgaacccaggctcaggtttatccccaaggccccagctttgagaagggggaaggcccctggtaagttattgatgcccccatatttcagctactgctctctttccaaggccttgcatggaaaggcctagccattgtctgaggcagcaatctttggcatctacaggtggcagcagcctttcaccagggctccatctgtgaagagtctcagccatgactttgagctgagcttgggagaagtaaagcaactgttaaggccagcccttgcccctcagacctgccatgaaaggaatgagccctagactgactcctgcagcacccccgggacaggctgggaccagctgtttgtctccaggtgtcagagtccctcctcctcctccaacctctccaacctactttgtttggaaataccgagctacacttcaaaatgtattcaagggatttccaataaatttttttctgta

SEQ ID NO: 612309 - DNA, 776 bp, Homo sapiens
cgtggtgcctcacgtgtaatcttactacttgggaggctgaggcaggcagactgactgagctcaggagttcaagaccagcctgggcaacatggcgaaaccccatctctactaaaaatacaaaaaattagccaggcgtggtggtgtgcgcctgtaatcccaactactggggaggctgaggcacgagaatagcttgaacccgggaggtggaggttgcggtgagccgagatcgtgccagttcactaaagcctgggtgacagagtgagactctgtctcaaaaaaaataaaaataaaaataaaaataaaaataaaaatacaaaaactagctgagcatggtggcatgtgccggtagtcccagctacttcgggggctgaggcaggagaatcgcttcagcctgcaaggttgaggctgcagtgagccatgtttgcaccactgcactccagcctgggcaacaaaagtgagacccctgtctttaaaataaaaaaagaacatatgaagccacaggatactaagtccaacacatggcgtaacagaaccacatcctaaagactacctaaaagacaaacatgagggatttcctttattacagtggccatttgcttgtggtgcactcagggtactaatttacatttatatttttaaaacacagataacatattcaccaagaacgaacattccacaggctgggaagtgagaattttcttctcagtactgggtcccgcacacatccttccaaggaacgcgcatatacaggttctgggttccaaagatgggttact

SEQ ID NO: 612310 - DNA, 3973 bp, Homo sapiens
ggcacgaggctttcacccccccccccccggccattaccgaagcggatgaaaacaaacactaacgatggcggcgccgggaagcgaccggctgctgggcttaaggcgggagtgaccgcttaaccagtgagggaagcactgaagagcgccagtcgacgtgggtgcgacaactcgcggagtcttaggagcaaaacgtctggggcctgcgagccaggacccttctgaagccttaggtgtctatcggcgacgtgtacggtcactgcagctccggagcgcggaaccctcagccaggaggcgcggctggtcggtcccaggtcccggcctccgtaatgagagcccggaaccactctttgtgccgcagcttcgcagcatcttggactcaagtgattctcctgcctcagcctcctgagtagctgggactacagattcctataggcaatggaaactgatctcaattcccaggacagaaaggacctggacaagtttattaaattttttgccctcaagactgtccaagtgattgtccaggctcggcttggtgaaaagatttgcactcgttcatcatcttctccaacgggttcagattggttcaacttagcaatcaaagacatcccagaggttacacatgaagcaaagaaggcactggcaggacagctgcctgcagtcgggaggtccatgtgtgtggagatttcacttaagacttctgagggagattccatggagctggaaatatggtgtcttgaaatgaatgaaaagtgtgataaagaaatcaaagtttcctacacggtgtacaacagactgtcattgctgctgaagtcccttcttgctataactagggtgacaccagcctataggctctccaggaaacaagggcatgaatatgtcatattatacaggatatattttggagaagttcagctgagtggcttaggagaaggcttccagacagttcgtgttgggacagtgggcacccctgtgggcaccatcactctttcttgtgcttacagaattaacttggcattcatgtctaccaggcaatttgagaggaccccacctatcatggggattattattgatcactttgtggaccgtccctatcccagctcctctcccatgcacccctgcaattacagaactgctggtgaggacactggagtaatatacccgtctgtagaagactctcaagaagtgtgtaccacctctttttccacctccccaccatcccagctgatggttcctgggaaggaaggtggggtaccccttgctcccaaccagcctgtccatggtacccaggctgaccaggagagactggcaacctgcaccccttctgacagaacccactgtgctgccacaccctccagtagtgaggatactgaaaccgtatcaaacagcagtgagggacgggcctcccctcacgatgtcttggagaccatctttgtccgaaaagtgggggcttttgtcaacaaacccattaaccaggtgaccctgacgagtttggatataccctttgccatgtttgctcccaagaatttggagctggaggataccgatccaatggtgaatcctccagattccccagagactgaatctcctctccagggcagcctgcactcagatggctccagcgggggcagcagtggcaatacccatgatgactttgttatgatagactttaaaccagctttttctaaagatgacattcttccgatggacctggggaccttctatcgggagtttcagaacccacctcagctgagcagcctctccatagatattggagcacagtccatggctgaagacttggactcattaccagagaagctggctgtgcatgagaagaatgtccgcgagtttgatgcctttgtggaaaccctgcagtaaaagtatccttgagtcccagcagcaccccctttttgtggccccagggcataagcagcctcccatgcatcagctgctcccacccctcatcctgctctgagccaggtggaagggaggctggcttctcccatggggacccagaagtccctactcttggacctcctggagactccgtggcggcagtcaagcccagtgccctgcccatcaccaactgcttcccaagggtgtcatcctgttcctcctgctgccggcctcctgcctgggcctgccttgcagctggccccttccctgcctgctgtcaccatccactgtttgacattccagctggtggccaagagattggtgtggaggcagaaagaggaaggagacagtgccaggaggaagaaggaaggagtcccttagctctcttcattgtcccctttacttcctgctatcttcttctcctcttcttctctctcttgcctctatgcctgtatttctggcaatatgacaggcctgcctacccaagatcagaactccaaaaccactcccacccctgaaggtcgggagggtctgagcagccctggtggctgcctgtgctcaggtcctcagctccatgggaaataaaaatggcaccctgaatctctaggattttgtcacttggagtcacagcaaagttctcttcctcttgtccccccgttgctgctccttggttatagaacatggtaaatatttattactttcagagaaaccagatattttatagaggaaatatgtttgaggtgagttgtttttcacttggagaaggcggagggctcttcctgggacggagacctcctcctccggaggttattgagaatccgggctgctgctttgaggatcttcccaccatacagacagcgagatccaagaagagggctggccgggggcaaagtcacctcccagtgtggctgcactggaactgactaaaggctttaccttggatagttgcgtattcctggtgagagccttacatctcccacagtttctgcagagtgactgactccattctggcagcccaggaagtcctgggtgctaaatgtgatggccacatgtagtggttaggggatgttgtgtgtgtcccccaactgcctgggtacttgttcctgatccctggggctgtcctgtggagcttttcctcctgcttgggcctagctaccatctccctctaatcccaggttctctacactgccctggggtttaccagctggattggcttctggttgagaaatcaaagctgggcgtatgattgacttaacccttcaggtattgttacttgaataagtcaagtgcctagcctcacccacctatgatctgtcctttcccagcctcgctggtagtcctggtcaaggagatctaggtctactccattcctcctggcccacctggggcattcactggcagcagctgtgcttcagtggagcaggtggttctcagctgcttgttagtatactgcatgtgacactgttcccacatacaaggctgacttctgaggattggagcaggctctggcggggaccagagctctgcgtgctgctgctgccaccaagaagtgttagcagaagcagtagcagccaactggccctcctgactttggcccagagcacatgcgtggcttgctgaacccaggctcaggtttatccccaaggccccagctttgagaagggggaaggcccctggtaagttattgatgcccccatatttcagctactgctctctttccaaggccttgcatggaaaggcctagccattgtctgaggcagcaatctttggcatctacaggtggcagcagcctttcaccagggctccatctgtgaagagtctcagccatgactttgagctgagcttgggagaagtaaagcaactgttaaggccagcccttgcccctcagacctgccatgaaaggaatgagccctagactgactcctgcagcacccccgggacaggctgggaccagctgtttgtctccaggtgtcagagtccctcctcctcctccaacctctccaacctactttgtttggaaataccgagctacacttcaaaatgtattcaagggatttccaataaatttttttctgta

SEQ ID NO: 612311 - DNA, 3702 bp, Homo sapiens
ggcacgaggctttcacccccccccccccggccattaccgaagcggatgaaaacaaacactaacgatggcggcgccgggaagcgaccggctgctgggcttaaggcgggagtgaccgcttaaccagtgagggaagcactgaagagcgccagtcgacgtgggtgcgacaactcgcggagtcttaggagcaaaacgtctggggcctgcgagccaggacccttctgaagccttaggtgtctatcggcgacgtgtacggtcactgcagctccggagcgcggaaccctcagccaggaggcgcggctggtcggtcccaggtcccggcctccgtaatgagagcccggaaccactctttgtgccgcagcttcgcagcatcttggactcaagtgattctcctgcctcagcctcctgagtagctgggactacagattcctataggcaatggaaactgatctcaattcccaggacagaaaggacctggacaagtttattaaattttttgccctcaagactgtccaagtgattgtccaggctcggcttggtgaaaagatttgcactcgttcatcatcttctccaacgggttcagattggttcaacttagcaatcaaagacatcccagaggttacacatgaagcaaagaaggcactggcaggacagctgcctgcagtcgggaggtccatgtgtgtggagatttcacttaagacttctgagggagattccatggagctggaaatatggtgtcttgaaatgaatgaaaagtgtgataaagaaatcaaagtttcctacacggtgtacaacagactgtcattgctgctgaagtcccttcttgctataactagggtgacaccagcctataggctctccaggaaacaagggcatgaatatgtcatattatacaggatatattttggagaagttcagctgagtggcttaggagaaggcttccagacagttcgtgttgggacagtgggcacccctgtgggcaccatcactctttcttgtgcttacagaattaacttggcattcatgtctaccaggcaatttgagaggaccccacctatcatggggattattattgatcactttgtggaccgtccctatcccagctcctctcccatgcacccctgcaattacagaactgctggtgaggacactggagtaatatacccgtctgtagaagactctcaagaagtgtgtaccacctctttttccacctccccaccatcccagctgatggttcctgggaaggaaggtggggtaccccttgctcccaaccagcctgtccatggtacccaggctgaccaggagagactggcaacctgcaccccttctgacagaacccactgtgctgccacaccctccagtagtgaggatactgaaaccgtatcaaacagcagtgagggacgggcctcccctcacgatgtcttggagaccatctttgtccgaaaagtgggggcttttgtcaacaaacccattaaccaggtgaccctgacgagtttggatataccctttgccatgtttgctcccaagaatttggagctggaggataccgatccaatggtgaatcctccagattccccagagactgaatctcctctccagggcagcctgcactcagatggctccagcgggggcagcagtggcaatacccatgatgactttgttatgatagactttaaaccagctttttctaaagatgacattcttccgatggacctggggaccttctatcgggagtttcagaacccacctcagctgagcagcctctccatagatattggagcacagtccatggctgaagacttggactcattaccagagaagctggctgtgcatgagaagaatgtccgcgagtttgatgcctttgtggaaaccctgcagtaaaagtatccttgagtcccagcagcaccccctttttgtggccccagggcataagcagcctcccatgcatcagctgctcccacccctcatcctgctctgagccaggtggaagggaggctggcttctcccatggggacccagaagtccctactcttggacctcctggagactccgtggcggcagtcaagcccagtgcccagttggagaagactcacgtgctggccttggagatgggaagaaccttcgtacgaaaaagccctcagcagggccatctgtgtgccctgcccatcaccaactgcttcccaagggtgtcatcctgttcctcctgctgccggcctcctgcctgggcctgccttgcagctggccccttccctgcctgctgtcaccatccactgtttgacattccagctggtggccaagagattggtgtggaggcagaaagaggaaggagacagtgccaggaggaagaaggaaggagtcccttagctctcttcattgtcccctttacttcctgctatcttcttctcctcttcttctctctcttgcctctatgcctgtatttctggcaatatgacaggcctgcctacccaagatcagaactccaaaaccactcccacccctgaaggtcgggagggtctgagcagccctggtggctgcctgtgctcaggtcctcagctccatgggaaataaaaatggcaccctgaatctctaggattttgtcacttggagtcacagcaaagttctcttcctcttgtccccccgttgctgctccttggttatagaacatggtaaatatttattactttcagagaaaccagatattttatagaggaaatatgtttgaggtgagttgtttttcacttggagaaggcggagggctcttcctgggacggagacctcctcctccggaggttattgagaatccgggctgctgctttgaggatcttcccaccatacagacagcgagatccaagaagagggctggccgggggcaaagtcacctcccagtgtggctgcactggaactgactaaaggctttaccttggatagttgcgtattcctggtgagagccttacatctcccacagtttctgcagagtgactgactccattctggcagcccaggaagtcctgggtgctaaatgtgatggccacatgtagtggttaggggatgttgtgtgtgtcccccaactgcctgggtacttgttcctgatccctggggctgtcctgtggagcttttcctcctgcttgggcctagctaccatctccctctaatcccaggttctctacactgccctggggtttaccagctggattggcttctggttgagaaatcaaagctgggcgtatgattgacttaacccttcaggtattgttacttgaataagtcaagtgcctagcctcacccacctatgatctgtcctttcccagcctcgctggtagtcctggtcaaggagatctaggtctactccattcctcctggcccacctggggcattcactggcagcagctgtgcttcagtggagcaggtggttctcagctgcttgttagtatactgcatgtgacactgttcccacatacaaggctgacttctgaggattggagcaggctctggcggggaccagagctctgcgtgctgctgctgccaccaagaagtgttagcagaagcagtagcagccaactggccctcctgactttggcccagagcacatgcgtggcttgctgaacccaggctcaggtttatccccaaggccccagctttgagaaggggcaacgtcatgttcatgctcctatgcccccctgtgtggtatccgcggaaggggttctt

SEQ ID NO: 612312 - DNA, 186 bp, Homo sapiens
cgcgcgcgatatctcccttagcgggctcctttttcgaacgaaggtcggctacacccaggtgattaaaagcttgatggctcacccaatagcctgtggggtggtctcttcacactgacgcgcgttaacagaatgaagggatagaaaagtcttctgagctactcttttaaggaaaaaagcttatcggcc

SEQ ID NO: 612313 - DNA, 3478 bp, Homo sapiens
ggcacgaggctttcacccccccccccccggccattaccgaagcggatgaaaacaaacactaacgatggcggcgccgggaagcgaccggctgctgggcttaaggcgggagtgaccgcttaaccagtgagggaagcactgaagagcgccagtcgacgtgggtgcgacaactcgcggagtcttaggagcaaaacgtctggggcctgcgagccaggacccttctgaagccttaggtgtctatcggcgacgtgtacggtcactgcagctccggagcgcggaaccctcagccaggaggcgcggctggtcggtcccaggtcccggcctccgtaatgagagcccggaaccactctttgtgccgcagcttcgcagcatcttggactcaagtgattctcctgcctcagcctcctgagtagctgggactacagattcctataggcaatggaaactgatctcaattcccaggacagaaaggacctggacaagtttattaaattttttgccctcaagactgtccaagtgattgtccaggctcggcttggtgaaaagatttgcactcgttcatcatcttctccaacgggttcagattggttcaacttagcaatcaaagacatcccagaggttacacatgaagcaaagaaggcactggcaggacagctgcctgcagtcgggaggtccatgtgtgtggagatttcacttaagacttctgagggagattccatggagctggaaatatggtgtcttgaaatgaatgaaaagtgtgataaagaaatcaaagtttcctacacggtgtacaacagactgtcattgctgctgaagtcccttcttgctataactagggtgacaccagcctataggctctccaggaaacaagggcatgaatatgtcatattatacaggatatattttggagaagttcagctgagtggcttaggagaaggcttccagacagttcgtgttgggacagtgggcacccctgtgggcaccatcactctttcttgtgcttacagaattaacttggcattcatgtctaccaggcaatttgagaggaccccacctatcatggggattattattgatcactttgtggaccgtccctatcccagctcctctcccatgcacccctgcaattacagaactgctggtgaggacactggagtaatatacccgtctgtagaagactctcaagaagtgtgtaccacctctttttccacctccccaccatcggactcattaccagagaagctggctgtgcatgagaagaatgtccgcgagtttgatgcctttgtggaaaccctgcagtaaaagtatccttgagtcccagcagcaccccctttttgtggccccagggcataagcagcctcccatgcatcagctgctcccacccctcatcctgctctgagccaggtggaagggaggctggcttctcccatggggacccagaagtccctactcttggacctcctggagactccgtggcggcagtcaagcccagtgcccagttggagaagactcacgtgctggccttggagatgggaagaaccttcgtacgaaaaagccctcagcagggccatctgtgtgccctgcccatcaccaactgcttcccaagggtgtcatcctgttcctcctgctgccggcctcctgcctgggcctgccttgcagctggccccttccctgcctgctgtcaccatccactgtttgacattccagctggtggccaagagattggtgtggaggcagaaagaggaaggagacagtgccaggaggaagaaggaaggagtcccttagctctcttcattgtcccctttacttcctgctatcttcttctcctcttcttctctctcttgcctctatgcctgtatttctggcaatatgacaggcctgcctacccaagatcagaactccaaaaccactcccacccctgaaggtcgggagggtctgagcagccctggtggctgcctgtgctcaggtcctcagctccatgggaaataaaaatggcaccctgaatctctaggattttgtcacttggagtcacagcaaagttctcttcctcttgtccccccgttgctgctccttggttatagaacatggtaaatatttattactttcagagaaaccagatattttatagaggaaatatgtttgaggtgagttgtttttcacttggagaaggcggagggctcttcctgggacggagacctcctcctccggaggttattgagaatccgggctgctgctttgaggatcttcccaccatacagacagcgagatccaagaagagggctggccgggggcaaagtcacctcccagtgtggctgcactggaactgactaaaggctttaccttggatagttgcgtattcctggtgagagccttacatctcccacagtttctgcagagtgactgactccattctggcagcccaggaagtcctgggtgctaaatgtgatggccacatgtagtggttaggggatgttgtgtgtgtcccccaactgcctgggtacttgttcctgatccctggggctgtcctgtggagcttttcctcctgcttgggcctagctaccatctccctctaatcccaggttctctacactgccctggggtttaccagctggattggcttctggttgagaaatcaaagctgggcgtatgattgacttaacccttcaggtattgttacttgaataagtcaagtgcctagcctcacccacctatgatctgtcctttcccagcctcgctggtagtcctggtcaaggagatctaggtctactccattcctcctggcccacctggggcattcactggcagcagctgtgcttcagtggagcaggtggttctcagctgcttgttagtatactgcatgtgacactgttcccacatacaaggctgacttctgaggattggagcaggctctggcggggaccagagctctgcgtgctgctgctgccaccaagaagtgttagcagaagcagtagcagccaactggccctcctgactttggcccagagcacatgcgtggcttgctgaacccaggctcaggtttatccccaaggccccagctttgagaagggggaaggcccctggtaagttattgatgcccccatatttcagctactgctctctttccaaggccttgcatggaaaggcctagccattgtctgaggcagcaatctttggcatctacaggtggcagcagcctttcaccagggctccatctgtgaagagtctcagccatgactttgagctgagcttgggagaagtaaagcaactgttaaggccagcccttgcccctcagacctgccatgaaaggaatgagccctagactgactcctgcagcacccccgggacaggctgggaccagctgtttgtctccaggtgtcagagtccctcctcctcctccaacctctccaacctactttgtttggaaataccgagctacacttcaaaatgtattcaagggatttccaataaatttttttctgta

SEQ ID NO: 612314 - DNA, 3272 bp, Homo sapiens
ggcacgaggctttcacccccccccccccggccattaccgaagcggatgaaaacaaacactaacgatggcggcgccgggaagcgaccggctgctgggcttaaggcgggagtgaccgcttaaccagtgagggaagcactgaagagcgccagtcgacgtgggtgcgacaactcgcggagtcttaggagcaaaacgtctggggcctgcgagccaggacccttctgaagccttaggtgtctatcggcgacgtgtacggtcactgcagctccggagcgcggaaccctcagccaggaggcgcggctggtcggtcccaggtcccggcctccgtaatgagagcccggaaccactctttgtgccgcagcttcgcagcatcttggactcaagtgattctcctgcctcagcctcctgagtagctgggactacagattcctataggcaatggaaactgatctcaattcccaggacagaaaggacctggacaagtttattaaattttttgccctcaagactgtccaagtgattgtccaggctcggcttggtgaaaagatttgcactcgttcatcatcttctccaacgggttcagattggttcaacttagcaatcaaagacatcccagaggttacacatgaagcaaagaaggcactggcaggacagctgcctgcagtcgggaggtccatgtgtgtggagatttcacttaagacttctgagggagattccatggagctggaaatatggtgtcttgaaatgaatgaaaagtgtgataaagaaatcaaagtttcctacacggtgtacaacagactgtcattgctgctgaagtcccttcttgctataactagggtgacaccagcctataggctctccaggaaacaagggcatgaatatgtcatattatacaggatatattttggagaagttcagctgagtggcttaggagaaggcttccagacagttcgtgttgggacagtgggcacccctgtgggcaccatcactctttcttgtgcttacagaattaacttggcattcatgtctaccaggcaatttgagaggaccccacctatcatggggattattattgatcactttgtggaccgtccctatcccagctcctctcccatgcacccctgcaattacagaactgctggtgaggacactggagtaatatacccgtctgtagaagactctcaagaagtgtgtaccacctctttttccacctccccaccatcccagctgatggttcctgggaaggaaggtggggtaccccttgctcccaaccagcctgtccatggtacccaggctgaccaggagagactggcaacctgcaccccttctgacagaacccactgtgctgccacaccctccagtagtgaggatactgaaaccgtatcaaacagcagtgagggacgggcctcccctcacgatgtcttggagaccatctttgtccgaaaagtgggggcttttgtcaacaaacccattaaccaggtgaccctgacgagtttggatataccctttgccatgtttgctcccaagaatttggagctggaggataccgatccaatggtgaatcctccagattccccagagactgaatctcctctccagggcagcctgcactcagatggctccagcgggggcagcagtggcaatacccatgatgactttgttatgatagactttaaaccagctttttctaaagatgacattcttccgatggacctggggaccttctatcgggagtttcagaacccacctcagctgagcagcctctccatagatattggagcacagtccatggctgaagacttggactcattaccagagaagctggctgtgcatgagaagaatgtccgcgagtttgatgcctttgtggaaaccctgcagtaaaagtatccttgagtcccagcagcaccccctttttgtggccccagggcataagcagcctcccatgcatcagctgctcccacccctcatcctgctctgagccaggtggaagggaggctggcttctcccatggggacccagaagtccctactcttggacctcctggagactccgtggcggcagtcaagcccagtgcccagttggagaagactcacgtgctggccttggagatgggaagaaccttcgtacgaaaaagccctcagcagggccatctgtgtgccctgcccatcaccaactgcttcccaagggtgtcatcctgttcctcctgctgccggcctcctgcctgggcctgccttgcagctggccccttccctgcctgctgtcaccatccactgtttgacattccagctggtggccaagagattggtgtggaggcagaaagaggaaggagacagtgccaggaggaagaaggaaggagtcccttagctctcttcattgtcccctttacttcctgctatcttcttctcctcttcttctctctcttgcctctatgcctgtatttctggcaatatgacaggcctgcctacccaagatcagaactccaaaaccactcccacccctgaaggtcgggagggtctgagcagccctggtggctgcctgtgctcaggtcctcagctccatgggaaataaaaatggcaccctgaatctctaggattttgtcacttggagtcacagcaaagttctcttcctcttgtccccccgttgctgctccttggttatagaacatggtaaatatttattactttcagagaaaccagatattttatagaggaaatatgtttgaggtgagttgtttttcacttggagaaggcggagggctcttcctgggacggagacctcctcctccggaggttattgagaatccgggctgctgctttgaggatcttcccaccatacagacagcgagatccaagaagagggctggccgggggcaaagtcacctcccagtgtggctgcactggaactgactaaaggctttaccttggatagttgcgtattcctggtgagagccttacatctcccacagtttctgcagagtgactgactccattctggcagcccaggaagtcctgggtgctaaatgtgatggccacatgtagtggttaggggatgttgtgtgtgtcccccaactgcctgggtacttgttcctgatccctggggctgtcctgtggagcttttcctcctgcagcacccccgggacaggctgggaccagctgtttgtctccaggtgtcagagtccctcctcctcctccaacctctccaacctactttgtttggaaataccgagctacacttcaaaatgtattcaagggatttccaataaatttttttctgta

SEQ ID NO: 612315 - DNA, 713 bp, Homo sapiens
  misc_feature (8)..(8): n is a, c, g, or t
  misc_feature (87)..(87): n is a, c, g, or t
  misc_feature (102)..(102): n is a, c, g, or t
  misc_feature (142)..(142): n is a, c, g, or t
  misc_feature (168)..(168): n is a, c, g, or t
  misc_feature (237)..(237): n is a, c, g, or t
  misc_feature (243)..(243): n is a, c, g, or t
  misc_feature (300)..(300): n is a, c, g, or t
  misc_feature (335)..(335): n is a, c, g, or t
  misc_feature (348)..(348): n is a, c, g, or t
  misc_feature (353)..(353): n is a, c, g, or t
  misc_feature (370)..(370): n is a, c, g, or t
  misc_feature (372)..(372): n is a, c, g, or t
  misc_feature (459)..(459): n is a, c, g, or t
  misc_feature (480)..(480): n is a, c, g, or t
  misc_feature (493)..(493): n is a, c, g, or t
  misc_feature (497)..(497): n is a, c, g, or t
  misc_feature (525)..(525): n is a, c, g, or t
  misc_feature (536)..(536): n is a, c, g, or t
  misc_feature (539)..(539): n is a, c, g, or t
  misc_feature (595)..(595): n is a, c, g, or t
  misc_feature (606)..(606): n is a, c, g, or t
  misc_feature (623)..(623): n is a, c, g, or t
  misc_feature (632)..(632): n is a, c, g, or t
  misc_feature (699)..(699): n is a, c, g, or t
aggaagtnctgggccgcccagagggacagccctgccctggagcatgtcgccgggagggaagggaaacaagccccccccctcagtgcngaggaaaaggcactnggctgggtctcctcctgccctctccccatccgtgggaganacggggtccttgcctccttgcccctntcagccgcccagaagccggtcctggttcagcctctggaagaagcttttgccgaactcataggtgccgancatganggcacaggagggggcagccttgaagaaccgaggaaggaagcctgccaagagtccctnggtgcccgactcggcccggatcctccgcagcagcngccagggggagtncacangcagggggttcactctnanagcctccatcgctcccagagcgacccggcgttgggtctttaccacgtcaaagggtagagtaagcactgcagccaccgtcccttaaangccaccagccacaaagctcangcccacagaagtntggnccttcggcctgagcccattgagccagcncttcaccagcncanagttgaaccagttcagggctgagaagggcacaactcgaagggcagttgggccccancccagccacanttagccccaccaccctngagccactncagttcgaacacaggcacccagcacccggtacgacaaaagctgaacctgcagctttgttcgcataanctccaggggggtga

SEQ ID NO: 612316 - DNA, 3982 bp, Homo sapiens
ggcacgaggctttcacccccccccccccggccattaccgaagcggatgaaaacaaacactaacgatggcggcgccgggaagcgaccggctgctgggcttaaggcgggagtgaccgcttaaccagtgagggaagcactgaagagcgccagtcgacgtgggtgcgacaactcgcggagtcttaggagcaaaacgtctggggcctgcgagccaggacccttctgaagccttaggtgtctatcggcgacgtgtacggtcactgcagctccggagcgcggaaccctcagccaggaggcgcggctggtcggtcccaggtcccggcctccgtaatgagagcccggaaccactctttgtgccgcagcttcgcagcatcttggactcaagtgattctcctgcctcagcctcctgagtagctgggactacagattcctataggcaatggaaactgatctcaattcccaggacagaaaggacctggacaagtttattaaattttttgccctcaagactgtccaagtgattgtccaggctcggcttggtgaaaagatttgcactcgttcatcatcttctccaacgggttcagattggttcaacttagcaatcaaagacatcccagaggttacacatgaagcaaagaaggcactggcaggacagctgcctgcagtcgggaggtccatgtgtgtggagatttcacttaagacttctgagggagattccatggagctggaaatatggtgtcttgaaatgaatgaaaagtgtgataaagaaatcaaagtttcctacacggtgtacaacagactgtcattgctgctgaagtcccttcttgctataactagggtgacaccagcctataggctctccaggaaacaagggcatgaatatgtcatattatacaggatatattttggagaagttcagctgagtggcttaggagaaggcttccagacagttcgtgttgggacagtgggcacccctgtgggcaccatcactctttcttgtgcttacagaattaacttggcattcatgtctaccaggcaatttgagaggaccccacctatcatggggattattattgatcactttgtggaccgtccctatcccagctcctctcccatgcacccctgcaattacagaactgctggtgaggacactggagtaatatacccgtctgtagaagactctcaagaagtgtgtaccacctctttttccacctccccaccatcccagctgatggttcctgggaaggaaggtggggtaccccttgctcccaaccagcctgtccatggtacccaggctgaccaggagagactggcaacctgcaccccttctgacagaacccactgtgctgccacaccctccagtagtgaggatactgaaaccgtatcaaacagcagtgagggacgggcctcccctcacgatgtcttggagaccatctttgtccgaaaagtgggggcttttgtcaacaaacccattaaccaggtgaccctgacgagtttggatataccctttgccatgtttgctcccaagaatttggagctggaggataccgatccaatggtgaatcctccagattccccagagactgaatctcctctccagggcagcctgcactcagatggctccagcgggggcagcagtggcaatacccatgatgactttgttatgatagactttaaaccagctttttctaaagatgacattcttccgatggacctggggaccttctatcgggagtttcagaacccacctcagctgagcagcctctccatagatattggagcacagtccatggctgaagacttggactcattaccagagaagctggctgtgcatgagaagaatgtccgcgagtttgatgcctttgtggaaaccctgctgtcaccatccactgtttgacattccagctggtggccaagagattggtgtggaggcagaaagaggaaggagacagtgccaggaggaagaaggaaggagtcccttagctctcttcattgtcccctttacttcctgctatcttcttctcctcttcttctctctcttgcctctatgcctgtatttctggcaatatgacaggcctgcctacccaagatcagaactccaaaaccactcccacccctgaaggtcgggagggtctgagcagccctggtggctgcctgtgctcaggtcctcagctccatgggaaataaaaatggcaccctgaatctctaggattttgtcacttggagtcacagcaaagttctcttcctcttgtccccccgttgctgctccttggttatagaacatggtaaatatttattactttcagagaaaccagatattttatagaggaaatatgtttgaggtgagttgtttttcacttggagaaggcggagggctcttcctgggacggagacctcctcctccggaggttattgagaatccgggctgctgctttgaggatcttcccaccatacagacagcgagatccaagaagagggctggccgggggcaaagtcacctcccagtgtggctgcactggaactgactaaaggctttaccttggatagttgcgtattcctggtgagagccttacatctcccacagtttctgcagagtgactgactccattctggcagcccaggaagtcctgggtgctaaatgtgatggccacatgtagtggttaggggatgttgtgtgtgtcccccaactgcctgggtacttgttcctgatccctggggctgtcctgtggagcttttcctcctgcttgggcctagctaccatctccctctaatcccaggttctctacactgccctggggtttaccagctggattggcttctggttgagaaatcaaagctgggcgtatgattgacttaacccttcaggtattgttacttgaataagtcaagtgcctagcctcacccacctatgatctgtcctttcccagcctcgctggtagtcctggtcaaggagatctaggtctactccattcctcctggcccacctggggcattcactggcagcagctgtgcttcagtggagcaggtggttctcagctgcttgttagtatactgcatgtgacactgttcccacatacaaggctgacttctgaggattggagcaggctctggcggggaccagagctctgcgtgctgctgctgccaccaagaagtgttagcagaagcagtagcagccaactggccctcctgactttggcccagagcacatgcgtggcttgctgaacccaggctcaggtttatccccaaggccccagctttgagaagggggaaggcccctggtaagttattgatgcccccatatttcagctactgctctctttccaaggccttgcatggaaaggcctagccattgtctgaggcagcaatctttggcatctacaggtggcagcagcctttcaccagggctccatctgtgaagagtctcagccatgactttgagctgagcttgggagaagtaaagcaactgttaaggccagcccttgcccctcagacctgccatgaaaggaatgagccctagactgactcctgcagcacccccgggacaggctgggaccagctgtttgtctccaggtgtcagagtccctcctcctcctccaacctctccaacctactttgtttggaaataccgagctacacttcaaaatgtattcaagggatttccaataaatttttttctgtactttacagcctcctgtcctgtaggttgtctgaagacctcgtaaccccttccccacccctgccccagtgcaggtctgggaaaggggagagtggtgcgttgtgaagcgcagaaagacctcaagtgtctggcaagcctgttttgagtcgggtgtggcctcttaggggctgtataccctggggtttcctgggtcaggaaacttcttagtatttctctttccctggtcccctatcaggggcttgaatttgaatattcagttggagaatgcatttaaaatacacccatagtaaaatctccataaaatgcaaaa

SEQ ID NO: 612317 - DNA, 263 bp, Homo sapiens
gaagttaaaattgtgttgacattcatgcgggcacaggttgacaagcttgccctaggcattatgtcgttcgtactctcagatgtattcgatatcatacttcagtattttctgttggacacaccctcacagtcacagttccaacagaatttccagcctatctaatctgttatgacgagagtcaatgtatctcatattgagccaatttagctctttcatactcccccatttattagtattgatcatatcagccttcattctctcac

SEQ ID NO: 612318 - DNA, 3011 bp, Homo sapiens
  misc_feature (2865)..(2865): n is a, c, g, or t
  misc_feature (2921)..(2921): n is a, c, g, or t
  misc_feature (2980)..(2980): n is a, c, g, or t
ggcacgaggctttcacccccccccccccggccattaccgaagcggatgaaaacaaacactaacgatggcggcgccgggaagcgaccggctgctgggcttaaggcgggagtgaccgcttaaccagtgagggaagcactgaagagcgccagtcgacgtgggtgcgacaactcgcggagtcttaggagcaaaacgtctggggcctgcgagccaggacccttctgaagccttaggtgtctatcggcgacgtgtacggtcactgcagctccggagcgcggaaccctcagccaggaggcgcggctggtcggtcccaggtcccggcctccgtaatgagagcccggaaccactctttgtgccgcagcttcgcagcatcttggactcaagtgattctcctgcctcagcctcctgagtagctgggactacagattcctataggcaatggaaactgatctcaattcccaggacagaaaggacctggacaagtttattaaattttttgccctcaagactgtccaagtgattgtccaggctcggcttggtgaaaagatttgcactcgttcatcatcttctccaacgggttcagattggttcaacttagcaatcaaagacatcccagaggttacacatgaagcaaagaaggcactggcaggacagctgcctgcagtcgggaggtccatgtgtgtggagatttcacttaagacttctgagggagattccatggagctggaaatatggtgtcttgaaatgaatgaaaagtgtgataaagaaatcaaagtttcctacacggtgtacaacagactgtcattgctgctgaagtcccttcttgctataactagggtgacaccagcctataggctctccaggaaacaagggcatgaatatgtcatattatacaggatatattttggagaagttcagctgagtggcttaggagaaggcttccagacagttcgtgttgggacagtgggcacccctgtgggcaccatcactctttcttgtgcttacagaattaacttggcattcatgtctaccaggcaatttgagaggaccccacctatcatggggattattattgatcactttgtggaccgtccctatcccagctcctctcccatgcacccctgcaattacagaactgctggtgaggacactggagtaatatacccgtctgtagaagactctcaagaagtgtgtaccacctctttttccacctccccaccatcccagctgatggttcctgggaaggaaggtggggtaccccttgctcccaaccagcctgtccatggtacccaggctgaccaggagagactggcaacctgcaccccttctgacagaacccactgtgctgccacaccctccagtagtgaggatactgaaaccgtatcaaacagcagtgagggacgggcctcccctcacgatgtcttggagaccatctttgtccgaaaagtgggggcttttgtcaacaaacccattaaccaggtgaccctgacgagtttggatataccctttgccatgtttgctcccaagaatttggagctggaggataccgatccaatggtgaatcctccagattccccagagactgaatctcctctccagggcagcctgcactcagatggctccagcgggggcagcagtggcaatacccatgatgactttgttatgatagactttaaaccagctttttctaaagatgacattcttccgatggacctggggaccttctatcgggagtttcagaacccacctcagctgagcagcctctccatagatattggagcacagtccatggctgaagacttggactcattaccagagaagctggctgtgcatgagaagaatgtccgcgagtttgatgcctttgtggaaaccctgcagtaaaagtatccttgagtcccagcagcaccccctttttgtggccccagggcataagcagcctcccatgcatcagctgctcccacccctcatcctgctctgagccaggtggaagggaggctggcttctcccatggggacccagaagtccctactcttggacctcctggagactccgtggcggcagtcaagcccagtgcccagttggagaagactcacgtgctggccttggagatgggaagaaccttcgtacgaaaaagccctcagcagggccatctgtgtgccctgcccatcaccaactgcttcccaagggtgtcatcctgttcctcctgctgccggcctcctgcctgggcctgccttgcagctggccccttccctgcctgctgtcaccatccactgtttgacattccagctggtggccaagagattggtgtggaggcagaaagaggaaggagacagtgccaggaggaagaaggaaggagtcccttagctctcttcattgtcccctttacttcctgctatcttcttctcctcttcttctctctcttgcctctatgcctgtatttctggcaatatgacaggcctgcctacccaagatcagaactccaaaaccactcccacccctgaaggtcgggagggtctgagcagccctggtggctgcctgtgctcaggtcctcagctccatgggaaataaaaatggcaccctgaatctctaggattttgtcacttggagtcacagcaaagttctcttcctcttgtccccccgttgctgctccttggttatagaacatggtaaatatttattactttcagagaaaccagatattttatagaggaaatatgtttgaggtgagttgtttttcacttggagaaggcggagggctcttcctgggacggagacctcctcctccggaggttattgagaatccgggctgctgctttgaggatcttcccaccatacagacagcgagatccagggcagccactggcgaanccttaacccagctggatggagacaaccctcagcgtgccctgctatacaccactgtnttcctgatagacagcagtgcctcttgcactgagtggcccagtatcaactgagaggagtncaggccggggagagaagaggatgaggcctcc

SEQ ID NO: 612319 - DNA, 377 bp, Homo sapiens
accggtaagatgtacacagtcaaaaggcttatcgagctgttgagagttctttgagtgttctggatcagtgatctgctgtgaactttagtcacgctgaagacagtcttctcagttttcatgactgtgaagtgtgcaaatggtacgcatccttgatcttaggtgctgctgacctactttcccaaagcaaaactgtttaaaattcaaggcaatctgggaacggggactatttccaaacttccttaggcagcacttttcagtggacttccccgcacgctggtttccctggcacgaagcgcttggtctggttactaaagccacgtatcctgattttacagaaacgtgggcaggtccagccgtgccactggtgagctcccaga

SEQ ID NO: 612320 - DNA, 2580 bp, Homo sapiens
ggcacgaggctttcacccccccccccccggccattaccgaagcggatgaaaacaaacactaacgatggcggcgccgggaagcgaccggctgctgggcttaaggcgggagtgaccgcttaaccagtgagggaagcactgaagagcgccagtcgacgtgggtgcgacaactcgcggagtcttaggagcaaaacgtctggggcctgcgagccaggacccttctgaagccttaggtgtctatcggcgacgtgtacggtcactgcagctccggagcgcggaaccctcagccaggaggcgcggctggtcggtcccaggtcccggcctccgtaatgagagcccggaaccactctttgtgccgcagcttcgcagcatcttggactcaagtgattctcctgcctcagcctcctgagtagctgggactacagattcctataggcaatggaaactgatctcaattcccaggacagaaaggacctggacaagtttattaaattttttgccctcaagactgtccaagtgattgtccaggctcggcttggtgaaaagatttgcactcgttcatcatcttctccaacgggttcagattggttcaacttagcaatcaaagacatcccagaggttacacatgaagcaaagaaggcactggcaggacagctgcctgcagtcgggaggtccatgtgtgtggagatttcacttaagacttctgagggagattccatggagctggaaatatggtgtcttgaaatgaatgaaaagtgtgataaagaaatcaaagtttcctacacggtgtacaacagactgtcattgctgctgaagtcccttcttgctataactagggtgacaccagcctataggctctccaggaaacaagggcatgaatatgtcatattatacaggatatattttggagaagttcagctgagtggcttaggagaaggcttccagacagttcgtgttgggacagtgggcacccctgtgggcaccatcactctttcttgtgcttacagaattaacttggcattcatgtctaccaggcaatttgagaggaccccacctatcatggggattattattgatcactttgtggaccgtccctatcccagctcctctcccatgcacccctgcaattacagaactgctggtgaggacactggagtaatatacccgtctgtagaagactctcaagaagtgtgtaccacctctttttccacctccccaccatcccagctgatggttcctgggaaggaaggtggggtaccccttgctcccaaccagcctgtccatggtacccaggctgaccaggagagactggcaacctgcaccccttctgacagaacccactgtgctgccacaccctccagtagtgaggatactgaaaccgtatcaaacagcagtgagggacgggcctcccctcacgatgtcttggagaccatctttgtccgaaaagtgggggcttttgtcaacaaacccattaaccaggtgaccctgacgagtttggatataccctttgccatgtttgctcccaagaatttggagctggaggataccgatccaatggtgaatcctccagattccccagagactgaatctcctctccagggcagcctgcactcagatggctccagcgggggcagcagtggcaatacccatgatgactttgttatgatagactttaaaccagctttttctaaagatgacattcttccgatggacctggggaccttctatcgggagtttcagaacccacctcagctgagcagcctctccatagatattggagcacagtccatggctgaagacttggactcattaccagagaagctggctgtgcatgagaagaatgtccgcgagtttgatgcctttgtggaaaccctgcagtaaaagtatccttgagtcccagcagcaccccctttttgtggccccagggcataagcagcctcccatgcatcagctgctcccacccctcatcctgctctgagccaggtggaagggaggctggcttctcccatggggacccagaagtccctactcttggacctcctggagactccgtggcggcagtcaagcccagtgcccagttggagaagactcacgtgctggccttggagatgggaagaaccttcgtacgaaaaagccctcagcagggccatctgtgtgccctgcccatcaccaactgcttcccaagggtgtcatcctgttcctcctgctgccggcctcctgcctgggcctgccttgcagctggccccttccctgcctgctgtcaccatccactgtttgacattccagctggtggccaagagattggtgtggaggcagaaagaggaaggagacagtgccaggaggaagaaggaaggagtcccttagctctcttcattgtcccctttacttcctgctatcttcttctcctcttcttctctctcttgcctctatgcctgtatttctggcaatatgacaggcctgcctacccaagatcagaactccaaaaccactcccacccctgaaggtcgggagggtctgagcagccctggtggctgcctgtgctcaggtcctcagctccatgggaaataaaaatggcaccctgaa

SEQ ID NO: 612321 - DNA, 328 bp, Homo sapiens
  misc_feature (30)..(30): n is a, c, g, or t
  misc_feature (169)..(169): n is a, c, g, or t
  misc_feature (183)..(183): n is a, c, g, or t
  misc_feature (241)..(241): n is a, c, g, or t
  misc_feature (300)..(300): n is a, c, g, or t
  misc_feature (311)..(311): n is a, c, g, or t
  misc_feature (319)..(319): n is a, c, g, or t
  misc_feature (321)..(321): n is a, c, g, or t
tctatgttttagttttcatttttttaaaangcttcttaaaattcactaaattgggctaggtgtggctcatgcctgtaatcccagcactatgggaggctgaggtgagaggatcacttgagcccagaaggttgaaaccagcctgggcaacatagtgagaccccatctctanaaaaagttttaaanccaggtatggtggtgccctcctgtggtcccagctactcgggagtctgaggtgggaggnccacctgagcccaggagactgaggctgcagtaaggtgtgattgcactattgctctctancctggtaaacngagtgatntnctatctc

SEQ ID NO: 612322 - DNA, 364 bp, Homo sapiens
cgacggctcaaggtagagagcactctaataagtcttagagaatactcatattgtctaacgtgggctccacgggaattttgggtttaaatcctggtttgacaagctgcttcttataagcaggtatagagaagaaaggaaagaggaaaaggagaaggaagaggaaaaggaaaatagaagtatgaatcaattgtttaaaagatggtataataaagtctgcaggagactcatattctgtctaacatgggctccacaggaattttgggttaatatcctatcatgacaaattagaaaggcctaaataggaaacgactaaggataggcacatacagtattttcgtttacttcatttgttttgggtcgacgc

SEQ ID NO: 612323 - DNA, 278 bp, Homo sapiens
ccctctgcactatctccgccttcttcattccctccttcccatgtggccccaaacatttctctcgaatgcctattatgggcatatgtctctgctacgcacccatcagttgtccatgtgctgtgcaactgctaagttccttttagcacttgttccgttggcagccgtcttactcttccggggaaggacacagaaagtagttgtagtacaagggcggcacaaaagtgaatccggttacacatatggaagtaaggcggaaagtaaggcggcaattgtacacg

SEQ ID NO: 612324 - DNA, 827 bp, Homo sapiens
  misc_feature (60)..(60): n is a, c, g, or t
  misc_feature (233)..(233): n is a, c, g, or t
  misc_feature (493)..(493): n is a, c, g, or t
gcttcccacacacttggttttccttgggcattttatttatctctttccgtggggggttgngcccagggggggggggttttccccgggtttctctcccccccctcggtaggagttgttgtccccaaacaggggttcccaattgtgtcaccccccccctcccaagagggggggggggggggggggtgtttttaaaagactttttttagccccccgtttccgggaccccccccccntttttttctctcttaaaaacccggggcctcccccctccggtttctcattggccgggggggggtaatttttccccggggaaacattttcccttgggccttttggggccctttttaaacatttgtgtccaaaaacgggtggtggccgggcgggtatttccggggtttttttccccccggggcgcgggggggggggggggggtgtttttaaatttttcccccccgcagaaaacccccccttcttcgccccaaaatatgggganttttcccctcccccccaaaaacccccttaaagggggtggggtttgggggccccccctttttcccccccctttggggggggggggggggggggttccttttgtcccggggttttttcacccccctgggccccgggggacccccctttttttccaaaaaaaaaattttgccccggggggggggggggcccctggggtccccccttttggggggccccccttttttccagttttgggggcccccctccccccccccttttcccccccccggggtggggttccctttgggggcccccccccttttttttttttttttttttttccccgggggggttta

SEQ ID NO: 612325 - DNA, 386 bp, Homo sapiens
ccttgaatggtgctgaacaggaagagaatttattggtgagtaaaagaggggggcagcacattggaagccctcatgagtgcagggcccgccattatgtccaggagggccacgactggggatgtacttgaccccacagccatctgggatgagccgcttttcagccaccatgtcttcaaattcatcagcattgaacttggtgaagccccacttctttgagatgtggatcttctggcggccaggaaacttgaacttggccctgcgcagggcctcaatcacatgctccttgttctgcagcttggtgcggatggccttgataacttggccaatgtgaaccctggccacagtgccctgggcttttccaaaggcacctcgcttgcctgtttgga

SEQ ID NO: 612326 - DNA, 1293 bp, Homo sapiens
  misc_feature (177)..(177): n is a, c, g, or t
  misc_feature (236)..(236): n is a, c, g, or t
  misc_feature (239)..(239): n is a, c, g, or t
  misc_feature (1167)..(1167): n is a, c, g, or t
  misc_feature (1175)..(1175): n is a, c, g, or t
  misc_feature (1177)..(1177): n is a, c, g, or t
  misc_feature (1209)..(1209): n is a, c, g, or t
  misc_feature (1211)..(1211): n is a, c, g, or t
  misc_feature (1231)..(1231): n is a, c, g, or t
gccagatctttacaccagacaactttgtgttaggtcagtctggggcaggtaagaagctgggccagaggccactacacagagggcgccgagctggtgttgtattctgatcctggatggtggtacggaaggaggcggagagcgtgtgacttgcctgcagggtcttccatgctgacccantcactgggcgggggcacaggctctggaatgggcactctccttatctagtaagatccganagngaatacgcctgatcgcatcatgaataccttcagttgtggtgccttcacccaaagtgtctgacaccgtggtcgagccctacaatgccaccctctccgtccatcagttggtagagaatactgatgagacctattgcattgacaacgaggccctctatgatatctgttccgcactctgaagctgaccacaccaaactacggggatctgaaccaccttgtctcagccaccatgagtggtgtcaccacctgcctccgtttccctggccagctcaatgctgacctccgcaagttggcagtcaacatggtccccttcccacgtctccatttctttatgcctggctttgcccctctcaccagccgtggaagccagcagtatcgagctctcacagtgccggaactcacccagcaggtcttcgatgccaagaacatgatggctgcctgtgacccccgccacggccgatacctcaccgtggctgctgtcttccgtggtcggatgtccatgaaggaggtcgatgagcagatgcttaacgtgcagaacaagaacagcagctactttgtggaatggatccccaacaatgtcaagacagccgtctgtgacatcccacctcgtggcctcaagatggcagtcaccttcattggcaatagcacagccatccaggagctcttcaagcgcatctcggagcagttcactgccatgttccgccggaaggccttcctccactggtacacaggcgagggcatggacgagatggagttcaccgaggctgagagcaacatgaacgacctcgtctctgagtatcagcagtaccaggatgccaccgcagaagaggaggaggatttcggtgaggaggccgaagaggaggcctaaggcagagcccccatcacctcaggcttctcagttcccttagccgtcttactcaactgccccttncctctccntnagaatttgtgtttgctgcctctatcttgtttntngttttttcttctgggggggnctagacagggcctgcacatagaggcgcttaataaaaactgttggtgaaaaaaaaaaatggcc

SEQ ID NO: 612327 - DNA, 243 bp, Homo sapiens
tcaactgtccagagatgacctggactaattcacggaacagcggtgaggtgagcacgcttggcaaaggatgcagcccctaagggggagtgtctacatctacgaccacctccgcctctcatggtgcctgaaatgagccccagtgtgtatcagattgacagacaggccggctggcgtgtggctctgtgtcgagggaagttacttcactccgaggcggtgactatgcctagctttcctctgacctgt

SEQ ID NO: 612328 - DNA, 139 bp, Homo sapiens
agagttccagaccagcctaggcaacacagtgagacccctgggtctacaaaacatatatatatgagagagagagagataaaaaaacacaaatgcatttaagccagacatagtggtacactcctgtagtcccagctacacc

SEQ ID NO: 612329 - DNA, 1141 bp, Homo sapiens
  misc_feature (131)..(131): n is a, c, g, or t
  misc_feature (190)..(190): n is a, c, g, or t
  misc_feature (193)..(193): n is a, c, g, or t
  misc_feature (1015)..(1015): n is a, c, g, or t
  misc_feature (1023)..(1023): n is a, c, g, or t
  misc_feature (1025)..(1025): n is a, c, g, or t
  misc_feature (1057)..(1057): n is a, c, g, or t
  misc_feature (1059)..(1059): n is a, c, g, or t
  misc_feature (1079)..(1079): n is a, c, g, or t
ggagccctacaatgccatcctctccgtgccatcgacgttggtagatgaatagtgatgatgagctattgactgttgaccatggaggcataaagctgtgaatgactgctgggcttcactaggtcgtgacccantcactgggcgggggcacaggctctggaatgggcactctccttatctagtaagatccganagngaatacgcctgatcgcatcatgaataccttcagttgtggtgccttcacccaaagtgtctgacaccgtggtcgagccctacgagggatgctgataccaggcttgttgcgtcatatcgatccatgagtggtgtcaccacctgcctccgtttccctggccagctcaatgctgacctccgcaagttggcagtcaacatggtccccttcccacgtctccatttctttatgcctggctttgcccctctcaccagccgtggaagccagcagtatcgagctctcacagtgccggaactcacccagcaggtcttcgatgccaagaacatgatggctgcctgtgacccccgccacggccgatacctcaccgtggctgctgtcttccgtggtcggatgtccatgaaggaggtcgatgagcagatgcttaacgtgcagaacaagaacagcagctactttgtggaatggatccccaacaatgtcaagacagccgtctgtgacatcccacctcgtggcctcaagatggcagtcaccttcattggcaatagcacagccatccaggagctcttcaagcgcatctcggagcagttcactgccatgttccgccggaaggccttcctccactggtacacaggcgagggcatggacgagatggagttcaccgaggctgagagcaacatgaacgacctcgtctctgagtatcagcagtaccaggatgccaccgcagaagaggaggaggatttcggtgaggaggccgaagaggaggcctaaggcagagcccccatcacctcaggcttctcagttcccttagccgtcttactcaactgccccttncctctccntnagaatttgtgtttgctgcctctatcttgtttntngttttttcttctgggggggnctagacagggcctgcacatagaggcgcttaataaaaactgttggtgaaaaaaaaaaatggcc

SEQ ID NO: 612330 - DNA, 190 bp, Homo sapiens
caagtggcgatatatcccttttagttacgaacatcactgtgggctccccatatgaatgaggagttcacaaaatatgtagtgacctaaagtctgctgctattgttatagcagatatctcttgacggaaggcacagagggaagcattaacatcaagctccatttatcaacgaagaactctatccaacactct

SEQ ID NO: 612331 - DNA, 731 bp, Homo sapiens
  misc_feature (353)..(353): n is a, c, g, or t
  misc_feature (541)..(541): n is a, c, g, or t
gcactacgatgttgcgatctggaaactctggtaaagactcaagctactgaatgccatgctcgttgacttgtgccaagagcaccattaggtctacaactatgacgcgttttcggtaaaggcataaagggtggctccacggtgaagtgtcactacatgagttcagtatgcatgggagtggcacgatagttgatactctaatcataaatcgttcccataattctctgaccaattctccgaattaacgacttagtgtgaactaagtactcgtcagttctccatatgggacctgctgcatagtaagagcatacatcagttaagtatccagattcgggcaaacctatcaacaatcgganctttctataatatcctataaatttcctgggggcattaattcctaacggttacacctttcttggttggcccccttaataatttcctaggaatattattttttctggttcaattgtacacaccatatgcaacatagcaatgcatacctaatcctgtgctctgtaccatgtctggtggctatctgcaatantcgaggcatacagaaagccaatttcacacggcgtggaagagtagactaccggaacaactttctcacaaaattttccaccggaaaatccataaccattagttccccaaacaccttttgttccctccaaatctccaacttttctttaaaacggtaaaaggcgggggccccgaaatggggctttatggccacg

SEQ ID NO: 612332 - DNA, 628 bp, Homo sapiens
taggtttgagggggaatgctggaaatggtaaggggtatggggacatatcatataagtaatgctagggtgagtggtaggaagttttttcataggaggtgtatgagtgggtcgtagcggaatcgggggtatagctggttcgaattcataagaacagggaggttagaagtagggtctgggtgacaaaatatgttggtgtagagttcaggggagatgtgcgtcatattgttgtccctaggaagattggtagtgggtgagggtgtttattattaataatggtttggtggtattcaggctatagaaaaatatgggcagaagggcgcctggcggcgtatctcagatgttagaacgcctgaagactagtctcgagactccccttcggcaatggtcagaagtggggtctcggttgggtctctggctagtggtgggaagataaatcatattatgggccaaggtgtcatagatgggcaggatgtaatccaagagggtggtccttggtggttggtggacaacagggtgggacgagtgttaaagggagccactttattagtaatggtcgatagtccgaatcgatggctagggtgacttcatatgagatggtcggggcactgctcgcaatgcccgatcaggc

SEQ ID NO: 612333 - DNA, 524 bp, Homo sapiens
cggaagcgccgggccgaagagtatgacgtccgctttggagaactacatcaagccgaactgtggccgttattacatcagatgtggagaatgatcgtgggaacactgagatacggttttgagccagacccattaattggattttggatgaaagccatgaacgagtattcagctcttcagagggggtagaacaagtggtactaggattatacattgtaagaggtgacaagtgcgagtcattggatgaaatcgatgaagaaacagattcgtgcgacttgattcggggaatattcgagcgagaaccttgtaaattctgtagcgacactgaggaaaaagctacgatagcttggagcatctgtaaagtctttgtacgagaaagtgatgattgctgaggatgatatatggagttttgatgaatgtgtcacgtggattatgactccttattggattcatgtgtagatatgtaagattaagaatatttcgtacagttcttattgaatggaaggagaagaaacaagaactaaagg

SEQ ID NO: 612334 - DNA, 130 bp, Homo sapiens
gatcagctgctgctgcgtcgactctaagatccccccctggatgtcaggtctggaatgacagagaagatggagattgggggcttagacggcagaatacagtgttaggttcttttatttcagatgcggtatc

SEQ ID NO: 612335 - DNA, 308 bp, Homo sapiens
  misc_feature (28)..(28): n is a, c, g, or t
  misc_feature (304)..(304): n is a, c, g, or t
gccctcatcctcagttgatgagatcacntgagggctcccggaagcgatcagtactgggacaaagatgtggtttgggaggcggatcacctgaggtcaggagttcgagaccagcctggccaacacggtgaagccctgtctctaataaaaataaaaaattagcccagcgtggtggcacacgcctgtaatcctagctacttgggaggctgaggcaggagaatcgcttgaacctgggaggcagaggttgcagtgagctgagatcgcactactgcactccagcctgggcaatagagcgagactctatctnaatt

SEQ ID NO: 612336 - DNA, 118 bp, Homo sapiens
atccccgaattttttaaaagtttaaataaggtaatcaaatatggacatatatttaaatatatgaattcttaaataagtggtattgctagttgaaaggaatttctgcaagcgtacaaga

SEQ ID NO: 612337 - DNA, 106 bp, Homo sapiens
cttcagcagggtaacttactcccaccctggtagcctccgtagacctcaccatcttactaacttaacaaacttagacaggtgtactaactactaatacttaaggggc

SEQ ID NO: 612338 - DNA, 136 bp, Homo sapiens
gttcagtttctacacataacagctgccagacgggtgtagctgcttcttgtgtaccccgcttgtttgtaaatcagccacaaggctaccaggggactgatggcattactcactgtcacttggtgtagaaatttgaact

SEQ ID NO: 612339 - DNA, 621 bp, Homo sapiens
gctcgcgttccggccggagggcttctccagccttgcccggaagctgcgctcggtacccgggtagcgggtcccggttgtggaagctcccgtggcgccgcgatggacctcgaggagtcggaagagttctagagaacgctgtactcagggtgctgctgtctcatggggtcttactgatgacaggctacatattattgcacttcttgccacagggttacagagagatatcaggaagttacaaagcacgtgatcttattcctaatacccaaagtacagagccctcaacgcgggggcttgaaatgaatagatagaagcatgtagttgaagagaaggctgggcatggggtcatgtgtgtgacggttccagtgatatcctgttatcaagacagcgagaagctttaaagaacctggagtaggcccagagttcacgaacgatgttcacgttaatttgggacagcgctaccttcagaagagcaagcggcttatggtagagaggcccaggtttgatacctcctggagtggaaacctacggtccttagacagataagtctaaggtcatccagactgggctagtgagcctgagctggtaagttgatgtcagggtcctcctttcttgaaagtggag

SEQ ID NO: 612340 - DNA, 120 bp, Homo sapiens
aggtacacgtcatgcttgggcctagaataccctgatgagacaacgacgaagaggaagggaggcatatctacaacacagcctctcggcactgtagctccttattttacacttgtctatgca

SEQ ID NO: 612341 - DNA, 2564 bp, Homo sapiens
ggcacgaggctttcacccccccccccccggccattaccgaagcggatgaaaacaaacactaacgatggcggcgccgggaagcgaccggctgctgggcttaaggcgggagtgaccgcttaaccagtgagggaagcactgaagagcgccagtcgacgtgggtgcgacaactcgcggagtcttaggagcaaaacgtctggggcctgcgagccaggacccttctgaagccttaggtgtctatcggcgacgtgtacggtcactgcagctccggagcgcggaaccctcagccaggaggcgcggctggtcggtcccaggtcccggcctccgtaatgagagcccggaaccactctttgtgccgcagcttcgcagcatcttggactcaagtgattctcctgcctcagcctcctgagtagctgggactacagattcctataggcaatggaaactgatctcaattcccaggacagaaaggacctggacaagtttattaaattttttgccctcaagactgtccaagtgattgtccaggctcggcttggtgaaaagatttgcactcgttcatcatcttctccaacgggttcagattggttcaacttagcaatcaaagacatcccagaggttacacatgaagcaaagaaggcactggcaggacagctgcctgcagtcgggaggtccatgtgtgtggagatttcacttaagacttctgagggagattccatggagctggaaatatggtgtcttgaaatgaatgaaaagtgtgataaagaaatcaaagtttcctacacggtgtacaacagactgtcattgctgctgaagtcccttcttgctataactagggtgacaccagcctataggctctccaggaaacaagggcatgaatatgtcatattatacaggatatattttggagaagttcagctgagtggcttaggagaaggcttccagacagttcgtgttgggacagtgggcacccctgtgggcaccatcactctttcttgtgcttacagaattaacttggcattcatgtctaccaggcaatttgagaggaccccacctatcatggggattattattgatcactttgtggaccgtccctatcccagctcctctcccatgcacccctgcaattacagaactgctggtgaggacactggagtaatatacccgtctgtagaagactctcaagaagtgtgtaccacctctttttccacctccccaccatcccagctgatggttcctgggaaggaaggtggggtaccccttgctcccaaccagcctgtccatggtacccaggctgaccaggagagactggcaacctgcaccccttctgacagaacccactgtgctgccacaccctccagtagtgaggatactgaaaccgtatcaaacagcagtgagggacgggcctcccctcacgatgtcttggagaccatctttgtccgaaaagtgggggcttttgtcaacaaacccattaaccaggtgaccctgacgagtttggatataccctttgccatgtttgctcccaagaatttggagctggaggataccgatccaatggtgaatcctccagattccccagagactgaatctcctctccagggcagcctgcactcagatggctccagcgggggcagcagtggcaatacccatgatgactttgttatgatagactttaaaccagctttttctaaagatgacattcttccgatggacctggggaccttctatcgggagtttcagaacccacctcagctgagcagcctctccatagatattggagcacagtccatggctgaagacttggactcattaccagagaagctggctgtgcatgagaagaatgtccgcgagtttgatgcctttgtggaaaccctgcagtaaaagtatccttgagtcccagcagcaccccctttttgtggccccagggcataagcagcctcccatgcatcagctgctcccacccctcatcctgctctgagccaggtggaagggaggctggcttctcccatggggacccagaagtccctactcttggacctcctggagactccgtggcggcagtcaagcccagtgcccagttggagaagactcacgtgctggccttggagatgggaagaaccttcgtacgaaaaagccctcagcagggccatctgtgtgccctgcccatcaccaactgcttcccaagggtgtcatcctgttcctcctgctgccggcctcctgcctgggcctgccttgcagctggccccttccctgcctgctgtcaccatccactgtttgacattccagctggtggccaagagattggtgtggaggcagaaagaggaaggagacagtgccgagggagtgacagcaaggcagggaggtccctcggtagctagtctggtcattagtcgcacgcgtttgacattcgcatgctattcgttcattactaactctttttcatctcatcttggcatatatggcggaatgtcctggccaagtagtgaccagtgcctgtcgtatgcaacagatctcgatcatcgcaaataactcgtctgcacctcctggaagggtcgggagggtcattg

SEQ ID NO: 612342 - DNA, 944 bp, Homo sapiens
  misc_feature (426)..(426): n is a, c, g, or t
gccccattgtagattgccctgtgcagtaaactttcaaggtgtcggctgccccagattgcttcatttgctgggtgtggaaagagttgctatggccaggcatatgggatttggaagctcagcagaagtgacttctgctctgctggttgctgctccccggctttcacagacatggtatggcagccattcttttatctatttaaccaaaggaaggatgctggggaattgtgcgtcgcgtttgcctgtggggtgtgggtgtgctgtctatgttgttcgcgggggtggttgccattggtggggtcctaatttaagagcttctggtccccttcctttcccttggccaggttggaccccaggattgagacaggcttgtagtaccttaggtctctttcacctctcattgcctgtccctgcttcgagctggttgtnttgtgcgtgggacatgggccttcctatctgtgttttctcaaagtcaggagctgaccaggagcacactaaggtgtggtcatgcatcataaccaacattcactcatctgggacattcttaagatacatttatacaatcatttcagcagtagtactttgtatgtgtcgagagtttacagagctctttgacatacgcgatcttagtctttacaaataaggaaaacagctcagtttgggaagtatcagagatgggattcaaacccagatcctctggtccaagttgtatgtgcactgaactaatcaggcaggacacaaagcccgccactgttctcacagattgttctgtatattgtagcaaaatccttgaaaccattggggtcccttccagtctcatccatacaaaattggcactctgggctgggtgcgagggtccaggcctattatcccagggctttcaagggttaggcaagaggcctctgagaatagagtcaagacccagctgggaactagagatctgtctc

SEQ ID NO: 612343 - DNA, 359 bp, Homo sapiens
gctcgagcgatcctcccttctcagattacagtaggaagcactggggattacaggggtgagccactgtgcccagccttctcaatttttttacccctatatttgttctaaggatatagacagggtaacaggaaaactcaatatttcttttggaataaattgccctctaatcactgatagcatctctatcattattctgtgcctaaaatagagaattatctgctcagtcctattctgcagagtacaatgtcacattctaacctgttagggattgtcttcaaattaatactgttattactcattatgttggcaagtcactttgggcaaagcatattagggtggttcatatgtaggtctttgtg

SEQ ID NO: 612344 - DNA, 980 bp, Homo sapiens
ggcacgaggctttcacccccccccccccggccattaccgaagcggatgaaaacaaacactaacgatggcggcgccgggaagcgaccggctgctgggcttaaggcgggagtgaccgcttaaccagtgagggaagcactgaagagcgccagtcgacgtgggtgcgacaactcgcggagtcttaggagcaaaacgtctggggcctgcgagccaggacccttctgaagccttaggtgtctatcggcgacgtgtacggtcactgcagctccggagcgcggaaccctcagccaggaggcgcggctggtcggtcccaggtcccggcctccgtaatgagagcccggaaccactctttgtgccgcagcttcgcagcatcttggactcaagtgattctcctgcctcagcctcctgagtagctgggactacagattcctataggcaatggaaactgatctcaattcccaggacagaaaggacctggacaagtttattaaattttttgccctcaagactgtccaagtgattgtccaggctcggcttggtgaaaagatttgcactcgttcatcatcttctccaacgggttcagattggttcaacttagcaatcaaagacatcccagaggttacacatgaagcaaagaaggcactggcaggacagctgcctgcagtcgggaggtccatgtgtgtggagatttcacttaagacttctgagggagattccatggagctggaaatatggtgtcttgaaatgaatgaaaagtgtgataaagaaatcaaagtttcctacacggtgtacaacagactgtcattgctgctgaagtcccttcttgctataactagggtgacaccagcctataggctctccaggaaacaagggcatgaatatgtcatattatacaggagaatcacctaaatctgggaggcagaggttgcagtgagccgagattgcaccactgcactccagcctgggtaacagagactctgtct

SEQ ID NO: 612345 - DNA, 954 bp, Homo sapiens
ggcacgaggctttcacccccccccccccggccattaccgaagcggatgaaaacaaacactaacgatggcggcgccgggaagcgaccggctgctgggcttaaggcgggagtgaccgcttaaccagtgagggaagcactgaagagcgccagtcgacgtgggtgcgacaactcgcggagtcttaggagcaaaacgtctggggcctgcgagccaggacccttctgaagccttaggtgtctatcggcgacgtgtacggtcactgcagctccggagcgcggaaccctcagccaggaggcgcggctggtcggtcccaggtcccggcctccgtaatgagagcccggaaccactctttgtgccgcagcttcgcagcatcttggactcaagtgattctcctgcctcagcctcctgagtagctgggactacagattcctataggcaatggaaactgatctcaattcccaggacagaaaggacctggacaagtttattaaattttttgccctcaagactgtccaagtgattgtccaggctcggcttggtgaaaagatttgcactcgttcatcatcttctccaacgggttcagattggttcaacttagcaatcaaagacatcccagaggttacacatgaagcaaagaaggcactggcaggacagctgcctgcagtcgggaggtccatgtgtgtggagatttcacttaagacttctgagggagattccatggacaggttggtgtcttcatttagcactgaaggctcctcacactctgagtccagttcatttctcagtcttattcctgcccctttcctctctgatattcttatcattctctgagggggtcatagttttttttgttcttttttgtttgtttgttttgttttgtttttttgagactgagtctcgatctgtcgcccaggctggagtgcagtggagcgatctcggcttactgcaacctctaac

SEQ ID NO: 612346 - DNA, 225 bp, Homo sapiens
ggggccttccaaggttttttttttcccttttgggttcaaaaaaaaacccttgtggggggggtattttgggggggggcctgtgggggggaaatttgtgttccagggtaaaccctttttgggattggggtaatgtttttttgggtttttttgccccccgaaggggaaatgggacccccccccctgggggcgggtccccattttttaataaagggaccccccgggcca

SEQ ID NO: 612347 - DNA, 703 bp, Homo sapiens
  misc_feature (688)..(689): n is a, c, g, or t
ggcacgaggctttcacccccccccccccggccattaccgaagcggatgaaaacaaacactaacgatggcggcgccgggaagcgaccggctgctgggcttaaggcgggagtgaccgcttaaccagtgagggaagcactgaagagcgccagtcgacgtgggtgcgacaactcgcggagtcttaggagcaaaacgtctggggcctgcgagccaggacccttctgaagccttaggtgtctatcggcgacgtgtacggtcactgcagctccggagcgcggaaccctcagccaggaggcgcggctggtcggtcccaggtcccggcctccgtaatgagagcccggaaccactctttgtgccgcagcttcgcaggtgagggtgactgttgactagtgaaaaaagggacccatggttcacgactgtcttcttactggcagtggaacgacctgtggaaacctgtgatccattctcattaaataaatctctgggtaagtggctaagcaccttcttgagctcatcactaattcttcccagttttcacttttccagtgagttcccagttagcctggtcaattcagcgtagcatttcacttttggtatttcttcgttctctggccaccccgcagccaaaaagaaaaaagagattttaaaaaaatacctaatttctcattacacttagtttaaaactcatctnnctaagtgatagaat

SEQ ID NO: 612348 - DNA, 143 bp, Homo sapiens
ccctggcaacctcgcctggccaatgcgagtcaccaccgtcgagcggctggtgtggcgttaggcgacgacattatcgagggtaaactgcagggtggcgatcgtctgccggctcaccgtacgctcgcctggcaattagagatcgg

SEQ ID NO: 612349 - DNA, 212 bp, Homo sapiens
gtagatctagcaattgcagcagcagcatttcatttttgtatattccacatcattctacaatggatttacaatagtttgcaatgatacacacaagtacaataaatagaagaaaataagaaacaataatagagcacgagaaaagccagaataaatagagaggcagagtccactggcttttctagtacataactccactggcagacctggtgtga

SEQ ID NO: 612350 - DNA, 863 bp, Homo sapiens
acactggattggtccgaaggagatctttctcttaccgagacactctgtgtgtgcccatttttcctcccggttcgcgtttaggccctcggataactatggggtataaccgtgccctcgagttcgacgttgcgtgggtcccctcccaggtcgccggggattcattgggtttctccccccccggtttgcttgaaatctgtgattatataggcaatattcacatttcttggaaaccccggtcctggagccctgtcctacaggacattaatccttcggggaccagccgtttttccccaggtattcaccttccctgagttcggttttcggccccttcccagtaccgccgtgatatttaagtacgggcgtcaaagccagcgaagtcaaggaataacccccgccccctactaccttaacggcacgatctctctgatttagactcctttttttatacgcgagccctgtttttcgccccccctctttgtgcccacatctcatctaaacactagtcctttacgcccggcgttgagtgggtcctctaatcccggctgactctcgccacccaccttcgggagcggcgaacgacacggtgcgacaccctgcggatcacacgagtgtgtgaagacagcctggggcaacacactagggggaaacctctattttgtcttcaaacaaaccccacgcaaattggcgggcaccagtacggggcacaccctctccatgtcccccaactcacctgcgggagagtcataaggcaaccggggaattctctggggaccccgtaggcccgaagggcatgacttctagtccccaaattctgtcccccgcccccccccccgcggggaccaaactacctcttccacaaaaca

SEQ ID NO: 612351 - DNA, 179 bp, Homo sapiens
tccagatacttcgctgtgtgtgaatcggtcagcttcctgatgataaaagaccacaggagacagagacccaggcgccagctgacctgtcaggtgagtgacccaggctaacacagaatcatgagaaatcataattcacagttatctaaaagcattaggttatggggtggtgtcttacatat

SEQ ID NO: 612352 - DNA, 636 bp, Homo sapiens
  misc_feature (66)..(66): n is a, c, g, or t
  misc_feature (81)..(81): n is a, c, g, or t
  misc_feature (611)..(611): n is a, c, g, or t
gcacaggatgtcagccctggtccaagtgcaagatagggacaggggacagccagcgagcgttcaggngtggtcaccagggantgttccaaccacaggggcagcatctcctccactccacatgctggccaagggaacagagctgccgtatcgcctgccaagggtgtggctcaatgctgctgccctggtcctgtatgggcccggggtgcgagaacagacagcaacctcacgcctggtcctttgagctttcttgatttcctcagagagcgcctccttcagctctggtaggcctggtccagcgtgtcgttaatgatgaccacatcaaacaggccgggctccttgctgctctccatgtcggcctgggcagcagcagccggcttcaccaggctctcctcggtttcagtgttgcgctgccgagccgctgctccagcacgtgcagtgaaggcggctgacgagagatgtagatggagcgcagatcggtggccttgatgttccgcacaccctgcaggtccacgtccagcacacagatgcggttcatggcctgcacggctttcagcggcaccttgctcgtgccatacaggttccccgaaactcggcatgctcgattaagtcgnccgctgctatgtcacgctgcatcac

SEQ ID NO: 612353 - DNA, 136 bp, Homo sapiens
gtataggcgatagaaatgagaactggcgcaatagatatagtaccgaaggggatgattataaccaagcataatatagcaaggactaacccctataccttctgcatagtgagggggagcgggcgggggttggagcggg

SEQ ID NO: 612354 - DNA, 106 bp, Homo sapiens
tgcctcaacctatcccctggccagtgtcactcacagggcagacaatttatcttcaccatctcacaattagttaaatctctaactccgatgcaggagctcgtgggaa

SEQ ID NO: 612355 - DNA, 141 bp, Homo sapiens
cacagacaggctcatgccttcatggggtagacaccggtcacacaacagcaggcggatctggttcacggcaaagtagtcacagctcaggctggagcagttccctgggatgtctgcacagcagtccatgcagtactcagacct

SEQ ID NO: 612356 - DNA, 247 bp, Homo sapiens
caccttatgccggggccaacttatgccggggcattctcagaccagagaggcttcgggaatggctcttgaagcgtgtggaaatttaggcagggggaagttctaggctatttaccaaacaggccttttctttatctgggtgggtaaaatagacatggcataatattggccactttaaccattggtaaggtataagttcagtagtcttaagtccgttgatgtggttctgcaaccagcagtaccatccatc

SEQ ID NO: 612357 - DNA, 438 bp, Homo sapiens
  misc_feature (81)..(81): n is a, c, g, or t
  misc_feature (98)..(98): n is a, c, g, or t
  misc_feature (107)..(107): n is a, c, g, or t
gcggccgcctactactactactgctcgaattcaagcttctaacgatgtacggggacatgacggggcaaatggaatttcaancaggcccgcaatgctgngaggacagntgcagcgcacaaccaggaacgccccacggtagtagtgacacccatccaggtacagaatgccggcggtctcagccctgcatctgagggcctgtcccattactcgctggcctgcccacaacctgcgcctatgatgccaggctcagccacgcacactgctgtcatgagtatcaggtgagccagtgcccctctggactgtgcagaatttgcttcactgacttacccaagcataaccagagcttatatggaggctgatcccaatgtacgtatagtgaccctattgcctggactgcggacatttgctgtcagggctttgtattgttgtgggaacagt

SEQ ID NO: 612358 - DNA, 239 bp, Homo sapiens
actccggggaggcagaatatattgaaaaggtagtatatactgtgaagcaaagtccagaagatgttaagaagactttagatggtgaacttgatgaaaagtataaaccgtagaaactttaattccaaaaaacctgaagagtcagctgatgccagacggaaagccgaaatgctacaaaatgaaggcaaaacttttttagctcaagcaaatagcaagctgccacctctcaaaggtttagacag

SEQ ID NO: 612359 - DNA, 243 bp, Homo sapiens
aagacataactgtctcgtctgtagcgggatcattcacagattaggatcgtgctgatgatatgttctgtagtcgggtgatcctctatagtctccccgttggcttttgagcccgcagggggtatccacgcagagcgtgatgcatgaatgggcaagacagaggcagcaccttgggtcccaagagcgacatattgtctatggtgttctgctctttccaccgagtcctttggctgctgaatgtgtctc

SEQ ID NO: 612360 - DNA, 320 bp, Homo sapiens
atatgtaaaccaaaataaatactggagatgacacacacatggatcaaaaacttctctgtcacatggaaagagtgagcggtcagactgacatccttcacataccaggtgggtcaccaggcacaaatcaagaagtagctaccaaactccaagaggcagagtcccatgtcccagcacagaagatcatcctggggcagagagagcccatgagatagtggaggggatactagtaagatgagccccagaagacagaaggatggaaggtgaagtgaaggcagcacagagacaccagtgcttgagcccagcatggacacagttgagct

SEQ ID NO: 612361 - DNA, 635 bp, Homo sapiens
  misc_feature (625)..(625): n is a, c, g, or t
tttgaagtttctgactcctttattgggttcctgcatcctttccccaccagaggctttcaaactgcccaaatgcttgctagtattcatgctttgttcttttaaacccctaaggtaggggcagtgcttgaggtctgccctgattttcttgccattgttcctgtgttgtcctccttattccatagtgtaagagggtgctccctgtgccatgttgtcctttctactcatccctcactcaataccatactggctagaattattgggatcccttgaggaagggtgttttgggtgtgaatgtatgaacgtggtggtccatagaacttcacccctgtaatctcagtactttgggagactgaggcaggcaaatcatgaggttaggagtttgagaccagcctggccaacatggtgaaaccccgtctctactaaaaatacaaaaaattagttgggtgtggtggcgcgtgcctctgagctcagctacttgggaaggaaagaaaagagttaactggtcatagtcgatgactggcccttcttcacatctcacctcccacgtagatactgacacagagggaagacttggtggtagcccctgcaggcatcacactgcatgaggcaaatgaaattctgcacngcagcacgaa

SEQ ID NO: 612362 - DNA, 402 bp, Homo sapiens
tgcacatacccgagtcttattaatgcccttagatcagttatgaccagtttacaaatgatatgcagagatttattgtcctaaccactagatctctcctaaagtccagacctacacctaggctacatgacgttcgtgcgcagttcagatgtctaaaaccaaagttaaagatcttccctaaaccttctcctaacatgttccctgctcattaaatgcggagaaccagaacccaggagtcaccctctgacacctcctcccaaagtgctgggattacatgaaatgagccactgtcggcagaccatggcttgatgtctaatagcagatagttggcatttagcaagcagtcattgataatattgaccaatttgatgtcatgtgagccttctaataattagtgtagaaatt

SEQ ID NO: 612363 - DNA, 223 bp, Homo sapiens
tgactgtcctgctgggcaactcttgctatgaatgtccccctcatctagcttgggctttggacccaaactctacctgcatgcctcctccccttgcctgggctctaaccatttggagtgcagtcatgcgccaggactccctgggacccaggctcctgtgctgcattgccacacctaagtgactctgggacatgggactgtgtgaggagtgtggagggctcgggga

SEQ ID NO: 612364 - DNA, 211 bp, Homo sapiens
cctttttttcagttgttctacatttgcataactcatttctctcatgattcaagtatgctgattgatttgtggactcacactagtcctgtgaagtacaactgaaggcagacgtgttaggcttttgcatctgatgttcattatcatggtattgatgcacctcagcgatcaaattagctagcccccaataagctgcatcatttgtcacatgcat

SEQ ID NO: 612365 - DNA, 303 bp, Homo sapiens
tagaggagcggtagctggcagccgacagagggaagaacaggcctttgatcaagcatggtcagcacgatgatcgaccagccccagttacccaggaggctgtggatatgttgcagcagccagaagatcggttgggcgatgaaccacaggaagccgtagtcgacggtcagttccaggcctggggacaactctttcagcttggactgaatcttcgggccggcgtacagcatggcgctggtttcgaccttgccgccagcaggcacgctgattacggggccggtgtagccaatgatgtagttaccctgg

SEQ ID NO: 612366 - DNA, 420 bp, Homo sapiens
tggaggttggctgggtgtactatgtctcctttggacctcatgccggaaaattggacgcgattgtagatgttgttgatcacaacagtggctttggtctgatggaccttgcactcaagtgaggagacaggccatgcctttcaagtgcatgcagctcactgatatcatcctcaagtataccgcacagtgcccaccagaagtatgtccgccaatgcctggcagaaggcagacatcaataccaaaggggcagccacacgatgggccacgacgattgaagccagagacaggaaagcacaagatgacagatttagatcgttctaaagttatgaaggcaaagaaaatgaggaacagaataatcaagaatgaagttcagacgcgtcaaaaggcagctctcctgtaaagcttctcccaccaagtgcctgg

SEQ ID NO: 612367 - DNA, 474 bp, Homo sapiens
aggatacgcgatcacgtgcattgtgggatttaaaagattattttagggcagttttaggtttacagcaaaattgagcagaaaatacagagttcccatataccctctgccctcacacatgcacagcctcccccattatcaacgtcccccatcagagttctacatttatcacaatcaatcaacctacattgacacaccattatcacccaaagttttccattggcttttaccttgtgcatgattcttcctctgtcattgaagtagtatacaggtgaatttaatgcttcagaaagtatgtaacagtcattaaaaattgaatttagtggaagacacacttctcctttctcctgataaacaaagccttctggaattcatttacagggttccactttccttgatgctagaaagacatgcctgacatagaacctctgttatctattaagtccatagaacctacgaccaccatggcacgtggat

SEQ ID NO: 612368 - DNA, 248 bp, Homo sapiens
  misc_feature (76)..(76): n is a, c, g, or t
tcgagatctcctccaacatcaccaaaacccggaaaacgaggatcctaagctcctcccagccaaatcagggcttggntgagctaacccgcagagcctctgactgcgtacactcagagtaagataaccagcaaggggctgagggaacggccagccgagtccagacatggacagatgtaactaaggaggacaggaaacagacaggtactgtccagctgtaggtaagagagggcagctaaggcagatctcga

SEQ ID NO: 612369 - DNA, 408 bp, Homo sapiens
tcctctggatgcaagtgtatatggagtagccattcttattcctttactttgttaagtaagatcttgctttggccttgatgggtgaactctaggctgaattctttcttgtgtaagatccaagaaccctcttttggggtctggatcgggaacctttcctgtaactctttgacataattttgctgagttcataaacacagattctgctacattcttacagtatcatgccccaggaggccaaaatcctagattactgttttcagaagtgtttacttcaaactcgttatcttgagtggagttgagccctgtctgtgattggccatgtttcataacatgcatgggaaaactgcaactgatagtcacagctctgttttcttgaggccttcttactggtttcttacttctattgtt

SEQ ID NO: 612370 - DNA, 117 bp, Homo sapiens
agagtatccctggcacgtggtaatcaggacttccaggtctaacagaagttagttcatttactgagtttggtgatggcttatcacttctttgtgtgaatgaaaccaacaaatgtaagc

SEQ ID NO: 612371 - DNA, 1662 bp, Homo sapiens
  misc_feature (288)..(288): n is a, c, g, or t
  misc_feature (546)..(546): n is a, c, g, or t
  misc_feature (779)..(779): n is a, c, g, or t
ggttcctcagatggaccagtttgccctctgcaggctcctgggattggaaccctgtcgtcctctgggatctcacagacgggccaccaccatcgaggcgatgagtggagccaatagcaaggcatggtgctgagatggtggccttctcgctctgactaaccggccggattagtctctggcatctcggagtataacaagccactcaaggtctattgcgatatacaccgtgaggctgggtgtgcaatatactacttgtcctatggactcgaagacgctcgatctctctagganagtgggttgtcattggttgtcctgctattcgtccgctcccaacgagctagtcgaagcccgtagtcgatcagtctttccgtgttgggcgttgagtggacaaggcgtcgcgttcaccacaagtcagtggcacgcccataggcatcatacttgcgtacagcatcgcaagcacctgaatcgcacacatttgggcgcacgcacgcacggcataatcatagcaacaatttggcggtacattgtcggtctcgcaatacaatcggntactcccctatctttgtcgccctctcagtgggaagcgaccgactaggcaatggcggccccatgggcacccaatggtctcactggggcggcagtccttccaaactccgaaagttgcaacatactcactcagtctctgacaacagcccttagcaatgggctggcgcggacccattcgcactctcaaacatgcacccctgttggcccctttcgaagcccacaattaaagccggggngtcacttctggaggctgtcggcttgtttgacttccggctcagtctgagagacacccactgaggtcggcaatcccaaagctagtccctggtgggcaatttgcaaggcaagggggtcacaacaagccatcccatttgtgtcgtcacaggacaaattggcaaaccacttgggaacaaggccgatacgggcaaaccggattgttaccttccaaagtctacacctcaaaggcgaacgcccaaccatgggcgcaatgcagaaccgccaagttccccccacaaggtctgggccacccacttgccctcggtgggggccactttgcgttcccttcggcactggcaggtgggtgtccaaaggaacctgcctcgaaatctcaggctcagggcgctcacctagctgtgggcacacacaaaccttcggcttcgccagaagttgtttgcggcacagagttccactccaattttgggcaaacctacagggcatattaagaggggttccaccaggggccggaggccatggatccagaacgtcatcattcaagcccaacactgtgtgtcttaccacaacgggactaggcatggcgaacaccacctgggacagcgccccagcagcgacctcgtaaacaactaccaggcgacaccacacacgagacactaacagagccgacgcacccaggcagctggtacaaaaagcgccaggcaaatacagcctaagcgcacccaccatacttatcacagcggcgaaaagagaggccaccaatagcgacgaaaaatatagcaccggcacacagcaccaagacaacagacaggcaaggagagcacccaaaacggccgacgccgcaacacaagaaagatagcatcacaacaacaggacacgacagagagaaaa

SEQ ID NO: 612372 - DNA, 965 bp, Homo sapiens
atgatgaggatgacgatctcgataccaagaagcagaagaccgacgaggatgactagcacagcaaaaaaggaaaagttaacactaacaaaaaaaaaggccgccgtgacctattcaccctccatttcccgtctcagaatctaaacgtggtcaccttcgagttaaagaggcccgccctgcccaccgtgggcagtgccacccagcagaatgacacgcgcatctccaccaccctaacccaaacccatgagaattgtgctaactagtggtgatggcaacaaaagacaccaaaactttccgaaggcccttgcattgttttatctctaagaagtacgtttcaatacaagtgaaatttcgttcttgtatttcttataatttaccagttcttactattttattgtacactatttggtaagaggatcatgccaatttctataatgatctcggattgaccaaagccaggccattcggaagacggtcacatctggtcctaacttctgacgttgtactgtgtgcgtgtgaccattgtttcatctataactctcaaagggaggaaaaaaaaccttgttacatagaacaacgcaaacaattgaccaacagaagagaacaagatcttattacctgagcatattcccagtttaacctattatagaggtgctaatgatacttaagcatgttactactcaagataagctatgggtcgcgctactgaacagtggcttacaaaaagtgcccaagagcactacgaagagtatacccttcaaaatctgcacccctgtaaatggggtcctcagttgacactgattgcccatgctcccacatcaccactgagtcgagacccctgcttctagacttgctaatggttgcttcacaccccaacatgtcgtgtctccaaacgatactaaaaccgcagggaactctcaatcgtcaggcctgcaatttgatcccacgacagagtcacaataacaatc

SEQ ID NO: 612373 - DNA, 952 bp, Homo sapiens
tagtaccctagacgggcccttccagggctgcgaggtggcatatcgtccatctattgatccgtactcatgttgaccatcatcgtggactaatacgtgtgtttctcttctttgttcaatggtgatgcagtcctcacgcttaccagaatccatgatcgttattgcacctggcacccttccctaatctccatggatgtcggttttctgccaacccacatgcatgccccctaacacttcgtactgtgggcatccaggcactcattgttaccagcaagagtggcgacaccctactgggctggtccacccccaagctctgcatgccctctccgttggcccatgctaaccgcaggcaaagtgggtctctccggcacatgggcagcgaggcccagcgtcacatttaagttcgacatgacccaggccatgctaacgtccggagtaactctacatacagttcaccttgaaacgcgctcagtctctaacatgctcgtcgtccttgcctccctgtcctctactgaccgtgtacgtgtcccttctctgcgacgtgaggagggggccttcaccccaagcccacctcccttgtcctcagcctaactgcagtccgtgagttaggtctctgctcttcttgttccaccagggatgggcacatggggacgcggaatggactttctcacaggggaagccacccagacctgtgggtcatggtctgtgagaggtggcaggaatgcgggaccctcaccccccaagcagcctgtgccctgctggccgcactgtgagctggatgtggtgtctgggtgtggcctggggctccctactgaggggcctctctcggcagcaacagccaagggtggaggcttcagtctccagcttctctgcttctcagctgccatctgccataacacccagaatgacagcgatataagtcatccgcacctgttttcggttcgtccatgctgtc

SEQ ID NO: 612374 - DNA, 149 bp, Homo sapiens
gctctgctcttcacccatgctggagtgcagtggttcaactcttggctcactgccgcctccatctcccgggtttaaagtattctcctgacctcaggctctccccggctagctgcggattactcggcactcgcccgatgacagcccggcgt

SEQ ID NO: 612375 - DNA, 898 bp, Homo sapiens
cgtgagctccagtgtacccacctctaatggatgaagcagtgtgtctcagaacaccctgatgtgcccctgctgagagaacctttgagaaggacaaccctcatgcaaggagccagtggcccagggagtgtcacctgtgggccaacaagcacaagggctgtgagccggcagggcctgctgcagaccttccatcttgccttgagtggctcttcagattcaatgagtgtccagccgtggagaaacatcctgggaccctcagacactgttgtttttcgggagaaaaaaccaaatgtgagtgtgactgggacggcttttcaagacgctgctccaaactcatcaactcctcccagctgctttaccatggagtatagttgatgttgtcctgaataagtgagatccatgatgccatgcatgctggcttggagagcactgtcctgatgatcaccctgtggctctatgctcctcctgctgtgcatgcctctggaatggccctggtctcctcctgagtcgtacctgcagctggctctccatggcctccagcggctccctctggcaggaaatccccgtggtgcgcaacagcaccgtgcttgtctccatgacccatgaagaccaaaatgcttgcaagagggtcaaatttgagctgatcgtgtccgaggcctcctagctgcgcagtctaaacatagcctgtggatcatttcccactttcaacttcgctccgggggcccacgtttccaccaggagcaccagtggctcttctctcggttaccggctttgcgagaccgtcagcgcccaggttccgtttcggaaccttggccggggtctttgcgcaccaatatcttctcgttccgggtttgtgacgtagtccttgtccgcggcccaggcttccgcggggctactgcct

SEQ ID NO: 612376 - DNA, 410 bp, Homo sapiens
aaagcgcagtggatgcatgacagtcccgaggctaaccataataagcttaatcaagatgatgctcgttatggtttccgtagctgccatatcaaaaacatttggactgctccgcttcctcttgagactgagctttctcgccaaatgacgacttctaccacatctattgacattatgggtctgcaagctgcttatgctaatttgcatactgaccaagaacgtgattacttcatgcagcgttaccgtgatgttatttcttcatttggaggtaaaacctcttatgacgctgacaaccgtcctttacttgtcatgcgctctaatctctgggcatctggctatgatgttgatggaactgaccaaacgtcgttagggtcgacgcggccgcgaatttagtagtagtagtaggcggccgc

SEQ ID NO: 612377 - DNA, 356 bp, Homo sapiens
  misc_feature (92)..(92): n is a, c, g, or t
ttttagccccttgttttttccaatgtcatatcccccaggacctggccccaactggcctgtgggtgatcccagctcttactaagaaaaggaanttaggttctggtgccaggggcccaggccctccaaccataaacagtccaggatggaacctggttcccccttcataccagctccaagccccaaaccatgggaactgtttgggatgttgatcccttaaaacttggccctgtgctttaaacccaaggaccccatttctgggctaggaaaaaaaaaacaaacaaaccggggctacctgcccccaggtggccccccagttgtggaagcccatttttaaataaaaactgctcttaaaatta

SEQ ID NO: 612378 - DNA, 391 bp, Homo sapiens
aaagcgcagtggatgcatgacagtcccgaggctaaccataataagcttaatcaagatgatgctcgttatggtttccgtagctgccatatcaaaaacatttggactgctccgcttcctcttgagactgagctttctcgccaaatgacgacttctaccacatctattgacattatgggtctgcaagctgcttatgctaatttgcatactgaccaagaacgtgattacttcatgcagcgttaccgtgatgttatttcttcatttggaggtaaaacctcttatgacgctgacaaccgtcctttacttgtcatgcgctctaatctctgggcatctggctatgatgttgatggaactgaccaaacgtcgttagggcagatcctctagagtcacccca

SEQ ID NO: 612379 - DNA, 143 bp, Homo sapiens
aaaaaggggacccttttgggggccccccgggggctggacctttaaaagggggccccgtcccccccccccttttttttttggggccccccccccctttgggggggggggggggggtttttattttttttatggaaaaatttcca

SEQ ID NO: 612380 - DNA, 639 bp, Homo sapiens
ccaattggccacaaatctgcaggagagcgtggcctgtagaggaatggggagaggggtctctgcatctggagagcatctggggctgtatgagacccacaccaggtcttggctgcttgctttgctttggcaatgacctaagattgaaaatggatgagtggcaatttgggagtctagcgaagatgctttgcaaatgaacacattgccgcagggcacccgttttcagcagtgaagccaggaataattttctatctcatgctacctaactcctggaagttatcatgagacccttgcaggtggataaacacagtctggagaggaatatttctccatttgtattgggacagcagtacctaaatctgggatgttcagagataatctgggcctctgcttgttagggagaggaagaggacattcccaagaccttagcatggattggcatagaaaccagagagttccacatgcatacacctgtctcagatcagggtttctcagtgtggtctgctgacctcgcacattagactcaccttaagcactgattaaaaatgggattccttccctgccttgagcctagttaaatgaatgaggtagtttttaaaaatgcagatgtagaaaaatctacaggttatgctaaacaaaaaa

SEQ ID NO: 612381 - DNA, 916 bp, Homo sapiens
  misc_feature (274)..(274): n is a, c, g, or t
  misc_feature (348)..(348): n is a, c, g, or t
agcggagcatgcgcgaactcctggagggacctacgcggtacgaagtttctactaagtgaaaaggaaggacgcgagggattcgtgtttctctgtggtctacaggcaggcaggcacgtagtgtagttaaagatattatggcacaagacaaccgtgtatatacaatcaagtggcatcttaaatattccgctggcaggctggagttcatgagactaaagatatctctttaaacacgaatccagagacatagtgccttattagatggcttattacaagntctgtattggcagttattacgttacattaatagttattcgcttagaaaaggtattctgcatagtgtgtatatantcgctagcatggaaggaaaataggaattggatcggggtgacagttccttcttagctggggtgtggtgtacgctaacatgggtgggagaatgtatgtagagagatacatggttgtgggtaagggtcaatggcatgctcaaagtgaaaccgagttgaagcgtagtagaatcttactttggagacaactgtcttgactgagaccgtgtagcctgtaacgtctacattacagatagcatatacgtatcaacataacttgagaaaaacgcgagtctttcgaggtggagctttagtttagggaatctttaatacaagaaggcgtttgtgttgctggattatggtaacacccagggatggttcgtcccgctgctgggagccagcccacaagggtctggggcttgttaccacgggcgggtcggtgtaactcggttcgaaattcatatcggggaacacgcaccttcaaggtaaaatccctggggggccaagacggtgggaagaaaccccctgggggcactcaaggcgcacccccgcatagaaggacgtctccagacaaagacagtagggggcccccc

SEQ ID NO: 612382 - DNA, 690 bp, Homo sapiens
ggttatcagcaagatgggagtgaaagtggaattaaaatgatgcatctattggattgttagatcaggtaacggctattaactttaaataatatgcattgaatgctagtggattggttctgaagaagtgatgcattagttttcactggagttttatattcttgattactttcttgcagaagtcatatttgctaaagatgtgaggatattagaaaccaccagaataaccaatctttctgacatcgtattgtaccataacgtaggcatagtacctgaccagatgaagtctgctaaactagtaatgtctcacgatactacactacctggcactgtatgatggtctggacttactcgtccgcaaggctaagctaaaactacatgcgacatgtggcagaggacgagcattcaacatctacatttgtccatcatctttacaatggtagtcatgcaggaaccccaagagcgccatcggtggcgcacaggtgctagcacgcgttcgcaattggcgttacacgtttgtcgcaggattcatctcacttagtcccgtctttaagactcgtaaatccttgcacccgccttagcttccgctttggcagacccaataaatttttatttactttagcgccgcaggtttcgatccttttaaggaacaagtatagttgttggcatgtcgagggtagtcaattcactgct

SEQ ID NO: 612383 - DNA, 221 bp, Homo sapiens
  misc_feature (2)..(2): n is a, c, g, or t
cnttccgcttgtgcctcatatttgtgttataacttgtcgttataattgcaggtctctgtttcggcccattttctctgccttctttccaagatcaggggttaaggtgcaagaatccatttcgggcagcataacaagtgacatgaagggcgggtcccattgtgtgtgtgtgctgctgtttcctgggctcttggtgagagggacaaaacaaggaatccagggtt

SEQ ID NO: 612384 - DNA, 184 bp, Homo sapiens
gcacatatcgtggcgaggctggagtgcagtggtggacgcatacgctcgctgcagcatcaacctcgagcaatcctcccacctcacgcttccccacgcagcatgggcactacacggtgcagtgccaccacgcccagcctacattttcactatttcattggttggacgacacaggctttttgccatg

SEQ ID NO: 612385 - DNA, 314 bp, Homo sapiens
ttccactatgataccaaaaacgtggacagcatcgtagtcactttcataatggcatctaaaaagtcttggtacagattgcatttaatgtcctcatttgaagaacacctggcatacccaatgaagcaggctatggaataaaagaaacaacaaatggattcattcattcatttgttcactcactcattcattgttgggaatacaaagggaattgatgcacagttcatgccctgcagaaaaatacagggaacacaaactcaaaagagtcgagaaatgtacattatcaggtgaacacacaaacccgagaagtctttccc

SEQ ID NO: 612386 - DNA, 745 bp, Homo sapiens
  misc_feature (316)..(316): n is a, c, g, or t
atcacagccacacacgttgctatgtaagcaccagtaaataagcttggcaatgttgtagcacctccacaaaaaagaatgagtttgtagagtggatataaagccaccggcacctccctacacattaaagaacgtgtacaagcctcagtttcagatatccatacaaagtatatgagaacacagcccagactgcttgataaacaacacttaaacagttccacgagtttagtattcgcctcgtggtaagatatgagccataccagagatgagtgacagagtcttcattatgatatcgtactccggcacagcctaggctcangcactaggtatgtcagaataagctgccaagtgtatatacacacggtgttgtgccaagatagcttattagagtctaattttgtgcgatattcttaaattacttcacagaaacaaataaggcacagaggacacttggtttccttaccagtagtggccttaagttacacactagcatgtgcagagtttagagatattcagtagcattagtggtgcaatagccattcatatctagtttcaggaagagtgtttagaaaaagaagaagagctcgccagaaaaggcttacaatctgaaggttaaatgcagaagaattcacacaacgactggaggcagcatgggggttgttaactagggagctgctgggaagagctgcattctgagtttttgtgaccattttcctgcagttttctcatgaagaactctggtcttctc

SEQ ID NO: 612387 - DNA, 961 bp, Homo sapiens
ggacttacatcctcattactatgtctgcctagacaaacatcaaactacgaatcgcactcacagatcgcatcataatccgtctctcaaggacttcaaactcatgctcccactaatagctctacgggaatgactctctagcaagtcctcggcataaccgtcgcacttaccccaccactattaacctacatgggagcaactctctgtgcatagataagaacacgtacctcctgcatccaactactcaactctcctacttacaggactcaaccatactagtcacagcacctatcactccctctacatcatttaccacaacaagaatggagagacatcactcacccaccacattcagcaacatcaaacaccacatcattcacaccgagaaaacacaccctcattgctccataccaactaatccaccagtctccatcctatccctcaacccccgacatcattaccatcgaacccaccaaaggccactaataaaacattaacataagcctacatctatcactatcacacccacatcatcctcaacccctcacccatatatcaacatcaacctaattcacaacacgaaccactagtaaactcaaccactctactacaacgcacaccacccacatgtgccacccaagctacacatactcattaactcaatcggacccatagctccatatacaatgccacaccgaacacactcagcgatccctcaccgaacttcacccaactgggaacacctcgtgccttaagatcaaaatagaatgaacggagtagccggagcagctcatcaaacaaggagtagcaaaaaacccgcgcaaaccgaggataaaaatcgcgaacacgcagaagggcagcaataaaaacactcaaaaaacatacaccagacacacagtggcagagacactagacccagcagagagatgtaacgccaagcgagagaggtacacgcacaatgaga

SEQ ID NO: 612388 - DNA, 148 bp, Homo sapiens
gtcctgggcaggagcctctggttccccggggtgggaggccccagccgagggtaagctttggtgggcccgaccccacttcgggcctccagaattgtcttgtgcttagtacctttgttatgtgcctcaagctgggacagggagttcacag

SEQ ID NO: 612389 - DNA, 1162 bp, Homo sapiens
tgaataaagtggaaaagacccaaacacccatcagcagtggaatgcgatcaacaaatgtgtgccggaattcctcgcctatctggtctttcatcgattgtgcaggcgcatctgttgaagcctcgggactgttcaccatgcaggaattgaggcacgcacacatcattcatcattgtattccaactgccatctgtgctgcaggacgccttgttgtagttcaagctcatttgcagacctcgctgcagctatgcaccctcagtggtgagacgatctcgaaggcaagagaagagcagtagtagcaaatcagaggactcagggtgatacgaccacagtgatatggcgatacgaaaggactgtgtaccatacgacctatccttcgtggcattccacgcgtgtactccaagcaagaggcactccgaaaacatgcgaggataaaggccgtgtagaggaaattcggtgatagcaagttagcaagcgaacaatatcgacacacatcgaaacgcacatagactttggtacagatgacagcaaataataccgacacagtggtgtacaattggcaaaagcatataaggggaccaagagaacgcatggaagccatgcacaggtcaaccacatattgttcacccggaagattcacagagagaatattcagacaagacaaaagtcagtactagggaaaagaggagaaagtagatgacaattaaccaatatgagaaaaagcaacactacacagaagactcaaacacagtacccatgacgaataataaacgtacagaggtacacagattgaaagatcgaacatgagaatgacaaatccaatgaacaccaatccaacgtacagtctaccatcaagaaaatacaccactgaccaaaaacaattatatccccgcagatatagaataacatggagcagaagaagagtaacgatacaagagatcaaccacaatccacaagatacaacacatagcactggaacaagaaattgagggacagttataaagacaaagagagcaaacaaaaaaagggtcagaaaccattagaaacgatagcaacacagtcacatgcattgaagacactaatcaagccattaccatcacacacgaagacaaaagagtacgacagccaaacgaataaagataacgcaacaaagagaagaacaaaa

SEQ ID NO: 612390 - DNA, 196 bp, Homo sapiens
gtttttgctggggggtaaaaaaagcaagttttttcttttcatggttatttaaaacattagccgcccgtaaataattcttgttataatgctctggaatgtgttgtaaaagttgtattagattagttttaaacccctgtttgaaaaccccattgttttggttatttctattaaattaaaaaattgaaaaagttttcca

SEQ ID NO: 612391 - DNA, 107 bp, Homo sapiens
ggcatctccatttttactcaacacaagcattctagacccatatagtgaaacacggcacaagccctaaaaaaatcaaagcgcaagaaattctaagagtgactagttct

SEQ ID NO: 612392 - DNA, 597 bp, Homo sapiens
  misc_feature (2)..(2): n is a, c, g, or t
  misc_feature (27)..(27): n is a, c, g, or t
  misc_feature (37)..(37): n is a, c, g, or t
  misc_feature (165)..(165): n is a, c, g, or t
anaacctcatcttttgcggaggtgctnggcctctacngtctcatcgtggccctaaatcctctccaacaaaagtagtcctttcccacccatccagtcaacaggataggatgtaaaagatcaccccctcctcattccaagaacgaacagcctgacacatgccaacgncagctgcccctcagtagttggtcttgtaaatgtgcagtgtcctagtgcccaattgtctgtcgcccccgccttgcccctactgcaccgtgctgtggacatacgggcccactcaatctcccaacccaggcccctgaccagtgacgaagtcagcctctggttaccccacccaatcgccctagagtgctcctgtgtataagaatgaactagagttgtcatttttctcttcactggatgtttatttataaaagatttgacctattcatgcgtctgtggagcagctcctgtctcccaactatatagtaatcattagtagactgttgccttgtggggttcctgttgctgagactccttggatggagccacccttccccctgccctgaacagccagggtggaggatagagtgctactgctcctcagagctggctcccagc

SEQ ID NO: 612393 - DNA, 681 bp, Homo sapiens
cggggggtaaaggggaaatttggagggaacccctttccccccgttttaaaaataaaaaagggttttagccaggttgttcctaaacgaggtttaatggatgtgtagggaaggcccccccccggggggggcgctgaattgtttttgtaccaacaagcccgggggaggggaagagaggacattttttttttcttggcggcccaagatgagcacctttttgttaaacaccccggcaaatttttgactgttcctgttaaatgggggggcaggtcttcaagcttctctttcccatgttgtcctgaaatgaaccaatgatcttagatgcgacttgggtcaactgggtgtcggtaaggtgtttatccatgaggctgcccgctccggggtcacaaaggagggagcgctgaagctctacaggcctgtgtataaggttgagctgcccaccccagacaaagggtttgaagcggcttggtccacgtttctagggtctatacacatgtttattcctttcaaggacggggtgtcccaaccctgagtcttattaatcattgaacaaaatggcaagtctccccagttcctgggaatggtgatgaaaccctttcaaagaaaactgcctgttgctcctcaagccctcccctccatccctggcccctccgtggatgacattaaaaaagggttgagctggaa

SEQ ID NO: 612394 - DNA, 87 bp, Homo sapiens
gcggccgcctactactactactgctcgaattcaagcttctaacgatgtacggggacatgataatgataataaaccttgtacagtggc

SEQ ID NO: 612395 - DNA, 303 bp, Homo sapiens
aatttagcctggatgctgactggcacccagagccaaagatcagcaacggacaagaagaggctggcgagggcttgaggtgcttcaaagaggaagctacacagatagtggataaatagcaggcatttcttgtacttttgccaccagaaaactcatagtgggttggcctatctatcacgctttttaaagaacaggcaaaaaaggattaactagggacaagtgctcttccacccacccctcaggagatcaatttcctctccctgacacatataaatacacacatcctcgaagggtgagttagaaagt

SEQ ID NO: 612396 - DNA, 420 bp, Homo sapiens
ttgggccaacgcaccgtgtccgagggcaccacggccgtcaccaagtatccagctccgagtgagcctcccgctgcataccagtaggtctttgtttttgtgttccggcgtgtctgacccaggtcgtatctgctccagttccttaatcaggctcctagatggccattgtgtaggatcagaagaaggatggaaagaagcgcaaacgcagccgcaaggagagctactctgtgtatgtgtacaaggtgctgaagcaggtccaccccgacaccggcatctcttccaaggctatgggaatcatgaactccttcgtcaacgacatctttgagcgtatcgccggagaagcgtcacgcctggcgcattacaacaagcgctcgaccatcacttcgagggagatccagacggccgtgcgcctactgctacccg

SEQ ID NO: 612397 - DNA, 229 bp, Homo sapiens
ccccccccttttttagggggccccaaaccctattttctttttttaaatcataaaacggccgaacagatttgggttgttttgaaaaaaaaaaagccctataaaaataaatctaaattcccgggttttttttttaaaatttttaaaaacccaggtcctttggcttttttttttggggaaaatggaaaggttggttttaaaaccataaattaaggcccgaagttttattgga

SEQ ID NO: 612398 - DNA, 128 bp, Homo sapiens
aatagcagcagcagcagcggcggcagcggcgggcggccgcgcgggtgtttatgtcgggtcgcggggtctcgcggcagcatggcggactacctgatcagcggcggcaccggctacgtgcccgaggatgg

SEQ ID NO: 612399 - DNA, 528 bp, Homo sapiens
ccataggaaatcttagctcatcagacagatctcgctggcttcttctccttcagtgcgtgtctcgaattcctatcccctcatagtacaggtccccgatggctggtcagcttaggttgggtctgccagttgaagaaggcatcaggcagtttctggtagtcgatgtcactttagcccatcttaggccgaactttctctcgcattttggacttcatggtcttctgttctgccttctcctgcagggcctctcgcatctcctggatgcctgtgcgttggatgaagtctggcagttcgaaggggggctgctcaatgccctgttagccctgcaggtattggcgcttaaaacaccagtggcgtggcacaggcacagagtaccgagtggccttgcggtgaaccaagagcttagggtcctgcgctgtcaaatcgtgcatctccacgacatcgggccgagccaccagctgattgagttcagacccagtgaagcggatcattcggcgcaacttcttcttggccagctcgggggtcagctgt

SEQ ID NO: 612400 - DNA, 301 bp, Homo sapiens
tactgtcctttggcatgaagcctggtgaacctgataatgtagccttcaagttcccttattgagccttgggctcccttcaaagtatccaagccaaccctgttttgggaaactcccctagataatgccctgaaccccaataaagggtccagcccccaggtccctcccttttttttggtcccccccctttgggtgggcatgggggtcctcaatgtttccaagcccttccagtaagccctgcaaggtgggctggcccctgttttttggaatttgtgagtaataaacaatttttttgccattttga

SEQ ID NO: 612401 - DNA, 176 bp, Homo sapiens
tcgtaatcccagtgactcaggagactgagtgcagagaatcacctgaggccagtggtttaagaccagcccagtgcaacatagcaagaccctgtctctgaaaaaaatcaaacatttggccgagctgcatgtgtggctcatgcctgtaatcccagcaccttgagaagctgtggcggtcg

SEQ ID NO: 612402 - DNA, 310 bp, Homo sapiens
  misc_feature (47)..(47): n is a, c, g, or t
  misc_feature (81)..(81): n is a, c, g, or t
aggagagcaagatggggtaagcttcgcacattgagggctgtcacagngtctcacacctgtaatcccagccctttggggggntgaggcggcggatcacttgaggccaggatttcgagaccagcctggccaacatggtgaaaccctgtttttactaaaagtacaaaaattagccaggcgtggtggtgggtgcctgtaatcccagctactcgggaggctgacaggagaatcgcttgaacccggaaggcggagcttgcaatgagccaagatcgcgtcactgcactccagcctggacgacagagtgagactttgg

SEQ ID NO: 612403 - DNA, 114 bp, Homo sapiens
actagcttaggttcgagcttagaaggctgcagagttatatcaatgcctatcgaaacgagacatcttcatcgttaaaagcagtatgcaagcaatcaagcatcactgggagtccaa

SEQ ID NO: 612404 - DNA, 133 bp, Homo sapiens
ttttgcaaattttggggcccccctttttacaaaaggaatttcttccctttgtttttttttaaaaaatttgggaatttttttgggttttaaaaacttttattcctttaccccccgggtgggccctttgggttca

SEQ ID NO: 612405 - DNA, 189 bp, Homo sapiens
aaagtaggaatgtaagcccagagtgtcaaagcatgtaatgaactgtccccaaatggttcttgtcctacaagtgggtagaacaaataagcaggagcaagaatgaggaagaggctgggaaattcagtggggttcggccgtggaagtgtgtcctttgttcccgacgtagctgccacgtagcaactgctttgg

SEQ ID NO: 612406 - DNA, 199 bp, Homo sapiens
  misc_feature (55)..(55): n is a, c, g, or t
  misc_feature (95)..(95): n is a, c, g, or t
  misc_feature (130)..(130): n is a, c, g, or t
  misc_feature (165)..(165): n is a, c, g, or t
  misc_feature (198)..(198): n is a, c, g, or t
aggaggacttacagcggatcctgcagctgtcactcactgagcactgagccattancccgggagggctgccaggccactccctgcccgcttttgtnatttatttatttataaactctctgctgctgaagcnttggctggagccccaggaatgacgcacggcagggnagacgtgacgatggaataaagaaactgtagcanc

SEQ ID NO: 612407 - DNA, 1092 bp, Homo sapiens
gccttgtccctgtcacagcggcaggtcacccgaggaggagtcggggtcgagtccggcgatgtggcagagcacctagtaatggcctgtactcgtgtccggatgtccctaccggcgatgctcggggcccttggtattggccttggagagctggtggctacctgtctcgctctcttctgtccctccgtgcgtccgctggtgagaagtcagcagcctggttctggaccaggcatgagcctgcacgtagcactgttggccgggccagcgtagggtgcgcgcgatgctcaggctgtggtgactgcatgcactgcgtggagactgaccgggagccatgcagtgtggatcgacgatggacctgggagcatgttcaacacctctcttgcacctgacacgtcgtacaacaaagtcccagggttgcctgagaaacggaaggacttacattggtagctggcatggagatcggacactagagacccacgaaggggccaatgaaaagcccccagagagacatcaagattccattgcttcgagcaaacattacctgggaatcgtagcagtcaatttcacctgtcggccacattgctttcgcctccgattgcaattgcttccacgtgcattaccggccccataaatgaagccgatggcaggccacaaatggggactagtaatgggtgcataggtgggggagcattacgtgaggatagaacccgggggggaggttacgaacgcctcaagaagaaagggtggccccaaagtccgttaccgagaggatgacgtagccaagcaccgcattatgcacacaccggcagacggctcgcagtacaactttggcgtagtacctttgtcgcactccctgtggtgctgttgaggggcccctgggggaacaccgtggaactcctgaagcgttaacgcccgatccgagttggaacgcgaacttcccgtacgaagtgtggaacgcgtgaaggggtctttaaccaggagcatttacatacccaaccccgagacgtggccccgacacgacacgggtcgaaagacttcgggcggcagcaacgtaagccaccttcgacatggtgcaatgcaaaggcccatggttag

SEQ ID NO: 612408 - DNA, 118 bp, Homo sapiens
atacttcatttagccatatcgtgagctttctgggcagagttggctgacctttgcccagctccagccagcacattgcttgtccacatgtctttttacttacatcccatcgcgcaacctg

SEQ ID NO: 612409 - DNA, 207 bp, Homo sapiens
atggatatatggttagatgtgtagtgatagtaggcctagatatgaggagcgtaatggagtggaagtgaaatcacatggctaggccggaggtcattaggagggctgagagggccctgattaggggtcatgggatggggtttactatatgataggcatgtgattggtgggtcattatgtgtagtcgtgcaggtagaggcttagtagaag

SEQ ID NO: 612410 - DNA, 1101 bp, Homo sapiens
  misc_feature (1)..(1): n is a, c, g, or t
  misc_feature (566)..(566): n is a, c, g, or t
  misc_feature (601)..(601): n is a, c, g, or t
nctgttctgtggttccctcgttacaccccctggtttgtttataccccggtgtccctttcctcgggtgggctcccccacctcgttggtgtggcgcttcttgcccgtcgacccgtgggttgtctcgctttcgttgggttgcctcccccctgcgcgcgctcgtggcgtgggtttattgcgccaacaagcgcacacattctcttcctagtggtggcaccctccggctgcttctcacaaaggcgcgtgtccccgcctggcggccccttttgtgtgaggacctacaagcgatctgctttcttagctcgccaagagatgtggcgtccaccgagagattgtcttcgaaggggggcgcctcttaagagcggccccgagcgagctatacttgcccgtgtggacccacacccctctcgtgctgtcggcttctctcctttcggggacgagtaacctgtgctgttttttcttccagccgctcgtggaccctccccgcgtgggttggttaccccgctcctcccccgatttggctgctcccccgcggatatagggctgttctcttgtcgagggcacacacnagtatcgcagcttgttctgtctcgggtggccaacnccgcagagcactcggagacgacagagatgtcgccccccagaagaggccgtctttgggcgcacgcaccacgagagcccctttctctcccggggattatgtctgcgtcctctcttataggaagcctgtttctcccccccactgcagatgtggtgtacaaccttaccgcggagaagagccaccaggggtctctcttgtcagcccacatgtctcctgtaaccagagatgttgttgcgcccccacacacactaggggggcaaggttcaccaacgggctggaactcattcgaattcgctcagtcttgcccctcgtcgcgagcccgtcccgtaagacaattgtagtctagggaagcccaccggtaggtcacccctcggggcttccgtccggtgctccatggtttctgtccccggcccggtgggtgtgtcgtccccccctttccccccccccccccctcggtcaccccccccccccgggtgaaaaaatttttgttggttgggaaagta

SEQ ID NO: 612411 - DNA, 761 bp, Homo sapiens
  misc_feature (359)..(359): n is a, c, g, or t
  misc_feature (607)..(607): n is a, c, g, or t
  misc_feature (717)..(717): n is a, c, g, or t
  misc_feature (727)..(727): n is a, c, g, or t
tgggggcaagattccattggaggaaataactgctgatatggtgtgaatagcaagagaactagaattagaagtggagcctgaagatgtgactgaattgctgcaatcccatggtcaaacttgaagagataaggagttgtttcttatgggtgaacaaataagatggttcttgagatggaatctattcctggtgaagatgctgtgaaagttgttgaaatgacaacaaaggattgagaatattctgtaagcttcactgattaaggaactagcagggttggagatggttgctatcaagcagcatcacatgctacagagaaatattttgtgaaaggaagacttaatgcatcaaacttcattgttgncttattttaggaaattgtcacagacaccccaacctttaccaaccaccaccccagtgagtcagcagccactaacatgaatgcaagaccctctaccaatagaaagattatgacttgttgaaagactcagatggttattaatacgttttagcggtaaagtatttttaaattatgtacattgtttttttggacataatgctatcacacacttaataaactaagctacaatgtaaacttagttttaaacattntttttattattatttttttgagacagagtctctctctgtcgcccaagctggagtgcagtggcatgaatctcgctactgcaacctctgccttctgggttcagcgattctgngtctcacctnctgagtagctgggattacagcgcgcatccgcctg

SEQ ID NO: 612412 - DNA, 659 bp, Homo sapiens
  misc_feature (109)..(109): n is a, c, g, or t
  misc_feature (657)..(657): n is a, c, g, or t
ggaagatgcaagcagaaatttgtccatgtatgtctgtatcccttgacctactcagaaattgttgggatctgttttctataaaacataatttctcctttgtatctagtcntccttcttccacaaatgctctgatttttctttagtgatctaccccttccccatgtgcatcaggtgaggctgacttgcatccccaggacctctgggtctagccaagtagtcaccatgtactgttcctctggccatggggattgcttcaggaccagtgcaaaatcgagaccaatgagagctagtgaaacttaattaggaagctttggtttaatctttcagggaagctggatatgaaaatgaaagaatgtaggttgtgtagctgctgcagtctaggaatggagagaaggaaaagctgctcttttggccttgttgatccccagatcgtgctgcaccagtctacctctggactattttttttacaagacccaaaggattttctttgcaacagaaaggatcctaactgatggcagttattttccttttaggtgatgcacaataataagggtatcattatttggtatagaacccctgtctacacactgctcaaactagagtagtatattttaacttcttctaatcaagacacaaccatgaccttacaggataaantt

SEQ ID NO: 612413 - DNA, 327 bp, Homo sapiens
  misc_feature (7)..(7): n is a, c, g, or t
  misc_feature (24)..(24): n is a, c, g, or t
  misc_feature (215)..(215): n is a, c, g, or t
ccgcccntctaggtcgtaatgtgntgagagtcgggacccatggaaaggtgagaggaatctctacatcgaatcatcgtgtgggttgatcatccagtggggagcaatcttgggtaagatggcactgacaaggaagatgaagtttacccggcccttattcaaggatcttgctgcctttgacaaaatcccatgatcaagctgtcccgaacctacccaanggagcacaaaagcaaagcattgcaatcccgtgacttgcaaatgcttgggtggggggaaaaggactttaaaaaggtgggatttaaaaggaccctgcggttttttggatggaat

SEQ ID NO: 612414 - DNA, 148 bp, Homo sapiens
cagagagaaattagaaatgcctgtatagatgtctcgaggaactgttacttttgagtccccatgattttcttcatactcgggttccctttctacaacacaaccatgtacttaccatcacagtaatatactaatttctctcggaccaatg

SEQ ID NO: 612415 - DNA, 305 bp, Homo sapiens
gctcgacctggagtccacccagctctgcccaacctcccaacctcttgctgcctaccctggaataagcagaagcttccaagggaatgtggactcagccccggaattgcctgtggacttcctttccctggctcgtggcccccaactcctccccatttgtgcttcctgatgcctctacaggacatgcacggcttgtccagctgtccccgtgccatggtgggtttccgttcccaatctgccccttcaagaagcagaactgctccttccccaggaacgtgctacttcttaaagctctccacacaagctgg

SEQ ID NO: 612416 - DNA, 193 bp, Homo sapiens
agtaatcctcgtcggcttcagcttctgggaatcgagatcgtcatcctcatcatcttcagctgcccgctatgcccgtagctgactcagcttcctcatcttacatctccatcctcttcctcaccatcaccttcttctccctcctcctcttacctccccaccttcttcctcttcttcgtctacctcagcgtcctgg

SEQ ID NO: 612417 - DNA, 555 bp, Homo sapiens
  misc_feature (129)..(129): n is a, c, g, or t
  misc_feature (132)..(132): n is a, c, g, or t
  misc_feature (141)..(141): n is a, c, g, or t
  misc_feature (144)..(144): n is a, c, g, or t
  misc_feature (149)..(149): n is a, c, g, or t
  misc_feature (154)..(154): n is a, c, g, or t
  misc_feature (161)..(161): n is a, c, g, or t
  misc_feature (177)..(178): n is a, c, g, or t
  misc_feature (180)..(180): n is a, c, g, or t
  misc_feature (185)..(185): n is a, c, g, or t
  misc_feature (190)..(190): n is a, c, g, or t
  misc_feature (192)..(192): n is a, c, g, or t
  misc_feature (194)..(194): n is a, c, g, or t
  misc_feature (196)..(196): n is a, c, g, or t
  misc_feature (201)..(201): n is a, c, g, or t
  misc_feature (205)..(205): n is a, c, g, or t
  misc_feature (208)..(208): n is a, c, g, or t
  misc_feature (210)..(210): n is a, c, g, or t
  misc_feature (217)..(218): n is a, c, g, or t
  misc_feature (222)..(223): n is a, c, g, or t
  misc_feature (226)..(226): n is a, c, g, or t
  misc_feature (231)..(231): n is a, c, g, or t
  misc_feature (234)..(235): n is a, c, g, or t
  misc_feature (238)..(238): n is a, c, g, or t
  misc_feature (241)..(241): n is a, c, g, or t
  misc_feature (248)..(248): n is a, c, g, or t
  misc_feature (266)..(266): n is a, c, g, or t
  misc_feature (268)..(268): n is a, c, g, or t
  misc_feature (273)..(273): n is a, c, g, or t
  misc_feature (287)..(287): n is a, c, g, or t
  misc_feature (292)..(292): n is a, c, g, or t
  misc_feature (295)..(295): n is a, c, g, or t
  misc_feature (300)..(300): n is a, c, g, or t
  misc_feature (311)..(311): n is a, c, g, or t
  misc_feature (313)..(314): n is a, c, g, or t
  misc_feature (319)..(319): n is a, c, g, or t
  misc_feature (324)..(324): n is a, c, g, or t
  misc_feature (326)..(326): n is a, c, g, or t
  misc_feature (330)..(330): n is a, c, g, or t
  misc_feature (344)..(344): n is a, c, g, or t
  misc_feature (351)..(351): n is a, c, g, or t
  misc_feature (354)..(355): n is a, c, g, or t
  misc_feature (359)..(359): n is a, c, g, or t
  misc_feature (366)..(366): n is a, c, g, or t
  misc_feature (368)..(368): n is a, c, g, or t
  misc_feature (377)..(377): n is a, c, g, or t
  misc_feature (382)..(382): n is a, c, g, or t
  misc_feature (384)..(384): n is a, c, g, or t
  misc_feature (394)..(394): n is a, c, g, or t
  misc_feature (397)..(397): n is a, c, g, or t
  misc_feature (411)..(411): n is a, c, g, or t
  misc_feature (415)..(415): n is a, c, g, or t
  misc_feature (421)..(421): n is a, c, g, or t
  misc_feature (425)..(425): n is a, c, g, or t
  misc_feature (430)..(430): n is a, c, g, or t
  misc_feature (432)..(432): n is a, c, g, or t
  misc_feature (434)..(434): n is a, c, g, or t
  misc_feature (440)..(440): n is a, c, g, or t
  misc_feature (482)..(482): n is a, c, g, or t
  misc_feature (501)..(501): n is a, c, g, or t
  misc_feature (507)..(507): n is a, c, g, or t
  misc_feature (513)..(513): n is a, c, g, or t
cttgatagggaccctggtgcaactacaccaccggtacagtcgccgtaatgtggtcagtacagggagtggcatggctgaggccagcctggaacccagcatacgcccgggtagccagcccctggagatgtnccncattgggcngcngcagnccttnaagcccncagaggcatgaggaanncncctcnggccnantncnttgcncccngcngncctcccnngccnnggngaccnttnnccnccngcctggngcgcgcgacccggggccncngtttncccccccccccccnccccnccnccccngtggccccctncnnccccnggtgncnccgncaccccctgcggancctgaancanncccngacaagnanccccccccntctgncnttgcggcctnttnactcccccccccantgcncccccncacnccccnancncccacncccccccccccccccccttccccaacaccccacaccaccccncccacacaaacctgcccancccacncacccnccagcccaagatgagcagaaacaataaagtgagcatttttcc

SEQ ID NO: 612418 - DNA, 391 bp, Homo sapiens
  misc_feature (1)..(1): n is a, c, g, or t
ntggagcaagattgatagcagtcatgtgacgacggagataaataactcaggcaggatgtatagattaagcatgagacaccgaagctccctgcagaggccagggagagaacggaagaccttcatcttaacaaattgtatgaggagtctctgtccatttgttaaaggcattggatcagagacaagagggctcagtgtttctcttgaggcctgaatggctgaaggcggtgagttcccgaggggcgtcatgggttgtccagcctttcattaactgcacatagtgttagccagacaggtgtacgtgtttgtcatcccatctaagagactgaagcaggaggatcacctgtacatgactgcttctttcaacattttaaaatgtgtaacttctattaaa

SEQ ID NO: 612419 - DNA, 1842 bp, Homo sapiens
taaggcatggacaagctgaatctaaaatgtttatgacaaataatctataacagccaaataactttgaaagaacaaagttgaaagatttaaatcatatgacttcaacatttattataaagttatagtaatcaagacatgtagtaatgccaactaagatagacaaatcagagagtccagaaatagaaccacacatctatgataaatggtcaactgatttttcataaagtgaaaatgcagctcaggagaaaaagaatagttttttaaacagtgctggaccactggatacccataaacaaaaccaaaaattttaaaaactcattttggctgagtgcaatgccttatgccctgtaatcccagcactctggggaggcagaggtgggaggactgcttgaggccaggagtttgagacctgcctggtcaacatagtgaaaccccatctctacaaaagaaaaaaattagtcaggcacggttgcatgtgcctgtagtcccagctacttgggagcctgaggccaaccatcacttaagcccagcagtttggggctgcagtgagctatgatcccatcactgcactccagccttggtgacagagtgagaccccgtgtcaaaaaaaaaaaaaaaaattttgagcattctccaagtcttcgccttttctggttttaatttaaaacaaacaaacaaaaaaaacaaaacaaaacatagtgcatatgtagtttttgtctgcccagaatccctcttttctgcagaaaactgccttactcccactccacgtgttcctagtaagataacaatcacagtgccctttcagctacctggctctgggagtgggttcagtatcaacctattctttcagttcttctaaagtaaactgctgatggaatatttctttagtctttcaagagggcagagccatgcttcttccttaatatgtgtgttcatgacataaaacccttcaaacctctcctaatcttaaaagtattaaatgtttacatcttcctcaaacataatacttgattgacagtcaaggagttccaacacaaaactattaatatggcgagacagcaaacaccaacccttcttatccactcaattatactatgaaatgagttatggttgaatcatcagaatgttctggaatggctgggtacagtggcttacacctgtaatcccagcactgtaggcaggtggatcacttgagtctaggaggctggtcttgaaccctggaggcagagtttgccatttgccattgcattccagcctgggcaacaagggcgaaactccatctcaaaaaaaaaaaaaaaagactacagaccaggcatggtggttcatgcctgtaattccagcactatgggaggctgaggtgggaggaccacctgagcccaggagtttgagaccagcgtgggcaacaaagtgagataccatctccacaaataacaaacaaaaaacaagaaaacaagattgagaaagaggttgccataatctctagtagtctgtacagtcttcctcttcttctttttttttttttttttttttttttttttttttagacagagtgtcgctctgttacgcaggctggagtgcagtagggcaatcttggctcactgcaagctccgcctcctgggttcacgccattctcctgcctcagcctccaagtagctgggactacaggtgcccgccaccacgcccggctaatttttgtcagctggtggaatgtgcctgtggtctcagctactcggcagactgagatagatcactggatcactggagctctgggggtcaaggctgtagtgagccatgattacatcactgcactccagcctgtcagcagagggaagaccctgcctc

SEQ ID NO: 612420 - DNA, 661 bp, Homo sapiens
ccagcctgggtgacaagagcgaaactccatctcaaaaaaaaaaaaaaaaccaaagggaaacataaaaatcccctataaatatttcccaggaaatatttaatgggggctggatttaaataagggcgtggtatcatggatggataacgtgggaatcgattttatggtctttgggtatttaaatcactggagttaatcaaccactggcaaatcccattggacaaagattagcatggtaaaaaacagatacgggggtagatttctagaaattcattcacatttaagacttctaaaagggaataatagcctttggttttcatggagcatattcgcacccctatatgaattacagcatttaaggttcaaaatcagtaactttaaatctaggaaatggaaaaatattaagtggcaaagcaaaaaagggtacttctggaaaatactattcacggtgttacctagactatgaggtagtcccttaggtggtttgacctggaagtggagtgggtggaagctgtggccagtcggtggggggtgtgtactcgtatgaaagttctctacccctactgtgtgagtgcccacttcagatgtccagtctcagagctagtcgagagactcaattgggttaacccctcgctttgactgtcggacttaactcattaattac

SEQ ID NO: 612421 - DNA, 208 bp, Homo sapiens
ttgattggtggtattcgcagcaaccacgatgagattgaagactactattctctttttttgcttgtttttgagatggagtcttcctctgtcacccaggctggagtgcagtggcacgatcttggctcactccaacctccgtctcccaggttcaagtgatttaagattggagactattattctaagtgaagtaactcaggaatggaaaagc

SEQ ID NO: 612422 - DNA, 230 bp, Homo sapiens
  misc_feature (52)..(52): n is a, c, g, or t
  misc_feature (156)..(156): n is a, c, g, or t
  misc_feature (194)..(194): n is a, c, g, or t
gatccacaaaagaagtgaaagtagccttaactgatgacattccaccattgtnatttgttcctgccccacgctaactgataccatatattcttcccccgcccttgagaatgtactttgtacacctatcccaaacctataagaactaatgataatccnaccaccctttgctgactctctttttggactcagcccgnctgcacccaggtgaaataaacagccctgttgctcac

SEQ ID NO: 612423 - DNA, 433 bp, Homo sapiens
  misc_feature (276)..(277): n is a, c, g, or t
  misc_feature (292)..(292): n is a, c, g, or t
cctctgaagtgttctgtgagttgtggctgtgttcacgtctctccgtcagccagactgtgggtgccgtgtccctgagcctggaactcctccggccttttgcgatctgtgcattccctccagacggcagctcctcactcccaggcccctctactggggcaccagcaaggagggaggcagaggggccaggcactgagtaggggaggggctggcagggaccctctacctggccccttgggaaggacacagacccagatggagcctgtcccctcgacaccnngcctgggcccctccncagctctgctggaataaatcctcctgtaacaacctcccgctgtgtcccagcgtctggagaatgaacacagctccccataactttccaggcgctatccgatgggacagtttgtaataaaattgcttctaaaaacataaaaaa

SEQ ID NO: 612424 - DNA, 557 bp, Homo sapiens
gcagacacaatcagcaacaccacacagatacacaccgagcacgacatataccagacagatataaaccacacacaaccatacatcaccacacagatatacagcacacatagacacagaatcaccactcaacacacagatccacaccacgcgcagacaaggaccgacacagatacaaaccacacgcacacacgtacatcaggacacggctgcagagcacacacagacgacacaagcaacaaacaagacgcagatacacagcacacacagacacacacatatcaccacacagatacacaccacacacacactcccacacatcaccacaaaaatacacaccacacagagacacacacacctatcaccacagatacatgccacacacacacccatacatcaccacagataccacacacagacacacaatcaccacccatcacacagataccacacacacatcacacagatacacaccacacacacatcaccacatggatgcacaccacacacacatccttacatcaccacacagatacacagcacacacacacacacactta

SEQ ID NO: 612425 - DNA, 255 bp, Homo sapiens
caggcgaccgtagcttcagcaggggaggggaggcaaccaggagcgagctcgtgagacaggccacaggggatagagctgccgaagtgggcggctgtggtggtgcttctggaaggagcgagataccctgcatgtcagcatggggggctgcccaagcccctcaccctgagatgggagccgtcttcccagcccaacatccccatcgtgggcatcattgctggcctggttctctttgcagctgtgatcgctggagctgtg

SEQ ID NO: 612426 - DNA, 601 bp, Homo sapiens
gatggcagaggaggtgaggagggaggaagcgtccggagtggtggctggtgcccggactccgacccccgtgggcgcttcgagccccccagctggtcaccgatggcacctgccgcttcacccaggccagtagccgccccctcgctgcacccctggcccctgcctctacacgctgctgccctgatgctgagcccctggtgctccgcctcgtggcccagctgtgtgcgcaggggtcatgtgcgttcgtctctgtgtgtcctctgcggacaacgcgtgacgcatcccctgcattcgacacggcccactgggtcccctcgacttgcctgtgccactgctctgtggtgcgccgggagctgccacgggactggactcgggtgggtggcgtgtcccccttgcccccagacagaacagctgtggctggcctcgttcgcacagttgcagcgaaaccccgcggggagttattcacccatggtcgctttggcacttatacagcctgttagcgaacttctcctcctccgcgcagccatatttcggcaaccccccattcatccgccaacagcccaccggagagctttctccgtcggccccacttacaggtccaccg

SEQ ID NO: 612427 - DNA, 201 bp, Homo sapiens
ttcgcttgtgatgtcccggacgttgtaaagctgacacacgttatggtactatgttagccccatactttgtttgttccttttcaagacacttccataatctggactcctctgtccaggcactgctgcccagcctccaagctccatctccaatccaaattttttacagctgcctgcagatactttacctactatcaaatccgg

SEQ ID NO: 612428 - DNA, 234 bp, Homo sapiens
ggaccattattccttctttattgtagtgtactgggagtgtaaaaagaacttgtatgtataatgctattctatacaaggtatgtagcccaggaaatgaccaacctgatgtgtgttatgacccatctgagcctcccatgaccacagttttaaaaataagattaagtactgaggactggtgggggctcataaacgatatgacgtaaagtgttagccaataaagaacggacaactacg

SEQ ID NO: 612429 - DNA, 191 bp, Homo sapiens
gaattatcaaaacgaatgttcaaaaatatcactgaattctgtactttaccgtactattagcacggtaattacttagactgctactattctgaatttcatccagattgtataaaaacaatggcatcaattgttaattgaactaggtccggtgtataaatcttaagaactgtcagagaagtgtcccagacgtt

SEQ ID NO: 612430 - DNA, 1435 bp, Homo sapiens
tggaaaaaaacgaccttgatttcccaccctttggagtttacaactcgggaacaccgtgggaagaagggggaaagaagttgggaaggtgggaattgaagaacactaggagaggggcctcaacaagcgtgggaggctctagtctccacttataatttgtgtgtcacgtggaagaggtgcctcactgggccgcggtgtatctcagtgtgagagaagagacaccagcgtgtggcgagaagtgagagagggcttctcgtgtctcacaccgaaaaacagaggtgtgtctcgccagtgtgtggcccagagagagggccgacacgaaatctttacagagagttaaccccgcttcttttctcatccgcgtgggcgccaacacgagtctcgcggaggaaagagtggcgtatatgtgcgtgtggcgcgacatcacgaaagtgtgagcattaaacccccgagcgccagaaaacagagtctcgtgtgtgacagtgtgtgtggagaagtgttattcacgagtggaaccttctcgcgaggctatagaagccgcctcggagaggcgatttgtgctccccacggggcgctctcgccctgtggggagaagatctccatatagcgcgcccacggaggatgtgtgtgggcacaccgcggagtgtcgcgcccgcgttggtgcgtgtcatagggggtcttctctcaaaggtgtgcggcgcccctcccctcgtgaggacgtgctccctctctccaggcacgcccattctttctttctccctttcgcgcgagctttgttgggccccatggtggggtgccgtaaaaacagtctggggggtaagtaggagcacaagcctcgttgcgcacccagaattctccacaggtattcccccaagggataagtgggggccttaaagcaagcatccacagcgcggtgcgccatcatcacacctcaaaaaaagatttttacaaacaccaaaccacagattgtccaagtagtgtaaacgggggaccaaccccaagacgcattagagtcacccccgaagtcttcatgattccccctttaacagagggcctccaattctgtggaatatctccccctatgtgtggacaggcgcatttgcacccctcgcgagaattaatgccccgccgaaaacacctagtatactcccggactatacacacagagagtcccccggagaaaacatgtggcccctcacaggagtgtctcccgtggcaataaaacgccatttgaatagttcccccaagcgccgacgagtactcatatgtagccccgtgtgggccccgtgtgtaaaacccgcgtgaaggcgacccccgaaagagggtgtccgtagtcattcccgcagtgaggggataccgcccgtgtcatatcgacaccaaaaggagttctactgtagtccacccagacatacagttcgcgacgagcaagccgcacaat

SEQ ID NO: 612431 - DNA, 173 bp, Homo sapiens
  misc_feature (16)..(16): n is a, c, g, or t
  misc_feature (92)..(92): n is a, c, g, or t
agtgctccgccagganctcttttaccagggcaactcccagacagtgagaagagtggctcaacgtggccatcacccggaccctgcaccaggcngaggagagccttttagagctgacgaaacagatctgctctttcctgcagacagcaccagagcagttcccctccggagcaagt

SEQ ID NO: 612432 - DNA, 162 bp, Homo sapiens
atcccctagtgactgtcgccgctctctactgctgcatcacacggagcgctccaagtctgcgatgatggactcaacaccttccggacgagccttttagagctgacgaaacagatctgctctttcctgcagacagcaccagagcagttcccctccggagcaagt

SEQ ID NO: 612433 - DNA, 142 bp, Homo sapiens
ctattcaggtagttgtggcaaatattatggatactagtatatggagatcaggttcgtcctttagtgttgtgtatggttatcatttgtgtcgaggttagtttgattattcgttgttgggatgctgatcgctggggttcgtaag

SEQ ID NO: 612434 - DNA, 688 bp, Homo sapiens
  misc_feature (688)..(688): n is a, c, g, or t
tcccaaaatcaaacggctttcctatactttatggatataaatacggcaaatctcaataagccccagctaccatttaccccctacaacaacaagaaaacaaagtttcaaaagaattattaatatttaatgtgcaaagaagttaaaccaacagaaagtgcgttctcacatctccacttagtagtctccctcttactacagcaaagcagcactccatagctatacctgtgcgatcacagactgtggccttactacagtgtggttataaaactcatctgtgactagtagaagccagaggatgtgagatttgtacaatctcacacacctctctctaatattgtctctctacagggtgggcacaaaatgtgcctcccttcttttccatctcaacacacgcggtgcgttgtggcagttattccccccgcactctctcaaagaccgattcaattttctccacaaacgaggtgtggcgctacattttgcgagaggaagaatacaccaccccgatagtctcgagcggggtttatcccggggcgcgccccgggcgtcgtgtgactttctatataaatatatatctcctctttgtgagaaaaaccacagagaaaagggggatctccccccaaggtatatatatctctgtgtgtataaagatggctctccacaaaaaaatatattacggcccctctgtccn

SEQ ID NO: 612435 - DNA, 293 bp, Homo sapiens
ccacggtatgtcttacgtgtacgaaataatgcttttgaccatgacaatttaaaaatcggaattgatgaagcccacgctttgggtaaaaagttttatgttgtggtgaatatccagccacataacagcaaattaaaaaactttattcgtgatcttgagccgattgtggctatgcagccagatgctttgattatgtctgatcccggcttaattatgatggtacgtgagcattttccagaaatgcaaattcatctatcggttcaagccaacgctattaactgggccactgcgtaaga

SEQ ID NO: 612436 - DNA, 219 bp, Homo sapiens
ccacagccggaccccaacgagggcgctgtacctgaggacaacttgtaccatgatggagcattgaattcgactatcgcatctggtgggcagtctgctgcacaatgcgtggttgagaacaatcatcagcccatcttcgcggagatcagtaggatggtgaagacctacgagaaactcacctgagatcatccccaagtcagccgtggggttccggctgtctga

SEQ ID NO: 612437 - DNA, 407 bp, Homo sapiens
cgaattgcatgtagaatatagccgtagtgccggaagaacttgtgggacttactgaagcctgcgaggacgccgtgaatagtatgtggctattggctatcgccaagcctagtgccacctgcagatatgccatccttaagtaagcaggctgtgcctacatgctgggtgctcagtgcaagtctgattctgggatgattactgttgctgagcggcatatgcctacatctgccatgggtggtgctaccccagcgtgctcgtatcgtagtgcttcagctcgtacaggtacagaccgagtgcatgcctgacgaagctgctcccacatgctccactagttgatctaggcccagatactcactatagtactacactctatgactacgagtatacatagcagctagatcctggcttct

SEQ ID NO: 612438 - DNA, 158 bp, Homo sapiens
gtaatgactcagacatacaggacacattaaagagtttacaacattgttagaatcctgaagccacagaaaacggattgcaaagaacgtctacgtcatccttcttcattatgtcatcttgttatatgtcatattataaacgataataggcgccgggacga

SEQ ID NO: 612439 - DNA, 413 bp, Homo sapiens
  misc_feature (153)..(153): n is a, c, g, or t
  misc_feature (171)..(171): n is a, c, g, or t
  misc_feature (234)..(234): n is a, c, g, or t
  misc_feature (238)..(238): n is a, c, g, or t
caccactcctatagatcagttaggaggctactgcaatagtgtagatgaggcctaaaggttacttggcaaagggagaaagaagtgagaagagaggatattgagtgaggctatgcttttgtttcaataatttcaaatttattttttaaaaagcanaaataaaaataggacaanaagcacccatacacactttaccagagatcacctatcaatatttacctattgtcaacactttanctancaaacatacacaaatgggtgtgtgtgtgtgtgtgtgtgtgtgtgtgtgtgtatagctgtagaaattgttgggtgctgttgtttaatatcttcccagagtgggtgtgtcaatttacactgctgccaacgggtgccctacatccgtgccattattaaattataaaatttatattttt

SEQ ID NO: 612440 - DNA, 1041 bp, Homo sapiens
gagcggagcatgcgtgctggggtctgggtgctgcagagcagcggcgggaggaggcggacactgtgtgcaacagcgtgtagcacgccctgggcggctgggcagcaacatgcggcggccggcaatcgtgccctgagcctgccgtgcctgacactaccaggcacataatcatagaaacatgtaatgccagacaagtattttcacaataccagcttgtggatttcgcgcacatagagatagcacagatcgatttcgagacctagaggcagacatatgaatcatagtagaatatataactcatctagactatcatcacaaacaggacaagcgaccaccccagggctagaccagagggcaaaccatagaatgccaccacagcacagcggcatagtgggtgacaaccgcggacgcgtctcagggacaagattgatcgtaaacgatactataaaagacaccataggcagcgagcactatgggtatcaaattgataataacatctggatgattacacctcgctaacgctgcgtccagaaacaatgatcgtgacaagacatgagatacgacaccagacgagcacccaactgcggccacttgaagacacgactgctcggagcgacagacgcacgaggattccatgactacgactggcggcaaatgcacacgtgaccactacacgtgacatggatgtacagaccccccctacgagccacggaacagaccgacaccgctacgtcccggctcagagaacctctaacatcggcgatacacaacatacgtagagtgactcggcaaatgaccacagcagaggatggaacatcaatcgaaacacaaagacatacgattgcaacataacgatgaacgcatcgagactgcatggataaggacaggacaacgctaggccgacagcacacgcaaggacaaaggaagaataaatatcacaaaaagagcactaaacaatcgctaaacaatccctcgagcggcaattgacatccacgacgctaagggtgcagcgaatggcaaaataatgagccagatccacagagg

SEQ ID NO: 612441 - DNA, 883 bp, Homo sapiens
tggcacaatgggtcctaaagcatcaagttaggtacaatcccagtatggtaagaaccatcatcaggatagttgatacaagtctgctttgctattctttttgggcgtaaatactcctatcattttctgaattacctggtaggttagaactccgtagcaccacggggaagaatagaggtatcatcagaaacgtggcaaagtcttcttttcaggcaataattataagaggcatgattccacagctttttctgggatgttcgagattctttttttagtactaagcaacattctcatcacagaatgtagcccaggccaattcagaactagaatctctattccgttcggatgatgcttctaaaaacagcattgataggttaaagaagcttgggtatgtctcaagttttactttcaagtgatttagctccaggcttgcttaactggagttggaaatcctgtgatatgtacattggattcatgactgtgcagcattttatagttatgtggtgttttgcgccacgaatgacaataagggttgttcccccattttggtttcaggaggacacgcatagtgtgtttattgtaaactcctcatacacttttaaaaccagacatcttttgttcatagaattcgcttggtagtgttttgtccaggtaccttaactgtagcttgtgtaatggtgatgaatatctgtatcttaacggcttccataactggctagttgatatttcaaggaacctgagttttctgtgatatcttgaaggggtggggaaaaaaatagcacctaagtgataactttgttaaaggcatagttgcttccagattctgactgtgtgagggtaaatactgtcaccaatgaaatctccgatacttcctggacacgaatcc

SEQ ID NO: 612442 - DNA, 408 bp, Homo sapiens
tccctgggccccgcacatttagaggtggtgaaaaggccaatggttggggttaacccccctgcccccggggttcctccctggggtcggggaattttggatgccccgtggggaattttgggtccaaaaacccccccaggcggggggggtttccctgcttggggggggcccccggggggggtgcctttttttttttcttttcggggccgaacccgcccgggggtgaacccccccctgggtggtgtggcccttttcttttttcccggttccccttcccccccaagggggcctcgggttttttaggggccccctttttttttttttggtcttttgggggcccggggccccgccccccccccctttgggggtttttttttttgggggtttaggcccccttttttccccccccca

SEQ ID NO: 612443 - DNA, 290 bp, Homo sapiens
gttccccaaggtggtcgatccagacatctgccttacaaaaccgcctcctgggaccaccttcccatggacagctggataccacctgcttgacttgtcccactgacccccacacccacatggaccatgccgatatcctacccacaccgacccctctcagtcacagcgtgagtccccggggctcatgcctgcttgctctaaaccccccagttagaacctccaggggaaacctgcatagatgacaccttgggccccagtgaaggctttggctcatagctccctgcgaggggtac

SEQ ID NO: 612444 - DNA, 994 bp, Homo sapiens
ggtgaacagacaggtttcctatatgtcgtcggaggtcaggaaatgggtatccccgtaagccgacaattgtgtcatgtgacgttaagtggaaccttccgttttctcaccattagttagcgctttttgctccacggagttaaagaggggccacttaacaagtgcccagggcgaagggaacgtgcggtctcttcagtgcccaaagtggagtcaggactctacggcgaaatgacccgtatagccattccttacactttcgctatgaggaaccacattgtgaataagctcaatttaatgtctttgttcacaaatgtgtactttcataccttgatttttaaatgtacacttataacctgtatggtatttgtatttaaaggagataaacagccacaatagcagactaggtcactgaatgataagatttgcaccttagaacaataatcattttaaggataacaagtatatgtctgaaaggcactgaggggctttagttgcctttacctcatatgagtctttgatcttgaactcgatactgtttggatctcattgttgatatacctgaatgtactattgtaagagaattgctaacttcacttcatgctgatgatgtatcaaaggtcattttatagaaagagttaaagtgtcttctttactggaagtgatatatgtcaaattagcatcttgcctacatgcagctagtttgatgcagggatcagttccatttgttggtgagaatgtttttgaccgggacgtgagtggtctcatgcctgtagatcctcagtacattgggaggccaaggcaggctggatcactctgaggtcatagtagctctcgaggccagccttggccaacatggggaaaccctgtctctactaaaaatacaaatacttggccgggctgtgatggtgggcgccttgtaatcccagccacttccagaggctgaggcaggagaatcgcttgaacctggcgagaagcgactcagcattgagtctacata

SEQ ID NO: 612445 - DNA, 473 bp, Homo sapiens
  misc_feature (420)..(420): n is a, c, g, or t
  misc_feature (451)..(451): n is a, c, g, or t
gccaggaggaagctgctgagccatgggcgcctacgacgcgggcttcgtggggtctgcgctcgcaggctgcactggactcagtcacggcccctaggaccgatgtcccgcagccctgccggccaccgcatcgccgcactctcatgctttgttcctgtttgtatgctggtcggactgccgagtgactcgtggcctggtgggatgacagagactatgctcgccacagttgccagtcctgaatcagtgcctgaagctgtgtcgacctgtccttgccatcgagcacacagttgatcgacagtaggcgctcggcctgcagaacagcctgtggagcacacggtactgtgttagttggatactcacagagcatgagcgatcacagtcgagcgccaggctagtagcgacgtgacactactctgcgagctncgtgctccaatcctgcgttgccctctgacgngtgtccagcagtccccctagcc

SEQ ID NO: 612446 - DNA, 142 bp, Homo sapiens
  misc_feature (38)..(38): n is a, c, g, or t
  misc_feature (101)..(101): n is a, c, g, or t
  misc_feature (104)..(104): n is a, c, g, or t
  misc_feature (113)..(114): n is a, c, g, or t
cgccgttgacagtcatcttgcgccccctgctggtggangatggtgtctgcaggcagttcaagctacccccgttggcagctgtggtggccccactggctgtngantggggattnntggaggtagggtgggtggctggaagccc

SEQ ID NO: 612447 - DNA, 394 bp, Homo sapiens
tgatttgcacattttgacattattgatgctttgcaagggcctaaaagtacaaggcgtacaggttatatgtgtcccagaaacccagcctttgtggcaacagtggtaataaacttgcgcagaggggactcagacccctttattaatccaaacatcatttttatctatggcctgtacgccacattagtcaatttcatgtttgatgtaaagaaatcaacattttttgtgtaaattaactctgggcttaactctgtaaattgctttgagcttcaaaactaacaaacgtatattggtgcacttttaatttcatagcgctcaaaaccatataataataaatgcaacttttgcggatcagctttgagattaaatttttgcttttgttgcagattttattgca

SEQ ID NO: 612448 - DNA, 102 bp, Homo sapiens
gttgcactcccagatttgtgggcaggctctgggtgattttcatccacatgcgggtgtgtcacataggcctcctcggttcaagtcacaccaacatgcctcgtg

SEQ ID NO: 612449 - DNA, 345 bp, Homo sapiens
aactgttcgtctctggagcgagatgagtataagattaaggttggaattacaagcttcggcgctgtcttttcacattgcttgggcacttagattatattcgcacccacgttttttccatcaatgaaatattcctgggattctgagtggctcccgatgatcagaccatccgagtgtggaattggcaatctagaacctgtgtttgtgtgttaacagggcacaaccatttattgttgatggtgtagctccaggtttccaacccccaacagaaagacttgtgtagtatcaggccagcctggtaccacgactgtgcgcggtttgggatatttctgggtctgaggaaaaaaa

SEQ ID NO: 612450 - DNA, 176 bp, Homo sapiens
tctcatgtgaactcccttcgtttcatgtcagctatttatatgtggactgggctgtgtttagggaaagtagtggccgtctgaaaacaacacagtcgtttagtgtgtcatggaaataggatgtggacctcagaaagaagagagtcttgattttgtcatcacatatcttggaatagctg

SEQ ID NO: 612451 - DNA, 1323 bp, Homo sapiens
  misc_feature (497)..(497): n is a, c, g, or t
agattttgtgtcccccaccacattttgtgtaaaaggaccaccaccttgtgggccacggcgcaccctgcgtacacatcatattatcgtttctttctgtggtcgacaatatattttcaaagcgcggcccacacaagatttcgttgggtaaaatgaagtgattagaaaagtgttgtgtggtgtgttcaccccccgtcgtgaagaaaaacacgtttgctcaacaacagataggggggcgcttctaacacatttcatataataagactccttgtcccatcgtcccgctcttttaaatatcgtgtcggccaacagctattcttcccccccccaccacgaggttgtttcctcaacgagcgaagtcactgtgtgtgagatgaatctctcttctctcattccacacccccgtcgtgtattggacaaccaccaggtgtgctcatcaagcgagttacacacctcatcctcctcggggcggtgaatcaacacaactacgtgtgaggtcncgacacaacacacaccactcctcgttggcgggcttcttcattatgattagtggggagtaagagtgtagtcgccatctcccaacatcgaagagagggctaacaccgccccccctcgcgtgtgtggtgtaaaacaacatcatgggttgtataattaaataataccgcgcgcgtcgtgtgtgtagagaggaagacacctctccagctcgttcgtctaccacattaaacacattttgtcttccgcgtctcatcttttttattacacccaccgcacactattagtagagaggagcggcgggctccacagaagtgatagtgacttatatattggtatagagaccacaacctgttcctcgcgggtgcacatactgtgataaaacctcctctgtgtgaggagaacccctcgtcctctgtttccccaagaaacacacgaggggagagccaacaaagacactctttcactattgttgtgtggagaaaaacacgaatgatttctcattcttctccctctgatatgaagcaaaacctcgctgtgaacttgtgctgctgtataccacagaagagttctcttgaaccacctctggctgcactggaatgcgtttgcccccgtgctgcttcaaggaataatagatggggggccctctcagagtgcccgcggccccatgcttcaatgacctcttctctgggcctctcccccggagtaactgggacctctccccctctaatgtgccacggggaacaatagagaggttgtgggggaattttaacgggaagcaaagattttccctctccttttccagggccccaaaaaatttttaaaagaagccca

SEQ ID NO: 612452 - DNA, 216 bp, Homo sapiens
tcacttctctcaggccagtctgttctcatgtaagctaattccttctatgctcagctccttggaatccagagggtttgtcatggtagctgttatcaaggagaagggcgtgcgaagatgtggagaacacccgtgatctcttccctaacgaggtgtaccggccgatgcccccttcgtctacacagattcatacgctcccttatgctgtcagtaaaggtg

SEQ ID NO: 612453 - DNA, 1033 bp, Homo sapiens
  misc_feature (723)..(723): n is a, c, g, or t
agcggaagaatttaatggactgtgaatttcaaaaaaaaaaaaaaagactgtcaaatgaacttttacagaatgctttaaaaaaaaaaaaacccctgtgtcggccaaaacaattggctactttatcatttttgggtattaaaagggaaataagtcttttccttttttggggtaaatttttggaaaaattattggctaaaagttgcattttagggagatggggagacaatttagcagaagggagaaagtaagtctttttttttcccaaatttatttaattggtcccgtgggtctctattgtatccctctatagccgtgtccattttggggacacttttcccgggttcccaaacccagtatttattccgggggtcctattaataagagttggatatataatctctgggacttctttagaaacccgtggtgtttctctattaacaattttttgtgtttcctgccaagaaatttaaaaccgtgagttcccctgtgaaaaattccctatgaggaagagaaccttagaactcttttaaaaggggcgcatctctccagaagtagtgcaagtggaaaacgcgccacttaccaggtggggcgtgcaccccaaaattttttcagaggcgtgaaagagttgcgaaagcctcactctctaattgtgagaaggacaagcggcgggaggaaacccccactattttacacatttatatttttcccccctataacctggtngcctccttcccccccaaataaggaaaaccccgttggaacacaaccccttaacctttcttcaacacacacttcttttctatgagcaaaggggtcaagacagttgcacctcgtggtgggggacatttataattgagggcacggcccaaaggggaatttggttgtccccaggaaaacaaactgtgccgtgaaagggtttttgggaacattacaaacgtgttgaacatcttggtgtgacaacttcgtgcaatgtggggctccccggcttataagttccttggaaatgttgtccttttgaaaaaactccctaata

SEQ ID NO: 612454 - DNA, 1357 bp, Homo sapiens
gtgagccgtgcgacgcgctgtgcactggcccagtgcgcgcctccgacccgccgtgtgctcggagctggtgcgcgagccgtggttgcggcatgctgcactgacagtagcgcactgagacagacggagccagccgtagcggcatctacatccagacgcagctgctaggctccggcccttcgcttgccagccgatcgcccgatcgacggcgcgaccgctgccaggctgctagctggaccggccagcaggcgctcatgcgtcacacgcctagttgcctgatcagccgacatgtcgcgccataccctgctgccagcagccgcccaggctccaggcaaatgcctagctgagtcgagaggacagaccgacagcggcccggcacgtgtggagaggacccagtcccggtctcccagcaaccgacacccgggatgtcttgactcccagagtatccaagacccccttccatctcaacagcattactcatcatccaaggaaagggtgccttgcctaaccagacagaccagacggctaacaacacgtctgactaacggcagtctccacgagccacacgattacccccagacaacttcctatccctccgaagctccaaagcgcagaagaccacgcacactatggtcccctggcccgccagaggacactggcagaccagcactgcaatccacctgcccgcttacactacacaatgacactcgcagtccccacggcagatagtcacaccatccacccccaactgcaccaacagcacagggggcactcccactaagaaacacaccaacatcgttcgccccctatacccaaaggcgccagcgacacagcgacgcgagcttccacgctagctgcgactgcaatcaggctctggggaagagccccacctcgccaggcatacctcccaacccacggcgcgcccaacgcacgcacactaaccctgcacatcaccacgatcacaacccacgactataaacgacactatcctgccacggacacacgcctcacgcctaaccatttccttaactaagcccaacaccacgccccggaacactccacaacaacacctgccacagccccacccaccatcccaggccggcgcgacacgacccccccacccaccccgactctcaaccacgacccccacaacaccctcgcctctctccccgcacctcacaaccctccacaacacccgacaacacacacgaacaatcccacacccacccccacccccccactacagacatcccaacatccgctaccacatcccaccacacaacaccaacacgccatacaccatccccccacacaagaaacaacccacccaccacaccctctaccaccacactacacaaaa

SEQ ID NO: 612455 - DNA, 660 bp, Homo sapiens
aggcagtaacgactaggcctcctctgcccagtatttaacaatctaagttacgccctgtactgactcacgctagactcatatctgctctcacaccatcattctgttatctgccatgacgtgtcctgctactcaggattgctcacaatgaactggtactgacttgtaacaggactaggaggaccttagggtcactaggatcgaacacctgtagctgtaagataacgatctgaaggagatcaggctcttggacaaggcacttataccagacttgagagactaactgtgtaagctccacatcaggaccaagctgactgtacttgaccgagacatatggcatgaccaattcctagatagagcctgccaggacgactcgaacgtgatctacaccggctgaatcattcatgactcaggaggaactcacaaacagttcatcatgaatgtcaatgttagaggcacccacttactagatgaggcctgctgacaaaccagagcgccaatatacatctacaccggtgcccttcgagtacaagggcacaattcaaacaggcatgcttccacaacgccaaccatagagagcttctggacaacacagagccaactccttgaccaacctatcaagagcctgctgtgaaacagcgcatgcggatactggattgcata

SEQ ID NO: 612456 - DNA, 314 bp, Homo sapiens
cccctccccgggtacctgaagcgaattgccaccaaagctgtggctgaattgccgcagttctagcttaaccttggggaggttccccttggacaaaagcgcactaaaccgcctccaggttcgaagcattcagcaaacaatggcaaggcagatccaccaaaaacgtacacctgattttcatgacaaatacggcaatgctgtattagctagtggagccactttctgtattgttacatggacatatagagcaacacaagccggaatagaacgaaacctgtcccttgttgtcagagtaacccggggaggggggggtactg

SEQ ID NO: 612457 - DNA, 887 bp, Homo sapiens
ggggcacatagccaggcggacaacagtcttcacggccactgaacggaaccgtgattcgactacgtcaagctccgccgctcgcgtatcgaccgacgctcccggcaccttccgcggccagaggtgtgttttataggcagaagcaatgttgtgaaaatcatctctagatcaaggcttttaatttatcacatggtcgccctgtaggttgaagtcagagtctccaaagaaaaccaggactacacaggagaaacatgaatttcttgcaaagttggaaacacgatttgacagtggtggacatgccaggcttatggctttagagcacctgagagattctctgttgacattggtcccagacctaatctaacacagaacgaaggaacttgagagagacacagttttgtatcaggtggcatagcgtctgttggaattcaaacacagacagtagcagatattgccatagaacatgtgtgaagcataatttgcattaccgtgtatgtgatgtgtcattaacaaaagacaatggagcagaagtcttccagagggagcatcgtttgagaaaacagagtgcttcagcatccagcaaatttgttcaacagtgcaaaactcagaggcatgttttcctcagttgttttcctgtaagtgctgtgaccttttctggaatccacctgtttgagatgctttactagccagtgtaacaggaaatcttgaactaaatggttcccggttttagctgaagattcaaaaaggccaaaaaatatgctcggaggcatcttctccggtgcgcaccaaagggtccgaaccggcccttggccatgttgtcccggaccattccttgaccagtggaaaacgccggccccaaggaggggataatcgcacaccgtatctcgcca

SEQ ID NO: 612458 - DNA, 188 bp, Homo sapiens
actagagacaggatttcaccatgttgcccagagtggtctcgaactcatgagatcaggcgatccgcgtgcattggcctcacacaatgataggattataggcgtgagccaccacggccagtcaaattctattttggtaaaagacaactcaacccagaaatgcacagtggggtcccttctgtcgtcttctc

SEQ ID NO: 612459 - DNA, 116 bp, Homo sapiens
attccaagatctgcatggagactaggttcctctccgatactcactgtacccatccgattccggcttgcgtgcatcatctgtatgggcacgagcttggtggtacttaagatccattg

SEQ ID NO: 612460 - DNA, 158 bp, Homo sapiens
tgccaaagcgtagtacccaaaaaaataaaaaaaaaagaaactgaagctaagagaagtgaaacaaccctcagagttatgccttcgtgtgggctgctcgttgtggttttggaactgtgggggaactgtctgtgtttggggtactacgcttgggcaggggt

SEQ ID NO: 612461 - DNA, 426 bp, Homo sapiens
tagcgacaccgtacgtgcaggagatgtcactcgaagatgagctgcaggcactcctcaaatgcctgcgacacaaggggacctctaaaccccaaactgcggcaggcgaaggattaccatccgtgttgcaacaactgagacaaataggcggaatgatgagaatccgcacgggaagactgtcggtgttcaacgcatttgagcctgccgacactcgtgacatctttgacttccatcactgggctcagaccaacctttcgcccgttcaaggggcagttatttcaatccttgtaccgctgagggctcactgatggaacggttcttctcttggcgaaacctggaacactgtccctcgcacggcagcattgagaccttggtgctctgttacaaacgttgccaactgaccgaagggaatgtgtctgccgatgtgga

SEQ ID NO: 612462 - DNA, 165 bp, Homo sapiens
actcttcaagaagtgggatgggggcagtgcctggagctgtagggggcagccgtggtgtaacacctcgcgcttaataggcgtggttagagactgaagagggactcgccgcgcagcagccccagcctgtaccgctcgcgagtgtactcttccttgatcgaggcaatc

SEQ ID NO: 612463 - DNA, 147 bp, Homo sapiens
ccgtctagcggtgcccggtacttggggggaatcgcctccccggaggggttaggagggccagccccgccccgccccgcccctccccgaactgggtgggggccggggaggactggaaaccctgcccgttcgccaaggccggaaagttta

SEQ ID NO: 612464 - DNA, 315 bp, Homo sapiens
tcacagcttcctgatgtcgatgttacagttcatgatgctgttgtaggtggtctcgtgaatgaccgccgactccataccgattaaggagtggctggaagatgcgtctccaggcagtggaagcgctcgttgccgatggtgatgacctggccgtctggcagctcgtatttcttttccagggaggaggaggaggcggtcgtcgccatctcgttctcgaagtccagggccacgtagcacagtgttctccttgatgtcgcgcacgatctcgcgctcagctgtggtcacgaaggagtagctcacgctcagtgaggatcttca

SEQ ID NO: 612465 - DNA, 289 bp, Homo sapiens
gtacttagaggatcccaggccgcggctgaactgaaaacaaaaaaaaataaagtagctgggggtggtaacatgcacctgtggtcccagctattgggagggtgaggtaggaggacttattgagcctgggaggtggaggctgcagtgagctgagatggttccactgcactccaacctgggcaatggagcgagactctgtttcagaaaaagagagaggaagccaggcgtggtggctcacgcctgtaatcccagcactttgggaggccgaagcgggtggatcacctgaggtcag

SEQ ID NO: 612466 - DNA, 355 bp, Homo sapiens
accccctgtgctcattgcgtacattgaccaagacccttcaacctgcggatcaagatgtcccagctttctttccagcgaaggcccttgagttcatgtggcaaaagtcctgtgtccctgtaggtaatgtgggcacagcgtgttgaacacgtggcacgcgaagaagtccgaggccacccacagggcgctgaaaatgctcctctgaagctgggacgtgcacaggtggtcgtttatgtgctgcaggaccacagggaccaagaggatttgaaaggtgagtgcggcacagtatagtggtagagaaagagtgtcttctccctcagaaagcacgagatgtagttctctgcacagccctcgtgcc

SEQ ID NO: 612467 - DNA, 478 bp, Homo sapiens
  misc_feature (3)..(3): n is a, c, g, or t
  misc_feature (15)..(15): n is a, c, g, or t
  misc_feature (38)..(38): n is a, c, g, or t
  misc_feature (60)..(60): n is a, c, g, or t
  misc_feature (77)..(77): n is a, c, g, or t
  misc_feature (470)..(470): n is a, c, g, or t
ttnaaggttgtgaanggtgaacccccctaccccccaangtcacaaaactgggccatcctnagcccccaaggagtccncctgaggccataagatcacagagaaatttgccataagccttattaaatattaatgtgttccgatcccttgaaatgaccatagatgtggtgtttcctgaagtcattttgaaaatgggttttggcccacatggggtagctcatgccctgtaatcccagaacgtttggaggttgaggtgggatcacttgagctcaggagtttgagaccagcctgggcagcgtggtgaaactgtgtctctataaaaaatgcaaaaattagccaagtgtggtggtgtgcgcctgtactcccagctcccgggaggctgaggtgggaggatcgcttgagcctaggaggcagagattgcaatgagctgagatcacgcctctgcactccagcctgagtgacagagtgagaanatgtctcc

SEQ ID NO: 612468 - DNA, 168 bp, Homo sapiens
  misc_feature (90)..(90): n is a, c, g, or t
ccccccctttttttgggggtttaaaaggggggaaaaaagggttaaaactttcccttttgtgggggggcttgggggggaaatcccctgggntttttttaaccccttgaaaaactcccccccccccggttgggggttttcggaaaaaaaaaattggggttttttttttta

SEQ ID NO: 612469 - DNA, 183 bp, Homo sapiens
  misc_feature (14)..(14): n is a, c, g, or t
tgaggatccagcgncacagccagcggtggaagtcattctgatatggagttggcattggaagcttattcttttgttcacggcagcagagcagagaactgttcacagttcatctgtgtctcaattatctgcattttttacatagtgtctctgtggtcttatttagcccctcttaaacgggtaccg

SEQ ID NO: 612470 - DNA, 567 bp, Homo sapiens
ggccgggcgcggtggctcacgcctgtaatcccagctctcagggaggctaagaggcgggaggatagcttgagcccgggagttcgagacctgcctgggcaatatagcgagaccccgttctcctgaaaaaaaaaaaaaaaaaaaaaaaaaaaaaattgggggggcgcgccggggccccgaaaaagttttcaaaaccacatgcgggggggggcgcgggggccccagtgggtaagagggaacccgggggccaaagcgggtctcccagagagaaaaccggggccgagagaacaagggggcggggatttccccccatttaaaaagagcgcccggggggacaccgcgaagggtttcggagaacaactcccaagaggggagagccgagaggcgccaacaacgggggcgccatactcaccggggagccccaaggggagaggcccgagaattctaaaattaaggcccccggggcggggggggtgacgtatagggagaggagaagacagacaatcaaccagaacaagatccagggtgaacaacagaaaagaaacaaaaatagcaggaacacagaagacc

SEQ ID NO: 612471 - DNA, 239 bp, Homo sapiens
tgcgaggttataatagtatccgtagaggtacaacggcatgccgtactactcaacttagactccgagcacacaggaccctacgtactatctcgcaccctgaaacacgctaacatgagtaacacccttgatcccatccaccctcctctccctaggaggcctgcccccggataaacacggcttttggcccaaatgggccaattatcgaaaaatacacaaaaaccaatagccgtcatcatccc

SEQ ID NO: 612472 - DNA, 151 bp, Homo sapiens
cacaggatctccggaatgtgtggtgttatggatctctacgaacattactatcaacgtgcacccacgtgcacgagacactaactacgtgcaaacacgtggaaaccgctaatctatgtatgtgtacgtacgcatacgcacaacacacacaatt

SEQ ID NO: 612473 - DNA, 403 bp, Homo sapiens
taacatggccttgactgtcagacataatgtgagctcatcggcaaatacgccatggagactagtccacaggcttccatggagggaacaacagcaacaacactgcaagcaaggccatgtcggatgacgcagtgacagctgtctgctgcacactgcacgaaggtgttaccaagaacatggagaacgccaaggccttacgggatgccggaggcttcggagaagttggtcggcatctccaaaagcaaaggagataagcactctccaaaagtggtcaagggttgcatctcaggtcctcaacagcatgttgcactaccgagatctgaggagtctctacaaacaggatggatggtcactataccacttggtagcctcgtcttcaaccatcgagagggaccggctaaggccc

SEQ ID NO: 612474 - DNA, 392 bp, Homo sapiens
taaaactataatttaaaataattctgtacaatgaaatggggaatatatatgggaataaattctattccatttatttcaatttgaatttccaaattgtaatgtttccctttgtgctataggaataggattaaatgggggaagactaggatttataaggcctgtatatggggggagggcagagatggaccaatcagggttgtgatgatagtgaatatcaacagagtgagtcatgggtgtcctcacggtagctcttagtgagaaagatccacgctttggctgttctccaaatagagcatcatcatttccagagggagagaaaatatgaaaggaaacagttagcagtgctgcccaggtatgtgcatgcacctcatattactagtggtcctctttgc

SEQ ID NO: 612475 - DNA, 143 bp, Homo sapiens
  misc_feature (80)..(80): n is a, c, g, or t
actgcagcccctgcttgtcactgcagccagctgcatgcagcagccttgcaaggccctcccagttttccaggcatcatgtngtcccagggtcccgcaagctggagccatcttctgcaggtgtccctgcagctctgcacattctg

SEQ ID NO: 612476 - DNA, 239 bp, Homo sapiens
ccacactcgaagatgataaaagcagtgtcattatttatacagagtgtacagctctcgcactaagctatacaagctggtgcacactgacaacactgctcgctcccacaagaactataaccacacatccccagacagtataaatatatggtcgaactaacatcaatacacatcaccaatttatcaattacatactacaacaactggccccgctatccaaatatgaagctacacagctcacg

SEQ ID NO: 612477 - DNA, 523 bp, Homo sapiens
  misc_feature (260)..(261): n is a, c, g, or t
  misc_feature (268)..(268): n is a, c, g, or t
  misc_feature (291)..(292): n is a, c, g, or t
  misc_feature (307)..(308): n is a, c, g, or t
  misc_feature (359)..(360): n is a, c, g, or t
  misc_feature (375)..(376): n is a, c, g, or t
  misc_feature (384)..(385): n is a, c, g, or t
  misc_feature (522)..(522): n is a, c, g, or t
atacttgaagatagcttagtgtaaacacagcctaggacatggactaggtaaagacaaagtccttgcattcttgacatacccagtaagtatgcagggacactcagagcccatagtggatagtctcttccaacagtctgctcctcagcctgagatgttcttggccaaacttgaattttcacatgagtatgccactctatcagctactctgattaacctgacagtcgggttgtttaagtcaggtaccaaatttgttcatttgnngtctcantatagcaattaatgcaggctatnntatcagacacagcanngcagggatgaaagccaacctgcagggtattaacctcagtttcctggtcccnncaaggttcttgactnncaatcaannctctaagttttccaaagggaagggaccaatagggttcttttttattaggcagcccagaatgggtaagtgaaggaccaattttattaatactttcatgaccccaataaaagggagcttttgactgacgggtaaaaaana

SEQ ID NO: 612478 - DNA, 1067 bp, Homo sapiens
gcacgagcacgccttcaccactaattagcagtcatgtggctgcgaacgcccaagccgtaccgctacaaaacaacaatcgcaatactagcaacggggataacggcagtaatgttaaccacgataataacaatggcagtaccaacacaccgcaattgagtcttaccccatatgcaaacaattcagcccccaatgggaaattcgattctgtgccggttgatgcatcctcgatcgaatttgaaactatgtcctgttgctttaaaggtggtagaacaacatcgtgggtcagagaggatggctcgttcaagtcaattgatagatccttactggacaggttcattgccgcatacttcaaacacaatcaccgtctatttcccatgattgataaaatagcattcctaaatgacgccgcgacaattaccgatttcgaaaggttatatgacaacaaaaactaccctgacagctttgttttcaaagtatacatgatcatggctattggttgtacaactttacagcgtgctggtatggtttctcaggacgaagagtgtctgagtgaacatttggcttttttggccatgaaaaaatttcgtagtgttataatttttcaagatatcgaaactgtacgatgcctattgttgttgggtatttattcgttttttgagccaaagggctcctcgtcatggacaattagtggtatcatcatgcgattgaccataggattaggtttaaatagagagttaaccgccaaaaaactcaagagcatgtctgctttagaagcagaggcaagatatagagtgttttggagtgcttactgctttgaaaggctagtatgcacctcgttgggtcgtatatccgggatcgacgacgaagacatcactgtgccactaccgagggcgttgtatgtggatgaaagagacgatttagagatgacgaagttgatgatatcattaaggaaaatgggcggtcgcatttataaacaagtccactctgtaagtgcagggcggcaaaagttaaccatcgaacaaaagcaggaaatcataagtggattacgcaaggagctagacgaaatt

SEQ ID NO: 612479 - DNA, 133 bp, Homo sapiens
cgggtctggcatcttgtacatggcaaatgctggacccaacacaaatggttcccagtttatcatcttgcactgccaagactgagtggttggatggcaatgcatgtggtgtatggcaaatgtgaaagcaaggcat

SEQ ID NO: 612480 - DNA, 632 bp, Homo sapiens
gtcgaaggtgaccggtggaccggagcatttcacgatctgctcgtgtacacctggtgcaccattcaccatgttggctgctgaggctggtgtgtctccgtgatcatctagccttctagggtttgccacccaggtttcatcaatggcctcccctgttgtgacgaattccatcacgaagaatcaatggctgtgaacacctagcagggaatatgccaccaaagcaagaatggggatccggcgtgggaagcaacttggccaggaatattcaaaggaggccaacatggggaaccattcgatggaacaaaatatttaaaaattgatcagaatgcggcaagcatggcttcggtagcatgagagggcgctgctgttgggatctttggccagcattgtgctaactatggctttggagacctgttctacatggagactttgcgacggctattggacaaacagggcttggaaatttgtgggcacttccagttaatggtccaaatggcattaaggaaacttacaattttccctacccctaaataattgatacctataggacacaggggacgatacttggagctttaacccacgcctcttatggtcttggccaattaggccacattcaacggcacgaaactgccttg

SEQ ID NO: 612481 - DNA, 255 bp, Homo sapiens
  misc_feature (198)..(198): n is a, c, g, or t
  misc_feature (234)..(234): n is a, c, g, or t
gctggacctctctcacactgggtgtgttctgtcatccaggctgagtgtagtggtgtgatcgtgctcactgcagcctctacctcccaggctcaagcactcctcccacctcaggctttagagtagatgggatgacaggcatgtgctgctaggcctggataattttttaatttttttgtagagacggagtttcactatgtntgcccggtgctgttttcaacactcctgtgcctcaangcggtccttctagcctcagcc

SEQ ID NO: 612482 - DNA, 161 bp, Homo sapiens
tgtgtactctactaactgtattatgtgaaatcgttctgccaccatctgcacgcaccactgcctacctgctgtacgtactgcatttgccccttgatccaggtggatgtttaccgtgtgttatataacttcctggctccttcactgctatgccattcttgctg

SEQ ID NO: 612483 - DNA, 669 bp, Homo sapiens
actacgaaatgcctattccaaggattcccaaatcagacccgcacatccacagtaggcggagggtgtttatgcctaattctaagacgcatctcaaaaaatagactgttcagctgcctaatgggaggaaaagagctagcacccggaagaacccagggattcttccaccgagttatatctacactaagcttctaccgcgactgctccgtctaccgcgagagcctgggtacccagaggcctacttttaagtagagggggcggcgtccacgttacgagcttcaacgtaacatccctacgaataaaaagcgacctcctaagagccgactacaaatccccccgttgtacatatccgagaatagttggaaaaagggggtgtagtaaccaccaaacgagcgtataagactataagatcgtcctcttcaccctactcataaaaactctaccctttagtagcagcggcctccaccgactactaagaggaatagggcaaaacatcttccgcgtaccccgcttcgttcctccgagttaccgagacctcctagaaaaggtagtcaggataagacccaggggggaactcgatctaagacgggttcgagggcgtccttaatgcctgaacaaagggcgcagaccgagcccatacctaagaccgacccctaccacaaaatgaccgta

SEQ ID NO: 612484 - DNA, 109 bp, Homo sapiens
gtacactccccctcataatccattccccattcatcaacgcaccagcacacaaaacattcaactcagagtctcaatcatccctcatcattctctctcttccgtgctcggt

SEQ ID NO: 612485 - DNA, 353 bp, Homo sapiens
  misc_feature (9)..(9): n is a, c, g, or t
  misc_feature (12)..(12): n is a, c, g, or t
  misc_feature (113)..(113): n is a, c, g, or t
  misc_feature (177)..(177): n is a, c, g, or t
  misc_feature (249)..(249): n is a, c, g, or t
ctcgtgccnagnaatcatagctcagtgcagcctcaaactcctgggctcaagccatccttccacgtcagcctcccaggtagctgggactacaggcacacaccacaacacctggntaattttttaaattttttgtagagatgaggtctcactgtgttgcccacggtgatctcgaactcntagcctcaagcgatcctcctgcttcggtctcccaaagtgttgggattacaggcatgagccaccactcctggncaggagtttatatgtatactgtggatactagatcctcatgtgatttgcaaaaactttatttatttatttatttatttttgaaatggatcttgctctttggcagg

SEQ ID NO: 612486 - DNA, 114 bp, Homo sapiens
ctagctaattttttgtattctggtagaaacggggtttacacccatgctggaccaggctggtctcaatcgcctcccagcacttaggataccgcaggggcagtgagccgagattca

SEQ ID NO: 612487 - DNA, 291 bp, Homo sapiens
ggcatcggcggtaataatattttagaaaaggttgggaatttaagaaatacctggggttactaattggaataccccatatcggggcaatggaaaaataaaaaccccaaggtggtttaactagccggggggtggtttttccggaataataaacccaaagaatagttgggttcttcaattcttaagagaatccccataaaagaagaaactattttttaaaaattcacttcaaaaaatccaatgggtaaaatcccagattttttctttaaataaaaataggtcattttaataact

SEQ ID NO: 612488 - DNA, 577 bp, Homo sapiens
cggtatgccacaagccgcgatgaacatgctgtgtaatggacagaaaataggcatctgttttccttgctgtctagaggtctgcatggtgaagagacttgtaagatttaatgtccttctgagatcgcagtaggaagtatgtcatgttcgcagtaggaagtgtgtcatgatcgcagtaggaagtgtgccatgatcgaattaggaaatgtgtcatgactgaagtaggaagtgtgtcatggtcgcagtaggaaatacgtcatgaggctgtatcatatccatctgagatcacagtaggaagtgtgtcatgatcatagtaggaagtatgtcatgatcacagtaggaagtgtgtcatgatcacagtaggaagtgtgtcatgatcgtagtaggaagtatgtcatgatcacagtaggaagtgtgtcatgatcgcagtaggaagtgtgtcatgagactatcatatccgtctgagatcgcagtaggaagtgtgcatgattgcagtaggaggtatgtcatcgcagtaggaagtatgtcatcgcagtaggaagtatgtcatgctcacagtaggaagtgttactgatcccac

SEQ ID NO: 612489 - DNA, 114 bp, Homo sapiens
acgataggcagtgatggcgcagttttggtaatagcacacgcgtgagtgccatgctgatagtaatgaagtatataccgatacggtcatttgtaccctagtacacagaaagaaata

SEQ ID NO: 612490 - DNA, 630 bp, Homo sapiens
gttccccatgatcccccccggacatctgccatatggattccagaaaggcaatagtaccctccatacttaaaatagtcttccccccacaataccttatttctgatctatacccattttccgaaggttattttctttatccttgctaaactgatgacttaccctgggatggggtcccagtccccatgacccttggggtaccaattgtaaacctagagttttatccactttggtgacaccagttttggccataatagtccatttctacttctggaagtcatctccattccccctgttggtattatataattccaggagaatatgataacaccctgccctcttgtggtgccttgaaagaagagatgagaaatgatgaaaaggttgccctgaaaaatgggagaccgcctcttacttgcccagaaaatgaagggattggaccgagctgggaaaccttccctttacccagatgctgactggccctggtggtttttgctctcgacagtatcccccatagctgacggctgggtgtttcagtttggaaatattttgttgccttcatcttcactgccattttgtgtaaatttttccaagatctgaattaaataaattaaattcatttctacagacccccca

SEQ ID NO: 612491 - DNA, 166 bp, Homo sapiens
tcaagtagcacatcccttagactccctagtctgtccaaggcatcattgagtttcctccttctattacaacgccaggagccagacttgctgccatatgctcaccagtaagtttaccctaggattatttggtttcacatttgtgtctgtgacccagagggatacaagc

SEQ ID NO: 612492 - DNA, 860 bp, Homo sapiens
  misc_feature (30)..(30): n is a, c, g, or t
  misc_feature (300)..(300): n is a, c, g, or t
tggggcatggagagagcgggggtaatcggncgaggatggcagcagggtactgcagccgagggggtccccagtcgggggcctcccggggaagtcattcatctgaatgtgggaggcaagagattcagtacctctcgccagactctcacctggatcccagactccttcttctccagtcttctgagcggacgcatctcgacgctgaaagatgagaccggagcaatcttcatcgacagggaccctacagtcttcgaccccatcctcaacttcctgcgcaccaaagagttggatcccaggggtgtncacggttccagcactcgctccatgaagcccagtatctatgggctcactcctctaggtatcgtcagaccatgcagcattcgagaggagtaggatcgatgcttcttgtggaaacgtcctcttcaagtggttacctgccgtcgaccagtagttcccagctgaaagcggcggaaccgagcacagcctagtaggggcctcaggcagctcaggagtgacggccagtcccctgtccgacggagcaagcacgatgaccccccaagcttggcaaatgcagggctgcttgggccgaatgctggatgagaaaatccctccctcaccctcaggacaacctgtaggagccggggatggtgcgcctggtgtgtggacagccataatcggatcgctgtggctatacccagtttctagtctgctacaggttgcaggaagcctctggctggcactggtgtattccaggtccccggctggacgtggcccatcgaacgactggcgctcacaggccgggttgcatggtggggccttgggtgaacctgaccagattgttggaccagcacaccgcgccgaaa

SEQ ID NO: 612493 - DNA, 377 bp, Homo sapiens
  misc_feature (2)..(2): n is a, c, g, or t
  misc_feature (17)..(17): n is a, c, g, or t
  misc_feature (90)..(90): n is a, c, g, or t
  misc_feature (119)..(119): n is a, c, g, or t
  misc_feature (192)..(192): n is a, c, g, or t
  misc_feature (261)..(261): n is a, c, g, or t
  misc_feature (273)..(273): n is a, c, g, or t
  misc_feature (322)..(322): n is a, c, g, or t
  misc_feature (346)..(346): n is a, c, g, or t
tntttaatacggactcncctatagggggaattttggccctcggagggccaagaattcgggcaccgagaactgggacgcaaccctaaacanaaatgaggggagggtactgggcttctgcntcaggggcttctgcacatgctctcttcccttgcactgaacactgccctcaccccctgcccacatcttcacggntcttaagttgttgctctaacgccaccctccctcgaggcccgcccctaaccactctacttaaaaacagcnccagactgggcntggtgctcatgcctgtaatcccagcactttgggagcccaggcgggcagntcacttgagattaggagttcgagnccagcctggccaacatgacaaaaccccatct

SEQ ID NO: 612494 - DNA, 783 bp, Homo sapiens
gctggcgtgtggctggctgtgttgtggccgatggcaggctggccgcaggtggccgagtgtggctggactgctgtagcatggtggaagggacgtggagggagcctgcagtgcgcagacccaccctgccatgaagccccccgcagcctgtgcaggatgacattggctgtgactgcatgcatctccgatgctctgtgtgtaaaacgacctgtcggtgggacctgagtgcccagcagatagaggagcgcaccagggagctcatcgagcatgaccagagcgcgtgtatgaccaggtaggcacccaggagttttgaggacgtgtcctacgagagcacgctcaaggcgctggccgatgtggaggtcacctacacagttcagcacggaatatccttgacttcccccagcatgtatccccctccaagggacatccggacagccagcacagaggccgacaagaagctctctgagttcgacgtggacgcatgagcatgagggaggacgtgtaccagaggatcgtgtggctccaggagaaagttcagaaggactcactgagggccgcagggctgcgcgagtacctggcagcggcctaatcaagctggagccggagacaatgggcttcaacctccccagagagactcaggacaacatcacaacgcatcaagaagaagctgagacttctgtgactcgacttcaacaagaacctgaacgaggaacgaccttctgacacttagccccaggagctaagagggctcccgacggactttctgaacatcccggaaaaattgca

SEQ ID NO: 612495 - DNA, 368 bp, Homo sapiens
cgaatctaaaagagcccccccccttcccgggtagggggcttgctattactttgaaagttttaacaggaaataaacgacatgtacccgtagggggagcaacagaaattgaatgagccaaacggatcacatcatatgcagagacatgtcctgtactggaacagaaggcactgaaaaagtttgtggaggcaatggaggctatcccccgggcactggaagaaaactttggagttaaggccaatgaagtaatctctaaactttatgcgggactttaagacggaattaaaacctttgtattggatattgagactgaagaccctgctgtaaagaacatactggaagctggcattctatatacacacccgaggagg

SEQ ID NO: 612496 - DNA, 784 bp, Homo sapiens
  misc_feature (250)..(250): n is a, c, g, or t
  misc_feature (441)..(441): n is a, c, g, or t
cagtttgcgcaaagtggagcggggaccctggctctgggcagcccctggcggtgcttccagtgccttccagccctcgctgtggctggtgcagccgcggcccatggagcccgctggcccggcccccggccgcctcgtggcctgctgctctgcctgctgctcgccgcgtcctgcgcctggtcaggagtggcgggtgaggaggagctgcaggtgattcagcctgacaagtccgtatcagttgcagctggaagcngcatctgcactgcactgtgactccctgatccctgtggggcccatccagtggttcagaggagctggaccagcccgggaattaatctacaatcaaaaagaaggccacttcccccgggtaacaactgtttcagagtccacaaagagagaaaacatggacttttccatcagcatcagtaacatcaccccagagangccggcacctactactgtgtgaagttccggaaagggagccctgacacggagtttaagtctggcagcaggcactgagctgtctgtgcgtgccaaagcctctgcccccgtggtatcgggccctgcggcgagggccagagcctcagcgacacagtgagctttcagcttgcgaggtcccgactggctttctacgacccagaaggacatcacccctgaaagtggttcggaaaattgcggaattgggcgtctccagaacttccatgaacaacgtggaaccccggtagggagaggcgccgtgtcgctaccgcagtcccagcagcacagccaagggtgtgtgatgagccgg

SEQ ID NO: 612497 - DNA, 301 bp, Homo sapiens
  misc_feature (83)..(83): n is a, c, g, or t
  misc_feature (106)..(106): n is a, c, g, or t
  misc_feature (115)..(115): n is a, c, g, or t
  misc_feature (179)..(180): n is a, c, g, or t
  misc_feature (216)..(216): n is a, c, g, or t
  misc_feature (256)..(256): n is a, c, g, or t
  misc_feature (266)..(266): n is a, c, g, or t
ttgtgcacagaagagtagaccacagagctgctccttctcctccggtctgctggggccccgagagagtctgcagcccttggcanggaccggctgacacaggagaacnaaagacctnaggctgggataacatggtggtgcagttcatcctctggagctccctgtgagatcagactggagcnngtctccagctgagaccacatctcacttagctccttncctgccatatcctgttttccttactcctatctcctgaganttcttcctgnatgacacacccggggtaccagctcgattcgtatct

SEQ ID NO: 612498 - DNA, 146 bp, Homo sapiens
actattaaagtatctgctcggcagaccctctgctcaactcatgcacacacaaaagacaatgagatgcagaatggtgggtgccaggcgctggaagggtggagggttcagagagtcagtgtttaatgggtacagagcttcttcatcct

SEQ ID NO: 612499 - DNA, 413 bp, Homo sapiens
gtctccctgagaccaggagatgttttccgaggtgtgctctccaggtggcacgagcagagtgacatatgggactggaccaggaagcttctatcctacaacaggcacagatgatgctctgaaggaccgcaagagtgatatcaccagcgagctgagtaccacaattattgattggcatccatgcgcattgtgcgcacggtgtatgggaaattttggatactaaattacctttcagaataggggttaaggaacattatcatctattattcagaatgactctgatacaagagaagcaggtgtgactacttatttgagtaccgagcctgaagatctgaaacctgactttagacagactaaagatcctttctgcacaagtgcatatctgttggaaaccagagaggtctgtcggactcctg

SEQ ID NO: 612500 - DNA, 183 bp, Homo sapiens
cggcatgcgctctgtagggtcggcagctctcgcggcagcggacggcgccccggtatctgccggcgcaccctcagggtcgcagtgggtgctgatcggacacaggctgtactccgcggtgctcatcaccttggagaactgactcctgcctgacgacaagctccgtttcacgccgtccatgtcgag

SEQ ID NO: 612501 - DNA, 203 bp, Homo sapiens
cccagtctcctctatccgcccactctcctcttaccgggttcaagtgatcttcccagctgggctttccaaagtgctgggattaaacgttgtgagccactgtgcctggccttgggattcttcatttttttattttgttaacagtctaatttccaggttcattattgtgaccgctgagcctttgggtaccccacgcacattccgta

SEQ ID NO: 612502 - DNA, 175 bp, Homo sapiens
cgttaaagccgagacacggtctgaaagctgggcctctgcaccacagttgtgaatgcaaaggaaaagttctgcaaggagattaaaaagtgctagtccagtgaacacagcaatgatgagaaagcaaaacagccttcttgctgacagaaagttttggtggtctgaatagaagatcaaa

SEQ ID NO: 612503 - DNA, 1477 bp, Homo sapiens
ggaccttcaacatgcccgtgccatgtactggtggccgtccatgggccgtgcgtgtccctctacgcctctgggccgcaccagtggcgattgtcatggactcatggagacgtgggtcacaccacatcggtgacccgagtctacagagggctactgccctccctccacagccgatccgtggcgctctggacgctgtcgtgcggccgtgggaccttgtaccgactttaccgtacgatgaacagcatccgtcgactggagccgaggcttcactaggcgtatcaccaaccaaacggccagagccgggcagacatcagttgcgcgacgatcagacggggaaggctgtgccgtagcgttcgccccgggcagcttcgaggccaggacgatgggccaccgagcgaattcctccgtgcttcctctggcaagacggagactatcgaggcatgagcccgaatgggccacaggttcgagtcgacccaatagggtccaccatggacgctggcgttcacctggtggttctcgggagcacgagcccgcataggttttcccgaaagcccccattttcccctttgccccttggcgggagtacttcgggaaaattccatatcgccgaggggtcaccttccacaccagaaggaaccaccttacacgttggtccaatccatgccccattaccattccgacaccgttagtttgaactcggctagggacacagaattgcggaagggcggagagaaggaaagcggcattgggttaaccggacacccgaaaggccgaaacagaggttaggcattggatacacgacgaggacgcgtggccgtaacccaacgcgccggagtgggcttaatttctcccggggggcgcccacattgtgggcgtttcggcaccacacggggcacttggcccaacggaaacacgggggcaaggcgaattccaaaacccgcggcccccccattgtggccgggcccctcataatgggacaaccccccaaatttgtgacacacgccaaatttcccaaacacgggacaattccaagtttcctgggcagaagcagccccacagcccaaaggaaacgcgcagggcacaacagggcttcaaccctttcccggacagcatatagcttcggagacactttcccagggaggcttggaggggcattcctcccaagatttccccgcttggggtcggatcccccttcccaagccagtttggatttccagcaagcacacctgtttttcccaccagagggcgcctggggcaagtggggtttgggagcgcaccttttttaaaccgaacaaaagcagtccaaacgcaggacaaagggtttaatccagagaaaccgggaacagggtctttccgggcgggcggcgcgccaccccgtttcaccccactagttttcgaggatgtccacagagacccccgggtcagcaacacaattgggagcttcttccttttaacaagaccgggcgagacccttttcaag

SEQ ID NO: 612504 - DNA, 365 bp, Homo sapiens
  misc_feature (350)..(350): n is a, c, g, or t
gactgtggccataacttttgcagttttagatgcaacagcaaaactaacattaatttttccttcttcttcacaatttcatgggtagatttgttcttaccgtagatcttagcaacctcagcatatgatgttttttcttttgagaactttcaccttttcccttaaagaaagcactttacagcttctctttgacatatctcaactgccatcatcactgctcttgaactttggggccattattaagtcaggaaaagggttacttggaaaacaaggcactgaggataccaccagagtccatctggataactaaggatgggtaacttacatggacttaacagggctgggtgacgttntacaggctggggata

SEQ ID NO: 612505 - DNA, 1467 bp, Homo sapiens
aaccccagacagctaaaacacacagtggtgaaaaatacaccgatcctttcaaactcggtcggctgagacttgaaacggtctgtactgaggacattagtaaaggaactgctctatatacaagcatcagactacttaaggacaagtgtctgagatactacctgtgtgactgggacaacgggacacaggccatttcgacccaacttacttgtggcgcctacactgagcccgacggcattcaaatatagcaatcactaagcaatagtacccgacactgatgcacagaccagccaaggcagacgaccaatagaccttacattgacaagataatgactcccacaacgtgcctacgtcatgagttccacagaaatgcaccgttaactaagaacagactgccacataagttctcatcccgaagccgacgccgacccaaccaccaccaagatcatacaatcaacgcaatacatgagaggctagactacaaagcacacgagcttgggaacacatatggactgacgcggactatatatacctaaccatatatcttgacatcgcacaccttcgtacttaggccgttccctggagtccacagacgaagattagggacaatacttaaccaagaacgcatgactattaattagtattcctaacattaatatatatccgcataaaggataaaatatatggaacacgcacttacggacatgccagatatgtgtataggcaacatcattcacttgccaagtacattccagagagcatcaacacaaaatcggacatcgtaatttgcaacagacacaatggaccaaaaagaaaatacagggaaaaacgacaagaagaaccctcaggaacgcaaaagaaacaaattgcaaacagcaataagaacacccggacctaagacaccaaggaacacacagacaaacaaaagagaaataggcataaaaccagacacacagaaaaaccatgagaaaaccacagcagcaatggaacacacaagtacacacaacagagaggaacagagcacagcgacaaaaacacggcgacgcataagacagagaaaacacgggcgacaagccaacaccctagcatcacggacacaaatacagcacgacaaggcacgaaccagaaaacaagacaaaagtcacaccgatacacatgagacaccactaacaccaactccacgcaacacgaactcccaagagatcccacagacaactagacgaacacacatacacaccaacagcaatcacgaactagaaatgaagagaaacgcacagaggaaacagaacacacaagaagcaccaaggcaaccacgagacagcgcaagcacgcaccaacaacatccaccagcaaaaagcatcactagcagaccaagaaccaacgagtcaaaacactagacatgaaaaaacatgaacacaaaatagacacaacacgacaacagcacaaccaagcaataaggaaagaaacgaa

SEQ ID NO: 612506 - DNA, 89 bp, Homo sapiens
ccccgtcagaacaatcagtttgtacttgtagttgggcttatctcgggtcaaggccttacatcagtttgatttttgatctatccctccac

SEQ ID NO: 612507 - DNA, 346 bp, Homo sapiens
atcgatctagaggaccccgtagtctttagttgtgatgttatgttgttaaattgagatctttctaactttttgatgtgggcatttagtgctacaaatttccctcttaacattgccttagctgtgtcccagaaattctggcatgttgtatctttgttctcattagtttcaaataacttcttgatttctgccctaaattcattatttaccccaaaatcattcagaagcaagttattcaatttccatgtgattgtatggtttgaagtgatttttttagtcttgtcttgtaatttgattgtgctgtggtctgagagattgtctttccttttttttttttgggaaaggaatt

SEQ ID NO: 612508 - DNA, 331 bp, Homo sapiens
tcccgggttcaagcaattctcctgcctcagcctccctagtagctgggattacagaagtgtgccaccatgcctggctaatttttttgtactattagtagagatggggtttcaccactgttggccagcctggtctcaaactcttgacctcaggtgatccacccacctcggcctcccaaagtgctgggattacaggtgtgagccactgcacccggactttttttttttggggaaaagtctcgctcaatggcccaggcggaagtgcagggttgcacttttgggctcacgtgaacctctgcttcccgcattccaagcaatcctggtgcctcagact

SEQ ID NO: 612509 - DNA, 206 bp, Homo sapiens
ggaacttggagcttagagacggttactgactgccctgcttcaggacacaggactactcacgtgctccactccactgccctgccccaagctcagtgatggcctccaggcagggggaaggctgctgctgggataagtacaagtgatggcttttaccttacatgctttatgtgggttacctcatctcatccttaaaacagtcctgggag

SEQ ID NO: 612510 - DNA, 268 bp, Homo sapiens
  misc_feature (12)..(12): n is a, c, g, or t
  misc_feature (91)..(91): n is a, c, g, or t
  misc_feature (120)..(120): n is a, c, g, or t
  misc_feature (132)..(132): n is a, c, g, or t
  misc_feature (176)..(176): n is a, c, g, or t
  misc_feature (223)..(223): n is a, c, g, or t
  misc_feature (256)..(256): n is a, c, g, or t
aaagggggaaanaaagccaaccggaaaagaaaatgattatcatgagacaaacaatgtgtcagcaccaaacaaacatgttaacccagaagancagtgtttttatttgtcagggccaggaangcccatgttggngggagttggtgcttcccccctcccagagaaaagatgggaaatgntgcaggtgtttagacacagttcgtgaggtgatggggcccagcgtctnccaaaggggaaatgttgcagcccagcgtagtcncatagtgccttt

SEQ ID NO: 612511 - DNA, 190 bp, Homo sapiens
tttaatcatctgtaaaatgattatgcaaaacaaacaaaaaaataaacatggtatctgtttgttaaactctgcaatgaacacatgtattagcttcccgctgcggcaacaaattatgaccacttggtggcttgaagtaacacaaatttggggagttttattttatttatttcattttatagagatgtcgacg

SEQ ID NO: 612512 - DNA, 292 bp, Homo sapiens
cactgcaatctccgcctcccggtgagaggtgaagccagctggacttcctgggtcgagtggggacttggagaacttttctgtctagctaaagatttgtaaatgcaccaatcagtgctgtgtctagctaaagtttgtaaacgtaccaatcagcgctctgtaaaaatgggccaatcagcactctgtaaaatggaccaatcagcactctgtaaaatggaccagtcagcaggatgtgggcggggtcaaataaaggaataaaaagctggtagccgagccggcagtggcaaaaaaaaaa

SEQ ID NO: 612513 - DNA, 212 bp, Homo sapiens
gtcaactagtcaaaaagattcagatatctgctgggcacagtggctcacgcctggattctcagcacttggggaggccgaggcaggtgggtcacctgaggtcaggagttgagaccagccttgccaacatggtgaaaccctgtgtctagcacaaatacagaaattagctgggtgtggtggtgcatgcctgtaatctgagctactggggggccagg

SEQ ID NO: 612514 - DNA, 170 bp, Homo sapiens
acgtgtacttgttagtgggacccaacatggagtggtattgcaacagtgtgacatctttggttcatctgtattatcttctcacatctcttttaggaatctatatagaaggcacagccctaccttgtctccctcagctgagactgcaagaatccctagctgaataatctcaa

SEQ ID NO: 612515 - DNA, 898 bp, Homo sapiens
tcggtatccgtgcggaccgttcgcctgggtacgcgcgcgaaggtttataccccccataagccgtgctcgccccccgagcctggcgcccgtgctcttgggcgtggaccgcgcccaaactctgcgttagcaccccttatccgagtttccctgcgccgttccggacaattgcccgcgcttttggccttttctgcgccgacaccccacaatggcggttatagcaccttttcagccgccgtcgcggctattgtgagcgctgggtgatatttctggcccgcccccctactcctttgggcctcggtgtgcgccgctcgcaattcccgttgccgacccttgttcaatacaagcgggggggttacgagctcccgttcccttgcgcgaccacaatcaatgggccgccccccacatggttgcctggaccttccgggttctcccgttttccgcggggttattttctcacgtcgccgacaaacggttcgccgccccgtatttgtgcttgtaccccggcgggccttgcggaaactctctcttgagccgtgtgcccacaaccggagagttgtgtcctcccccggttggagcggcccccccttccggtttattgattgccatccccagggcggctttgccctctctgcgcgtgggcccgccccccttatggcgctttacgaccgaagcccaattctcgcggaccgtgttgtacgcgcaccccctttctgcccgcgtacaccggccccggggtaatactccccggtcccaatcgtctctgtaatcctgtggacgcccaacccccacgtgttctatgcccccctgttccctaaggagttattcccccgtaaaattttttaataggggcccctttttcccctttgccccccctttcccccttttgggcccaaaaaaa

SEQ ID NO: 612516 - DNA, 254 bp, Homo sapiens
cgaactgagctcttacccctaattgcttcttcgatgacgaagtatggtacccatgtaagaaactgtaatataatttaagagatttgactactatataaaaatattttaaaaaatgcattagcagacaaaactcagagacggaaagtagaatagtggttgctatggtaggggtaggggaaaaagaggcgttagtctttaatgcgtacagagcgtcatcgaagaaccaattagggagtaccgagctggaattgtat

SEQ ID NO: 612517 - DNA, 844 bp, Homo sapiens
agcggggacaggcatggaggagccaaacttacaagggactctccagggagggcagtgaaaatacctcacccctgcatgcacacacacaggctctctcgctctctctctgtcacacacacacacacacacacacacacacacacacacagacaagatgctccacaatataccagagcgaggcctgtggagacagagtagagaggaagagggtggtggggtggtggtatgggggatgtgtgtgtgtgaagtgggtatgtgtgagtgacacgagagaagtgcgtcgtcagtgggttacgtgtcgtgggctttcctcgtgtgtccagcgctcacgcgggagggagggcctccgagtgtcatagagccgtttggccctgtaatgtctcatgagtggagtgtgtgtgtgtcatctttctctttgagggtcctggaggtgggtcctagaggacagagggtgagaagaagaggggcgtgcaattagggggcagggaaagaggaggcgggatgacacatatcacttagaggggagtggacccatgtgatagtgggaaccactcccagggagctaagggattcttctacagcaccttccattgtgcaacagggagctggaacgtggggcagaaagctctgtcagagagatctggagatgcagggaggtgactctgaacagatagaccctgaccccaatataattcaacgtggtgtgtggacaggtggaggggagatatcttacgtgatgacaagagtctcgaagcggggcaaactcagagggggtgagggtttcccgtatgaacaaaaaaaaaaagagaaaagaggtagtgagttcattaatagagaaaacacg

SEQ ID NO: 612518 - DNA, 868 bp, Homo sapiens
gggcgcggtggctcacgcttgtaatcccagcactttgggaggccgaggcgggcggatcacgaggtcatgagatcgagaccatcctggctaacacggtgaaaccccgtctctactaaaaatacaaaaaaattagccgggcgtgatggcgggcgcctgtagtcccagctactcaggaggctgaggcaggagaatggcgtgaacccgggaggcggagcttgcagtgagccgagattgcgccactgcacttccacctgggccacagagcgagactccgtcgcaaaaaaaaaaaaaaaaaaaaaaaaaaatttttggggggcctgggcctgaaaaaggtttttaaaaaccaactctcggtgggggggcgggccaagttggggtacggcgacacacgcgccaaaggcggtcccaaagagagaccgggccatgaaataggcggtgggcgtttctcacaattaaaaaacgccgggggggacaccgaggcgctttgaacaactccaaagggcgtctggacggccgtcacggggcgcctctcacggggagtccaggggagccgatataaatacacgcccgcgtgtgaaaaaaagagacggcaaggagcaagaaaagaagcaggagtaagaaagaagaggacaaagacggcgaaagagagagagacgagagaggaaagaagacaggaagagggagggaggcaggaaaacaggagacaaagaaaaagacagaaagagcgagacgaaagagaagaacagaagagagaaagcacagaagagagaagcaacgaatcgtaacaaagacccaaacgacaaagcagaaaaaaagaagaaggagaacaggaagagagagcagagaacgaggacaccaagaagatgaa

SEQ ID NO: 612519 - DNA, 176 bp, Homo sapiens
taataaaggtaaaccaatcgagtggctgggtaaagtcgtccaaagtttttgaggtctaagagtcccagattaaagtttacatactggctgtgtggcctctgggaagatcctttaatctctttggactggtttcctcgtaatatttacatagggttattgtgaagagtaagatagcc

SEQ ID NO: 612520 - DNA, 709 bp, Homo sapiens
  misc_feature (173)..(173): n is a, c, g, or t
  misc_feature (177)..(177): n is a, c, g, or t
  misc_feature (185)..(185): n is a, c, g, or t
  misc_feature (194)..(194): n is a, c, g, or t
  misc_feature (241)..(241): n is a, c, g, or t
  misc_feature (262)..(262): n is a, c, g, or t
  misc_feature (284)..(284): n is a, c, g, or t
  misc_feature (290)..(291): n is a, c, g, or t
  misc_feature (296)..(296): n is a, c, g, or t
  misc_feature (302)..(302): n is a, c, g, or t
  misc_feature (309)..(311): n is a, c, g, or t
tctcacggagcaggcttctgtggtggggggtccctgtgcagtacttgctcggggctgtggccggggaagatggagcagtataagctggtcgggcccagaagggaggagggctggggactccttaaaacctactgagggcctgggcaccgtggctcacacctgtaatcccagcncttngggaggcngaggcgggnggatcacatgagcccaggagttcgagaccatgcctggccaacatggngaaaccccgtctctactaaanataaaaaaattagccgggcgtngtgggnncctgnagtccnagctacnnnggaggctgaagcagcagaatggcgtgaacccgggaggcggagcttgcagtgagccgagattgtgccactgcactccagcctgggcgacagagcgagactctgtctcaaaaaaaaaaaaaaaaagagaagggaaagaaatggccgggtgctatactttgcggtttcccagaataaagcagttttactaaaataaaaaaacaatgcgggagagaggaccctactctgttttttccccatttattttccaagtgtggtgggagcgacggttactacttttgggacaccgttgtaagggagctctctcggcgatattggagttgcgcgtttggggaagcctctggggttgaactcactaagtggccagaattggaggtctttccgaaatttcaactcgttga

SEQ ID NO: 612521 - DNA, 868 bp, Homo sapiens
  misc_feature (648)..(648): n is a, c, g, or t
tctcacggagcaggcttctgtggtggggggtccctgtgcagtacttgctcggggctgtggccggggaagatggagcagtataagctggtcgggcccagaagggaggagggctggggactccttaaaacctactgagggcctgggcaccgtggctcacacctgtaatctgcagtcgactcggagagtcggaccgcgagatcgtgggtaattgctgcatggtcgctgcagactgtcaagcaattggtctggacggtggccgggaagcgcaggcccggtcgggtgaggggtccgcgaggtgtgaataaaacaactgagtgtgaatgaaaagtagagattctgtgaaggctgatgtctccagtgacgcttcgagagaatgaagtagcaacacatcacttatgaagcctttctttgacctgacagatttctatcacttctggagagttcctgtgaagaactcggatcctgaaaagccatctgatgtcactttctgcgaagcctggacttcagtgtaaggtcggtccttgatgatatccttgctgggaaggacataaaacgaagaaagaaatgcaacagggcctgaattttaaacttcactggaggttttactatgatcctgcctgatgtgccagacattattattggagatantaaaactcagtaccacatggggtatttcagggattctcctgatgaatttcctgtatatgttggtataaatgaagcatagaaaaaggcgtatattgttcctaatgggataatgtattgtgcagggcagattattttgacgaaaaagttatagaaataggataaaaggaaatcagctcttgaagaaacattgattgaaaatcaaggagcggcagagaattgg

SEQ ID NO: 612522 - DNA, 648 bp, Homo sapiens
  misc_feature (173)..(173): n is a, c, g, or t
  misc_feature (177)..(177): n is a, c, g, or t
  misc_feature (185)..(185): n is a, c, g, or t
  misc_feature (194)..(194): n is a, c, g, or t
  misc_feature (241)..(241): n is a, c, g, or t
  misc_feature (262)..(262): n is a, c, g, or t
tctcacggagcaggcttctgtggtggggggtccctgtgcagtacttgctcggggctgtggccggggaagatggagcagtataagctggtcgggcccagaagggaggagggctggggactccttaaaacctactgagggcctgggcaccgtggctcacacctgtaatcccagcncttngggaggcngaggcgggnggatcacatgagcccaggagttcgagaccatgcctggccaacatggngaaaccccgtctctactaaanataaaaaaaaaaaaaaaaaaaaaaaacattgtgggtgggcggcctcgggccccggaaaggttttaaaaacccactgggttggggggccggggggcccaaggggtaaggggggaccgttgggccccacagcgtgtcccaaaggaaaaccgggggtcagacacaacgtggggggggttcgtccacccaagtaaaaaacggccggggggggaccccggagcgggttgttggaacacctccacaagggggggtccgggaggggccgaagccgggtcctacaaacaggaggtccaacgagagtccgattacaaattacgccggcgcgggtgaaagagacagaagcgcgccacacgacccggcaacacgcaaccaccagcgacgacgacggc

SEQ ID NO: 612523 - DNA, 473 bp, Homo sapiens
ctctagtgagccaggagtattccagaaggaaaaatctggacatgtcaaacatcggaaggaacaaactccagacacactatctttaagaactgtaacactacaacgtgagggtcccgcggattcattcttggaagtcagtgaagacaagaaaccaccaatttcgggaacacctggaattctttggaaggctgaagccagaggatcatttgaggccaggagtttgagaaattctatgtgatataaagcagatgcttaaaatttgcccacatctggcacttacttataaaatgtttttttcaagagactggaacttctagtgcataaatacagtttgggtttaaaaacccagaatcctgaaaaaactggctctacttaaaaaacgactgtattcggtagttgaacagtaatttaaagggctcttcagtgacgttagaaatcattaaatccaattctttccttttaaatgtaaggaa

SEQ ID NO: 612524 - DNA, 752 bp, Homo sapiens
gcgggaggtggaggttgcaatgagccaatatgacaccgctgcagtccagcctgggccatagagtgagactctgtctcaaaaaaggaaagaaaaataggctgggcacagtgactcatgcctgtaatcccaacactttgggaggccgaggcaggtggatcacgaggtcaggagttcaagaccagcctggccaagatggtaaaacctcgtctctactaaaaatacaaaaattagccaggtgtggtggcaggctcctgtaatcccagctactcaggaggctgaggcagagaattgcttgaacccaggaggcagagtttgcagtgagccaagatcacaccactgcactccagcttggacgacagagcgagactctgtctcaaaaaataataggccaggcatggtggctcaaggtctgtaatcccagcactttgggaggccgaggtgggcagatcacaaggtcaggagttcgagaccagcctgacgaccaacatggtgaaacctcgtctctactaaaaatacaaaaattagccaggcctggtggcacgcgcctgtaatcccagttacacagaagactgaggcaggagaatcgcttgaacgcaggaggcagaggttgcaggagctgagatcgcgccattgcactccagcctgggcaacagagtgagactctgtctcaaaaaataataataaaatacatgaacacacatgctgctgagtccgcaggggggcagagcagaggacagcgtgctttagtgtac

SEQ ID NO: 612525 - DNA, 328 bp, Homo sapiens
  misc_feature (108)..(108): n is a, c, g, or t
gaaaacagccatcggagtaattatctaccattgctctgcattaaaaccatcaactaggaagttttcaccagaatcctcaggagatccagacattattattggagatantaaaactcagtaccacatggggtatttcagggattctcctgatgaatttcctgtatatgttggtataaatgaagcatagaaaaaggcgtatattgttcctaatgggataatgtattgtgcagggcagattattttgacgaaaaagttatagaaataggataaaaggaaatcagctcttgaagaaacattgattgaaaatcaaggagcggcagagaattgg

SEQ ID NO: 612526 - DNA, 109 bp, Homo sapiens
atgtttttatgtttcatgctaaaagacatattgggcttcacacgcttacagctgggaagaatgcatattttggcaaagaaggctcgagtaatctctgcacgttcacacg

SEQ ID NO: 612527 - DNA, 213 bp, Homo sapiens
tagatgacacagagtggcactatataacatagtagatgacataggactaacacccggcaatatatccagaactactatactccaggatttccatataaataaagcagagaacaaagcacaacgaaaataaaaggggagggggtaagacaaggaaaaagaataaaaaagaaagcaactactagtctaaataatagacaaaacaataactatgga

SEQ ID NO: 612528 - DNA, 313 bp, Homo sapiens
ttggactacgacgaacaacaaggtagtggcaatgagtcatgaagacagagtcgtctccctgtacggctgtcgtctgcttctctgcaaacccaggctctgaccttgcaacaggcctccagcacagctggccatgtggccttacagctgtcatcagcctggactttactcttgatagtgaggacccattagattcgagagatgttgtgaaaaattgtgctttgtctcttcatagcttgacattggcatgcattgtccaagtgtttacaaatctttgaccgtagagtgtagcaattaaaactgatatctgagccat

SEQ ID NO: 612529 - DNA, 134 bp, Homo sapiens
  misc_feature (57)..(57): n is a, c, g, or t
  misc_feature (91)..(91): n is a, c, g, or t
ctaaaaaagaatattaagtgtggacagccctatttcaaaggagcttaattgatctcncttgttttagttctgacccagggagatcaccccnctaattatttctgaacttggttaataaaagtttataagatttt

SEQ ID NO: 612530 - DNA, 475 bp, Homo sapiens
actctgcaagaagtagcccaccatgacaaagctgcctttgcttttatcgctttgcaaaacaaaggggacatgttgggaacaggccccccaatgtggccataaactggctccaaaactggccataaacaaaatctctgcagcactgtgacatgctcgtgatggccatgacgcccatgctggaagattgtcggtttaccagaatgagggcaagggacacctggcccacccagggtggaaaaccgtttaaggcgttcttaaaccacaaacaatagcatgagtgatctgtgccttaaggacatgctcctgctgcagataactagctagagcccgtccctttgtttcccataaggaatacttttagtaaatcttaccactggcttgctgtcaataaatatgtgggtaaatctctgttcaaggctctcagctctgaaggctgtgagacccctgatttcccacttcacatgctgtaaaaaaa

SEQ ID NO: 612531 - DNA, 106 bp, Homo sapiens
acggcagtttcgcgtcggtgaggagccggggttggggggagcggctcgtggaggctactgcagcactggggtgtcagttttttggtccgcccagaaccgtttcagt

SEQ ID NO: 612532 - DNA, 540 bp, Homo sapiens
ggacgcgtgggtcggacgcgtggtcgatccacgcgtgcgaccacgcgtccgcgtaagacggatgtctctttccttgctaacgcagcatggatcgtggtcccaagaagcctctgagccgctgtggcagttccacagctgcatgctgggataatgaccggtgtgtttgctcctcgtccatccaccggtccccataagttgagagaagtgtctacccctcatcattttacctgaggaagagacttttaagtagtgcccctgacgggagatgaagctcacagaagatttgcatgccagcgggtaaccagatacaaacttcgatggggcacgtggtcccgatgaggataataacgcctaccccttgcctggactccactggaatgatcattcaggaaagttgactaaagaacggggacgaaaaattttaccggacgaagaatctagtgacacaccaaatgggatcagttttgccacagcacatcgatatacacaccttgacggcagggcccaggttacaagttgtgcacagtgacgaacagatca

SEQ ID NO: 612533 - DNA, 749 bp, Homo sapiens
tttaagctcctgcaccatcacttctgcgtctcttcatcctgacattgaatttcttgttgcaggcggggaagatcttagactgtatacttatgattataatagtggagatgatttataatcctacaagggacacatttggtcctattcactgtgtgagatttagtcctgatggagaactctatgccagtggttcacaagatggaacattgagactatggcaaactgtggtatgaaatacgtatgggctttggaaatgtgcgcttcctgaagaagatagtggcgagctggctaagccaaagattggttttccagagacaacagaagaggagctagaagaaatcgcttcagagaattcacattgcatctttccttcaggtcctgatgttaaggcctgagcgttaatcatatgttgcagttagtataccgctgtctaaaacaagcgcgcttataatagcattagccttccagggttactgtctgcttaaggcggactcatccacgaatattgaggaaaatcacctcgcttctacgccggcacacccaattaactagctggcgcgtgagtgggtgtgctcaagagttatatgatcccacttggtttttttggtggccgcgttaatcccccccgttcttctcatgtcttcctccgcccgcgtttgttcttttattttttccttcttagcgttcatcctcgttatacccgcggaccactaccctcccatccctctgtttcccttccccccccgccc

SEQ ID NO: 612534 - DNA, 1414 bp, Homo sapiens
ggggggcggcgggggggtgcgcacgacaataggaagagaacaacgagcagcgatttggcggacccgtgtgttgctgtgtagtagtcgccggcgtgggtgctgttctgagtatagtaacccggggggtgttcgcaggggccggagcgcgctgccggaggatgagatggccgcgccgatcgagtgtgtgggttgatctcgtcgtcgagctgcggggggtgggcggtgggctaggggttgcgcttgtggggtcggtcgctgggaagtgctcgctgcgtcgtgtgggtgggtgcgtggtgtagtgggggtggcgtgtgtgctgtgcggtcggggtcggggggttgtgctgccgcgggtgtgcggtgttgtggggtgcgtggtgtgtggtgtgttgtggtggggggcctggcgggcgtggggtgggggctggcggggggtgtgtggttgggggtcggtgtgtgtcatctggttgggccggtgtgctccgtggtggtgcacggtcggtgccgggtgcgcgtgtgctgtggtcggtcgcggggggggtgcagggggtcggggccggcggcggtgtgcgcctggtggggtctggttgcgcgctcgtatgtgtgctggcgcgggtggggggggtgggcgggtgggggggtgtgtgcgggggtgcggtggggtgccgcgtgcggtgtgggctggtggggggggtttgctggggtcgtgtggggcgggggtggtgggtgtggtgtggggcgtgggtggcggcgtggtcttccggcggggtgggggcggtgcggacgcgctggggggggggtgggcgtggtcgggggcgtgtggttggtgttttgggggcgtgctgggctgtgcggtgggcggtgcgtgttgtttttctctcgggctcgcgcgcctctgggcttggtgtgtgtggtttgccgccgtttcgtgtggggtcgtgtgcttttggtgtggcgtggtgggtgtggtggcatgtgtcgcggagggggcgttggggggtgggcgtcgcgtgcgcttgccggcggggggggaggtagttgtggggctgggaggggcgggtggtggcctgtggcagcggttggtgggtgtgtgttgttgtgttggtgtttctggtggccctgttgcggctcacctccctctcctgttcccgcggcgtggtaggcgcacccctgatgggtctttttgatctcctccacccccgcccgcggcggcgtagcggcgtgcgatcacacttcctccgtgttcgtgttaggagctcggcgtgagtaagatccgttcacttatttgtgtgacggacgtagcaatacaaaaacaacaaagaaaagaacaagagaacaaacaaaatcaaatagataagagtaaacgaacaacataacataaaaaaacaattcaaataaaaataaagtatcaatca

SEQ ID NO: 612535 - DNA, 404 bp, Homo sapiens
tctgaatccctcccactggctggcttcgcagatcataagggatttagtatatcaaggtcgtgacttataaaacggatcacgtagccagacttggtgtaattagcaaagtgtcaacgttggcaggtccttcctctgatgatgagaatgaagaggaatcaaaaccagaaaaagaagatgaaccacaggaagatgctaaagaattgcaacaaggtaaaccatatcattggagagactggtcaatcattaggggaagggactgcttatatatttggagtgatgcagcagccttggaattatctaatggcagtaatggatggttcagatttatcttggatggaaaacttgccaccatgtattcaagtggtagtccggaaggtggatctgacagttcagaaagccgaagt

SEQ ID NO: 612536 - DNA, 971 bp, Homo sapiens
  misc_feature (6)..(6): n is a, c, g, or t
  misc_feature (131)..(131): n is a, c, g, or t
  misc_feature (226)..(226): n is a, c, g, or t
  misc_feature (313)..(313): n is a, c, g, or t
  misc_feature (349)..(349): n is a, c, g, or t
  misc_feature (373)..(373): n is a, c, g, or t
  misc_feature (409)..(409): n is a, c, g, or t
  misc_feature (420)..(420): n is a, c, g, or t
  misc_feature (449)..(449): n is a, c, g, or t
  misc_feature (463)..(463): n is a, c, g, or t
  misc_feature (652)..(653): n is a, c, g, or t
  misc_feature (663)..(663): n is a, c, g, or t
  misc_feature (676)..(676): n is a, c, g, or t
  misc_feature (693)..(693): n is a, c, g, or t
  misc_feature (754)..(754): n is a, c, g, or t
  misc_feature (757)..(757): n is a, c, g, or t
  misc_feature (790)..(790): n is a, c, g, or t
  misc_feature (794)..(794): n is a, c, g, or t
  misc_feature (825)..(825): n is a, c, g, or t
  misc_feature (835)..(835): n is a, c, g, or t
  misc_feature (847)..(847): n is a, c, g, or t
  misc_feature (856)..(856): n is a, c, g, or t
  misc_feature (863)..(863): n is a, c, g, or t
  misc_feature (879)..(879): n is a, c, g, or t
  misc_feature (884)..(884): n is a, c, g, or t
  misc_feature (886)..(886): n is a, c, g, or t
  misc_feature (899)..(899): n is a, c, g, or t
  misc_feature (909)..(909): n is a, c, g, or t
  misc_feature (937)..(937): n is a, c, g, or t
tattgnggttttatttgtataatgtaaaaatatattttaaataagaataatcacatactttacaatgttacaaatatatatatgtatgaaagaattatgaaggcatttgatataaaatataaaaagtatgntattttaatatataaatgtttaaaagaaaatttagttataagaattataaaattattaataatttataaaacgttttcatttttcttaaaggctnacattctcatcctttgggcatgtacaaaaattatgtggctttacacagttttatttatatttaaaatatcacgttttgaatgttttnagcatagcatgtacagtataaaatgtttccataggnacacaaaagaaactgttactagtngcctgctgttagatggcttctaattcattagttagncatttttaggncactagtttagcttattgctacaatcttnaagttgttctagtnacccaaattataatgaattcaatgtataccagaatttaccaataaaggctcaaagagttatataatatacaccaatatacacaaaacagctattctgagtaaaatgaatattccatacttaaataagaaccaagaatagtaattttaggctactctattatccttgtgattggtatttttaaaattttnngcaaagtgcncagtgaatgaaanagtcagcagacacgatncttctgtgtactctcaaattcctgccttagaatcacgtcacctgagaaatgagaaccttgnganctggtgcatatcaaatagcttcacatgtcaaanacanagggccgcttggaggcacattcatgggtcanaggaggtcanactgctccttcnaaaatggcnccattcnctgtacagggcccctntgtanangcagcagaaccancctccagganatcaatgctgtcttaatttagagcaaanatggcatccttcagccatattccagcgttggtgg

SEQ ID NO: 612537 - DNA, 406 bp, Homo sapiens
  misc_feature (325)..(325): n is a, c, g, or t
  misc_feature (368)..(368): n is a, c, g, or t
  misc_feature (393)..(393): n is a, c, g, or t
caagggtgtccttcgccagatcactgttaatgatttgcctgtgggacgctccgtggatgaggctctgcggctggtccgattaagaaaaccaagagaggccgggcacggtgactcacgcctgtaatcccagcactttgggaggccgaggtggcggatcatgaggtcaggagattgagaccatcctggctaacacagtgaaaccccgtctctactaaaaatacaaaaaaattagctgggcatggtggcacgcgattgtagtcccagctactagagaggctaaggcaggtgaatcgcttgaatccaggaggtgggggtttcaatgagnccgagatcgtaccactgcactccagcctggggcaacagagtangacttcgtaacccccaaccaacccnccaaccccccgcc

SEQ ID NO: 612538 - DNA, 129 bp, Homo sapiens
ttctctctcagatacatggcacagaggcaacagcgtgagagacacgatggctgaactcaccagatacttacatgagagtgatgtgcctcaggagtctcggacgagagaccagtccccgaaccagatacc

SEQ ID NO: 612539 - DNA, 147 bp, Homo sapiens
tgattctgaggatcaccctatctggagccggagcgaagattcgtgtgtgagactgggagcagagctacagcccggtggctgtgcagcagcgtctgtctgatgggacccaggaatctatcatcaccctgtccccagctcaaccagacg

SEQ ID NO: 612540 - DNA, 346 bp, Homo sapiens
acagaatataagaagtaggagtctccaggggagtgaggctcttgtggttagaagaggctatatcggccgggcgcggtggctcatgtgtgtcatcccagcattttgggaggccaaggcgggcggaccacaaggtcaggagatcgagaccatcccggccaacacggtgaaaccccgtctccactaaaaatacaaaaaaagtagctgggtgtggtggcaggtgcctgtagtcccagctgcttgggaggctgaggcaggagaatggggcgaacccgggaggcagagcctgcagtgagccaagatcgcgccactgcactccagcctgggtgacagagcgagactctgtctc

SEQ ID NO: 612541 - DNA, 101 bp, Homo sapiens
gaaggaggtgcatgaaggatgtttgcttggaggtcgcggatggacttgttgaggatggccacgtatgagtccaccaggttgcgaatggtctccacctgccg

SEQ ID NO: 612542 - DNA, 179 bp, Homo sapiens
  misc_feature (29)..(30): n is a, c, g, or t
  misc_feature (103)..(103): n is a, c, g, or t
acgagccacaaccagttttaggacttttnntttgtttttagtagagacggggtctcaccgtgtgatccacctcggcctcccaaagtgctgggattataggcgngacatcagcgcccagcctataacatttttatcacccccaaaatgaaatccttcacccattagcagtcattccccat

SEQ ID NO: 612543 - DNA, 2157 bp, Homo sapiens
ggagaagagagagagagaactagtctcgagattttttttgatatttatttttctcttctctctctctctcgggccgcggtcgtcgaggaccacgacgaccgaaagctagagaataggataacaacaaccagaggaaaagaggactatgacagactaagcatagaaaaaaaagagaacagaaaaaacgaaaggaacgattccccaccgcgcagaccagccagacgcggagccagcggcgcgggacggacgacgaccccaccgagcagcgacggacaaaggacacggacacggcaggagaaccgtgccgggcgacgcccgaccgcgacacgcgagacgacgagggagagaaagaagacagcagaaccacgtgcatacggacacacgccgcaccgcgccagcccgagaaacgtgaacagaggagagcagagcactccggacgggggcgcgcactccctgacagggaacaggacgccgcaccggacacgccgccaagcaggctgcgccagaagcgacaagcgagagaagacgacacaagcagagcacacccgccaccagacgcgacaccggacacagcagccagcgccgcaggagagagaaagcacgcagcgccccgcacgcgcgagacgacaagaacgacggagcgcagacagaaagaaccaagagtcgaagaccaagggactagcagcgcgacagcagacgagcacgcacgatcaagcggagaagactgccacgagccaacacaaacgagagcggcagccgccgcggacggcggcgcagggacacgccagacgccggcggcagcgcagccgaagagacgagcgagaacgacagccaccacgacgtaggagcggtacgcgagcaacgaggtcaggcgctagcgagagcgagaaccagcagagaagacacgagagcaagcaccgaagagcaggcagacagtagagcgcgagacgaacacagaagccacggaagagggagccgacagacaccgacgacggagcagcacccacacgagtcagacggcgacgcacgaccaagcgaacaacacagcgagcgagtgcacaacggagctcggagcggatcgccacccacagcataccgacgaggacgacacaagagacacccacaccagcctgtgcagccagaccctaacacacaccggcaccgcgacgactgcaagccagacagaccacacgacagacagcgagggccacgacaaaccagcgcgcgacccgacaggacgcgcctgcgagagcgccaccggcccacaccgacctccacgacgaacacggcaccaccgacaaacaagagggagcacgacgacgatacaacacgcacaaaagcacgaacggtctgcactcgagatgacccagcgacacgagctgtagtgcgctgaggacggccgcacggcctgccggtagagcaccgctctactgacaacgcgagacaggatcaagccagactacaaacgagacttacaaccgtgactcacgcagactccacaagagcacaacctagaacgagagaccgcagaacggaatacgactagataagagtggatatagcaggcaagagagctggcgcacgtctagtgacctactctggacgctacgcacgagcccacggcggcatgtcaggctcactacagaaccatatatcacataataccagctatctatataccatctaagataataatcaaacagactacataatagacaaacacaacaataccaacacaaccaaccatcacatcacatgattcccatcatacatctcacacagacgagtatgcatcactaacactcagaagaaatctacacacagtccccacaacctataccattctacacacttacgctgagggagcgcgatgcccgcggtcgcggctgtctgcagtgcgtatgactaggccagcgaagctcaaacgctcgagcacgccggagcagggcgcgcaggatcgcaccgagcgagcaaggcggtagcgacagccgaggaatgaatagaatgcagtgcgaagtccagcagcccgggcatcgtggaggtcgcgcggctgacgggcgagctgcgaggatgcggtgagtcgcgtgtgtagtgagcggaagaagcagtagcaaaagaagagggtcgccacgcgcaggcaggaggtagggaggcgcc

SEQ ID NO: 612544 - DNA, 450 bp, Homo sapiens
tccacgtttaagcgcatgccatggatcctttgagtaattcctgcggtgcatagagacaacctgtcgtgagcaaatcccgcgccgttcctggcacgtagcggatcagaaataacggttcggacatgccttcgcgcaaacgcaacggacaataaacagacgccggatagcttaagcggttcgatgaacaaggcaaattgattgatggcgggatgatggcgttgcatgtgcaacaagacatttccagcatcgcaggatgacgttacatctggaagcactctagatcgcggctttttggcacttagttttacgctggaagcctattggtcctacgaacccaagtgtctggaggctacgaatgaatacccgtggattgctcgatcagttgctcaagtctggccaggacatgttgcaaaacaaggccggcggccaacgcaaatccaatgacaaggg

SEQ ID NO: 612545 - DNA, 118 bp, Homo sapiens
cagttaagcatgagaggataaggatacttggctcagtcatcgttccacagctccacttgcatcttctcaccgaagccttccatggatgcacagggagcttctttctccttatcctgtt

SEQ ID NO: 612546 - DNA, 428 bp, Homo sapiens
ggcagggtatagggagatcacaagggttagtgcagtttcctgagactgctaacatggcctgtttcccctaggactgaagaaggtccctggaggggagggaatgggaagatacaggttctggaaatctcagtgaggctgaggagtgagttcctcccaagaacctggaaataagggtggctcctgagagttacaaaaaacccgtctagaacacatgtgggagtaaatccaaaatggctggtctgtaaatgtgtgactgagtgtttgggaaccaactaaagtctgtcaagggtggtggctgaggacgcctcggggaggttgggctggagggggaccctattgggtgaacagaaatcccaattgtattaagtaaactaataaaggtaaagcgtttactgtagtgtccatcactcagcaagcactaaaaaaaa

SEQ ID NO: 612547 - DNA, 236 bp, Homo sapiens
tttgtatttttcagtaagatggggtttgccatgttggccaggcaggtcttgagctcctggcctcaagtgatctgccctcctcggcctcccaaagtgctgggattacagacgtgagccgccatgcccagacacctatgtatgtcttgatgcttagtcacaatgttctgattagttgaggcggtctttttctttcaggaaaggtatgtttaacattccacactgaagatgtaattgtc

SEQ ID NO: 612548 - DNA, 460 bp, Homo sapiens
caattcaatgtccatcggcaccaaagggaagtcacatttcctcttgggagacagaaatccgcacctgaacacagagtaagttaggaaaaaatgacccctgtagtttattacaattggtgattcttagatctaggatttctaatatactatatccttcaggaaagttgctatccaacaaagcgttgataacatgattcagctctttccaattgaaattcagtgcccgtgaatcctcgaccaatgtctaacatgtacaatgtaaagccaatttctccagaccatgtcaaacacacatcgagcatcagatagagcatgtacatatacttgaagattctttgcaagcactcgaaacatgaaaattaaccccaattatttggacatcaagttccttagcacattccaagagatgcctacagttcttccgggtagtgccaaacttcatgttaccctcttcacctcc

SEQ ID NO: 612549 - DNA, 238 bp, Homo sapiens
ataggtgaatgagttgatctagaggatcccaacgacacgtgtgtatacataactgggcgtgctgactattagggcggaaaatcgttccttcaatgtgctttaacacttccagaagctgcagccaaaacagcccgtgctccgctgtgtagctctggcgagcgtggccagagtgctgactagcaatatggactctagtgtttgttcttgcttgcactgccctgcgattcacctgcgctcc

SEQ ID NO: 612550 - DNA, 326 bp, Homo sapiens
tctgtccctcgattctccctctgccctcttctcccttcctacttctctgctcccctttcactctgtgaatgtgagctttggccccattccataagccgagataaaaatgctaggcatgacaaatttgtgactgctactaacatttaggattgttctttgagatggagtttcactcatgttgcccaggctgagtgccatggcgcgatctcagctcactgcaacctctgccttccgggttcaagcaattctcctgccacagcctcgcaagtaactgggactacaggcgcatgccaacatgcccggctaatttcttttgtattttcagc

SEQ ID NO: 612551 - DNA, 997 bp, Homo sapiens
gcaaccttcaacaccaccttcttcgagcccgtcggaggaggagatcacattctataccaagaccatattctgattctcggtcaccctgcaagtaaatgtcttatcctacgcaggcttcggaactaatcttcccatatgtgtaacattactacctccggaaaaacaaagtaaccattatggattacatcggttatggatcatgaacgtaatgattatcatcattggctgtccgagcgggttgaatccggtgtgaagcacgacccatgatcatctgagcgagtaggaagtagacgtacacacacagaaaacaatatttgcaaacatacgtgtaccataatcaatcgctagtccccaagcgggcgtccaagagtattgaggctgactcgcacactagcatccactggaagcaatgatgaaatgctctgatggcagtgcatcgtgagccctaaggataacatcttgctttgtcaccgtgggctggccgtgatgtgggggatagtattaaacaaagctcatcagtagaacatcgtagttacacgacaccgtactacagtagtagctcaaatgcccactgatgtcgcttattcaatagggaagcggtactttggctatcactagagaggcgaacattcacgtgtagtatcccctatccgtcagggcgtagatcctaaaacaaactaacggccactagtccagtttggcctagtcatattcatcgggcagaaatctaagcttacttacacagcaaagaatttacgggctaattcggagagtgcccgacggtaattagaagaaccccgatagagtaaagccaaattgacatagtcgtattaggttgaaggctccatcatggtgttaaaagaaagtacactacatactccatagaggagaagaccactgaagcaacaaaccacattagagaaacccaaacatgatcgaatagggtcccaactacatagagacgcgtataatcacaggagtagaccccaaggtacgc

SEQ ID NO: 612552 - DNA, 715 bp, Homo sapiens
cggaacccggcgctcgttccccaccccggacggccgcctatatacagccgtccgacacctcttgaccgcaccctcggactgcccaaaggccctggacaccgctctagcacctggcaagcaccatcgacgacaacgtctatgcttactcagacacgtgacgaccgagtgcacctgacaggtgcgccaaacctactaccatgactcagaggccgccatcaaccgtcgcatcaacctggaactatgcgcctgctacaatgacctggccatgtgtaactactcggaccgcgatgatatgggctcaaacaactctgccctatgggtggactcgcgatgtaatggggacaggggggcgggctgacaagctgatgaacctgtacaacccacgaggaggcacgaatcgtacttaggatctcaagaaaccctactggaataactgatagaacaggctgaatgcaactgggtggacattacattcggaaaccaatgtggatcactgactactggaactgggcacactgagcactgacggaaatgactccggaatgtgtgacaacagtgtgacacactagctgaatgagcaggttaaagccatagcgtaattggtgaccacgagaccaactttcgcgagatgggagcgcaccagtctagctgggcggaatatgtcttggacgagttcagcatcgcgggacagtgcgtggcgtgaggcttggcgtgg

SEQ ID NO: 612553 - DNA, 228 bp, Homo sapiens
ttctgacccactagaccagtcatctggctcaaccagttccgcatcccgatcccaggagcagaagacagcaagaaaaactcactttgaccccctatgaatccatctccaatacggaccaaccagcattccccagtttctgagcccctacctgccaaagttatctttaaaaactctgatccccaaatgctcggggagacccttttgagtaatggtgggtcagaacataag

SEQ ID NO: 612554 - DNA, 109 bp, Homo sapiens
tcggacaccagacagcggtcaagtggatagagcgcacacagggctcagctgagcatgttcgctcatcatcccaggtttgcatcacaggatggaggattgggcgcagtgc

SEQ ID NO: 612555 - DNA, 116 bp, Homo sapiens
ctgggggcagcctctccccagtgcctggctgggtggccccagtgcaggctcggggtgcagcctctccccagcctccccgtgccaaatcttttcattaaagaatgttttggaacttt

SEQ ID NO: 612556 - DNA, 159 bp, Homo sapiens
  misc_feature (105)..(105): n is a, c, g, or t
  misc_feature (136)..(136): n is a, c, g, or t
  misc_feature (153)..(153): n is a, c, g, or t
accctcgggagccttaacctggggggtttgtattcagtgagtgacagaaattccaggcatggtatggaaagctcaggtggttgtcctcagacatctgtgcattcntggaagtaggacaacggtgcaggtaactctngtcacttggagcaactngtatag

SEQ ID NO: 612557 - DNA, 107 bp, Homo sapiens
gatcggagctgcgcggaaccgctgtcgcccgccccgctccacccgtcgtggcccgaggcagccgggatgacagctctccccaggaatcctgctgcctgctgagaaac

SEQ ID NO: 612558 - DNA, 166 bp, Homo sapiens
gcctatcatatagtaaaacccagcccatgacccctaacagggggcctctcagccctcctaatgacctccgcctagccatgtgatttcacttccactccataacggtgctcatactagggcgtcttaccaacacactaaccatataccactgatggcgcgatgtaca

SEQ ID NO: 612559 - DNA, 229 bp, Homo sapiens
caagaatagagatgtgggtctgtataccgaggatgagccagctatccttcctcagccacaggagtagtgagcgtgagcaccctaggatagggtagtagaggactagcgtactagtggggcggcccttacccaactactataggctagtgccacaggaagcaccttactaaggggcacaaggggcatggcccctacttatagatgaagaaccaaggggaaatccaaacct

SEQ ID NO: 612560 - DNA, 835 bp, Homo sapiens
cgaatggtctcgtgcagtgtgcgcagcgtgcctgctgcccgtcgcccgggactccccgtccctccctcgcgaccccgcgcctggggctgtgtgcggcgcttgcggctgggcatgggtgtgctggtgcagggtgagatgggggctctgtcctgtgtgggtatgcctgcgcttccttctagcatgtcctgtccttgctgccttcgagatgcctcttgactctgccttcctgtccatctttacctccatgctgtgctctcattccctgctctctcctgtagtcactctgttccatcacctgacctgtccatcgcgtcctgtccggcgtccctcctgtgttgtgacttgctctcttgtgccgtgacccgtggcgtgatcgtgtggtgtggcctcagcttcagctgttctgatctctgaccctgtcgtctgtgcgtctgtcgctctgtgcacctgtgctcctgtgtgatgtgctagttgcagtttgccgccctttgctttgccactgctgtgctggctcacacatgcagtgctatgcctccgtattctcgcatgataggtcgagtcattgtgcatgggtgagcaggtcgaatgcttgtgcgtgtagctagacttcggaggtagtactgtgaacactgttgcagcctgttgatactgttgcaggggtcttccttctagtccaactgacatgctgccgtacctgctaaagccctagccctggtgccctggatgtgacaggcatgctgcctgttgcccctcacgtgcatccttctagctctgcttggcctgccgggggtccccctgtgctcggtggcaaagacatcgtgtattggtggacctg

SEQ ID NO: 612561 - DNA, 400 bp, Homo sapiens
ttaaaagaccataccaaaaatttaaaacctgttatattaaagtttaaatttttaaaaatttaaaaatttaaacctgtttaatggctttcgcatgcacttgatctcaatcaacttaatttggatatacctcatccatacatacatactatatccaaactcaccctatccaaggcacctttttacaagccaagtagaccactgtgtgtgatccactaatgaaaccaacccacagtacaagccagtatttgtgtgtgtttgaccaaagcgctttacttcatgtaagagaaaatataaagcaacacaagcccagtgttcacagtgcgctcacgcctgtaatcacagcactctgaaagcacaacacaggcgtattcacagaggagttgagcacagtgtcgctcgt

SEQ ID NO: 612562 - DNA, 192 bp, Homo sapiens
cactgggtggataggatgactggcaactcccacaagggcagaagcgtcccgaggggtgagggctgtgtaatcgtatcactgtgcgaggctgaggcaggaggatcacatgagtccaatcttcaaggccagtcgggccgcatagtgagacccaagtctctatttatatattaataagaattgtttttaacttca

SEQ ID NO: 612563 - DNA, 135 bp, Homo sapiens
  misc_feature (10)..(10): n is a, c, g, or t
  misc_feature (15)..(15): n is a, c, g, or t
  misc_feature (24)..(24): n is a, c, g, or t
  misc_feature (35)..(35): n is a, c, g, or t
  misc_feature (61)..(61): n is a, c, g, or t
  misc_feature (92)..(92): n is a, c, g, or t
  misc_feature (104)..(104): n is a, c, g, or t
  misc_feature (108)..(108): n is a, c, g, or t
gtaacttttnagctnagatgtggncatcgccactnctgtgagcctttagatgcattaaatnccacaaatgtttgccctaaatgagtttactncagcttgttaancttncaagaatattaaatgatttataataaa

SEQ ID NO: 612564 - DNA, 164 bp, Homo sapiens
aaaagaggtttaattgactcccagttttgtaggctttacagtaagcatggctggcaggcctcagaaacttaaaatcatggcggaaggcaaaggagaagcaggccctttttttccatggcagaacaggaaagggaaagaaagtgagatgggaagtgcccccccca

SEQ ID NO: 612565 - DNA, 231 bp, Homo sapiens
tcaatttctacaccttatgtgtgtatgttagatgctgaagcttggtgctgctattgaagatactgtggaactggagacataggaaatgttgaaagcctttgtgtaatgaaaacagccttcagcttaactaggtccacctcagaacgaccaagtaaggacatagtaggactgaaggactagtgtctgtcggcaggagcatcgtgcttctccagcctccgcgtatcgtgagtc

SEQ ID NO: 612566 - DNA, 101 bp, Homo sapiens
ctggggttttgccaaccccttgatggcggtttagtgggaccccttttgggcttttggtttttgggacggtaagataataaatttgttttttgaggccccca

SEQ ID NO: 612567 - DNA, 1911 bp, Homo sapiens
  misc_feature (162)..(162): n is a, c, g, or t
  misc_feature (265)..(265): n is a, c, g, or t
  misc_feature (520)..(520): n is a, c, g, or t
  misc_feature (950)..(950): n is a, c, g, or t
gcctgcggcggacgcgatctgtgtgcgcgttgcggcgggcgtcttggaggctccttgcaggcgtgcggactgccgtgtcgctctgcagcgcggcgatatgcgcggatcagacgcgaccatggctgccccgtcatgcactatcacatatagcctctacagttnggtcgtgcgcgctgagagagtcttcaagattgaagcgggacatccacgtgagctcttaccataggtcagctcttttacctcatcacatgacatgttgctagancgacacatatgaggtggacagagatagagacagcccctagatcgcactaccgtcctttcttcattgtcaccccacctctcacagagtaacttaccaaggaactcgatggggtcggggccgatgagacgggcctcggccccgaccttgactttggaggacgtaggaagcgtacgccatggcctttgttaaacccagctcgtcatacacttagccaacagggggccagttccctgttccgagatgtaagtgtgtgcncccgcacacagacaggttgtctgtgcaccacgacacgagagcagagacatcgccggggatagcgccagctcagaggtgcgtgcattcgggtgtttgcgtcattaagatgcgtatcgccaagaggctagttgcgttgacttggctgcggcgcaagggggcactaggggccacaggcaggacgtacgtccaacatgcgcatcgtcgatggttgtcggcttgcaattcactaaagctcgccgaacactgaagaacccaggggacctgtcgatacatacaggtttggttgtccttggactggacgacttcgcggcagcacggcttatggcagacggacgttgcctttcgaaccacgctgtgtcgtcggtcccacacggcgactggcgcacagcaggggcaagggggaccgcattaacgcaagaaccgccgaaantttccacaccttgcccacgcgcggcacttcgccacggatcgaacgaacaacgcgtgacgtcgatctttgccacagacaattggctcttggcgatactcggaggttacacacatctaggaggggccaagttgtgtaccacacccccgcggggggcgcccaacaatggagaattccgcacgaactggctacaccctgttgcagcaaaaagaacatggccctgtggtccaccgagacccctggtgaaaaagccttgagttttcaaacgctggggcaaactttgctgttgtgcaactttccatcgacttgtctacgaaggcatttcaaccaccgtggttgggtgtcacagccaggacccatgtgtggacctgtccacaacatgagtgggcccactcgcgaccggccgaacccacagtcagagtagagcagatactccccctatggagaggacaacacagcacgaccgacgtgtgtgagttgatgtcatcgagagaacaacgacatctatcgaacacaaacataaccaacccacacggtcaggactcatccagaagcacgaggacatagaacacacctaatccaacggccgcgcaaccgacgctcagtagctcacacaacaaacagaggcgagagtagcgaagccaacattacgataaacacaaacactacgacacaacactaaacatacaacaccgtcacacagtgatgacatacacatacctaaccaaaaacactgccaacgaccaaacagcatgactataacaacagagatcaacaacacaacaaaatatgacatcaacgcgtgccttcagccctcctccctactatccttgcacaagcacacagctactctcaaacacacaacaaccaactactacactcactaccatacacatacctaacccacctataacagagaaacacatacacacatacagcacagcgacagcagcactatacgatc

SEQ ID NO: 612568 - DNA, 426 bp, Homo sapiens
accggagtatgccggaatctcagctcattgcactcacctctcgggttcaagcaattctcctggcctcagcctcccaagtagctgggattacaggtgcccaccaccacacccagctaatttttgtatttttaatagagatgaggtttcactcctgttggccaggctggtctcgagctcctgtcctcgtgatccacgcacgtcagcctcccaaagtgctgggattaccggtgtgagccactgtgcccagcctctcagtgatttttgatgcaaattcatttactgtgttcacgaagtggccaatcttgggacctttagcatcacttgcccttttagtgtcttacatatgtatgattaccatcagcactagaaattccaggtacttcaagcttaaaagtaagagctctagagtgtattgtcttgtattat

SEQ ID NO: 612569 - DNA, 1229 bp, Homo sapiens
  misc_feature (1229)..(1229): n is a, c, g, or t
gaggcccgagcggcaggagctgcagcgcgggagcggctgagccaggcgcccagtcgcgagaagctgccgccgcctctgccctgccctgtgctgcctgcagccccgggcggtccatgggtgcgtggcacggcgtcgctgcagtgcgcctgtgcagcccttggagggcagccggcttaggcgctgcgctcttgtccccgcaggtcgcagccaggggcgggcggtggcgctgcccaggccccggtgccccttgtgagctgcccggccggctggtccccaaccttccattggacgcctttcaaaggggggggcattgagccttggagcgggttgcctgggaggggggctccgggccgggcctgcccggccctgccaacccctattgaactattgcggggccctgccttcccacccttgtgccccggggccctgcctgaacccccggcagatgcccggcttcggagaaacttccggccaagcggaggtcggtcttggaacacggggagctttgcccaggagcaagggaggcggcggggcgggggaaacccccaaggggggggcccggaaggaccagttggttgcgggagaagggcacggggtgctttgcggggcggtgcctgcaagaacggaaacccaagccaaagaaagaaagaaagccaagcgggcgggccaaacgcggtacggcactttcacaaaggccaagcagtttggcaagaagcctaggagggccaacggtttcccaagaagggaaaccgggataacccccggactatttgacgccatttaagcgcgcaagggaacggatcgggcgggttgtttggaacccaaacctttcaacccggaagcccgtctggcgttcgcaggcgctccgtgggttcccaaggaaaacgcgggggcgtgaaggccagaaggttggggcagtataaaagcgcgccagagaggcgggttaaccccagggcaaggctttgggacccttgtttgccaagaggggcgttagggcaataccgtgttgcgccagcaagagtaccaaacacgggggggcacataaagtttggcccaggccccttaacggacgagcacagcgttgttataaacggccacaggaccggaggaataataatttccctttataaacaacaacacgcttgtgggggcgcgacacaaaagaaaagccttttggggtagcaccaaaggagaccaggattcttccaaaaccaaaggagagacgttcn

SEQ ID NO: 612570 - DNA, 764 bp, Homo sapiens
aaattacacttacctttgtactgtaaaagaaaagtcatgtaagtacatattagtactcgtgtgaaaggatttcccatcaagactagtcttggatgtagtagacattcgtttggtgacgtgcaacgaaggatataacagttatgtgtgagaatcatttagctattgtacaatgagcaaaatcgataattcattgtgaggaatcattgtattttatatgagacaatccattttaagttctgtaagataacagaagtgacgcaatgtaatttcacaacacctaaggattttttggttgatcaggttactgtagatttttactgattgtcctggatgaatagactgtgctttttctttttctctcccttccttcttggtttcccatagtataataagcatgcatactttaacttctatagttttctcctttagagggtcttcttcagttttagaggtttacttctcccttgcctttgactcattggactagtgcagaggctttaagtagtttaaaatgggcttttgcttttctaggtcattaacgtttttatttagtttctttagccaatagtggctgagtttcgcacttgattttcaatattttatagtaagaaatgacaaactgctttggttcatttcataaacaaactctgcatttagataactattaaaggttgttaagatgaacgatttactgtgtctttgttactcgtagagtacagctgttggtcttacttgcacatttgtacatatacttaatgttttca

SEQ ID NO: 612571 - DNA, 156 bp, Homo sapiens
cctcagtcgcctcgggcctgcagttccccggctttaacccccaaccagtaaccaaagacttgaccactaaaagtccagctcccaagaaaatgctcgaaatggaaaccggtgtgattaaggtggttaaatgtcactctcaccatccggctacttatg

SEQ ID NO: 612572 - DNA, 470 bp, Homo sapiens
tagacatccccatggccggtgaagagatacgaggcaagccttctgacggcaaaacgacgtagcagaggaagatagaagaggagggacgtctcgacaccgagagatgtttggctcggggcagtcagagcggagtccagcccctgggcggcccaactccaggggaagatcaccttcccacttcatccatccccacccttccagctccccatccatcctgctgaaagccatttccaccactcaataaaacctcgcattcatccttcaagtccgtgtgtgacccgatttttcctggattctggaaaagagctcggaatacagaaagctgtcccctggtcctttgcccttgtgaaaaagcaaaaggtccattgagctggttaacactccagctgtctgtggtggccaagctgaaagagctttgtaacactggggttgcaggcacccacctttatacgcttccgcagagccagagc

SEQ ID NO: 612573 - DNA, 191 bp, Homo sapiens
  misc_feature (78)..(78): n is a, c, g, or t
  misc_feature (118)..(118): n is a, c, g, or t
ttaggattcgtagatcgaaccgatctgattactccggtctgaactcagatcacgtaggactttaatcggttgaacaanacgaaccctttaatagctggctgcacccatcgtgtttgtncctgatcccaacatcggaggtcgtaaaacccttatttgttggataatgcgactctagaaatacggatttgcgc

SEQ ID NO: 612574 - DNA, 382 bp, Homo sapiens
  misc_feature (336)..(336): n is a, c, g, or t
  misc_feature (382)..(382): n is a, c, g, or t
cctagatggtcatcagtggtgggctggataaagaaaaagtggtacgtatacactatagaatactatacagccataaaaagaacaaaatcatgtcctctgtagcaacatgaatggagctgaaggtcaatatcctaagcgaaataatgcaggagcagaaaaccaaatattgcatgttctcacttatgagaaggtgctaaacatagagtacacatagacatgaaggaagggaacaatatacacaagggcctatcttgaggatgggagagtaaggagggagggttgagggtttgaaaactaccttatttgttgttactattgcttcatttacctgggggncaatggaattaattcttgttaccaccacatcccccaccaaaacacn

SEQ ID NO: 612575 - DNA, 215 bp, Homo sapiens
aaaatttttttttttaagggcgggaggtttttacccggttggtttttaacccaccaaagaacttttccttgggcgccaagccaaagggccccggccccatgaaaggtccagacccccccggggtttaaccccgtttgccccggtttggttttttttttggggggtttgaaagggggaagggtttttggggttaataaaccgggttccctttttta

SEQ ID NO: 612576 - DNA, 899 bp, Homo sapiens
agatgcgctactgcactccagcctgggcgatagagtgagactctgtctcaaaaaaaaatagactaatacaatataacacgcaaaaaaaggtaataattatacctcttgggagcatgaggggcactagggcgatgtagtcctatgacattgatttggatggtgtccgaagttgaggttgacgtgtgttgtcttgacaaccctgagaaggagcgagagcgtgaaagttgaagctgatgttactagtggtagattggttcatacgatgcacggaggggtcaatgtgtcaaagacatcggttatcaacggaatgagacatgtgcataaccttaagaaatggtgagaaattatttggtcgtccttaagtactgaataaaattagggaggataaagttatgctaggaatagcggtgaagtggggcctacctgaataattttggggcgattatgaacaacacaccagaagctgcataattaatgaaaatgggtaaattggacttcgaattagagcatttctatattggaaggatgttatagaatggggcataaagcgggatgtgaaaggggcttcccctatgactggggttcataaagggcctcgggacacacttgtgatactctatagggggatgtctctttatagacctattgaatggccccttcatcaattagagacaaaaaaaaccagaaaagaaggtgaaaaccgtttgggcaacggatggagcaaagaaactgtgggaaatagctggtggcccttggatcggggttaatgtggacagtgggtccaccccacttgtgagaaagtttggtccggtgggttcctccagtcaacggggacattgtgaatttaacctctcccgatctgggatttaccccatgggagtggccgttcacttaatcga

SEQ ID NO: 612577 - DNA, 116 bp, Homo sapiens
  misc_feature (96)..(96): n is a, c, g, or t
aatcagctcgtaccttttatcaacagatcgtgtatgacggtatcattccataaatatggggaatactttcctggcacaggagacttgagggatatnggtgctggaaaaggcaaata

SEQ ID NO: 612578 - DNA, 219 bp, Homo sapiens
  misc_feature (172)..(172): n is a, c, g, or t
ggggggccccccccctttggggggcccccccctttgtgggggtttttttttttccccccccccccccccttgttgcccaaggggggtttttttttttggggccccttaaggggggccggttttttaagggggttttttttttaaaacccgtttgccccccggtttttaaaanggggggtttggaaaaaggccattttcccatttttccttttttcccca

SEQ ID NO: 612579 - DNA, 352 bp, Homo sapiens
  misc_feature (248)..(248): n is a, c, g, or t
gtggcgaggtgaggccagctggaaagagaggctgtccatgttgacggcagtgcaccttatttccgctgtggtagatgatgctcgacgaggtatattgaccaccgcgctcattgtctgatctatacttgctgacactctgcatgccacagctggagtaagcgctgcgcaatacaaacttgtcacccctgtcctctgcctcacagctggggtcccatgaaggtcaggcccgtgatggatgcacttcaaantgcgcaacaagctctttcttttagataccagggttcttggcgttgtccggacactttgtctggatcaaggacacgagcagctccgggctacaagtgtgaccacg

SEQ ID NO: 612580 - DNA, 353 bp, Homo sapiens
gaagattgttgagccatatttcgagtatcgccgcgatatcgaatcgcgatgagcataccctctctagaggagctgtgactccctcaagtgcagtgacctgcagaacttaacccagagtctgggtctccgggccaacctgagggcaaccaagttgtgtaaaagccttgaaaggctacattaaacatgaggcaagggaaatgagaatcaggatgaaaggcaaacttctggattctcttgtgatgagactcggatacagatcagcaaccacgaagaagctgagagacaggcacttggccatgtgaccccaaggagaaggtgcaagactgtgcgcgtggaccctgactcacagtctg

SEQ ID NO: 612581 - DNA, 381 bp, Homo sapiens
atcagtcccattccctgccttcccgcttagaggtggccacaatctttaattttgtgtgtatcatttttatggtttttgtgtttagtgccttcacatttattattattattttttggtgctttggctggcttatgtttttttggcccttgtgatccgggcctgtttcccgagctcaatatggtccaaaaggaggttccctctgtgactttttggatgtaaacccttggctttggtatagaataaccccttgaaatttttgctgtgcgagggtggtagaaatttccttttttgggtatattcttatatatattatgtacatccctgtctgaaattttagttattttttgtttttaataaagactaacccaaacttaatgatta

SEQ ID NO: 612582 - DNA, 149 bp, Homo sapiens
gtggtggccccagtggcggtagcggctagtggtgccacatggtactctttcagctacacattccatggagaccctcatgccatgtaatgcatgagattcttacggtaggcagaaatcccatttgacacctatttatagggcagacggaa

SEQ ID NO: 612583 - DNA, 131 bp, Homo sapiens
taaaagttgcgtttaagttgtattaaaaatagatatataaggaaaaattctttccacttgatgttttgtttagaccagaaagtgttgttgtgtttctgttagctcagattcccagaacagacttttttagg

SEQ ID NO: 612584 - DNA, 1951 bp, Homo sapiens
  misc_feature (1204)..(1204): n is a, c, g, or t
  misc_feature (1244)..(1244): n is a, c, g, or t
gcgcgttaggtcgcagtaatgcgttcatggtcgccatccgcgtggtcttagcgcggatgctctgatgctgaacgcgtaaccgcgttgtgtatacaaggcacttgacagagatgtgcaccgtcgaccatacctggtgatcgccgcgggcactatatggacgctttcggcagaccagagatgccagcgggcaagctacgtcggcgacgagactgcgcttgatgtcggtacagcctaaaacggccgtgcgttcagtcagggatgcgtaacgaaagacttgcgtgccaacagacgcaagtctcggatcaggcgcccagcgcactagcggtgtcagatcacaatcaggcaccgcccattcccagggcaaatgtatcaggtgacttgagtagagatgtgtgtgcaattaatcaaagaggatgacacctgctttaacatacgccgttctgaggttcccacttggaatcagatatctcgctctgagatttgagctctgcccacgagatccagcgggaacggagcccatacgcttccacaattcgaactagccaattatatcggtgactctggcgattctccgacactaggaggctcgagttcccgagatccgattgttaagggcgccacgaactttgccaactactatagggaacatgtattgcgcacaccgagctacctcttaatagccgcgcaagttaaattctgggtggcgcgcgctccctggcgccgggccacatcccacccaaaaggtgagccatgcccagggggaccatgtccctacccgcaggggggcaattcgttacttaggtgccttgggcgtttagcaagcggagaagaccaaaggagagcgataagaggtccggagacaattaggagcgatcgattaggagcgctgacagtaccccatttgcctttcacacgttagaacccccgaatgtcctttgtctcactttaacgctaaccacaggtgggttgggaggaacgtaactacaatgggccagggttcgttcccctttaccttgggtgattgaaccgttcgtgctttttatcaccttcaatcgggacataacaccggggcaacggggctttagagcccccttggtctgtttaaacctaagggacaccacggagcaacatagagcgcacttagaacattaaagtagttaggccccccacgaaagacctattgagttaacagcagacagcacancggctttaggtacgctgttggcagaaaaaccgcaaaacgncggaggcgggcgttcaacacgcatcataggagcggagaagaacaccatttcgagaaaccatttggtgatctcctttggagaatagatgctccacaaaaagcggccacactagtgtattacccacccaaacgtttatcacagagtagagtatcgcgcgaatatgcgacacttacacaacacagagcatattatgcataccccttgcaatatctaccattgggactaccactcaccatattgagtcacattgggagaatgctagaaacccggtggcatatccagtggccaggacagtcgtgataacagtagaacaggagcattgcaacacttctatccactagtacctgtgaccatagccaacttatataacatataattgtaacgccccacccccaccacccagcagtagcaaagcgtcagacatcaaccagctgtggcagccccaccagtaccgacgcgggaatctacggcgccccaccgacatggcaggcccaacagcctaccacacacgagaaagtcgagcgcgcccaccacaatagaccacccaacaacccacgcagcggacaagcacaccaccgaacggctatacatcacgcgccaacagcacactcatcagcgagcccgtcacaccaaaaacacaagggtcgcccccaagcgccaccacgacaccagcaacagccgccgagtcggcacccaacgcacgatga

SEQ ID NO: 612585 - DNA, 1157 bp, Homo sapiens
cgcagccggagcaggagcgccgagacgcgcctccggaactgtagagtaacaatcacaaccccacattccgggcgagctgtgagcactgagcgggaatgggatgcgaccctgtggccgaggccgcctgcgtcgagacgccctgacagccaaccgtgagcgccgaccagccgcggctggaccagggctgccggtcaggcctgggaggcgagacgggagcctgcgtgcgtgcactccgtctccatctgcttctcagtgcagtcctggaacgcatgtggccgcggccggctccctccggggtgcaaacaccaagtcgccgccagacagaacggccgacgcttgcggaacgggacgacaggtccatttctcgggcctgtccaccccccttcacaccgagttctatccggcgagaacagcagtcaggcattcagcccacgactcgggaccccaggtggcacccggaggatgggcagcttggacaccccatacttgggacccatcaggcccccacgggagaggcacccagatccgcgcgccaagacagggacggacaagcacaccgataaaagagtgggggttcaccaccagagggcagaataaagcgacttgagataaccaaggcgccaactgagaacacgagccccctttccccactcggccaccctagggcccaacccttccccaaggtgcgacacatgcgagcgggcccacatgcagggccacaccaggagcggaggcacaccccaaccaggggacacccacgtctgggcaccccgttcgccacagttccgagtccccgtcggacgactataccctcggcccgcgaaagctcttgggcgggccaaccacagtagcacgcgaacgggccgcccctctagaggcatgcgcccagtccggaggacacacccgaacaccccaggacactgccacggacaggtagactcggcagaagagagaccggagcaggaaccacgatcagccctacccacgagcgagcgacgacgcacccccacgccaccagagggccactcgagcggccggacaggacgccccacggcgagaccatgacgcccgtgcggcccaagaagcactccagaacacagcccgcacagcggaccgcacacacaaggcgacaacaacagcgagcaacactagtggct

SEQ ID NO: 612586 - DNA, 108 bp, Homo sapiens
gacacgtccttgggatggggctttcattggataattcaccgaaggcacccctgaatggagtgggccctcagtaaatacctggaggaattttacctggccagttaggtt

SEQ ID NO: 612587 - DNA, 344 bp, Homo sapiens
  misc_feature (19)..(19): n is a, c, g, or t
atctctactaaaaatacanaattagccgggcgtggtggcacatgcttgtaatcccagctactagggaggctgaggcaggagaattgcttgaacctgggaggcagaggttgcagtgagccgagattgcaccattgcactccagcctgagcaacaagagtgaaactccatctcaaaaaaaatattttaaaaaaaacccacaaaacaaaaaaaatgctacaggtcagggctgggcgtggtggctcacacctgtaatcccagcactttgggaggccaaggcgggcggatcacctgaagtcaggagtttgagaccagcctggccaaaatggtgaaacactgtctctatt

SEQ ID NO: 612588 - DNA, 102 bp, Homo sapiens
cccctctatctgaatcagactctcctatctgaatccagatcctcctatctgaatgctgaccgccatgatgacaaaaagtgagacggatatacagataggagg

SEQ ID NO: 612589 - DNA, 1087 bp, Homo sapiens
ttgataccctgagtgctagcctacacgtatgtatctagagtagcttatagcccctgtgaaggagggggcatgttattattattactgtcgtgtgagttatggtagctagccgtactagagataggcgtgatcctagtagtaacagatgctactacatattacacagcttcctctctactggttcctccccgtcagcacccactacgatgcatgatgatttctatacttattatgtgagtagtgcgttcgtggtacgtaatgtagacaatagaatagtacatataagtcctggatgctatggtgattctttaatttatacttgtatgtgttataggcgtcgagttatgagtcacggccagcgatgcgcttgagaggtgtagtcttatgtggatagctcaagttaatgtagttggagtcatcgattatttgtatgtgtatatactctgcctttcatgatttcaggccctggtctacgctactatataccatgttatatcattacctgtgtgtgactatatgtgtcactctggcccacacgccgtgctatccgttcttagttctagctttacactcttccttttctaatatattacacgtaaacttattttgtaagatagtcgcttctattcaactatatctttatatatatatattaaattaacgctcgtcgatctgtcttataattaagtaataaatagtataattgagatcattaccataatattattaattttcttcagtattacggacatttgctacatgctagtcacatgtgagcataataaagcagagatagaaggagtagcagggaatttagtagtctatgtactcaacgtttgcgtatactccacctgggctcgtaccgtcgatgcgtcatctcgttctctattagttctctttctttctgtgttcctttgtgtagagatatattagaagacaagtactatcgatagttagatcgtttataattgatagcaacttagacttcttcacctcttttacattatctcattagctgtatgtactctcactttttccagctgacagctgtagtttgcgatcagccctccgttcactgttctccctt

SEQ ID NO: 612590 - DNA, 330 bp, Homo sapiens
gtatacataaattagccttattagaagctgtgttcaggttgaatatctctaatctgaaattagaaatgctccagaatctgaaactttttcttttctttctttcttttttatttaattaaagttctagggtgcatgtgcacaatgtgccggtttgttacatcagtatacatgtgccatgtgggttggctgcacccattaactcgtcatttacattaggtatttctcctaaggctatccctcccccagacccctaccccatgacaggccctggtgtctgatgtacaccgccctgtgtacaagtgtactcattgtacaattccgtactcccaa

SEQ ID NO: 612591 - DNA, 674 bp, Homo sapiens
  misc_feature (627)..(627): n is a, c, g, or t
tctttcctctaccttttaacctaggccaagaggccaaaccattattttcatcctaacatattacacccccttcacaccttttcccacatcatttatttcactcttttatcacctttaaacacctctttaccccaaattaaatttaccactaactcactcttcaacttatccaacattttttaccggggtaaccccccactactcactacccaaaaaaatcaccccaatccctttttcccccatttaaacctatttacatctttcataaacaccgcatttcattaatcccttcataaaaactaatatctgttaccttcatctatcaattccccactttccccaaatttcctatatccctcactaatcacaaatttaccatatcatcccaaatgcatactcccccattactccattccctcatacaccacccatcttacttattatgccttttttccaatattccccttctcctctaaccttaaaacaagccagcttaaccacacaactttcctaaatccaaccttcaaccccccccatacttataaacccccctcttactcctatctttttaattaataaaacaacccttatccattattttggtaattaaacctaaacaaaacctcnaacaacttattattttaaaccctcctcttaaaactttactctttcac

SEQ ID NO: 612592 - DNA, 277 bp, Homo sapiens
acagactccacgatattacaagggttctctgtcctaccatgaagttcacccgcaagggctactggcaggtccaactggaccagagtggaggtggccagcgcgactgacccgtgtgcaagagagggctgtgagcgccatatgtggacacagagcactacccatcatggatgcgcccggatggatgaggtgcgcgagcttgcagaacggccatacggggccgtgaccgctagattcaggcgcagagtacatagatccccttgtgatgaaggtgtccaca

SEQ ID NO: 612593 - DNA, 1019 bp, Homo sapiens
  misc_feature (27)..(27): n is a, c, g, or t
  misc_feature (61)..(61): n is a, c, g, or t
  misc_feature (63)..(63): n is a, c, g, or t
  misc_feature (81)..(81): n is a, c, g, or t
  misc_feature (190)..(190): n is a, c, g, or t
  misc_feature (202)..(202): n is a, c, g, or t
  misc_feature (205)..(205): n is a, c, g, or t
  misc_feature (228)..(228): n is a, c, g, or t
  misc_feature (238)..(238): n is a, c, g, or t
  misc_feature (241)..(241): n is a, c, g, or t
  misc_feature (252)..(252): n is a, c, g, or t
  misc_feature (280)..(281): n is a, c, g, or t
  misc_feature (283)..(284): n is a, c, g, or t
  misc_feature (286)..(286): n is a, c, g, or t
  misc_feature (295)..(295): n is a, c, g, or t
  misc_feature (298)..(298): n is a, c, g, or t
  misc_feature (305)..(305): n is a, c, g, or t
  misc_feature (307)..(307): n is a, c, g, or t
  misc_feature (310)..(310): n is a, c, g, or t
  misc_feature (342)..(342): n is a, c, g, or t
  misc_feature (357)..(357): n is a, c, g, or t
  misc_feature (370)..(370): n is a, c, g, or t
  misc_feature (400)..(400): n is a, c, g, or t
  misc_feature (405)..(405): n is a, c, g, or t
  misc_feature (426)..(426): n is a, c, g, or t
  misc_feature (436)..(436): n is a, c, g, or t
  misc_feature (439)..(439): n is a, c, g, or t
  misc_feature (475)..(475): n is a, c, g, or t
  misc_feature (499)..(499): n is a, c, g, or t
  misc_feature (512)..(512): n is a, c, g, or t
  misc_feature (514)..(514): n is a, c, g, or t
  misc_feature (519)..(519): n is a, c, g, or t
  misc_feature (523)..(523): n is a, c, g, or t
  misc_feature (525)..(525): n is a, c, g, or t
  misc_feature (529)..(529): n is a, c, g, or t
  misc_feature (535)..(535): n is a, c, g, or t
  misc_feature (538)..(538): n is a, c, g, or t
  misc_feature (556)..(556): n is a, c, g, or t
  misc_feature (565)..(565): n is a, c, g, or t
  misc_feature (567)..(567): n is a, c, g, or t
  misc_feature (575)..(575): n is a, c, g, or t
  misc_feature (607)..(607): n is a, c, g, or t
  misc_feature (633)..(633): n is a, c, g, or t
  misc_feature (652)..(652): n is a, c, g, or t
  misc_feature (655)..(655): n is a, c, g, or t
  misc_feature (663)..(663): n is a, c, g, or t
  misc_feature (671)..(671): n is a, c, g, or t
  misc_feature (680)..(680): n is a, c, g, or t
  misc_feature (683)..(683): n is a, c, g, or t
  misc_feature (687)..(687): n is a, c, g, or t
  misc_feature (692)..(692): n is a, c, g, or t
  misc_feature (719)..(719): n is a, c, g, or t
  misc_feature (743)..(743): n is a, c, g, or t
  misc_feature (746)..(746): n is a, c, g, or t
  misc_feature (769)..(769): n is a, c, g, or t
  misc_feature (780)..(780): n is a, c, g, or t
  misc_feature (831)..(831): n is a, c, g, or t
  misc_feature (880)..(880): n is a, c, g, or t
  misc_feature (894)..(894): n is a, c, g, or t
  misc_feature (937)..(937): n is a, c, g, or t
  misc_feature (981)..(981): n is a, c, g, or t
cgctcgcagctcgcaggcgccgcgtancgtcgccaccgccgccagcccgtgcgccctcggngntacccgccgcgctcccanccccgccgccggccaggggcgcgctcggccgccccggaaagtgtcccgctgcggctccgcggcgatggccaccaaaaacgaaaaaaaggcttgccgggcggcgtacaanctggtgcgcganganggctcggccgtcatctgggtganttttaaatanaanggctccaccancgtccccggcgagcagggagcggagtannannanttcatccancantgcacanangangtccggttgtttgccttcgtgcgcttcaccancggggatgccatgancaaaaagtccaantttgccctcatcacgtggatcggtgagaangtcancgggctgcagcgcgccaaaancgggacgganaanaacctggtgaaggaggtcgtacagaatttcgctaangagtttgtgatcagtgatcggaangagctggaggaananttcancaanancganctgaanaangcggggggagccaattangacgcccananggagtaancccagcccccgccacaccaccccttgccaaantcatctgcctgctccccgggggagangaccgccggcctcagctantancccaccancccaccanggagaaaanaanccangagangcagcgcccgccaccctgtgtccacancccccaccttcccgcttcccttanaancctgccgcgtcctatctcatgangctcatggaanctctttctttgatcttctttttcttttctccccctcttttttgttctaaanaaaagtcattttgatgcaaggtcctgcctgccatcagatccgaggtgcntctgcagtgacccntttcctggcatttctcttcacgcgacgaggtctgcctagtganattgcatgactcacgttgctttcagagccgggctatattgcatntagttttctgggcctgcttctgtgtacactgaggggag

SEQ ID NO: 612594 - DNA, 1101 bp, Homo sapiens
  misc_feature (394)..(394): n is a, c, g, or t
  misc_feature (717)..(717): n is a, c, g, or t
tcgacctccccaccccatccaacatctccgcatgatgaaacttcggctcactccttggcgctcagcactgatcctccgaagatcaacgcaactaggactattacctagccgagtgcgacgtacatcgaccaagacgcctctaaccgcacttttcatctaatcgcccacgatcactcggagacgtaaatcatggtctgtactcactccgtctaccttcagcgccaattggagcctctaatattcttgtatgctggcgctcgtatcgctacgaacaatcgggacgagagcctatagttacggtatcagtttctgctactgcagaaaagcgctgaaacatccgggcattgatcctgcctgcttagcgaactagtaggcaagcagtcctgtcataggncgtatggtccgtcccatgcaggccagatatatcattctgacggggccacaggtaattacaaactgtactatccgcccatcccagtacattgggcacgagaccgtaggttcaatgaatctgaggaggcgtactcagtagacagtcccaccctcgacacgattctttacctttcacttcatcttgcccttcattattgcagccctagcaacagtccaactccgtattcttgcacgaaacgggatcaaacaagcccctaggaatcacctcccattccgataaaatcaccttccagccttactacacaatcaaagaacgccctcggnttacttctcttccttctctccttaatgacatttacactattctcacagaactcctaggggacccagacaattataccctaacaagcccttttaaaacgcttccaaattaaggcccgaatgagtattcctaattggctaaacaaggtccgatccggcctagaaaacgggaaggggggccgtggcgccatataaataacatcgcaattccttaggagaagatccccccgtcctctattttcacaccaagggatatttttttggcgaagaaacacctttttggatctaccgaggaacccactttactgaacggggcaggacagcgctcacactagcgaaggagcagcattttacaagcaacgtatattccttcaaaaggaggcaggg

SEQ ID NO: 612595 - DNA, 980 bp, Homo sapiens
agcggagcgtccagagaacgccagccgttcacgtcgttacggtcctccttgcgctgactcaccgtcctcgccgccgaaccatggaagcccccaagagctatgtggtcaagctctgaggtacgctggtcccggaacgagagcatgcctgcagcatcgaggttgttgattcgtaggattactaaacatggaaatcattaggacctaccagagaggcagtatgacagtaaggtagtgcatctcgaaagtgagtcacagcgtcaatcagagtaatcgcgcaggattagttaaacatgtacagagtaaattctgggtgctgggaagttagctgatcgctgtccctagacaactgagtcatcggatgagtttcttcttgcaaagggaaggtgggctgacggacatgtctcagatgcatgatcctcgcttcaatgctcatgggcttgaagacgccgagaacggtgtgccggagctattgctcgaggtcgcacaggtagccttgtgtcatgctcatatgggctcgacattaacggaagccaaagaagtaagcggactatggcttattcgtttcgcccttaacacctagagtgacgtaatgcagattattgtcatgatcccatagttaccctgagagaacttcgaacacagatgtactcactaacgatggatactctaatgggccgactccagtgaagagcgtgtagcgatgggtgctagggagtgttaggactgtgtactaacccctgatggtgctcagggcgaagactagggacatgggttagtcgcacgtggtcacttcggagacggatacctgtgtccatctcacaggtgggagaggtggtcccaagtgtgggatagatggcttaattggcgggtggctgcagcaacgaaagggtagttctcttcctggggatgcgacgttggttgacatagggcctgggattggcatgctggaccgttaggaccgcacccaacagatgggccta

SEQ ID NO: 612596 - DNA, 195 bp, Homo sapiens
gagccgtacaagcgcgtagcagctctcccgggggcgcagcaatggcgcggccttttgcgccgtcgtctgtaacctttctgtcacattacctgattagtatgaagcccaactccgagcgccagggaaattctaggtgaatcttgaccgcggcgcgataactaaaaaggtaaccacgctatgaccaagcaactggag

SEQ ID NO: 612597 - DNA, 124 bp, Homo sapiens
ttgaggatcctcacgcgcgaacgtcaaaccattgtcgccgatcttcacgtgtcacacgccgaaccacccaaactgcatacgccgagcaaccacactgagcatcgcggtgtcgccgatcttcacg

SEQ ID NO: 612598 - DNA, 516 bp, Homo sapiens
  misc_feature (416)..(416): n is a, c, g, or t
gcaacggcaacttccaccccaagcagtgtcacccagctctggatgggcagcgtggcaagtgctggtgtgtggaccggaaaagggggtgaagctccgtctcaaaaaaaaaaaaaaaaaaaaatttacccggggcattgggtggggggccccttgttaattcccagcttatttggggagggggggcctttagaagaattcattggaaaccggggaagggcggaaggttgtgccggtgaagcccgaagaatcggcgcccatgggcaccccagcccggggccaaccggtgaagaactccgctctcaaaataaaaaaaaaaaaaaaaaaaaaaaaaaaaaacaggtgttgggcgcgcgccaccgggcgccctgaagaaagagcttttcttagaaaccaacgcggggaggcggcggcggggngcccccgatgaggtaaggaaaaacaggggcacaaagagagggctcctagaggaaaaaccgggcgcaaaaaaaagggggggggatttccaacaaaataaac

SEQ ID NO: 612599 - DNA, 610 bp, Homo sapiens
  misc_feature (247)..(247): n is a, c, g, or t
atgaattaactgatcagccctatatgaaacataagtggtgttataacttatcagccgaatatggcccataaactagttctcgatacctgctctgtagcacgagacgcttctacaactcccgggttctaactaacactacgagtatgctacgcctgtccactagggaatccagcagatgtctgcctgcacaatgggcataacgtgtctatcacttctgggcaagccagcacagtgcgaaagagtccancttagcgcaatacgttaactcacacgctgaaatctcagagtctcgcataatgggtcgagatgtggcccaacaacttcctttctccaacgacttcatagtgtcttactctccaccccaacaaggcccctctaaacaaacacttaaggccctgcgcgagccagcaccttcccccacgaaggagcaaaatgtatccccgaatgcacttcttctctatacacatttctcggggccccaacgacaggcccttaaacacgctctcaccgacgcgtcacaccacgcgcttctactcacactacacacccttaggattcctacaagagcattcaccgcccttcaacagctggcactccccataatgccacg

SEQ ID NO: 612600 - DNA, 107 bp, Homo sapiens
tgttgtcgtctttatccaatgcctactttttcacacttctagataagcctctacctgcacgacaacatataatgacccaccaatcacatgcctatcatatagtaaaa

SEQ ID NO: 612601 - DNA, 372 bp, Homo sapiens
aacccctgttgctttcctaaaccccaactgtttcccgggggtggttagaaaaaattttgttttgatgtttaaattggccggtttagatgcccggtttagttttttgaagatgaagttccccccttttgtttccacccgccccacccgggtttgtccctttccccgcctaaagtttagtgagatgttatatgtaagatctgatttgctggttttcccctggagggttttaaatgggaaagttccccccttttgtttaatggttttttccccccccgccaataatttggggcgcccgaattttgttttttgttcccccctttgtacccaaccccctgaaaatttgttttttaaattttgtcctttttgggggta

SEQ ID NO: 612602 - DNA, 324 bp, Homo sapiens
aaaatggggcaggggccttatgtttttataatttcccaacaatgggccgccatatttttgcctcaaggtaaaggttttaacagatgaaaaaggacttccccattcccccgggctattcctaacctataatgcccaaatgttttgggcaatgtgtagggtggggggataaaaacaaatattcttgaaatagacataccctcaaagacctcattcccaagtaactgatgtattggcatttcattcatatttttgatgtgtgagggatatgggactaattaccttttccttgatgtttgcccaatttgaataaaggccttgggtcga

SEQ ID NO: 612603 - DNA, 719 bp, Homo sapiens
tgggaactttttggtaaagatgggagtttaactatgctggctcaggcgggtctggaactccggagctcaagtaatctggccggcctgggtctcccaaagtgcggggactacgggtgtgagccactggcacctggcctggtgcaagtctttaagtggcatatgtgtatgtaatcctttggtgtattgggccaggagtgaaagtccggggtcataggatatgcttatgtagaattttagatattggccaaacagtatcccttcttgggggttctacaaattacatgccccaaagagtgttggagagtctcatttggtcccatatcttggccaatacttagtatggtcactattattaactttagccgtcggggggattggtagtagtatctctgggtttaaatcggcgtttcacttattactaaaggaggtggactactccctggtgggtcactaggaacccttgtgtgaacgtgctttatccacttgtctgtgccccaattttatctttttccctaatatgaggagttcctatatattgtggtttgaccccttctgtgggtcctgcggtgtggcaaatttttcccccttactctggctttgcctttaagacttctaaggggcaggacgggttcatgctgtaccccctgtggtgcgggcgggggttgtgcgcccagggtctcgccggcgggggtaggaccttcctgtgatccgacaagaaa

SEQ ID NO: 612604 - DNA, 617 bp, Homo sapiens
  misc_feature (21)..(21): n is a, c, g, or t
  misc_feature (307)..(307): n is a, c, g, or t
  misc_feature (596)..(596): n is a, c, g, or t
attttttggaagaatcaaccnaccaagtggcacaaattcataagggaacgaccaattatggatatttcaaacttttttaacaaatcaaaaactgaaaaattaagttaatactttgtagcgtcgccttttgttgcgattacagctgtaagtcgcttggggaatgtctctatcagttttgcacatcgagagactgacatttttcccattcctccttgcaaaacagctcgagctcagtgaggttggatggagagcatttgtgaacagcagttttcagttctttccacagattctcgattggattcaggtntggactttgacttggccattctaacacctggatatgtttatttttgaaacattccattgtagattttgctttatgttttggatcattgtcttgttggaagacaaatctctgtcccagtctcaggtcttttgcagactccatcaggttttcttccagaaaggtcctgtatttggctccatccatcttcctatcaattttaaccatcttccctgtccctgctgaggaaaagcaggcacaaaccatgatgcttccaccaccatgtttgacagtggggatggtgtgttcagtngacgcggccgcgaatttagta

SEQ ID NO: 612605 - DNA, 208 bp, Homo sapiens
tccctttaatcgagctcgttacctgcactggagatcgctctgaactgtagatcgctcatactacagtcgtcccgacagctccagcctgctagactcatgtagattggctggcgggagcgggaagtgattcagagcgcccccatgagcagttctgctcttcgcactgcagtacgcagccgcggaacaccggctcacggtcgccctggga

SEQ ID NO: 612606 - DNA, 373 bp, Homo sapiens
ccccgtactagtcccgacaggagttttctcgcgtgactactatcgctgtcatgtaatggtcgtgactaggcgaaagaccgtggggcccggccaaggccaagtcgcgctcgtcccgcgctggccttcagttcccggtagggcgagtgcatcgcttgctgcgcaaaggcaactacgcggagcgagtgggggccggcgcgcccgtctacatggctgcggtcctcgagtatctgaccgccgagatcctggagctggcgggcaacgcggctcgggacaacaagaagacgcgcatcatccctcgtcacctccagctggccatccgcaacgacgaggaactgaacaagctgtcgggctagtcgggggggtaccgagctcg

SEQ ID NO: 612607 - DNA, 110 bp, Homo sapiens
gtaccaaagtgggatttgagcagatatgacagtccttagtgagcacctgctgtgtactagatgtctagctaaccttgaaccctactaataccttgggctgcgtaaaagtg

SEQ ID NO: 612608 - DNA, 636 bp, Homo sapiens
  misc_feature (492)..(492): n is a, c, g, or t
  misc_feature (494)..(494): n is a, c, g, or t
tgggagactagtgttctcccgtaaattcaggcctgactgttgatctggtggccagggtcaagagtcaggacacatttgtaggggcttacacgagggttcagtagagttcacctggatgtatgagactgttagtttcagttaagcaggtctccctgaaggaaaactgtgtgaaggtgttaaggaaggagataatggacgaaaactggcagcagtatttgtatatcccgtgtcagggttgttttgtggatattaggtcaatcttaacctttaggcaggggtggccactcgtactaggctgttggcttggtggttctttactctaccatctaggtaggctgctggcttgtgtttgtgtgcaagagctgggtttcacccgaaaaattttcctactgtacaagagggtcactacctcctactagtgttatgctctggtttggtcctcccaccacaaacgtgggatccgtgcacgttaacgattactaggacataggnanccctttggggtaagggcttatataggtgttgttgattctggtactgtgggttgggatgttggttgggctgtgttttatgggggggattgagagtttctatctatggggttgtactgtgcggcgtgggctgtcgactgtaggg

SEQ ID NO: 612609 - DNA, 171 bp, Homo sapiens
gacagttagcagagatgatggattgaacgtcccttacagacacctgcttcttcagttctctttcccgtaacatcccttccttggcaccgaaacacaaacctgaattgggtcctgtggggcaacagggcaccccagcaggacaagcagatcgagccaacgcctccaccctct

SEQ ID NO: 612610 - DNA, 710 bp, Homo sapiens
atcagcattttggatgtaaaaaaaagaggttttgtcagacgaatttgttatgaactcaatctttaacccacgttgcttactttgcttttcgaaaatacccatctctgttagtttcccccccattttgtcattttctatatccagtttccaaatttttacttgactatcagtaccagttgtgatcagtaaatcatccttcactgcaaggccccaacactctccagtatgcgcaatatgcgtctctatacattgatgtgtttttaggtcccatagcttgatcattccatctttggaggtgctgatcagccaatcttctccttgacaccaaaagccagtaatggaatccttgtgtgatctaagtttataaagaccaacttctccaacaagatcccatacaatgatattggagtccttggaaccagaaattaatcttgtgccagtcccatcaaattgtaataatgttatagctgctttgtgaccgttaaaattcaaaagcacagtcttagacatcaaatcccaaactttaatgacaccatctgcgtaaccgacagctaataaatccgtatctttatgagcctccaaatatgtacactcggctggcttggcgcctctagcatcagatgcgcctggaggtaagccatcggataatttactgaccaaatccccggtcttaatatcccatatattaacgtcctcgagggggggcccgg

SEQ ID NO: 612611 - DNA, 620 bp, Homo sapiens
cgctctagaggtcctccaactagtcaagaataattagacttataaaagcactggtctgataagattctattggctttctttattcatagagaccacaacagatcggcagatcccggtttctccaactggagcctctggttaattttccataaaatcaggtcttattctatatatttgggatggagtctggtccaccaggctggagttcaggggcacaatccatggttcactggaggcttgattctcccggactcaggtgatcatcccacctacagactctagattagcggggaacaaaggggcacgccaccacgctggctgatttctatgcactgtttgtagagatgaggtttccaccatgttgttccaaacttcctgggctcaagccatctgctcaactcggtctcccaaagtgctgggaccacaggctccaggcaaccaacaccaggccttcagcctaataatttccacttctgagagttaattccaaaaataatccaggggatgtgacagaagatttagactgccagaaatttcagcatctaactttctcatttacgtcatgcaaaaatactgggttccagacccagaattatatcattataataggctcaaacaca

SEQ ID NO: 612612 - DNA, 251 bp, Homo sapiens
aggatccttatgttagccttaacctaaaggcgacgagagacagaaggcttgcttgtcggcctgtctgaagtgacggtgcagccagggtgttcccgtgccagaaaacccgatagcattgtgctggacgtcgactaaccagtcttgggaccccgatgcagagtgctggaaaaagccccgatatcttggcgcaagttcaagggtgaagcggatgttggaagttaggttgaactttggaaaaagcaaggtcttgc

SEQ ID NO: 612613 - DNA, 868 bp, Homo sapiens
gtgaggctgtgagtaggtggcattcacttaactggcccagccctctctgcttcgtgattttattctcattgaacttataaccacaagccaccacccattgacatcctctctggattcccaacggcagcataccctccaaaactccgcagcaagagcaaactcagcagtcttcaacacactggactcaccactaagggcatgtctcacttccttcacttctccctctctgctctcttacaacaacgcaactcgcgactgtactgcttccaacagggctccctcacttctgctctccctcctctctatgacaccctcttctccctctctctgctcccctctgctacctctacacacgctgcgcctctctctacacacgcgcgcgtcctacacacaccacgcacctctctctgcgcccacacacacccactactcctgcacgcaactgctacgcacctctacgcccctggctgcacacgcacacacactctcaccctggccctaacccacgccacctccaaccccctgcactctacacccctggcctacacaagcacaaccgcctcttacctctctctacctacaccacccctctgcacccgcacacctagcacacgcgcaccatttacgccttgggcacctctacctctgcctgctgcctgcccacctctggcttactctctctcctatccctccttccttacctcctctcctccctccctctctgacccttctctcaccactccttcctccccacgctctccacgcccccgccacgcacctccacccactgcacccaacccagcctctcctccacaccttcctccacactctgcctcccccccctctccctcaccctggccccctgccc

SEQ ID NO: 612614 - DNA, 1750 bp, Homo sapiens
tcgcggccctgggagctggaggaaccgcgactcagcaggcatgactggagagggaagtcccaactggtgctagaactggtgctgcagtggcagaagacggctcacaagtgaggtctggaacgaacaacagggcaagacatccatcactttgctccaaagctgtgcaacgtcaatatccatgaggcgagcacatctatgactacacccgtgcagtcagctgaagccacgctacagcaaggcagaacatcgtgagcagtgcacgcgtgacaaatgacacagcggccttcaagacactcgagatcatggccatatggcccgtggagtcaagtgcaagaaacaatcatcctaacccatgatgcagggaaaccctccatctgtcacaaagcccttgctggctccctgtacacgagctggcaatctcaccatgggcaccgcggagagcccgcttggcccacccaacggtggagttatcccatggcgttgaccatgcaacgccctatcccactgggaaccccaatgtacacgatacgaaagcgctgatcgaagacccataacccgaagtcgccacaatcaaacgaggaaccattggaagggcgcggttgcgcaagacaccacatcgaaaggaaaaccccaacagcagccgaaggaaaatcccggaggcgaggccaaaacagccgtgacaccaacagccacaaaacgagggcaacggaccaagggacaccccgataatgcaagatacgccaccgaacaaacgcgagaacccccaataaacacaggaaaaacaccgacttgggaaaggaaccccagcgacagcgaaaacgccaaaagcaccgacgcagagcaaaccgcaaaaaccgcacgcaataggcgcacactagggcacaggggcccacacgcagccagccgttgggcacgcaaccgccggttcccgccgaaaaatatccacgaaaagacggcaaaaaggtgtgacagacacaggtggggaccgcacgtgagccatattccgaagccggtatccagaattaccaaggagcagcatagaaccccacagcgggaaattggggaagatatacgcccccagatgagatctaccgagtacccggaaagccattgggagacacccaacggacccaaacagcacgagaaaaataggatttggcgggaaacaataaggaccaccacccgggtagctcacgcagaccacagcgattaccacaaaaaaacacggagaccaaatggacaatagaggaaaaaacgagatgacgcaaaaccagaaaaaaatccaagacgaagagaaagcaaatgacgcaaagaaagggagcagaaaacacaaaagaagacacaatagacaagaatacggagacaaaaatgaaagcggaaagcacaccaacgagaagaaaaaacccaccaaagaccaacaaagagaagaaagaatacaggacaaccaacagaccaaccacccacgcaaaccacaaagacgacaccaacacatgcaccccacaaaaagaacaaagaaacaacgagaggcaaaagccaaacccgataaaagacaccgatgaaaccagaagcagatagagtaataaaacaagaggaacaccaccaaaaggtcaggagaatagtaccagcgctaaagagacttaggcacgctaatacaaagataaaactcagaatcaaagacaatcagaggaaagagcaccccacacccagaaagtgacaagttagagcaaagaaaaaacgcaataagacgaac

SEQ ID NO: 612615 - DNA, 196 bp, Homo sapiens
cctggctggcttaaaggggcttggtcaagggcctggcattaacctgccccccccgggaacttaaactaaggtcccaacccaccccaaaaaccttttgccccaaaaaattgggtcaatcagggcttggccaagggtccctcccattttggatggtttaatcctgttttttttaaaaaataaaatattttttaatcca

SEQ ID NO: 612616 - DNA, 143 bp, Homo sapiens
ccgttttgagtcagacacacgctatgaaaaatgctcttgccctgacaagaagaataagctggataatctatggagtcatagatttcattttaacaagacagagctgaggtctcaaaaaaagctaattaacttaacattcagac

SEQ ID NO: 612617 - DNA, 298 bp, Homo sapiens
cagatgccaggcaaaagtcatttcactagggctattctgcgttccacagggactcttcttgctaagcacaattataaagaaaatgacatcaccactctgaatcacaggctgaaagaaaattgggttttggttgattctccacaagaaacacagttatagtgatagctagaatatctgtgcctttggggtttgcttatcacacagctgatattggtacatatgccaaaggaacgcacaatcacatatgctaccagaggtgagtggatagctaggtaatcaagctttaatataagacttt

SEQ ID NO: 612618 - DNA, 851 bp, Homo sapiens
agcggggtggtccgagccaggctcctagggcagagggcaaacgggccctccagtgagggagccgggagattacgcatgctccagtgtaggtccacgtttaggttgggaggatctaccatgaagaaggtctaggaagaaaaggtcatgatggccagacgccaccgagactccacctcccagcatgctagctccaattccatgctctagcagtctagtcctgaatccacacacactagcagcctagccctgaatccacacacgacaggattccagccttgaaaccagctcccggcagccagcattccaagcccattccagtcacccgagaatccgccgctcctcttgctgccttttatcgtccagatgctaagcgtgaaggcagcccctcaatccaggaaagcatggtcctctgagtcgcgccggcccgcattccttgctctctgttggccagcttgcccctgcaggtcctccgctttgctaggcgtcgtcttggggctatgccatatgccgcatcttcgatgtccttctgcctcgggactggcagatggcgccagggagaggcactccccaatctgctcaccttctacagaaaatcttcaagaaaaacctccagtcatcgtaacgcgtgtctccaagccctcggaactgtggctgtggctctgggggctctaggaggctgctactacatcactgaatccgttgtgaacaagcccctagtgccccacagtctggcagagctccaccagccccaggagttgataggtgatggcgctgggagaacgatgttcagaatatctcaaagacaaggtccagaagtttgatgtcttccctgtccagagagtgaaaaacca

SEQ ID NO: 612619 - DNA, 1887 bp, Homo sapiens
  misc_feature (252)..(252): n is a, c, g, or t
  misc_feature (1073)..(1073): n is a, c, g, or t
acctatctgcctagtttgtcaatcgcgtgtgttgcgtgcccgctgtgggtgtgtgtcttgcggggagtgctttcctccggcgagtgtgggggtgtatgtgctgtccggctgctcgctctctttgtgcttgtctcttacattggttttgttgtgtggttgttagtctctgcctccctcgtgtcttcgcttctgtggtgttctctctctgtggtttatcccgtccgggggggggggccgccttgctttgtttgnccatgatgatgtccctactgtctttcctgctgttatttatgttggtggtgctgttgtctctgctcgctgtgtgctcgcttgttatagtcgcgctgatcaatcgtggttgtggtgtgtgggttttgttcacgcgtccgttgtggtgtccggtccggttgtcgtctcctttgtgtgttgccggcctgtgccttcgtgtcgtagcttattgtgttggaatcgtggtgcctgctttgttttttcttttgtttctcctgcctgttttctctttgctcttcgtgtctgttgttgtgtccctccgcggtgtgttttgctcccccacctactattggtgtatgttggttgtggtctgcggcctcggagtgatgtggtgtgtgtatagacgctacgttcgggtacgggtggtgtgatgttgtctttctcactgtggtaggctccaccacaggggggggctccctccgccccctgaatgaccaatgcccatgctgctgcagctgcccttcttgggtggttctccccgcgactgatgttatggtggggtgctcctcctctgtgttgcgtggtaatttgtctcgcggctggcgggttggatggtaaggctgtgccgccgctgatggtggtgtggtaagatgttgatgcgcccgcgtgttccaccggtgatattagtttggttttggtttgtgtggttgttggtgctgggcgcgcccacgctgggtgatgatgattggtgttggtgatgttgttggagatgcgccccgcgttgttgtttgagggccgcctacccagctttgtctgctacgagttctccttattggtcgcctccntcttattgtctccctctctctcgccacaactttgtattaggagactgagtgtgggcaaccttttttgtggtgccgcaccacacgccactaacaaccaacaaggcggacaatatgtcaaataacgacacgctcggcgtgatgatattttttgcccctcgttatgaggaataaattgtttcccacaactcgtgtcgcgcttgttgtacacacgacaactgtcccccgtgatgttgttatatcttctccgcgacttctcacagagagagtattgtcgcacaatgcgaacccctgggaaagcgtcgcaaccgcacatataggtgtttatacatatagagaagacacacaccccgtggtaaacgcgccaaaattatagatttctatagacccactgtgtcttttattgtacacacgtgttgtcacagtgtggggtcttctgtggtttgtgtacacacagtctcctatccaagacctctccagagagattaccttcggaggagtcttctccctggtctcacccagtttctcgcacaggcacatctttccggcgtccaaccatgattgttttagtgagcccaccaggcttcccaccggacattcacagtgccatatattggcgtccaacatttcctgccactgatactgcgttgcatacccgcccaactaataatttccacatttacacatacccaaccatgccctttggctttgaaccccccgcctgatgactggcctatttgtaggaaagtaggtttgtactcatttctgtatagtctccctctattgatgagggtcttaaacaaaaataaaagataaa

SEQ ID NO: 612620 - DNA, 187 bp, Homo sapiens
ccaaaagcctctgatttttaatttccataaaatgttagaagtatatatatacatatatatatttccttaaatttttgagtctttgatatgtctaaaaaaccattccctttgccctgaagcctgggtgggacacctgaagaaaactgtgtttcatttaaagatgttaattaaatggttggaacttgga

SEQ ID NO: 612621 - DNA, 138 bp, Homo sapiens
gtggctaaagtgaaaatcgtagcctgtgatggtaaccatactgactccaatactacagaatgcatagacaacatctgacttatatacacccatctctgtacaacataagcttaagaagcagaacctcagcaagcagca

SEQ ID NO: 612622 - DNA, 726 bp, Homo sapiens
ggaatggaatggaatggaatcgaatggaaaggaaagtaatggaacccaccagagtagaatggaatggaatggaatggaatggaatggaatagagtggaagggaatggaatcgaatggaaaggaatgtaatggaacccaccagagtagaatggaatgtaatggaatggaatagaatggaattgaatcaactcgagcgcaattgaacgaaatggaatggaatggaatggaatggaaaggtatagaatggaattgaatcaacccgaatggaatggaatggaatggaatggaatggaatggaatggaatggaatagaatggaattgaatgaacacgagcggaatggaatggaatgtattagaatggaatggaatcaagccgagtggaatggaatggaatgtcctggaatggaatggaatggaatggaatggaatggaatggaatggaatggagtgtaatagaatggaatggacaactgctcgatttggaatggaatggcaatggagtagaatggaatggaatcaaacagagtggaatggaatggaatggaatggaatggaatggaatggaatggaatagaatggaattgcataaaccaaggggaatggcatgtaatggaatggtatggaaaggaaaggactgtaattgaatagaacggatggactcagacgaatggaactggatgaatgtatgtaatgtatgacatggactagaatgcattaattcaatc

SEQ ID NO: 612623 - DNA, 457 bp, Homo sapiens
ggctgcccatcaacagtggactggataaagaaaatgtggtacatataaatcatggagtattaggcagccataaaaagaacaaaatcatgtcctttgcagccagccacatggatgcagctggaagccataatctaagcaaattaagaacagaaaaccaagtactgcatgttctaacaaatgggagctaaatattgagtacctcaggatgcaaaggtgggaacaacagacactgcagactggaacactgtgggtgaggagggcagaaggataggttgaaaaactacctattgggtactatgctcactacctgggtgatgggatctgtacctcaaacctcagcatcacacaatatacccttgtaacaaacttgcacatttacccactgtttctaaatgaaaagttgaaatattttttattaaaaaacacaaaagcaatatgtttctcaataaaaaaaaaa

SEQ ID NO: 612624 - DNA, 132 bp, Homo sapiens
tgtaaccatctaatgtatggatacgcactaaaacatactgtaaacgatgagttatactctataacaaatgcatcactgattttcaggcaatcatgggtttaataataattagtttaagactattaatcacat

SEQ ID NO: 612625 - DNA, 566 bp, Homo sapiens
gttcctatgtctatctatatcacagtggttttcaactgagcaaaatttcgcctcctcagggacaactggtatatctatctatctatctatctgtctgtcatttcctcatttatgaagattggggtaataacaatgcctgcctcaaaaattgacaaatgagatctcattaaactaaagagcttctgcacagcaaaagtaactatcatcagagcaaacaggtaacctacagaatgggagaaaatttttgcaatctattcatctgacaaaggtctaatgtccagaatctacaaggaacttaaataaattctcctgcctcagcctccctggtagctgtgactacaggcagccaccaccacgcctggctgatttttgtatctttagtagaggcagggtttcaccatgttggccaggctggtctcgaactcctgaccacaaatgatccacccatctcggcctcccaaagtgctgggattacaggcatgagtcactgcgcccggcgactgtctcattctgtcttgcccgctgacatgtaagacatgcctttcctcctccttcaccttctgccg

SEQ ID NO: 612626 - DNA, 215 bp, Homo sapiens
tgcttctaaaaagagatttcattttaaatttgtcaagggaagtcatttatctccacacaaacgcacaccgcaaatatatatatatatttttatttcctcattctttgttgacaggggaattgtaactagaaatcaaataatcgggatgcgcaataaccctatagtagtcgagttcaacaaactgattaacaaaatcactgacatttagcattaag

SEQ ID NO: 612627 - DNA, 169 bp, Homo sapiens
aggtgttatctagcctttctattagctcttagtaatgattacacatgcaagcatcccgttccagtgagttcaccctctaaatcaccatgatcagaagggagaagcattaagcacgcagcaacgcagttcaaaacgcttagcctagccacacccccacgggaaacagcag

SEQ ID NO: 612628 - DNA, 499 bp, Homo sapiens
ataagcatcataatgaaaaaaaaaaacctcaggggtacgagtcacggacattgaacatgtgttactatctgtgtatctgcccttctgcttgggatactaggaataaagaaagtgatcagttgtctactgttgaaagcactctgccgtggagcacacggtatccgatgtacggaaagaggctagtttcatcatcacagatcacgtccattgaccacccggcccgggtcttgaaagaaaagcatgcccaagacaagactacctctgcgcaacatagattcgaaacatcggggcgtgccctagttaccacatcccgaacggccacgacaagacccgtactcgcacgtgcgcgaggcgacataatcccccgaccatagcaaataatgcgaaggctggccccgcgccctaaccctacgacgggaaagcgagtaaatatacgcttgaaacgagtcaccgccgcctaaggacaaggtttcgcatccatgataaacgaccccgccag

SEQ ID NO: 612629 - DNA, 133 bp, Homo sapiens
  misc_feature (3)..(3): n is a, c, g, or t
  misc_feature (63)..(63): n is a, c, g, or t
gcncgtaccagtcatgttttatttggaggttaattcttattaggatatgaaaggaatcagctncgattgagattgtgttcctctcggaggggctcgggccaaggtcgtggggtgggggggtgcagagtgtgtc

SEQ ID NO: 612630 - DNA, 1815 bp, Homo sapiens
  misc_feature (231)..(231): n is a, c, g, or t
  misc_feature (509)..(509): n is a, c, g, or t
  misc_feature (792)..(792): n is a, c, g, or t
  misc_feature (794)..(794): n is a, c, g, or t
  misc_feature (1064)..(1064): n is a, c, g, or t
  misc_feature (1815)..(1815): n is a, c, g, or t
ttttaaaaccctcatcaatagagggagacttacagaaaatagtcaaaccacttttacaaaaggccagtatcaggcgggggtcttcaaagccaaagtgatgttgggatgtgttaaagtgtgaaactatttagtgtgtggggggatgtgaacgcacgatatagtgtgagggaaagttgtgacgccaaataatgtgacggtgaagctccggggaacgcctgtggtggctctacnaaacaaatgtgtgtgacgccgataaagtgccgttcggaaagagtggtgtgaagagcggaagaactctcgaagagttcactctctgtgagaggctctgtgtgtgtagagagagcgtgctacacactatagagagcgcccgagttataaaagtgtgtgataagtggagccgagtgtgctgtgtgagaattttatgtgtggtttctggcggtgtgtgtttctccttactcatagacaacatcagtgggtgagagccctcgaggggtgagagtgtgcaatanctctcgcgtgagaggtgcgcgagagggataacatcagcggagagtgggtgtgtatagagagagagtagtgggagaacaccctcccaatagagaggggaaatctacagcgggcgggcgggtgaaagttgacccgtgtgtgtgggcgggtggccccccagagatgtaccctcctctctctataaaagtggtgcggaggggagacactaaggcgagggcaccatacgatgaccgtgggacaaggctgtgggtctaccacaacgaggggtgctctccaaaacaaaananaacatcttcgctgtgtgcgagaagagcagacaacaacaaaaccactcttctgcgctggcaagggcactcacacaatcaaacaaataaggagaaaaattatacatccgccgcgggaataattctcagcaaagaagggggcgccattatctggttgtggcgcacccgaaggagcgtgtgcggtcgtcgacctgtgttggtgtatgtggggccccccactgcgtggggcacaacgtatggtgtatggaacttataacccccacccaggagtgngtttatccaacacatcttccggcgacggccccaaaaccaccaaattggggggggcacacattacgtgggggaccacaagagggggcgtgtgttaggagataatcaacacaaagaggccccataaacataattgaaaggagaaaggcgcatcatagtggggacacgcgtgtggccacacgtcgtgcaacaaacacttaccacagatggttgggcacatagaagaccacagggacgactgattcacataatcagcgcgagggaggagcagtaagaacaaatgagggggcccccccgggagatatacagggggcgaccccacacgagggactgaggaggggtacaacacccactaccagtgtgtcaaggagcgacagtgtatgtcgccctcccaccgtgggtcggccccacaacaaaggtggcgcgcgctcgcccacctaggtgggtggtacaggcattgaagcagaacaagcagagggcccagagaacacacagaacactacaagcaagagcctactcaacgaggggagagcccaccacgttggtcagccatcgcagcgggggggattaacacccccgtggtgaatcatacccggcggggcttaacaaagagagggcgcgaaacccacgcgaagcgcttgcaacaaacaggtgcgtagccgcacacacatgagggaaagaagcgaccattatgagtgctcgagcaactagagagcacaaatgcacgcacagacaaaagagatgcgtgacgcan

SEQ ID NO: 612631 - DNA, 395 bp, Homo sapiens
tggcccggctctctacctcaggcgctagaaaaaacggggggcacagaagcggacagatgagctggtgagtgagtggtttacccagcctggagcggcgaggagaatgacaatcattccagactcaaacttaatgcgcaagttggccgccatcacctagcaccttatttagccactctgcagctggatagcagcctatggataccacttaaataccagaccccaccagcagcagcacaggggacaagctacgccaggggaagggtggggcccttagctccaaatgggatcagcagctcccccagggggcagggcatttaatcccacctcgaatagtagttctacaaatccggcagcaagtagtcctggatcgggttcctcggtgccaccggtctcag

SEQ ID NO: 612632 - DNA, 211 bp, Homo sapiens
  misc_feature (134)..(134): n is a, c, g, or t
  misc_feature (174)..(174): n is a, c, g, or t
tgtctctgtctctgcatgcgcaccacacccagctaattatgatatagagcaggttctccatgttggtcaggctggtctcgaactcctgacctcagttgatccacccacctctggctccaagatgtgctgtgatnacaggcgtgagccacctcgcccggcaatggactaccagtntaatagggaaatctacaaatagatcacatgtgatagg

SEQ ID NO: 612633 - DNA, 189 bp, Homo sapiens
taatatgtacttataaacacagaggctagacagtcatggtctaagtccatatacatgtgacacatactgagtattgctcccttccaagccatttttaagttacttaaatctgttttcaagagtttggatgttaaggaaaacgagacaaatctgttagccagctcttggctctcctgtgttcctctagct

SEQ ID NO: 612634 - DNA, 269 bp, Homo sapiens
gcgctgtctcacagaaaaaacatataaaatctagttaatggaagagctgtcgttgtatctggcaaatacagtgatgctgcctgtcaggaagccgggtgcttgtcctctgtatagacttacagcagtaagcaggtcaggtacacgcagtctcaagtgccctcctagaaaggagctcatagtcttccaggatggctgggaaacaatttcaggactgtatgtgaaatttagtcccatgtccccaatatctcccatatcctgtagcctaccct

SEQ ID NO: 612635 - DNA, 174 bp, Homo sapiens
tcttaacgtgctgtcatagtatcagtcctcacgtcaatgtctcctgttcatcaatggcttcctcaacagctgtctttgcgtgaaaactcgttctctcaggggacgtccagaatcgcattatctgacacacagcatttcatggtcagaacctcggacagcctggatgtgttcgat

SEQ ID NO: 612636 - DNA, 880 bp, Homo sapiens
ggctcttcttcctgccaacttgtgaagagggtttcttatcttcgccttcaccttctggcatgattgtgggctctccttgaggcctccccagtccatgtcgcaactgtgtaggtcaactaaacctcatgttcctcttcgagaattgcccagatcattgagcaggacttcttctgtagcgggttgtgaaaactggacataactaccagttagtatacgatctcagcatcgtggatagaagtgtagttacacaccctaatttttcatcgtgcatagtatctcccaggcggagtgcttctgcaatctactcagctagtgtattcttcggtctactgtgccacgatccggctgcctgtgctctgtctactctctcaacaggccgtactggtgccactctgaacagatgaaggtccaagatacgctatgtgtgggccacggagacactccggagctggggcactccacttgggccccgtggatagaggtcaccccgaagacaccgcggtcctatggaagggaaagggccactgacgccgccacgcgtacgtggagcttcaccgggggcgccttccgcggacagtactcacggaacggaacccttgagatcctcttgggaaacacaaaaacaagtgagcgtacacaataccgccaccttaggctttacctctcctacctttcaaacagacggtcttacgcaggcagcagcatctgacgggccaccactcggagccatgtcgcggggtacgaggtagcactgggtgtggccccggtggacatcgacaggtcccgccacacggaccgtgatgcatttccacacgccgcaaggggcctgtgcacagcagaccaagcgggaaggaacgtctagcggcccatgtggaaaagc

SEQ ID NO: 612637 - DNA, 1712 bp, Homo sapiens
  misc_feature (1258)..(1258): n is a, c, g, or t
agctggcctccttgtctaccccacgcgcggttctcaacgggtttgtgttgctccgtcccacctgtagtggaacggtcctcacactctgcgggggtcctcctttgtagatcaactaaccggcggggaagcagagtagtcgctgtggcaccaactattgtggacacctcctgtttcttctgcagacactgtggtgcacacccccaaacacgtgcgggccccacgctctttgtgagtacgcggcgtgcaccacaattgaaggtaggagatatggtttcaccctctcctccccctcttccttcagctgatagggtgtgcatcgatctcctgtggctcgagatttttttcctgggcgccgattttctccacagggcggggcccccttgttgctgccgctcttactaatactccctctgatgttcctcctgtggcgaattctactcgggcaattttttggtggtgttgtggtcacacactcttctctcgcccccccccggggagtggtttcgccctccacaggggggtgatatattggggggatacaccctgatgcggtgtcctctcctccctcctccacttgtgcggatatccaacagtgtcaacagacgtccgtgggggggggtccattttgtgtctcgggggccccacacatatagagcgggggtccaccccaccgggggggccccgcccgttgtgtcctccgtccgtgtgggatagcgccccccccttgggatactggatacctcgtcttcttatacacccctctctctccgatgtggtctaccccccctcttccgcattggttctcacgcgggggagaccccactggggttttcttttccccccccacggcagagatataatattgggtctttgtgtgaagagggagagggaatcgcccccgcgggggcccaaacaaattgggcccccccccgcgggagagccccccacacccggcgggaacgagcacgctctctattgggccccccatgagtcgaaactctcgagaggggagactcttcacccacagcgcgctctctcgcgcgtgagaccacccccccacatcacatccggagccggagtactttctcacgcggtttctctcgcgtgagagtcgcgccccctctgccctctgcgcggagaacgccccagcgtggtgttcgcacacacccacactcactctcgctgatatctctcgcgggagaacactctctcggggtgagcacacacacggggtgctactcacacgcgttccccgcgnggagcactctctcccgcccctcataagaatgtgggccggggcctataccctctgtgagagagagagggtctctgtgtgagagagagaagaaaaggggggtctctgagagagagagagagaggagaggagagagccctctcacacacacagagagagagagaggagaggagaagagagcgcgcatcaactgaacccccggcccacgcgcgcgcgcccccccgctgatctccgcgaggagccgcagacttcgccacgggcgttcccgaggaggcgccacgggctctccaagaaagaaacttgggcccctcgagagttcgggagaaagtttatagttcgttctgagttctgaacgtcttttctaacgtagccttttgtatttttttttttaatttgaagggaccctgatgaagccctgccatacccctcccgagtttaataaaacgtataatcacca

SEQ ID NO: 612638 - DNA, 198 bp, Homo sapiens
  misc_feature (184)..(184): n is a, c, g, or t
tcaaagaaccactccccgttgaacaccaaatacccttgtatttggcccatattagctccctgtaccccattgtctgctccagccactcctgctattcctggaccacagcaggcaacatcactgagtatcagtgtcaccaggtacattaccaacgatgacggccatcactttttagctgattacncgtttaattctgtg

SEQ ID NO: 612639 - DNA, 237 bp, Homo sapiens
  misc_feature (40)..(40): n is a, c, g, or t
  misc_feature (57)..(57): n is a, c, g, or t
  misc_feature (95)..(95): n is a, c, g, or t
  misc_feature (107)..(107): n is a, c, g, or t
  misc_feature (205)..(205): n is a, c, g, or t
  misc_feature (210)..(210): n is a, c, g, or t
  misc_feature (233)..(233): n is a, c, g, or t
gggggcggttagggcgatgaagtggggaggaatggggtgntttttgtatgttcaaangggtcctttatttttacgttgaaagatatggggagtangtgtgattgagngtggagtagattaggcgtaggtagaagtagaggttaaggagggtgatggtggctatgatggtggggatgatgagtgctattgttttttgtgaattctntcgantatatggtcccatttgggcaaanaagc

SEQ ID NO: 612640 - DNA, 138 bp, Homo sapiens
ctaaccatgggctatatgatggcaaaaagcactggagatcatcctgaccaccccattgtggagacgctgaggaagaaggctgaggccgacaagactgataaggcagttaaggacctggtggtgctgctgtttgaaacc

SEQ ID NO: 612641 - DNA, 157 bp, Homo sapiens
ctgtggttcttgtgctgggggtgtctggctgggggatggggcagatagagccagctgtgagcagagtctcttcagcatctgctcaggggccagcatataggtgacggctttggggaggatggcacttccctgcccaccagcacaaccagcacaagaa

SEQ ID NO: 612642 - DNA, 538 bp, Homo sapiens
  misc_feature (22)..(22): n is a, c, g, or t
  misc_feature (82)..(82): n is a, c, g, or t
  misc_feature (145)..(145): n is a, c, g, or t
  misc_feature (149)..(149): n is a, c, g, or t
  misc_feature (174)..(175): n is a, c, g, or t
  misc_feature (199)..(199): n is a, c, g, or t
  misc_feature (244)..(244): n is a, c, g, or t
  misc_feature (269)..(269): n is a, c, g, or t
  misc_feature (292)..(292): n is a, c, g, or t
  misc_feature (298)..(298): n is a, c, g, or t
  misc_feature (320)..(320): n is a, c, g, or t
  misc_feature (326)..(326): n is a, c, g, or t
  misc_feature (330)..(330): n is a, c, g, or t
  misc_feature (334)..(336): n is a, c, g, or t
  misc_feature (363)..(363): n is a, c, g, or t
  misc_feature (398)..(398): n is a, c, g, or t
  misc_feature (400)..(402): n is a, c, g, or t
  misc_feature (439)..(439): n is a, c, g, or t
  misc_feature (444)..(444): n is a, c, g, or t
  misc_feature (470)..(470): n is a, c, g, or t
  misc_feature (521)..(521): n is a, c, g, or t
tttctgttgaaccctgacagtnaccatgatggcagctcagttttagttactgacaaattatactaacttctctcgctcaatnttccccgtccccccttccccctccctgagttttgcctttccggtgttccccctttggtttggntttnttttgcccttttttgcttttccccnntggtagttgccccggttgcctgcngtgtgggggcccttttttgcctttgttttcctgcctgtgtttttngtcctttttttgggtccctttcccnttgcccctcttttgctgggtgcncgtttngcgtttttctggggggggggtncgtgtncggntttnnngttcctttcctccttgctcttcctctnggccttgccctcctttccctgctcctctctttttngnnngcggttttctctctcccgctcctcttccgtggctggnttttngggccttttccccctccgcccccgcngcgctctgtgggttctgcttcttctttgctatttgataatgctacctttgnggatttctacataatat

SEQ ID NO: 612643 - DNA, 82 bp, Homo sapiens
ccccgggcttttttttgggggccccccccccccccattttttccccggttttttggcccccccctaagggtttttgggggga

SEQ ID NO: 612644 - DNA, 274 bp, Homo sapiens
cagcttgtgggagccgcatatcacccaacgccagtggagaaagcctgggcccttgcaaacgattccaactcatcagccgatgaagttctcatgggcagactggtcctggactgacaacgccccgtggtgaggagaaatgggggccttgatgctcacctggtcaggccaaggtcaagctatactgtcaggacatggcaggctggtggacacaggaagcctacccaacacgctggtatttggccaacactgaggatgtggttcatgggggagcagt

SEQ ID NO: 612645 - DNA, 216 bp, Homo sapiens
gtaccaggctcgtagtttgtcgcctctacctataaatcttcccactattttgctacataaacgggtgtgctctatcttagctgcttcttagcgttgctcgtcttggtttcgggggtcttagctttggctctccttgcaaagttctttctagttaacttcacttatgcagaacgtataggggttagtccttgctatattatgcttggttatgatttt

SEQ ID NO: 612646 - DNA, 444 bp, Homo sapiens
acttcttctccccagcccacatcatgaggttactagaggtcattcctagccgatactcttcccccactaccatcgccacagtcatgagcttatccaaaaggattggaaagattggagtcgttgttggtaactgctatggatttgttgggaatcgaatgttggctccctattacaaccagggctatttcttgatagaggaaggtagtaagccagaggatgtagatggggtcttagaagagtttggttttagaatgggacccttcaggtgtctgacctcgcagggctagatgtgggttggaaagttcgcaaagggcaaggcttactggaccgtccttacctccaggaacccccacccgaaagaggggcaataccaggtactccccaattgctgatatgctctgtgaagctgggcgatttggtcagaagacaggtaagggctggtat

SEQ ID NO: 612647 - DNA, 577 bp, Homo sapiens
gaggaaaacagtgcaggtaggagaaaagaggggcctgggaagggaagaaaacagcagggaagaggagggctgaagacagagcaggaggaaggctgagtggctttagctctttggcctaacccagaccagtcagagttcactctgggcacctcccagtggcagccacttgatttgcaggcaaagagcttggagaccggctctgcaaattcagccttatccatgtccacatgggtatggccccggaaagcactcaacaaatatgcactaaatggatgacttcaggcagtgatccagattattcagagcagaaagctgcttgggctctgattacagaaaagtactccccgctcatccggatgcagggataccttccaagaccccccgtggaggcctgaaactgtggattgtaccgaactgtagaaatacagtactgttttttttttcctatacatacatacctatgataaagctaggcacagtaagagattaacagtaattactaatgataaacagaacgattgccacaatatactgctgtaataaagttagtgtgtgtgatctctctttcacaataaaa

SEQ ID NO: 612648 - DNA, 119 bp, Homo sapiens
ggtctgtaggcgcacaccatggatcgatcttcctcatcatctatcgcctttgttagccaggcgtcgctggggacacggtacaagtgggacttaatatcttcggggtgggggtgataata

SEQ ID NO: 612649 - DNA, 112 bp, Homo sapiens
ttctggattcacgtcgtaacttaaagggaaactgttacaatgtccggagcccttgatgtcctgcaagtgaaggaggaggatgaccttaagttccttctgcaaggaacccacg

SEQ ID NO: 612650 - DNA, 520 bp, Homo sapiens
taaatcgcgagcggcgccctcaacattttaaaaaaaaaaaaaaaaaaaaaaaaaaaaaaaaaaaaaaaaaaaaaaaaaaaaaggggggggcgtttaaaattttccccgggggggcccattttcggtcccccttttttttgaaaagggggcccctaagggggggtttttaaaacgggaggggaggggcggttttaaaaaacgtggtggagtgggggaagaagactggtgtaggcacgtgggacttctttgtgggggaagagggaaccctattacttggggggggggggaaacattatggtggggaaaaactattacattacagagagagaaatttataagagcctctagaggggaaataatattaatattattaagcgggtatattagtggggttaacaacaaacggcggaaataattccgggcgggcagtagaagaatattgtggcgatacgaggaaagattattgaatatattggaaacatttttttattcccgggggagttgtgttgtataaatcagg

SEQ ID NO: 612651 - DNA, 584 bp, Homo sapiens
  misc_feature (226)..(226): n is a, c, g, or t
gatcacgtgcattgtgccagtgggcagtgtattgatggtgcctccgatgcatggagatgcaaactggcaggacaaatcagatgagaagaactgggaagtgctcttggttaattgatacaggtccggtgtggccatggtccgggccttggaaagccccagaagtgtgatcctaatgtggattgcagtgacaagtcagatgaactggattgttatccgactgaagaancagcaccacaggccaccaatacagttggttctgttattggcgtaattgtcaccatttttgtgtctggaactgtatactttatctgccagaggatgttgtgtccacgtatgaagggagatggggaaactatgactaatgactatgtagttcatggaccagcttctgtgcctcttggttatgtgccacacccaagttctttgtcaggatctcttccaggaatgtctcgaggtaaatcaatgatcagctccctcagtatcatggggggaagcagtggaccccccctatgaccgagcccatgttacaggagcatcatcaagtagttcttcaagccacaatggcacgtggatcgggtaacgag

SEQ ID NO: 612652 - DNA, 330 bp, Homo sapiens
ggtcgacaaaaatcatatcatcatttcagttgagttgtaaaaagtgatgttgatggccaggtgcagtggctcatgcctgtaaccccagcactttgggaggccgaggctggcggatcacaaggtcaagagattgagatcatcctggccaacatggtgaaacctcgtctgtactaaaaatacagaaggctgggcatggtggcgcgtacctgcattcccagctactcgggaggctgagacaggagaatcacttgaacccgggaggcagaggttgcagtgagctgagattgcgccaccgcactccagcctggtgacagagcgagactccatctc

SEQ ID NO: 612653 - DNA, 400 bp, Homo sapiens
caggcaggcttctgggccctgcagctatggctcttcattccttttacatgttcttcgagaatcagctgcaccctggatgcttctgacagctcagaggacatcagcatgaggacaagcacagggcttgatggctcggagggaaatggagttggaagatttggacttaatgtgcacacattttagaaatatcttaacaaattttattttgctgatatctttcttttttgtgtgtgccaaagtgatggccagtacaaatccatgtctaattaagtccagaagagctccttcaataagcgtaagatgaaagttatgagtgataagaaagcgtcatgtcagtttaattggcagcattttctctttcttagtggttcataaaataaggcagtgctttgctatcaaa

SEQ ID NO: 612654 - DNA, 458 bp, Homo sapiens
cgtactacatcgtgttgtcatccatgacgagtattcattcttggctatgaatttttgtggttcgtggctgataaagcctgatcgcacattcttagcagtaattagtggaatccctgagctggttttggtaggcgtcctgccgcggtaatcaataaagcgagcaagatttccaagtcgggaatatgcccagccggaactaattttaagatactggtctttttgtggaacttcggtttgcgccttggtacgtaaaccttcctcaaccatcaatcgtaattgttctgcagtaatgctttttagcaactcaccggctggttcatcattcggatcttgcggtaccaactttccacgcacagctagctccagaatcagctcacggagcttttttattccgtctggcgcgcctgagagcagtggcagattctcggtcaacagcacggtcatgcctggcgctccag

SEQ ID NO: 612655 - DNA, 179 bp, Homo sapiens
cctgttgaagtcagtagcatcatgcaccgcactctagcctgggcaacagatcagacccatctcaaaaaaaaaaaaaattatatgggagtcaagggaagacccaatatacccaagacaatcctaagcaaaaagaacaaagctgggagggcatcatggctacctggacttcaaacctatac

SEQ ID NO: 612656 - DNA, 309 bp, Homo sapiens
  misc_feature (12)..(12): n is a, c, g, or t
  misc_feature (43)..(43): n is a, c, g, or t
  misc_feature (110)..(110): n is a, c, g, or t
  misc_feature (262)..(262): n is a, c, g, or t
  misc_feature (281)..(281): n is a, c, g, or t
  misc_feature (284)..(284): n is a, c, g, or t
  misc_feature (291)..(291): n is a, c, g, or t
  misc_feature (299)..(299): n is a, c, g, or t
atcaggccgggnagttttgtttgttgtgattggctgctatctncccagtgccctaaaattgccctggcatacagtaggcatttaataatcccttgaatcagtgaaaaccnagatggtggcttggcatttcccacataggcaatgagcccaggtggaaatcatccaggatataagtagatcttgaagtgataaggaagggtcatcataatccatgtggggcccattttgccctttcttgtttcttttctctaggctcagcaanagcctcacctaggactccntgnatcttgnagcccatntccacatgtt

SEQ ID NO: 612657 - DNA, 232 bp, Homo sapiens
gctctccgcggtgaacgcgccaccctgagctgtgagtcgactgtttgcctgtgccgaaggccgggccgtgaacattgcagggctgcctcagacctgcgtccacgtttggaaacgggagcttcgcgatttgtgtttacatcatcgactatgccagggagtctcagataagcctgttttattttcgcagtgaaaagccttaccgataactgactttatgcttgccctgggaccg

SEQ ID NO: 612658 - DNA, 822 bp, Homo sapiens
aactcggccgttgtcaccatgccggtcgtccggaagatttgccgtcgccgccggtggctgactcggagtcagaggaagatgagcgaggactcataggaggttcgattagaactggaagagagcagagaggtacagaacttgaggaagaggccctaacggggtgagtgctgtggccttgctggtgggagagaaggtacgagaggagaccactctagtggatgatcccgtttctagatgaagacaggtggtatggtggatatgaagaaatgaaggaagaggggcaacgattcagatcagtcgatggtacggaggaactgcacctggaggacatctgtttcctgcagtaagaccataccgtaaagggatcgacggatcgccgactttgatgtaaagtagattcgagactgatgctcatagaagaggaccgggatcgtggaagcatggatggagcagtagagagttaatgcgcagacgaatgcagaaggagctgtctgttatgaaacttcgcagagacatcatgcgcgatacctcagcacaagaagaccgcaaggagatgctttccaaacagatgctgactggcatgcctgaggtggaccctgggccatcgaatgctataacctagacgatcatatcatttccacggacggaatgccaaggaccagtcctgctggccagaagcagagcagagcagagaacgacagacaggcgaggacctccgttcgatggctagcaaacatggctgtgaatcatgtggccgcaccaacgactgtcattcatggaggacgctacaaagcgcccattgcgggaagcaggcaagaacag

SEQ ID NO: 612659 - DNA, 1557 bp, Homo sapiens
atccagtggagtcaagggcatggtggcgagaccagactagtgcgatgtgtgggctgtgtggcggagtgaatgacgctctcatggagggatggatggttgcatgtgcatgggtgtgatggatgctgcatgctggtgctgtgtgagccgaggaggcacttggcgctccgagatgcaccgtgggcacaagtgcgtggcctacgctgagagctgtgtcagaacgggcacgcccggagtgactctgagttgcctcatacatgactggtacggggcgcttgggatgatctgagtgcacagtgtcctccaagctagaggagttgggatcggttgccacagcaaatgtttgcgcgaagggcccaaagaacctgcccagggtgtccagaggtgcgaccgtttgaccatacggccaggtgaccagttgaccatttggtccctgaggttgcttgagcatgtgcggactggggaccactgaggtgaagcgccgccggtcaccggggccactttcccgtggaagacagcgcctataagggcagtggggtggtgcggccttttgagtgtgcagaagatggacaaggcagaggggctacgttggtgtcacatattaactctatcacttccccagcggagaacgctacaggggcaacctaccgatagtgggggccttggccacatccgtggggagcatcccccagggaaaagccttagaagaatacactttgtacccacggcagaaggtggcgtgtgcaataacccgcgaggacaatcaaaagccgcgtgggggccccctttttggaaacacttcccgggggaccacccaaaagaaagcgcccattgactaagccgttggggggcaccaaatgtggaacatctaaattggccgtgggacacctttgtttacccaaaagcccaaacttggcacacacttaaccccgtttgaagccttccgagtcgaaacctccgggggactttctctctgacaaagtgtgtcttgacaacggccgtcacgaatggggaaaaacaccgatagtaattccttatcagttacaggggcccccaaaatgtttctcacgaatgagctcaccccaattccgggacacccaggccgagggcgtaccgcgagtggtgtagagccccacaaacgcccgtggcacaccggggagtgaaactttcccaaattcattatacaaaatgggggccataaacccccccttagtgatgaggaggtagcaacaggtggttttgtagaccccaacagcgagggacagacaagagaaagtttcaatcacccccagaaagagcgaggaggaatacgatacccacgagcggggcgacaaaacaagagacgcggaccaccagacaggaaaactcagcactgacatcaacacaatgaggcacagacagacgacgagggaggcaccagatggagaccacgacgacagcaaccggcggtggcgaatgccgacaaacaacgacggccagagagacaacaagcacctccagcaacacaatatattgcccgcgaccccaaccatgagaaaaaaataaggacagcaagacgag

SEQ ID NO: 612660 - DNA, 95 bp, Homo sapiens
gagaatagggaagcgggtgaaggcccttttggaggagttccctgacaaaggcttcttctttgcctttggagctggtcatttcatgggcaacaaca

SEQ ID NO: 612661 - DNA, 122 bp, Homo sapiens
ctacccaacaaatggatatcaaatattgcaacaactccaaagtattgagcaaagtgcatttctacagtattcagtgttgctattcagttttctaacttaaaacagcctattagaactggctt

SEQ ID NO: 612662 - DNA, 870 bp, Homo sapiens
cgctaggtcgaggctgggtgttaatcggccgagggtagggctgggtgcttggacaggcctccaggtaataaataacaggtactagcaacagcagggccagatggggagttggggacaaatgaccctggtctcaggctttgggagctcttggggtatggttaggggttcaggggacagacgttagccaagacagaggaagcagcagcaggtacgggattcccctgtcttggggtatggttaggggttcagggggacagacgttagccaagacagaggaagcagcagcaggtacgggattcccccttcccccgtggctcagtcttgccccaaagccaggccccaccaggccaggaagggggacaggtggcaacgtagcttctccggggccaggcaggttaggacacggcctctcagagcctgggcctgggccccagcagggctggtcctggagaacaggtgagctggctccacagagctcagcagccacacggctgaggggccacggcctgggcactccgaggctgccgaagctggcggagggacgcatccccgtactgaatgccagagcccatcctctccgggtctagctcgcctgagtcaatcttgttgaggatagtgcgggcacacttgaggaacgcctcctccacgttctcgccagtgagagcgctggtctccaggaacatcagctcatttctcctgggcaaagcgggaggcctccaggaaagtgacctcccgctcagggtcccaggtccttcttgttgccacagaggatgaccacgatgttggggctggccagggtgcgggcattcgtcgcaggcgccgttgagttgtttgtcttccggtggtgatgtcgtaccaggggtccgcgcc

SEQ ID NO: 612663 - DNA, 194 bp, Homo sapiens
agccggccgtgtgtcagtagactagaaatatcattgaacatataatggttatttcttttcttggattccagaaaagcctcttacttttatgctttctcatcgaagtaatgtaccctttttttctcgaaactgaattaaaatactcattttatctcttgaaaaaaacacacaacaaaaacaacaaaaaaaaacac

SEQ ID NO: 612664 - DNA, 2108 bp, Homo sapiens
  misc_feature (937)..(938): n is a, c, g, or t
  misc_feature (955)..(955): n is a, c, g, or t
  misc_feature (1131)..(1132): n is a, c, g, or t
  misc_feature (1951)..(1951): n is a, c, g, or t
  misc_feature (1974)..(1974): n is a, c, g, or t
  misc_feature (2015)..(2015): n is a, c, g, or t
actcctgacctgaagtgatccacccgcctcgacctcccaaagtgctgggatgacaggcatgagcaccgcacccggccaacacagatgtttattgatcgtggaggataaattgtggaaaatgtttttctctcttttaccatttttgggaagagggataggtaagtgcagggagtttgtgctgaaacagcgcctggcaatttttcagaaatgaatttgatattgcgctccacctttgagctgttcacacctgtggctacccctggaaagcgctggggttgttgatgcttttggctgcccggcttcctgaggtctcgctgctttttggggaaagatgactggcttccctgtgggacgcttttgtctgacacgtgatgatgtggtcctgcctgccactgtgcaccatcccaggtattgaattttgaccttttcttttcaagtttctgtgcttagtgtttttaatgtttacttttgccacttacaataatatcaccaaaataatatgcatagagttttggaagaaacatagaaaacatgagcagaatgagacaattccttgggctgtagtttggacccaactgaatcctgagtgctctgtggctgacgctgtctacccgtgggagagacacactcaggagtggccgtttggcagaaaagaaggtcatggcccctggctggcccccgccctgcagggacacagaagccacaccatttgcaccatccacgccttgctccagaaggcctggccgccttctccctgggggtgattcaaggatttggtctcggaccagaccccctccacagctgcccggccccagacccatctcttggattgagggtgtgtgggctggaacagtgggtcactgtggcagcttcatctgagccgaagtgtgggatcctctggtggctgtcgattgacctcgatgggaaggagcgttcnncccattttccttgtttncagtgctgcggtatcagtcagtgatctgaggaaatcctgtaggggaaggcaggctgcagtgaaaacaggagctggtgaaacgagccctctgcatctgcgaatgtgccctaggtgctgctgctggggacatggatgccgagcggaggcctgcgtggcctcctgagcagcagctgacnncccgtctcatgctggacgggacccctgggcgggtggacatgagaccactgttggccagggacgccgtgcggaggcctacgtggctgcctgagcagcagctgaccgcccgtctcactgttggccagggctttgtggcgtgggtgttttccagtctgcctggagcagcgagaagcagctgtgcagactggtggcggtgggagggtttgctgggactgatggggacaccggccagcttgtctggtgtccagcagccctgccggacttggcctcctgtcctgtcgttgggagccctggctggggctgctttgagcaatgacgctggcccagagcagcttcccacatgaccccagagccgagggtctgccctgtcctaggttaggtcttcatggtttagagtaaaaccgtgagggatgttaattatgggcattgaagacttaaggttttcctaaatttttagtgagcagtgattggccttcaatacttgtgctgagaggaattttaagccaggggaagtgtaagaaaatgttcccattcaggagagattgtgttggagtttctttcttcctctgtatgtattttgtggtgtccacctttaaccacgtttcatccaaaacgatgatgcagctttaacatgaatgttacatttttattttcaaggaattattatctatgttccctttgtaaaggaaagataatgttgtaaatctttttattagataatgtaaagatgtatatcagtatttttggatcatgttatagattatggatatattgtttaataaataaagtattttttggaacaaacaaaaaataaaaaantcagggggccccgtacccaatcncctatatgagcgaatacattcactgccgtctttacaacgcntactggaaaccttgcgtacccactgatcgcttgatacaatccctttccacgtgcgtatacgtatttgtaaattcctaatttgtaaacactact

SEQ ID NO: 612665 - DNA, 205 bp, Homo sapiens
agaggcatgaaggtttagtgcaaagggagcacaaaagttgaagatgaggcgctgctatcaatgctgggacttcaggccaagggcatggcaactggtaggaagccacaatgggaggacattttctcgcagttcgctgaaccagtaaacaactagcgtcctgatgaaagccctcgtctcgtgcgaagagataacacgccagagcggg

SEQ ID NO: 612666 - DNA, 951 bp, Homo sapiens
gggagcgcggccgcggacgaagatggcgaccgccatgtacttggagcactatctggacagtatcgagaaccttccctgcgaacttcagaggaacttccagctgatgcgagagctggaccagaggacggaagataagaaagcagagattgacatcctggctgcagagtacatctccacggtgaagacgctgtctccagaccagcgcgtggagcgcctgcagaagatccagaacgcctacagcaagtgcaaggaatacagtgacgacaaagtgcagctggccatgcagacctacgagatggtggataaacacattcgaaggcttgatgcagacctggcgcgctttgaagcagatctgaaggacaagatggagggcagtgattttgaaagctccggagggcgagggttaaaaaaaggccggggtcagaaagaaaaaagagggtcccggggccgaggcaggaggacatcagaggaagacacaccaaagaaaaagaagcacaaaggagggtctgagttcactgacaccatcctgtccgtgcacccctctgatgtgctggacatgcccgtggacccaaacgaacccacgtactgcctgtgccaccaggtctcctatggggagatgattggctgtgacaatccagactgtccaattgagtggtttcactttgcctgcgtggaccttaccacgaaacccaaaggaaaatgatttcatttaaataaaaacctgtagtctgggcaacatcgggagaccccaactctacaaaaaatacaaaaattagctgggcgtggtggtgcgtgcctgtggtcccaactacctgggaggcggaggcgggaggatggcttgagcctggaagtccgaggcttcagtgagctgagatcgcgccactgcactccagcctgggcgagagagcaagaccctgtctcaaataaataaataaaaagataaaaacctga

SEQ ID NO: 612667 - DNA, 241 bp, Homo sapiens
  misc_feature (209)..(209): n is a, c, g, or t
tgcctagaggacccacgtaatatgtaacaaggtctaaataaggaatagtgatctggaaagacatgagcggcatgattgaagcaatattcatattgtgaatactgagaatgaaggccgtgaggtacagtgttagcaattacaagttaaagaatttggattttatcctgcttaagtaggattttatttatgggaggttcatgaacggtgtngacaaacgatagtgaggttacatattacgggt

SEQ ID NO: 612668 - DNA, 114 bp, Homo sapiens
tgagctcggtacccccatgcactttgtcacagctatatgtgactgagaagaatgccccctcctcccaacatgaccaccaacgagaggagagtcatcgtccccgcagaccccaca

SEQ ID NO: 612669 - DNA, 1130 bp, Homo sapiens
gggagcgcggccgcggacgaagatggcgaccgccatgtacttggagcactatctggacagtatcgagaaccttccctgcgaacttcagaggaacttccagctgatgcgagagctggaccagaggacggaagataagaaagcagagattgacatcctggctgcagagtacatctccacggtgaagacgctgtctccagaccagcgcgtggagcgcctgcagaagatccagaacgcctacagcaagtgcaaggaatacagtgacgacaaagtgcagctggccatgcagacctacgagatggtggataaacacattcgaaggcttgatgcagacctggcgcgctttgaagcagatctgaaggacaagatggagggcagtgattttgaaagctccggagggcgagggttaaaaaaaggccggggtcagaaagaaaaaagagggtcccggggccgaggcaggaggacatcagaggaagacacaccaaagaaaaagaagcacaaaggagggtctgagttcactgacaccatcctgtccgtgcacccctctgatgtgctggacatgcccgtggacccaaacgaacccacgtactgcctgtgccaccaggtctcctatggggagatgattggctgtgacaatccagactgtccaattgagtggtttcactttgcctgcgtggaccttaccacgaaacccaaaggaaaatggttctgtccacggtgtgtccaggaaaagaggaagaagaagtaggaggagctgtgtgcccggatccgaggagcaagttaatctgtcccttcattcgtgtcgcaatatttcccttccttttaaaactaccttgttcggttgatacttagtaactccgtggccagttgaagcgctggatgtttcctagaacaagaaccaccaaagcctgttcgcacagaagggcgaccttgcagggactcgccgccgcgacctcagtgtggcttttacaggactccccccgagcatcagcagggaccccggcggacgtgggcgggcgcgcgtgagctcgggctgcccggccgggcgtgcgggcggggacatggtaacctggtccacggagggcggccgctaccctcgcgtagcatttcctgtggttttccaggactccgct

SEQ ID NO: 612670 - DNA, 204 bp, Homo sapiens
ccctgaaaaagcggcaaaagacagaacgacagcagaaagaaacgaaaaagaaagacacaagtacagaaagaaaaaaagaaacgaaacaaaaaacagaggaccaaaaacgtagaaagaaaacaaaacaaacaacagaagacaaaaaaaaaacacatagacaacacaaagaaaacacaaacaaaaacaaaacaacaacacaaataa

SEQ ID NO: 612671 - DNA, 516 bp, Homo sapiens
  misc_feature (10)..(10): n is a, c, g, or t
  misc_feature (49)..(49): n is a, c, g, or t
  misc_feature (320)..(320): n is a, c, g, or t
tttttttttntttccagggggagggaggaaagaaaggagggggtccaanctgtccccaaaaaggaaaacggttaggttttaggaggggcacaaacaaggccggccaaagttgtcctctcataaggtggtatgggggggtggggtcaggcccttaacattgtccttctttagaatttgtccggggaaaaaatccaggggagccggaggaaaaacccggagggccccaggcaaaaaaaaaatggagttttttgggcccgggtgaaccaagggtccaaggcccataggtgttttcttgggggggggggaaaaagccagggggncccctccccttttcccccccaggtccagccctggttttgtttttttatccctttttcccccgacaaaaaaagttgtggccccggcccagttattgtgtttctgtgttccctgcatggaccccccccccccccccttccttttgggggggccccctttccataaatttttaataaaatcccgtttttgggtttggga

SEQ ID NO: 612672 - DNA, 911 bp, Homo sapiens
gcgtgtggtcctcaaatatgcgcgccagtgtgtctggggtgcgcggctttcacacttgcccaccggggttttccgcccccccgtttgctccgtaccgcgcagttcccactccgtgtggggccccccacctttgggggtccctttcgccacaacacccggtgccctggtcgccgtaatcccccctgcggggggccgcgcctcccccccgcggccaagtgtcccggagtgctcttaaccacctccctcggcctttatactgccccaattctgccgcttcttgggcggcatcctctctttggccatctctgctcttcattgcctcctgggggttctacgcccctttctcgtcagtctggcccatcccgatgtccggccccggtttttctttccgccacgctgatcccccctcttcaagtgagacgggggttaacccccccgcgctcctcggtgggcccctcgcccctgggagtgcatctcggccccccggcccccttcggtcagtcctccggctccgcgtgttgtttgcccccgacgagacgcccaccctttttgggtaggccctccttggggccccccccctccctatgacttgggggggacagcctagcctttctccctcgatagggggggtccccccggctcctggtgccctccagtcggtgggtccccgaggaagggtggctgttgccacgaatatctgcttctagacgaggttccctatccagccacgcgcagattgaaagccggcttctctggcccccggagatttgctagcggccgcccctctccagtatgttcggtgctgtgtaggctcggaacgtcgtcgcccccccgctcctcatagcgccggcctttctctgtttgaacgcaagagcccgggggccccaagcgaaaaaaacttttctcatcat

SEQ ID NO: 612673 - DNA, 681 bp, Homo sapiens
gggagcgcggccgcggacgaagatggcgaccgccatgtacttggagcactatctggacagtatcgagaaccttccctgcgaacttcagaggaacttccagctgatgcgagagctggaccagaggacggaagataagaaagcagagattgacatcctggctgcagagtacatctccacggtgaagacgctgtctccagaccagcgcgtggagcgcctgcagaagatccagagccgagggtctgccctgtcctaggttaggtcttcatggtttagagtaaaaccgtgagggatgttaattatgggcattgaagacttaaggttttcctaaatttttagtgagcagtgattggccttcaatacttgtgctgagaggaattttaagccaggggaagtgtaagaaaatgttcccattcaggagagattgtgttggagtttctttcttcctctgtatgtattttgtggtgtccacctttaaccacgtttcatccaaaacgatgatgcagctttaacatgaatgttacatttttattttcaaggaattattatctatgttccctttgtaaaggaaagataatgttgtaaatctttttattagataatgtaaagatgtatatcagtatttttggatcatgttatagattatggatatattgtttaataaataaagtattttttggaaca

SEQ ID NO: 612674 - DNA, 912 bp, Homo sapiens
tcagacgccttttgctggcgttgtcagacttgctcagattccccagggacactttgaccggccagctcccaggcccagtgcagggttccctgcttgggttttcctggcctgaggggctgccatgctctcatacgcgtgctttggtacctgcagcccccccagactgcagcctggagggcaccagcgaccctgccatcggccggggaagaaggacccaccctgttaaggatggacgcctgggtgtcaaatcggttttgctcattgatgtgtatctgtccacttcagaaccggcgtcctgcatagagccgcacggtgcatcggcgcattttccctgcgggaggccgcggccccactgcgtgtgcctctcctggtgccctcctgccggcgtccagcagccctgggagacatggggaggcgggccctgggcaccctgcgcgctggcggaaatggcgcccagggcctcactgcgcctttcttgtcacaggttctgtccacggtgtgtccaggaaaagaggaagaagaagtaggaggagctgtgtgcccggatccgaggagcaagttaatctgtcccttcattcgtgtcgcaatatttcccttccttttaaaactaccttgttcggttgatacttagtaactccgtggccagttgaagcgctggatgtttcctagaacaagaaccaccaaagcctgttcgcacagaagggcgaccttgcagggactcgccgccgcgacctcagtgtggcttttacaggactccccccgagcatcagcagggaccccggcggacgtgggcgggcgcgcgtgagctcgggctgcccggccgggcgtgcgggcggggacatggtaacctggtccacggagggcggccgctaccctcgcgtagcatttcctgtggttttccaggactccgct

SEQ ID NO: 612675 - DNA, 421 bp, Homo sapiens
  misc_feature (74)..(74): n is a, c, g, or t
  misc_feature (102)..(102): n is a, c, g, or t
caggataacaacgaacaaaaagccaaacaacttcccggcagccagtatagtgtggcagtgctgagaccaaggancttaagtatcggacaaatgcagtttganaccagaatcttccacttacaggcagttattaaagttctctaaatttccatttcttcactaagttgttgccaggattaaagaaaataatgcatctaccaagattagcataatgttttacgcacagaaatgtttccaatgaaggaaagaaagatgacatacaaaaaaaaaaagaaagaaagatgacatgcacagagcagtgaatgagtaatgtttaactttaaacatctaatgatatctggttaattttagcaaacacaaagatttttggcagatggctttagtctgaagctcgcagcataacacctggtagggacgattt

SEQ ID NO: 612676 - DNA, 751 bp, Homo sapiens
ccagtctgctgccactgggctgtatgtaaggcggttcttctgtccaccccaccgctactggactctcttccctgtagacagggtctcacgctagttgcccaggttcggagtacagtggcacaatcagggcctacactgacaagcctatgactttaccaggttcaaacaataccacctgcctcagcctcacaagtagctgggactacaggcatgtgcaaccacacccgtgctaattatatattgaattcctagtggagacaaggtctcattatgttgcccaggctggtcttgaactccttagcttaagcaatcctcctgcctcagcaatcccaaagtgctgggattatgggcgtgagccaacatgcctggcaatatctaccctatctcgaaggctgaaataacattccatgatggtcctagaacaataggagatacatacgcacacaaagaacctcaacccttacctcacaccagaccaccaaacagctaccttccactaaatcataggcctaacttgaaccacctaaaaccatgccactccagaaagtcccgccacgacagaaaaaaccggagcacaatctacgggaccttggagtaggccaccgcatcccctaaaagaccacaacaacgcccgcaagctcatacacggggcccacaactcacacacaactggcactcccacccacagaaacaacacacccaacacacaacgcaagcgcacaccataacgcaaactgcaaccagcacagcc

SEQ ID NO: 612677 - DNA, 1229 bp, Homo sapiens
gggagcgcggccgcggacgaagatggcgaccgccatgtacttggagcactatctggacagtatcgagaaccttccctgcgaacttcagaggaacttccagctgatgcgagagctggaccagaggacggaagataagaaagcagagattgacatcctggctgcagagtacatctccacggtgaagacgctgtctccagaccagcgcgtggagcgcctgcagaagatccagaacgcctacagcaagtgcaaggaatacagtgacgacaaagtgcagctggccatgcagacctacgagatggtggataaacacattcgaaggcttgatgcagacctggcgcgctttgaagcagatctgaaggacaagatggagggcagtgattttgaaagctccggagggcgagggttaaaaagcaagtctgttaattttttttctttattttcattactgttaactatggagttctcgcaagagtttgtcacggtcaatcattaccagtatgatcactaggaaggccggggtcagaaagaaaaaagagggtcccggggccgaggcaggaggacatcagaggaagacacaccaaagaaaaagaagcacaaaggagggtctgagttcactgacaccatcctgtccgtgcacccctctgatgtgctggacatgcccgtggacccaaacgaacccacgtactgcctgtgccaccaggtctcctatggggagatgattggctgtgacaatccagactgtccaattgagtggtttcactttgcctgcgtggaccttaccacgaaacccaaaggaaaatggttctgtccacggtgtgtccaggaaaagaggaagaagaagtaggaggagctgtgtgcccggatccgaggagcaagttaatctgtcccttcattcgtgtcgcaatatttcccttccttttaaaactaccttgttcggttgatacttagtaactccgtggccagttgaagcgctggatgtttcctagaacaagaaccaccaaagcctgttcgcacagaagggcgaccttgcagggactcgccgccgcgacctcagtgtggcttttacaggactccccccgagcatcagcagggaccccggcggacgtgggcgggcgcgcgtgagctcgggctgcccggccgggcgtgcgggcggggacatggtaacctggtccacggagggcggccgctaccctcgcgtagcatttcctgtggttttccaggactccgct

SEQ ID NO: 612678 - DNA, 309 bp, Homo sapiens
gaacaaatatctcgcgtgacgaccctggacatcgtcagagccaatcacctctgttgcagagcttaagggtttggatccagctcgagtcaacatccctgtcataggtggtcacgctgtgaaaaccatcatccccctgatctctcagtgcacccccaaggtggactttccccaggactagctgacagcactcactgggcggatccaggaggccggcacggaggtggtcaaggctaaagccggagcaggctctgccaccctctccatggcgtatgccggcgcccgctttgtcttctccccggtacatgcaag

SEQ ID NO: 612679 - DNA, 1129 bp, Homo sapiens
cacagcgtgagttcatgtcagcctacatctttgccacaacttggcgttggctgactttagttgttgccagtctggtgagcacatcatggtgtcttgtgcagggctagcttttcccccatttctccatcagataagaaagcagagattgacatcctggctgcagagtacatctccacggtgaagacgctgtctccagaccagcgcgtggagcgcctgcagaagatccagaacgcctacagcaagtgcaaggaatacagtgacgacaaagtgcagctggccatgcagacctacgagatggtggataaacacattcgaaggcttgatgcagacctggcgcgctttgaagcagatctgaaggacaagatggagggcagtgattttgaaagctccggagggcgagggttaaaaaaaggccggggtcagaaagaaaaaagagggtcccggggccgaggcaggaggacatcagaggaagacacaccaaagaaaaagaagcacaaaggagggtctgagttcactgacaccatcctgtccgtgcacccctctgatgtgctggacatgcccgtggacccaaacgaacccacgtactgcctgtgccaccaggtctcctatggggagatgattggctgtgacaatccagactgtccaattgagtggtttcactttgcctgcgtggaccttaccacgaaacccaaaggaaaatggttctgtccacggtgtgtccaggaaaagaggaagaagaagtaggaggagctgtgtgcccggatccgaggagcaagttaatctgtcccttcattcgtgtcgcaatatttcccttccttttaaaactaccttgttcggttgatacttagtaactccgtggccagttgaagcgctggatgtttcctagaacaagaaccaccaaagcctgttcgcacagaagggcgaccttgcagggactcgccgccgcgacctcagtgtggcttttacaggactccccccgagcatcagcagggaccccggcggacgtgggcgggcgcgcgtgagctcgggctgcccggccgggcgtgcgggcggggacatggtaacctggtccacggagggcggccgctaccctcgcgtagcatttcctgtggttttccaggactccgct

SEQ ID NO: 612680 - DNA, 1934 bp, Homo sapiens
  misc_feature (937)..(938): n is a, c, g, or t
  misc_feature (955)..(955): n is a, c, g, or t
  misc_feature (1131)..(1132): n is a, c, g, or t
actcctgacctgaagtgatccacccgcctcgacctcccaaagtgctgggatgacaggcatgagcaccgcacccggccaacacagatgtttattgatcgtggaggataaattgtggaaaatgtttttctctcttttaccatttttgggaagagggataggtaagtgcagggagtttgtgctgaaacagcgcctggcaatttttcagaaatgaatttgatattgcgctccacctttgagctgttcacacctgtggctacccctggaaagcgctggggttgttgatgcttttggctgcccggcttcctgaggtctcgctgctttttggggaaagatgactggcttccctgtgggacgcttttgtctgacacgtgatgatgtggtcctgcctgccactgtgcaccatcccaggtattgaattttgaccttttcttttcaagtttctgtgcttagtgtttttaatgtttacttttgccacttacaataatatcaccaaaataatatgcatagagttttggaagaaacatagaaaacatgagcagaatgagacaattccttgggctgtagtttggacccaactgaatcctgagtgctctgtggctgacgctgtctacccgtgggagagacacactcaggagtggccgtttggcagaaaagaaggtcatggcccctggctggcccccgccctgcagggacacagaagccacaccatttgcaccatccacgccttgctccagaaggcctggccgccttctccctgggggtgattcaaggatttggtctcggaccagaccccctccacagctgcccggccccagacccatctcttggattgagggtgtgtgggctggaacagtgggtcactgtggcagcttcatctgagccgaagtgtgggatcctctggtggctgtcgattgacctcgatgggaaggagcgttcnncccattttccttgtttncagtgctgcggtatcagtcagtgatctgaggaaatcctgtaggggaaggcaggctgcagtgaaaacaggagctggtgaaacgagccctctgcatctgcgaatgtgccctaggtgctgctgctggggacatggatgccgagcggaggcctgcgtggcctcctgagcagcagctgacnncccgtctcatgctggacgggacccctgggcgggtggacatgagaccactgttggccagggacgccgtgcggaggcctacgtggctgcctgagcagcagctgaccgcccgtctcactgttggccagggctttgtggcgtgggtgttttccagtctgcctggagcagcgagaagcagctgtgcagactggtggcggtgggagggtttgctgggactgatggggacaccggccagcttgtctggtgtccagcagccctgccggacttggcctcctgtcctgtcgttgggagccctggctggggctgctttgagcaatgacgctggcccagagcagcttcccacatgaccccagagccgagggtctgccctgtcctaggttaggtcttcatggtttagagtaaaaccgtgagggatgttaattatgggcattgaagacttaaggttttcctaaatttttagtgagcagtgattggccttcaatacttgtgctgagaggaattttaagccaggggaagtgtaagaaaatgttcccattcaggagagattgtgttggagtttctttcttcctctgtatgtattttgtggtgtccacctttaaccacgtttcatccaaaacgatgatgcagctttaacatgaatgttacatttttattttcaaggaattattatctatgttccctttgtaaaggaaagataatgttgtaaatctttttattagataatgtaaagatgtatatcagtatttttggatcatgttatagattatggatatattgtttaataaataaagtattttttggaaca

SEQ ID NO: 612681 - DNA, 1068 bp, Homo sapiens
gggagcgcggccgcggacgaagatggcgaccgccatgtacttggagcactatctggacagtatcgagaaccttccctgcgaacttcagaggaacttccagctgatgcgagagctggaccagaggacggaagataagaaagcagagattgacatcctggctgcagagtacatctccacggtgaagacgctgtctccagaccagcgcgtggagcgcctgcagaagatccagaacgcctacagcaagtgcaaggaatacagtgacgacaaagtgcagctggccatgcagacctacgagatggtggataaacacattcgaaggcttgatgcagacctggcgcgctttgaagcagatctgaaggacaagatggagggcagtgattttgaaagctccggagggcgagggttaaaaaaaggccggggtcagaaagaaaaaagagggtcccggggccgaggcaggaggacatcagaggaagacacaccaaagaaaaagaagcacaaaggagggtctgagttcactgacaccatcctgtccgtgcacccctctgatgtgctggacatgcccgtggacccaaacgaacccacgtactgcctgtgccaccaggtctcctatggggagatgattggctgtgacaatccagacgttctgtccacggtgtgtccaggaaaagaggaagaagaagtaggaggagctgtgtgcccggatccgaggagcaagttaatctgtcccttcattcgtgtcgcaatatttcccttccttttaaaactaccttgttcggttgatacttagtaactccgtggccagttgaagcgctggatgtttcctagaacaagaaccaccaaagcctgttcgcacagaagggcgaccttgcagggactcgccgccgcgacctcagtgtggcttttacaggactccccccgagcatcagcagggaccccggcggacgtgggcgggcgcgcgtgagctcgggctgcccggccgggcgtgcgggcggggacatggtaacctggtccacggagggcggccgctaccctcgcgtagcatttcctgtggttttccaggactccgct

SEQ ID NO: 612682 - DNA, 855 bp, Homo sapiens
  misc_feature (698)..(698): n is a, c, g, or t
  misc_feature (721)..(721): n is a, c, g, or t
  misc_feature (762)..(762): n is a, c, g, or t
gggagcgcggccgcggacgaagatggcgaccgccatgtacttggagcactatctggacagtatcgagaaccttccctgcgaacttcagaggaacttccagctgatgcgagagctggaccagaggacggaagataagaaagcagagattgacatcctggctgcagagtacatctccacggtgaagacgctgtctccagaccagcgcgtggagcgcctgcagaagatccagagccgagggtctgccctgtcctaggttaggtcttcatggtttagagtaaaaccgtgagggatgttaattatgggcattgaagacttaaggttttcctaaatttttagtgagcagtgattggccttcaatacttgtgctgagaggaattttaagccaggggaagtgtaagaaaatgttcccattcaggagagattgtgttggagtttctttcttcctctgtatgtattttgtggtgtccacctttaaccacgtttcatccaaaacgatgatgcagctttaacatgaatgttacatttttattttcaaggaattattatctatgttccctttgtaaaggaaagataatgttgtaaatctttttattagataatgtaaagatgtatatcagtatttttggatcatgttatagattatggatatattgtttaataaataaagtattttttggaacaaacaaaaaataaaaaantcagggggccccgtacccaatcncctatatgagcgaatacattcactgccgtctttacaacgcntactggaaaccttgcgtacccactgatcgcttgatacaatccctttccacgtgcgtatacgtatttgtaaattcctaatttgtaaacactact

SEQ ID NO: 612683 - DNA, 491 bp, Homo sapiens
gaggtaccccctgcagcagacaacagcataaatgggacatcgttgcagaatgtaaacagtcctcaaagaaaaaatgactatcaagacatagcaggcaagtgcagtggctcatgcctgtaatcctagcattttgagaggactagacgggtgcatcacttaaggccaggagtttgagaccatcctgggaaacatggtgaaaccctgcctctacaaaaaatacaaaattagctgggcgtggtggcatgcacctgtagtcccagctactcgggaggctgaggcaggagaatcgcttgaaccagggaggtggaggttgcagtgggctgagattgcgccactgcactccagcctgggtgacagagactctgtctcagaaaaaaaaaaaaaaggagaaggaaaatttagatgggtgtggtggcatgtgcctgtaatcccagatatgggggagcctgaggcaggagaatcgtttgaacctgggaggcagaggttgcagt

SEQ ID NO: 612684 - DNA, 659 bp, Homo sapiens
gaccagaggatctcgctgccatttccaagcatgcaactaggaaaacattctttatgctcacagattgtatataacctcaaaaaccaagtatacacatttaaaaagtcatattcaggttgggcatggaggctcatccttgtaatcccagcacttagggaggctgaggcaggaggatcacttgaggccagtagttagagactagcctgggcaacatagcacgtcccatctgtttaaaaattgaaaaaataaaaaatcagcaagacatggtggtgcatccctgtggtcccagctactggggaggctgaggcaggattggtcgagcccaggaattcaaggctgcagtgagccatgatcgcaccattgcattccagcctgggtgacagagtgagagcctgtgtctaaaagaaaaaaaagaacaaaaaagtcatatccacaaagcatctaatttcaggttatagataatactgtcaatgaaagtacctttcctggttgcagtgcgaatgtagtctgggctgcttccacgcatgctcttatgactttcacgcctgacttaacggtctgaggtatgagggtcccacttacacaccactttcttctcccagagaccgcaggcaaatgtcggtgtggcatgatgctgtgacttatttggccctagatgg

SEQ ID NO: 612685 - DNA, 641 bp, Homo sapiens
  misc_feature (18)..(18): n is a, c, g, or t
agcggctgagcattcatnggtcatggggatatggggtcatcgggacatggtgtttctggtagaaatttggtccttgcaggtatcaataagctgctttccttaaccataaacatcttatgacggtgactcgtgcatgagctgtaaggaatatgtctggctagtttaattggactttgaacttggtcacccatagctctcctaggtttccggctttaacagttttatccatttcagtgcaacattagtcctaagcacaatttatggagacaccagttctctcgttaagtgtatctgacagaacgtgagcttcggccccaagaaacatagtattagcaatactaagtgaaatatcaggaagttcaatgtatgtatataatggatcatttagtatggctcagcgctagcgctgagcattctgtgttacactagagtccacagggcatttggagtgtagacgtgagtgcttaaacatattggggttcctctctcaggtttaaaaatgtttcaaatgtaatggtggctcatcagtgcagttatcaatgcaattttatatcccttgaggggagaaagaggggtctcatggtacatgtccaaggggggtgataagagtatcatctgttcacttaattggaacaaccatg

SEQ ID NO: 612686 - DNA, 874 bp, Homo sapiens
  misc_feature (151)..(151): n is a, c, g, or t
  misc_feature (176)..(176): n is a, c, g, or t
  misc_feature (212)..(212): n is a, c, g, or t
  misc_feature (214)..(214): n is a, c, g, or t
  misc_feature (220)..(220): n is a, c, g, or t
  misc_feature (226)..(226): n is a, c, g, or t
  misc_feature (228)..(228): n is a, c, g, or t
  misc_feature (234)..(235): n is a, c, g, or t
  misc_feature (239)..(239): n is a, c, g, or t
  misc_feature (270)..(270): n is a, c, g, or t
  misc_feature (313)..(313): n is a, c, g, or t
  misc_feature (335)..(335): n is a, c, g, or t
  misc_feature (341)..(341): n is a, c, g, or t
  misc_feature (383)..(383): n is a, c, g, or t
  misc_feature (392)..(392): n is a, c, g, or t
  misc_feature (432)..(432): n is a, c, g, or t
  misc_feature (436)..(437): n is a, c, g, or t
  misc_feature (451)..(451): n is a, c, g, or t
  misc_feature (453)..(453): n is a, c, g, or t
  misc_feature (476)..(476): n is a, c, g, or t
  misc_feature (499)..(500): n is a, c, g, or t
  misc_feature (527)..(527): n is a, c, g, or t
  misc_feature (541)..(541): n is a, c, g, or t
  misc_feature (550)..(550): n is a, c, g, or t
gcacgcctcaggcaactggttgtgaccgaggaagatggcggtgcctgacccgaggcgctagggaagatcgcaccgcggacgcccgctgagcttggcgcacgggccgaccaggagctggtgactgccctcatgtgtgatttgcggcggccancggcaggtgggatgatggacttggnctacgtctgtgagtgggagaaatggtccaagagcancncagtgnccatcngntgcccnntggnctgcgcctggtcctgccgaaatctcatcgcncttcaccatggacctgcgcagcgatgaccaggacctgacccgnatgatccacatcctggacacgngagcanccctgggacctgcactcgatcccctcagagcagcacgaggcnatcacctgnctggagtgggaccagtcaggctcccggctcctgtcagcanatgnncgacgggcagatcnangtgctggagcatggcggacaccntgggtaatagctgggagagctcnngtgggcagcctagtggagggggacccnattgtggccctgtnctggctgcncaatggtgtgaaactggtcctgcgacgtggagaagtcgggcgcctccagcttcggggagaagttctcccgatgtcaagttctcaccgtcgctcacgctgttcggcgggaagcccatggagggctggatcgcggtgacggtcagcggctggtcaccgtgttccccggcttgaaatcgcaatgggtcaaggttgatgaccgtcgaccggagagcctgtgccggctgctcggacgcgtggacctggacgacatggcttcaacgtcggggaaacatcgtggtaggccaggaggaggaagcacgcgtcgccgtgcgtatcaaagtgtgc

SEQ ID NO: 612687 - DNA, 150 bp, Homo sapiens
tcgaagatggcggtggtcagatggccggtggctacttggtgtctgtaccacaatccccaagaccttctcacccaggactgggctggaattctgtccggaacagggctggctgctgaagtccaccaggaggagtctcttctcagcctcccc

SEQ ID NO: 612688 - DNA, 627 bp, Homo sapiens
agcggatggtccccattgcctgctgcgcacccgggacgtgcggctcccctccggactcctcgccatggacgcggacgactcccgggcccccaagggtctccttgcggaagttcctggagcacctctccggggccggaaggccatcggagtgctgaccagcggcggcggatgctcaaggtatgaacgctgccgtcctgtgccgtggtgcgcatgggtatctacgtgggggccaacggttgtacttcatctacgagggctagcaggacatggtggacggaggctcaaaccatcgctagaggccgacatgcgagagtgtctccgagcgatcctgcaagtgggcgggacgatcattgccagtagcggcggtgccaagcgccttcccagcacggctggggaaggagcgcgcctgaaaggctggctatcgcaaccctagctagcaagcagcttgattacaccaaccttgtgttgttgatcgtgcgggggaacggggatcctcacccgagggcgcaaaccttctttgccagtgagggaggagtagaagttgggccttgcttggcaggaggcatgcccaggaaacagtcagattcggatgatcgatggccgccggcaagaagtaggcctaccctc

SEQ ID NO: 612689 - DNA, 340 bp, Homo sapiens
agtgatgtatttcattagcagcatacagaggcaggaaggactgaagagagtttggagaagaaataaagaagcaaggatgagtagcatattcaagatctcagaagatacattcattaagcataaatgctaggttatttttgtaacagtagaacccttttcatcaaaataagagatagatgaaaatggctgaaatcattctaagatactgcatgaaaattgagggagtttttgaacgagtatgtggtacttgtatcctgatggttaaaacagatgaaaagctaaaaagtccttcatgggaaaaatcattaaagtatcctcttggttaaaaacagatgaaaag

SEQ ID NO: 612690 - DNA, 357 bp, Homo sapiens
  misc_feature (13)..(13): n is a, c, g, or t
  misc_feature (98)..(98): n is a, c, g, or t
  misc_feature (167)..(167): n is a, c, g, or t
  misc_feature (301)..(301): n is a, c, g, or t
  misc_feature (322)..(322): n is a, c, g, or t
ttcaaatgtattntttgttagaatttaccctagattcttatttaatgtctgcagtagactgaatgtttgtgtgcccccagaattctaatgttgaaatntcatttccaatgtgatggtatttggaggtggggcttttggtaagtgataggtcaggagagtaacagcgntcatgaatgggattagtgcccttatataaagagacccagagagctccatcaccccttctgccatgtgaaagggagaagacaaacatccacgaaccaggaagtggtcctcaccagaaaacaaatctgtaagcacnttgatcttggacttcccagcntccagaattgtgagaaataaatttctgttgttgat

SEQ ID NO: 612691 - DNA, 221 bp, Homo sapiens
aaagggttttttttcctttgggggggccccccccaggaaccaaaaagctttggaaaaatgggggttccctaaaaacccccgggggactggggagggggttttttgccaaaccattttccccccaaaaggcaggtagggggggggggaaaatttttttttcccccccgggaaaacccaattgggaggggcctagggcaaaaaaaaaaatttttgccccggga

SEQ ID NO: 612692 - DNA, 320 bp, Homo sapiens
  misc_feature (171)..(171): n is a, c, g, or t
  misc_feature (309)..(309): n is a, c, g, or t
tttttttaaagagacagggtctcattctgttgcccaggctgcagcgtagtgatacagtcatagctcattgcagcctcaaactcctgggctcaagttatcttcttgcctcagcttccagagtagctgggactacaggcgtgcaccatcacgcctggcttgtctgtgtatttnctttactaaggtgtctgctcaggtcttttgcccagtgggtttctttgtttgtttttgttttgagagacagagagcctcactctgttgcccaggctggagtgcagtggtgcgatcttggctcactgtagcctccgcctnctggggttcaa

SEQ ID NO: 612693 - DNA, 134 bp, Homo sapiens
  misc_feature (52)..(52): n is a, c, g, or t
  misc_feature (96)..(96): n is a, c, g, or t
aaggccctgcagaccacctatggcaccaacgccccccgcatgacctcggccngccctgcgctggatgtaccaccactcgcagctccagggcacccngaggggacgcagtaatcgttgggcaatgtccaagtttc

SEQ ID NO: 612694 - DNA, 1057 bp, Homo sapiens
gtgttctttgagaacaccattgtgtcctgcattgcccgcatctgcaaggtgcgatgacggtgtggagagctggtgtgctacatgcagcgctggacctccttcctcaaggcccagctgctgtgctcactgtgccctgacgatggcttccccttcaactgtgctgcagtgatgtcgttcacgctgagccccatgccccatgtgactggctgttgacaccccttttctattgtgtgtgtcttcacatatcccatgtggcacatgggtgaactacatgaagtgctctgccggtctgtgtcttcacaattgaacgtgatgtgcagacgatgtcttcagtcgtgcctctacaattgagtgttgaacctgtgatgaacacagcacgttggtacacctgtgacccacacctggttgaccacacccctgggccttggagcgttgcatcagccaagcagatgccctgggaacaggacacgatcaactcatccctggatggtcccagaacctgctgttgctgaagctttctcaatggaccacttccttgaatggactgggcatggtccgacagacctgacattgcattggcttggcttgcatgaccccaagtgactcaggcttacccacggcgggctgttggcattgtaacagccctgactagtatccattggacccttggcagacgagaagccgtagcgaattgtaccgtacgttgccttgggagcacacttggcgttggcactagtggcctgtagcgtacagcacaacaagtggccacaagtgagaagccaggtaggagtgcccccacgcgtggtgattagcgaaccaagtcacattttcgaaggtgagatgactttggcgaagagattccgttaccgtcccagttacgtctgtgaccatagcgcccggctggcaacggaaaaatgtcttgcttcacctttggagaagaaccgaccaccaggtggggcgcacattggagtggtacatagccgagcgcctgtcaggaccgtacgtgtgtggtcggttagggtccccaaggggttggcgcacagttgtcgggcagaca

SEQ ID NO: 612695 - DNA, 156 bp, Homo sapiens
cccacctgcttattccacttgcctctgtacaggtcactgtgacgctgggtcccagctggctcagaccactttttggctccgggcgtatttttctcaaccaatggttgccgcagctgtcattgtccacctggtgacggatgggacatattatgggga

SEQ ID NO: 612696 - DNA, 1071 bp, Homo sapiens
cggacgcgtgggttagcgcagattggacagtggactcatccatgctatggatacaagtcccgcccactccaaagtccacggcatccaaggggatgcatccatgggtagaggaaggaatcctcggccctctggctggaagctgcatacctgaacgtcgacgtccgcaggcctcatccgtgggaagctcttcctcaggccatgcgtgtcaccttgccctacccaggtgtaagcctcctcgatacagctgtgtggagcttggacaccctatcatagaatatcgatggaggtctccatgcactagacgctcattgccccaagaatgcccaagggttgcgatgcacatactctgggataaccgagttcagtcatcacactattatctaggtagtcctgtacgccgcatacgtacaggttcttcagtgtgtgacatgactctccaggcacagctctgcgtgacagccctctggctgaaacgcatgctgcaccaggagcacgaagggggcagagaaaaggagcacatgcaggtggtgggagctacatctttctaggccctcgctgtgggtggatgtttcgtgcggcaacaagggaatcgacatcatcgtgggactgggaagaggggcatacaggacggcgcctcgtcaaattataggtcaagctagcataacatgtaaggacgtggttcacctgcattctacttggaggctcacgatttaacactattctttccccttggatggggccaatttacagaccatcgatctccccttgtgccctcctcaacttacacaaagaccacctggatatccgccatcaaccttgcgcgtgaagggtacacgcgctgggcgcatgcaaacccggacgaaacgggatgggcaacgccgcagctcacaggaggtgtggaacagcgatacaatacagattcaactaactcagggaataaaccagcacacaacatagaaccttgacacaaatcaaaaaacacagcaccagcagacacacaacagaccacaaaacaaaagaccacaacaaaaaccaaaaaaacgcagagcccgcagacacacaaatagcgcc

SEQ ID NO: 612697 - DNA, 314 bp, Homo sapiens
tggaagtgtgtggtgtatgcatgagacatataacggctaagtaaacttatggccaatggttggcttacagcgagtttagctactctaggatcacatccagaccgcggctggtatgtgaactctagaggtgttatatatctgtatagatataaattaataattgcttaaaaatgtcatatatgccatatcatatcttcattattcatacatacctgtgccatgatatacctgatagcatctgcattgtttagtatactatgcatgctatatctgtttatttatttgcatgtgcatacatatttgccataacacca

SEQ ID NO: 612698 - DNA, 150 bp, Homo sapiens
ctcgtaagctgcacattgatgattaaaagcaatacgctgtctgggggaattcggacaatttatcttccatatgctctttaagtaaaagtttcaaagacagttttaaagggagccatgctcttaaaggcagttgattaaagaacctgttac

SEQ ID NO: 612699 - DNA, 255 bp, Homo sapiens
taagtgacgatctcgggctgctttggtactaggtttcttaccttctttatttaagggctttcttacaacatactggcggacatcatcttctttagagagattgaaaaagctagcagaatccgcaaacttttcaatctctctaaagaagatgatgtccggggtaccggagcctccggaaaatttcggtaaattcattgggtccattaggccttggtttttcccccttggttgttggaaaaattggttatccgctag

SEQ ID NO: 612700 - DNA, 743 bp, Homo sapiens
  misc_feature (1)..(1): n is a, c, g, or t
  misc_feature (8)..(8): n is a, c, g, or t
  misc_feature (96)..(96): n is a, c, g, or t
  misc_feature (102)..(102): n is a, c, g, or t
  misc_feature (109)..(109): n is a, c, g, or t
  misc_feature (128)..(128): n is a, c, g, or t
  misc_feature (132)..(133): n is a, c, g, or t
  misc_feature (138)..(138): n is a, c, g, or t
  misc_feature (154)..(154): n is a, c, g, or t
  misc_feature (160)..(160): n is a, c, g, or t
  misc_feature (171)..(171): n is a, c, g, or t
  misc_feature (175)..(176): n is a, c, g, or t
  misc_feature (183)..(183): n is a, c, g, or t
  misc_feature (202)..(202): n is a, c, g, or t
  misc_feature (208)..(208): n is a, c, g, or t
  misc_feature (230)..(231): n is a, c, g, or t
  misc_feature (261)..(262): n is a, c, g, or t
  misc_feature (265)..(266): n is a, c, g, or t
  misc_feature (277)..(277): n is a, c, g, or t
  misc_feature (288)..(289): n is a, c, g, or t
  misc_feature (299)..(299): n is a, c, g, or t
  misc_feature (304)..(305): n is a, c, g, or t
  misc_feature (314)..(314): n is a, c, g, or t
  misc_feature (324)..(324): n is a, c, g, or t
  misc_feature (326)..(326): n is a, c, g, or t
  misc_feature (344)..(344): n is a, c, g, or t
  misc_feature (346)..(347): n is a, c, g, or t
  misc_feature (349)..(349): n is a, c, g, or t
  misc_feature (351)..(351): n is a, c, g, or t
  misc_feature (354)..(354): n is a, c, g, or t
  misc_feature (381)..(382): n is a, c, g, or t
  misc_feature (387)..(387): n is a, c, g, or t
  misc_feature (391)..(392): n is a, c, g, or t
  misc_feature (396)..(396): n is a, c, g, or t
  misc_feature (399)..(399): n is a, c, g, or t
  misc_feature (401)..(401): n is a, c, g, or t
  misc_feature (430)..(432): n is a, c, g, or t
  misc_feature (435)..(435): n is a, c, g, or t
  misc_feature (634)..(634): n is a, c, g, or t
  misc_feature (640)..(640): n is a, c, g, or t
  misc_feature (643)..(644): n is a, c, g, or t
  misc_feature (647)..(647): n is a, c, g, or t
  misc_feature (650)..(650): n is a, c, g, or t
  misc_feature (663)..(663): n is a, c, g, or t
  misc_feature (683)..(683): n is a, c, g, or t
  misc_feature (731)..(731): n is a, c, g, or t
ntacagcngtgctcaggaagtttctggatcataggctcagctccacagaggagaacacgcaggcgcagagaccatggggcccctataagcacctanatgcanaaagaanataaactggaagggggtantgcnnaaagnatcaattttaaacttntggaanatgcatataantgcnnaagtaangattgaagcactgcaaccnaaagtntccgaggggaaggatgtacttnnacttgtacaaaatttgcataaaaatattgnnggnnaaatctggaanaaaggaaaacnnaaggacctanacaannaaattaaanaaaatgtagnanaaggtaaaataaatatananngnantgnataaactggacgagaaaaagtatatannaatgnatcnntgcngancnagaatgataacacagggaagacgcaggannntanaccttaaacataataaagcgaggtgataggactagaggagtaactggatatttcaccttcaacttatacctgaagctgcccaagccctacatcaccatcaacaactcaaaacccagggagaataaggatgtattagccttcacctgtgaacctaagagtgagaactacacctacatttggtggctaaatggtcagagcntcccgnttnnttnttntggaaagcgaccnattgaaaaaaggatcctcantccacccagtgtcacgagaaaagaaacaggaccctatgaatgtgaaanacgggaccgaga

SEQ ID NO: 612701 - DNA, 80 bp, Homo sapiens
gggacggtgcccaagccagaggctgggttcatttgtgtaacgacaataaacggtacttgtcatttcgggcaaaaaaaaaa

SEQ ID NO: 612702 - DNA, 960 bp, Homo sapiens
ggctttcctggggaggcgacgccgggtgcaagtgcaggagtgggcgaggaggaggaggaagaggaggtgatggcgacgcgaccaggggcgggggagatgctccgcctagctcagacgccacgcaggttgccgtgacccttccgggtgacatacccggccttggggcgccaatgatttgatgcccggagcgcagttaagctcaaggcatcaatggcatgggacttaggacaacaaggacagccaacacgaactcaccggaacactaacagcgccaggcaaacccagcacaaaaatagctcctgaaaggcaatttgcattgcgcgcaacacataccaacagtgggatctccagtggtcaaccagatgccacggacccattcatactgcctatcaatgggtgccattccaaaaagcaaagagaagtgtcaagcaaaaattcacggtcagtgaggcgagggttggtggtacttgggaatgaatctcaagagcaagtggtaacaaagtaacgtcagatttaacatattgtgtgctggagtattgtgaattagaccataataaatgggaatcacaggagagttaatatttcaggtggagggttaaaaagtcctgtgggtggtagctaccttagggcagtgtgcttatatccatatggggctagtagaaatcaaggttatcagggccacaagtgggctgagtaatcccaggaaagagcttacattgtaatagtttcgaaactgtgggactattggggtataaaaactcgttgggacatagatacctacaaatagttaagtgtagagttgtactggatcgaggagggaaataaggaaaggtaaatgtgaataggtgttgcatgtaggctggcagttgtccagtgaaattggcataaacgggggggatcgagaagagaggagatagacaaaaacgacaaagaaatggaaaggacaggcaaggagagacc

SEQ ID NO: 612703 - DNA, 187 bp, Homo sapiens
ccgtggtttatgaaccttggaataatgagaagataggagcataacttcgataacctctgcctttcttctgaaatgagtgctgtttaaagtatttcttaatttacaaaaattgatacatcttcaagatgttggggagatggaactctgtactcacattagccagaataccagatagttgtagattgcg

SEQ ID NO: 612704 - DNA, 103 bp, Homo sapiens
aagtgattcaaggactccaggaccccttttaaaagcctttctaagaacatgataggcttacttttgctccataataaagtgggagaaaaaagcccgaatttta

SEQ ID NO: 612705 - DNA, 149 bp, Homo sapiens
gggcggcctctggcaagggtctcatctctctctctctgggtctctgtctcctctgtctctgggtctctgttctccctctgtctctgggtctccatctctctctctctgggtctctgtttccctctctctgggtttctgtctccctctgt

SEQ ID NO: 612706 - DNA, 592 bp, Homo sapiens
aggtttggtccaaaaacgggggtgggccggggtccggatttccgggattttcgcgccccccctgtccccgaacggtgggtccgccgcgtggggtcccgcacgcgtgggcggaacgcggggcccgtgtttttttgggccccaaaaaaccccctccctgtggtttgttccccccttccaggggggtcggtgggggacatgtattttttccctttctcccagaacccggggctggttctgggccttgtttgggggggacggggccgatttccctgttttcctcccccccgccccggggttttttgggttttcctccggggcccgcccccacgggggtgtttcttggggccagttccgggggggtgccccgcccgtccgggtttttttttaccccccccgggttttcccccgggttgggggtggaccctttgccccgggggtgggtgccttcttgccttgggagaaccgggggttggcggggttcggtccccggggggttttccccccttttttttttttttttttgccggccccccccccccccccctttttgggcgggtcggttttttggttttggggggtttttgggtccctc

SEQ ID NO: 612707 - DNA, 236 bp, Homo sapiens
gtgtaacactgcactgcattcttgctagtgactgatacatggcctcgcagccgactgacacttgacaagtctggtattgaccttgaggttcccatatttatactgagtgttgaaggctgtgactgttacttgccaagttgaaagctctctaattcttagacggatagaccttactgtatacgctggatgactgtcattccctactcaccgttgctagatcattagcacagagtctt

SEQ ID NO: 612708 - DNA, 113 bp, Homo sapiens
gatgggagtatcactgactgtgttttaatgtatctgatgtgtagatagttggatatattatagtaccgatgatcttagtgcgaagtagtgatcactgtattgctgtgatgtgt

SEQ ID NO: 612709 - DNA, 1313 bp, Homo sapiens
  misc_feature (355)..(355): n is a, c, g, or t
  misc_feature (370)..(370): n is a, c, g, or t
  misc_feature (376)..(376): n is a, c, g, or t
  misc_feature (380)..(380): n is a, c, g, or t
  misc_feature (383)..(383): n is a, c, g, or t
  misc_feature (385)..(385): n is a, c, g, or t
  misc_feature (910)..(910): n is a, c, g, or t
gttttgggccgcgtgcccaaggacgcccctttcgccccaacggtctcttggacaaagccgcgagcaacgtgatcgcctccctcacctgcgggcgccgcttcgagtacgacgaccctcgcttcctcaggctgctggacctagctcaagagggactgaaggaggagtcgggctttctgcgcgaggtgctgaatgctgtccccgtgctcctgcatatcccaacgctggctggcaaggtcctacgcttccgggacccagaccagaccccccgagacctgactgaggccttcctggcagagatggagaaggccaaggggaaccctgagagcagcttcaatgatgagaacctgcgcatagnggtggctgacctgtnctctgncggnatngngaccacctcgaccacgctggcctggggcctcctgctcatgatcctacatccggatgtgcagcgtgagcccatctgggcagtgcaggggccgagggaggaagggtacaggcgggggcccatgaactttgctgggacacccggggctccaagcacaggcttgaccaggatcctgtaagcctgacctcctccaacataggaggcaagaaggagtgtcagggccggaccccctgggtgctgacccattgtggggacgcatgtctgtccaggccgtgtccaacaggagatcgacgacgtgatagggcaggtgcggcgaccagagatgggtgaccaggctcacatgccctacaccactgccgtgattcatgaggtgcagcgctttggggacatcgtccccctgggtgtgacccatatgacatcccgtgacatcgaagtacagggcttccgcatccctaagggaacgacactcatcaccaacctgtcatcggtgctgaaggatgaggccgtctgggagaagcccttccgttncaccccgaacacttcctggatgcccagggccactttgtgaagccggaggccttcctgcctttctcagcaggccgcgtgcatgcctcggggagcccctggcccgcatggagctcttacttttcttcacctccctgctgcagcacttcagcttctcggtgcccactggagcagccccggacagccatctgccacccatgggtgatctttgcctttccctatgggtagaggcccattccccccttattaaggcctttaggtagctatagccccggttaaaaatgggggtaaccataatcccgcaaggcttggctcacctagccacaaaggcctcaaatagtaccacaatcaaagcacatgtggataagttcccacaaaagcaataccaacaaacaacagaaacaaa

SEQ ID NO: 612710 - DNA, 514 bp, Homo sapiens
  misc_feature (60)..(60): n is a, c, g, or t
cgtgggggactagttccaggacgccgctgataccaaaatccacaggtgctcaagtcccgnacatgaagtggtgtcgagtctgcacagaagctatgcacgctgccccccaacgcgctctacgccatccccagattacttacgacacttaacacgctgtgcacgccaccccccaccactttacgccatccccagattacttacgacacttaacacgctgtgcacgccaccccccaccactctacgccatccccagattacttacgacacttaacatgctgtaaacactatgtcaatggttgttctactgtatttttaagatgtgcattattgttattgttgtactgttatttgttattgttttggttcccaaacattttcaatctgtgttgactggacccatggattcgggggagctggccgtgcactattaaaccgggtgcacctaaagcaggtgacgtccgagcacggacaagatatgatgaacttgaccctaataaaatggaaagtttacgtg

SEQ ID NO: 612711 - DNA, 278 bp, Homo sapiens
gaaaccttagatgttttctgaaagacggaaggcagaaaggtcttttttcttggttttcctatatttagaccattttatctcaaacttgagtagtaaatagagtattttgaaaggaatacaattctcacagatccccagagttgatttaaattattttattataatacaatttgcacattgtaaacagtatacattccctacttacagatcttatacaactgtcaagtcaaaacaaatttagaaattaaatcgaaataaaaccacaaataaaaagtcca

SEQ ID NO: 612712 - DNA, 373 bp, Homo sapiens
gtcgctgttccgcgccagtgcaagcgcagcagatggtgaaaacagagctaaggaaggagctggggaaggaggacaatgggcgcgggcgggtcgtgagcttgggagtgggtcaggacacgtgatagtatgctatcagcttgcccgtgcttcggttaggcacacaccctctggctagcttgagaggaaggacgatggtcaaggtacatgtctcttctcctctgactctgggaatgagatattactactcccacaggcttgaactctccttataggagtgtctccacatgccaaaatcagaggaagtcagaataaaacctcccaacgctgaaaactagagctggcacgtagtacatggtcagtaaatgtttttagg

SEQ ID NO: 612713 - DNA, 1408 bp, Homo sapiens
  misc_feature (355)..(355): n is a, c, g, or t
  misc_feature (370)..(370): n is a, c, g, or t
  misc_feature (376)..(376): n is a, c, g, or t
  misc_feature (380)..(380): n is a, c, g, or t
  misc_feature (383)..(383): n is a, c, g, or t
  misc_feature (385)..(385): n is a, c, g, or t
  misc_feature (910)..(910): n is a, c, g, or t
  misc_feature (1023)..(1023): n is a, c, g, or t
  misc_feature (1026)..(1026): n is a, c, g, or t
  misc_feature (1030)..(1030): n is a, c, g, or t
  misc_feature (1032)..(1033): n is a, c, g, or t
  misc_feature (1066)..(1066): n is a, c, g, or t
  misc_feature (1076)..(1076): n is a, c, g, or t
  misc_feature (1094)..(1094): n is a, c, g, or t
  misc_feature (1097)..(1098): n is a, c, g, or t
  misc_feature (1109)..(1109): n is a, c, g, or t
  misc_feature (1204)..(1204): n is a, c, g, or t
  misc_feature (1207)..(1207): n is a, c, g, or t
  misc_feature (1227)..(1227): n is a, c, g, or t
  misc_feature (1236)..(1237): n is a, c, g, or t
  misc_feature (1260)..(1261): n is a, c, g, or t
  misc_feature (1392)..(1392): n is a, c, g, or t
  misc_feature (1403)..(1403): n is a, c, g, or t
gttttgggccgcgtgcccaaggacgcccctttcgccccaacggtctcttggacaaagccgcgagcaacgtgatcgcctccctcacctgcgggcgccgcttcgagtacgacgaccctcgcttcctcaggctgctggacctagctcaagagggactgaaggaggagtcgggctttctgcgcgaggtgctgaatgctgtccccgtgctcctgcatatcccaacgctggctggcaaggtcctacgcttccgggacccagaccagaccccccgagacctgactgaggccttcctggcagagatggagaaggccaaggggaaccctgagagcagcttcaatgatgagaacctgcgcatagnggtggctgacctgtnctctgncggnatngngaccacctcgaccacgctggcctggggcctcctgctcatgatcctacatccggatgtgcagcgtgagcccatctgggcagtgcaggggccgagggaggaagggtacaggcgggggcccatgaactttgctgggacacccggggctccaagcacaggcttgaccaggatcctgtaagcctgacctcctccaacataggaggcaagaaggagtgtcagggccggaccccctgggtgctgacccattgtggggacgcatgtctgtccaggccgtgtccaacaggagatcgacgacgtgatagggcaggtgcggcgaccagagatgggtgaccaggctcacatgccctacaccactgccgtgattcatgaggtgcagcgctttggggacatcgtccccctgggtgtgacccatatgacatcccgtgacatcgaagtacagggcttccgcatccctaagggaacgacactcatcaccaacctgtcatcggtgctgaaggatgaggccgtctgggagaagcccttccgttncaccccgaacacttcctggatgcccagggccactttgtgaagccggaggccttcctgcctttctcagcaggccgcgtgcatgcctcggggagcccctggcccgcatggagctnctntctnanncctgtgagactcagtctcgtgcactgcagccgncagcacatgngcttgttctgtaccatcnctnnactggctggcntagatggactagtcagctgtctagcgagctatgcatagatggagtcaaaaaaaaaaaaaaaactagggccgccatgctgagcgtcatatgcggtnagngtgaactgtcatatctgcanctgcatgannagcactctcatgacagagatggnntgacgatgaacttcagcagactataaacaaggtgtgaagctgcccaggacttggcccaccattgggatacagatggcgggggagggtgccccccggggggcttttctttttgctcttttccgtttttccgntgttctctctnccttc

SEQ ID NO: 612714 - DNA, 1384 bp, Homo sapiens
  misc_feature (355)..(355): n is a, c, g, or t
  misc_feature (370)..(370): n is a, c, g, or t
  misc_feature (376)..(376): n is a, c, g, or t
  misc_feature (380)..(380): n is a, c, g, or t
  misc_feature (383)..(383): n is a, c, g, or t
  misc_feature (385)..(385): n is a, c, g, or t
  misc_feature (910)..(910): n is a, c, g, or t
  misc_feature (1023)..(1023): n is a, c, g, or t
  misc_feature (1026)..(1026): n is a, c, g, or t
  misc_feature (1030)..(1030): n is a, c, g, or t
  misc_feature (1032)..(1033): n is a, c, g, or t
  misc_feature (1066)..(1066): n is a, c, g, or t
  misc_feature (1076)..(1076): n is a, c, g, or t
  misc_feature (1094)..(1094): n is a, c, g, or t
  misc_feature (1097)..(1098): n is a, c, g, or t
  misc_feature (1109)..(1109): n is a, c, g, or t
  misc_feature (1204)..(1204): n is a, c, g, or t
  misc_feature (1207)..(1207): n is a, c, g, or t
  misc_feature (1227)..(1227): n is a, c, g, or t
  misc_feature (1236)..(1237): n is a, c, g, or t
  misc_feature (1260)..(1261): n is a, c, g, or t
gttttgggccgcgtgcccaaggacgcccctttcgccccaacggtctcttggacaaagccgcgagcaacgtgatcgcctccctcacctgcgggcgccgcttcgagtacgacgaccctcgcttcctcaggctgctggacctagctcaagagggactgaaggaggagtcgggctttctgcgcgaggtgctgaatgctgtccccgtgctcctgcatatcccaacgctggctggcaaggtcctacgcttccgggacccagaccagaccccccgagacctgactgaggccttcctggcagagatggagaaggccaaggggaaccctgagagcagcttcaatgatgagaacctgcgcatagnggtggctgacctgtnctctgncggnatngngaccacctcgaccacgctggcctggggcctcctgctcatgatcctacatccggatgtgcagcgtgagcccatctgggcagtgcaggggccgagggaggaagggtacaggcgggggcccatgaactttgctgggacacccggggctccaagcacaggcttgaccaggatcctgtaagcctgacctcctccaacataggaggcaagaaggagtgtcagggccggaccccctgggtgctgacccattgtggggacgcatgtctgtccaggccgtgtccaacaggagatcgacgacgtgatagggcaggtgcggcgaccagagatgggtgaccaggctcacatgccctacaccactgccgtgattcatgaggtgcagcgctttggggacatcgtccccctgggtgtgacccatatgacatcccgtgacatcgaagtacagggcttccgcatccctaagggaacgacactcatcaccaacctgtcatcggtgctgaaggatgaggccgtctgggagaagcccttccgttncaccccgaacacttcctggatgcccagggccactttgtgaagccggaggccttcctgcctttctcagcaggccgcgtgcatgcctcggggagcccctggcccgcatggagctnctntctnanncctgtgagactcagtctcgtgcactgcagccgncagcacatgngcttgttctgtaccatcnctnnactggctggcntagatggactagtcagctgtctagcgagctatgcatagatggagtcaaaaaaaaaaaaaaaactagggccgccatgctgagcgtcatatgcggtnagngtgaactgtcatatctgcanctgcatgannagcactctcatgacagagatggnntgacgatgacttacagtgactaccagtgtgctctaggtccggactgggctaccatgggatacagcttgcagggtgggccccccgggggttatgatattgttattatatattatttgttttccg

SEQ ID NO: 612715 - DNA, 1092 bp, Homo sapiens
  misc_feature (355)..(355): n is a, c, g, or t
  misc_feature (370)..(370): n is a, c, g, or t
  misc_feature (376)..(376): n is a, c, g, or t
  misc_feature (380)..(380): n is a, c, g, or t
  misc_feature (383)..(383): n is a, c, g, or t
  misc_feature (385)..(385): n is a, c, g, or t
  misc_feature (910)..(910): n is a, c, g, or t
gttttgggccgcgtgcccaaggacgcccctttcgccccaacggtctcttggacaaagccgcgagcaacgtgatcgcctccctcacctgcgggcgccgcttcgagtacgacgaccctcgcttcctcaggctgctggacctagctcaagagggactgaaggaggagtcgggctttctgcgcgaggtgctgaatgctgtccccgtgctcctgcatatcccaacgctggctggcaaggtcctacgcttccgggacccagaccagaccccccgagacctgactgaggccttcctggcagagatggagaaggccaaggggaaccctgagagcagcttcaatgatgagaacctgcgcatagnggtggctgacctgtnctctgncggnatngngaccacctcgaccacgctggcctggggcctcctgctcatgatcctacatccggatgtgcagcgtgagcccatctgggcagtgcaggggccgagggaggaagggtacaggcgggggcccatgaactttgctgggacacccggggctccaagcacaggcttgaccaggatcctgtaagcctgacctcctccaacataggaggcaagaaggagtgtcagggccggaccccctgggtgctgacccattgtggggacgcatgtctgtccaggccgtgtccaacaggagatcgacgacgtgatagggcaggtgcggcgaccagagatgggtgaccaggctcacatgccctacaccactgccgtgattcatgaggtgcagcgctttggggacatcgtccccctgggtgtgacccatatgacatcccgtgacatcgaagtacagggcttccgcatccctaagggaacgacactcatcaccaacctgtcatcggtgctgaaggatgaggccgtctgggagaagcccttccgttncaccccgaacacttcctggatgcccagggccactttgtgaagccggaggccttcctgcctttctcagcaggccgcgtgcatgcctcggggagcccctggcccgcatggagtttcctatgatcacctcctgctgcacactttactactcgggccactgacagaccgggccaccccatgggttg

SEQ ID NO: 612716 - DNA, 366 bp, Homo sapiens
actagcccggttactggcccgcagggccgctacgcgaaggtgacgcctccactgataagtggcaagagctcaccccagttccacaacccgacttgcgcaaactatacccaccatcgatccgaacatcgatgcgcaggatggcggctacgcctgggcactctggcgcccttattcgtgttgccagcgtcgtgaacagaccttcctcggcagtacggacttccaatgaaacagcgatcggagcacagcatgaaactcacttaccttggcgatagggctacgcctgaagcctcagcagtgcaatagcgctctctgctgatccaatcaaggtctcctcctccggaaagcgtcaattgggggccgcgcagg

SEQ ID NO: 612717 - DNA, 1109 bp, Homo sapiens
  misc_feature (355)..(355): n is a, c, g, or t
  misc_feature (370)..(370): n is a, c, g, or t
  misc_feature (376)..(376): n is a, c, g, or t
  misc_feature (380)..(380): n is a, c, g, or t
  misc_feature (383)..(383): n is a, c, g, or t
  misc_feature (385)..(385): n is a, c, g, or t
  misc_feature (706)..(706): n is a, c, g, or t
gttttgggccgcgtgcccaaggacgcccctttcgccccaacggtctcttggacaaagccgcgagcaacgtgatcgcctccctcacctgcgggcgccgcttcgagtacgacgaccctcgcttcctcaggctgctggacctagctcaagagggactgaaggaggagtcgggctttctgcgcgaggtgctgaatgctgtccccgtgctcctgcatatcccaacgctggctggcaaggtcctacgcttccgggacccagaccagaccccccgagacctgactgaggccttcctggcagagatggagaaggccaaggggaaccctgagagcagcttcaatgatgagaacctgcgcatagnggtggctgacctgtnctctgncggnatngngaccacctcgaccacgctggcctggggcctcctgctcatgatcctacatccggatgtgcagcgccgtgtccaacaggagatcgacgacgtgatagggcaggtgcggcgaccagagatgggtgaccaggctcacatgccctacaccactgccgtgattcatgaggtgcagcgctttggggacatcgtccccctgggtgtgacccatatgacatcccgtgacatcgaagtacagggcttccgcatccctaagggaacgacactcatcaccaacctgtcatcggtgctgaaggatgaggccgtctgggagaagcccttccgttncaccccgaacacttcctggatgcccagggccactttgtgaagccggaggccttcctgcctttctcagcaggccgcgtgcatgcctcggggagcccctggcccgcatggagctcttacttttcttcacctccctgctgcagcacttcagcttctcggtgcccactggagcagccccggacagccatctgccacccatgggtgatctttgcctttccctatgggtagaggcccattccccccttattaaggcctttaggtagctatagccccggttaaaaatgggggtaaccataatcccgcaaggcttggctcacctagccacaaaggcctcaaatagtaccacaatcaaagcacatgtggataagttcccacaaaagcaataccaacaaacaacagaaacaaa

SEQ ID NO: 612718 - DNA, 182 bp, Homo sapiens
ggagtacagtggtgcaatctcgactcactgcagtcctccacctcctgggtttccagctcttctcctgcctcatcctcctgggtagcgtggattactgttgtgcgccaccatgcctagctaatttgtgtatttttgcttaaagatggcgtgtttatcaccactgttggactcgcggctgtgct

SEQ ID NO: 612719 - DNA, 247 bp, Homo sapiens
ttctctgcgagaaagcacaattatatgcaatcctaggcagctccctcagctgggtttaagtttcctatgacgactgtattgcccttattgtataggtcttcaacaatccagggtgttaatgtgtgttcctgggatcctttagcttaactccttactgttgggataagtcgctctgtcgcccaggctggagtgcagtggcacaatctcactctgttacccaggctggagtgtggtggcgcaatcttgg

SEQ ID NO: 612720 - DNA, 876 bp, Homo sapiens
  misc_feature (85)..(85): n is a, c, g, or t
  misc_feature (355)..(356): n is a, c, g, or t
  misc_feature (479)..(479): n is a, c, g, or t
  misc_feature (512)..(512): n is a, c, g, or t
  misc_feature (524)..(524): n is a, c, g, or t
  misc_feature (526)..(526): n is a, c, g, or t
gctgcgcaggagccgcagggccgtaggcagccatggcgcccagccggaatggcatggtcttgaagccccacttccacaatggacntggcatgctggctgctgtggccactgtggttcaaccatgcctggccctgtaatgatcctgcagactgtaatgtgccctggcaatgccaatggctgcgcctgcatcgcccctgcgccccgctgtcgtggtcccatcctggcccatctgtgctgctgccccactggttctgtgtaccacactgaatggtgcgcgcctggccgcggcttcagccttggaggagctcagggtggcctggcattcacaatgaactggtgtgcccggaccatcggnnatttctgtggatccgaggaggcggaacaagtccacggagtccctgcaggccaacgtgcagcggctgaaggagtaccgatccaaactcatcctcttccccaggaagccctcggaccccaagaangggagacagttctgctgaagaactgaaactggncacccagctgancnggaccggtcatgcccgtccggaacgtctatacagaacggagcaagctcgagttaatctacttgacggcatcgcagcacgcacttctccacagccttcgctaaggtctccgacatggcccggtgacaacgaccgggtcttcgggcatacgggggcacacacgtacaccaatggaacagccgcagcaaacaccgattgttcgacccccgcaccaacgatacagcgcccttcccgcgggaccctggcatgtccaccacaacatcacaaaacaacgtcgagaagctacaatatcgggagagcggcacaaagcgcgtatatcgcctgtgcactcgccgcataagcgtgccctgac

SEQ ID NO: 612721 - DNA, 100 bp, Homo sapiens
gccagcaccaaccagacatctatgtacctctgtgccagcagaaaccttcaggggcttaatgaaaaactgttttttggcagtggaacccagctctctgtct

SEQ ID NO: 612722 - DNA, 396 bp, Homo sapiens
  misc_feature (1)..(1): n is a, c, g, or t
ncagcgtgtatgatcccccacagatgatcaggcacagccctgttagccattcggaaatctcgatggatgtgtcgcagtcagggataatgagacgaatatagtgcgattttccataaccatactgatgttccatcacaaagtacctggtgatagtcttttgtagacagtttgctgcatgtgtagatgtcactgctgtttgataggtattacattcacatatgatttcttcacatgtcctaagatttttacctcaaaaagatatcaatgatagactcatatgtagaatttactacactttctttactggatcgatttcagtttatattcaggtagtatgagtatctctctgaattacccatattctacttaggcctcaacctcgtgctgaattccggc

SEQ ID NO: 612723 - DNA, 626 bp, Homo sapiens
cggcgaccatttcaagacatagcttagagggtgcaagcccaagcttggcacgttccaagcggtgttgagcctgcaggtacacagaagtgaagaactgaggttgggaacctctgcctggattttagaggatgtatgaaaacgcctggatgtccaggcagaagtttgctgcaggggtggagcccttatggagaatctctgctagggcagtgcagaagggaaatgtggggttggagcccccacacagagtccccactggggcattgcctagtggagctgtgagaagagggccaccatcctccagaccccagaatgacagatctactgatggcttgcaccatgcacctggaaaagccacaaacacgcaacaccaacttgtgaaagcaatcagcagggaggctgcaccctgcaaagccacaggggcaaagctgcccaaggttgtggaaacccacctcttgcatcagcatgtcttggatatgagacatggagtcaaaggagatcatttcggaactctgaggtttaatgactgccctattggattttagacttgtatggggcctgcagtccctttgttttggcaattttcccattgaaatggggtattacccaatgctgtatcccattgatct

SEQ ID NO: 612724 - DNA, 140 bp, Homo sapiens
  misc_feature (38)..(38): n is a, c, g, or t
actctagaggatgctgacatgaccaagcatcatacttnctgctgatcgacgtgtatacacactgcggtgcatcctcctgtacagttcccgtcgacacgtgagcaccgtgctgacctccaaatattgttaagctggagcct

SEQ ID NO: 612725 - DNA, 102 bp, Homo sapiens
ctagtcccaagtactattgacccagcgattggggcttcgacattggctttatggagtcataagtggagtcctgtaaagaggtatcttcactattaatgcttt

SEQ ID NO: 612726 - DNA, 201 bp, Homo sapiens
  misc_feature (165)..(165): n is a, c, g, or t
tagcaataggctataacataagccgaggtataggctacactagctaggttcgtgtaagtacactctatattggcacaacataaaattaactagtgacgcatttctcagaatgcatccccatcgttaagtgacacagactgtccctcatatcaccggaggactggnccaggacctcctggcggcaccaaaatccacgagcgc

SEQ ID NO: 612727 - DNA, 136 bp, Homo sapiens
gccagcaggctgcccaggaagccacccgccgcatgcaactgatgcacgcgcagatcgtgaatcttgcgaacagcgccaccgacgccgtcagcagataggccactggcagcgccgcgcacagccaccaggcccagcc

SEQ ID NO: 612728 - DNA, 111 bp, Homo sapiens
aggcatggtctcagcggtgctgagtggtcgtaggtacatggatggagccaggtcgtgtcctgccagtgtactccaggcactcaaacctagctttactgaaccctgccctgt

SEQ ID NO: 612729 - DNA, 984 bp, Homo sapiens
  misc_feature (71)..(71): n is a, c, g, or t
  misc_feature (79)..(79): n is a, c, g, or t
cacgatacacacgaacacagaacagagcgcacgccaacacacatgaacacccccaccatcgagcaccaatnggaacggncagagacgaccaacgagaagaaaccccgcgaagacgcatgaaaacccgtggaagagaacgagggcgacgaaaatggaggcaggaaaggagacagcacgacggcgaacaggaccacgcgaaagacgtaactgaagagcgacagcacggcacgaagaaaaaggacaagaagcagagcagacgcagaaggaacgggaagaggcgacgcagacagacagacataaaaagaagcaaaacacgaaaaaaggaggagacacaggaagaagaaggcgagcaagaaagcaaaaaagaaggacaagaagaagaagacagagaggaaaccgcagagatgaggaagaagagcaccagggaaccaaacccaagacgagccaagaaagacaagtcgaagccacgaaagcggcagaagaccactcacagatgagacgaaaaacaagaaagcaaaggggaaaacaaggagaccaagcaatcagaaaggaaaaaccccgaaggaacagggagagacgaaacgagggcaaaaagacaaggggccacgcgagacgagaagaagaagcccaacaaaagcagaagtggaacccggaaaaaacaaagggagagaaaaaaattcaaaggaggaaaacgaaaaaaggggagagcaagaacaaagaaacaacaaagaagaagagggaagaacagaaaaaagacaaagcaaaacggggagaaaagaaaaaaagagcagaggaaagggaggacacaagccgaaaaaagagaccgggaggaaccaacaccgaaagaggaaagcaaaggcaagcacagaaagaataaagacggaccaaaaaaggaggcggaaagaaaaaaggaaagaggacgaaaaatgagacaaagaaggggaaagggagaaaacggcagggacaacggaacacgagacaggt

SEQ ID NO: 612730 - DNA, 427 bp, Homo sapiens
catcacagagcaaaggtgggagattccatctaagagccaagaattagtttagtatcttacctttcttttcttttcttttttcttacctttctttttgaatactcaacttgagtttcctcctggcccttaaatcatttgtggccaggcgcagtggctcacgcctgtaatcctagcacttcgggaggccgaagaggccggatcacgaggtcaggagatcgagaccatcctgacccaacatggtaaaacccgtctctactaaagatacaaaaattagctgggcgtcgtggcgcatgcctgtaatcccagctactcgagaggctgaggcaggagaatcacttgaacccgggagaaagagtttgcagtgagccaagatggcgccattgcactccagcctggcaacagagcaagcctctgtctcaaaaaaaaa

SEQ ID NO: 612731 - DNA, 183 bp, Homo sapiens
atcaggttcactggaatcaggctgtaacgtactcaagtcacaacgactgcagctgcaggaggtttgtcactaggacacagaagtctgattccaagcccactcttcaacagctgagatgtggtgtgcgtgtttgtatgtgtgtgtgtgtaaacgctgtcctgatgtcccgcatttacactttgg

SEQ ID NO: 612732 - DNA, 674 bp, Homo sapiens
ggcagacctaggaggtgcgacagagccgcggggcgatacggtactggggccaagagccgggagcgcgggcgctaatggcaccagagtccggccaggggtgccgagcagctacggccttgggggttctgcgggccttcggttgcgcgtcttcgcctctagccatggggtccgcagctgttggcagatcctggtgcctggctgctgtgcctcggtggtgctggggcgggtcgtgatcctgtggcgtgcgggcttgccgcatgtgtgcaggtgaccgccttccgtggaccactaacaatcgtgactggctgcagaccacctgggacaggggctgtgagatgtcgtgcgtggtgcaggagcaccggggcaccattgcgagttgcaaaagtgtacgaactcgcgtgctggcctctgagcaccgatggtggcaggctggctgcgtggtgctcacctgtgacgcgcccgtggctgcttggcgcgtccggttgcgcgcatcttctgtgaccctgggcgggccgcgcaggttgcaccaactggcgtggcccggggcccgggcaaggcgcgtgtgggccctcaagggacggggtgctctacctgttgtgcgggcttgctggcgctcgtggccactctgctggtacgccaccatggtcgcccggcgagtctcacgacccggctgc

SEQ ID NO: 612733 - DNA, 477 bp, Homo sapiens
gagagagagagagagagtatagagagagagagagagagagagagagagatagagagagagagagagagagagagagagagagagagagagatagagagaggagagacccagagagagccgatgcacatgcaccctacacctgatccgttcactctcttcgaacctatcccatcatcaaactcgtcacctcctatgccgcaaccacaactgcattcaccactcacaacttccgaaactaactcctacaacactatccaacgaaaacaaccgagccagatacccaacctgcaccccacattctaacagtgacaacatcacgttctcgccacgcgcttcagctgacccccttacgcccaacaccccctcatttgctcacaaccaaggctccaagtctcctcctcgcaatctcatgatcagctttccacgccactgaccatcctccaatcctgacagcactcctccacatccctcccgccc

SEQ ID NO: 612734 - DNA, 473 bp, Homo sapiens
ggggagccaaaagatagaaaaagaatagcaattctcaccccccacataattggaaaccacttttccttctgtctggcttcagaaacacaatgtcttgatttccgtgcgagagaggatgactgttctttaactggtttcacgtcggctttttcctctgatttgagaggtggagttaagtgtgaactgcttaagaatgcactgttttctatttaatttggctgcggaagatggaattcattgagctccgtctgttcaaatgaactttaagcaacagcaagcaaaccatttatacttctccctgcacatgcaatcgaaatgtgtctggtgaaagaatggatgaaaagcccaggattacctaaggagagccatggagatgtgataacaactccttatctctttgttggctcatctgaagtgttaaagtgttgttgggggaaagcgagcctcttttttactagggagtattgaaggcg

SEQ ID NO: 612735 - DNA, 344 bp, Homo sapiens
ggcaggagagcaggggccatgtctcagctcacggcaacctcggcctctcaggttcaagtgattcgtccgttctccagcctcccgagagcggggattacaggcatccaccaccacgtcgggctcatctctttggtatttttagtaaagacgatgtttcaccagtgtgggccaggcgggttctcaaatttccgtgaccttgagttgatcgtgcctgcctgcggcctcccaagagtacgtgggatcacagggcttgacgccaccagcgccgcggcctatctgggcgctacttttggagaataaaagtggataagtgtaagtatctgggtgagcagcgctctacgtgt

SEQ ID NO: 612736 - DNA, 104 bp, Homo sapiens
gctcctcagtagatgatggcgcaagaggtctgatggggagctgcggagtatcggcgggctctccatcaggactctttgctgcccacatccatcttgctgcggtg

SEQ ID NO: 612737 - DNA, 219 bp, Homo sapiens
ctttagactgttgatgctgaagatgatgcaagacatggaaataaactggaggcaaagatagataacttacaggaaacactgagcaaagagatacaagataaaaaacttaaacaagaagagatgtaaaatacaataactgaaatgaaagcaatgaaggcttttttgtaatttaacaagaataagacattgcttttgctctcaactagcttaaaggaaata

SEQ ID NO: 612738 - DNA, 160 bp, Homo sapiens
  misc_feature (56)..(56): n is a, c, g, or t
  misc_feature (85)..(85): n is a, c, g, or t
cagaggctagaagctgggagactgaaaaaatgcagaccgccggggcattattcatntctccagctctgatccgctgttgtaccangggtctaataagggctgtgtctgcctcctcttgaatagccagtgaattcatctaaacagcctcctacagacactt

SEQ ID NO: 612739 - DNA, 168 bp, Homo sapiens
agagacaacagccgtgttccacagtctgtcctcgagatgtcgctgagtccgcacacttgggctgcacccgccctgcagatgaccaagcgccggccgctcagcacacgtgcaggcggggttaaacgccaatacgcagttttcgttcttgttgttttaatctgaacgact

SEQ ID NO: 612740 - DNA, 204 bp, Homo sapiens
gcgcaatagatatagtaccgcaagcaaagatgaaaaattataaccaagcataatatagcaaggactaacccctataccttctgcataatgaattaactagaaatacttatccaggggaccaagctagccccgtaaccagacgggctacctagcacagctaatgggcacacccatctatggcaaagtgggagcttataggtaggg

SEQ ID NO: 612741 - DNA, 840 bp, Homo sapiens
tcaataaaggaaagctttaagaaaagggcacgtattcctggaataggtaagaaaagctccccatcggtcccctcccttttggagggagcagcccctaggggaactcgtttgggtaccccagaaacattcagcaaagcaaccattagcctcctggacccctctccccgtttccccagcagctaggatgaaggcaacatattcctcacaggtcattggatctggaggtccttcaggggtggactccaagctcttcacatcccagatatctcatgccgccatccatgccagtggtgcagaacggcgagcattgggcctggccgccgctgagcaccgagatcgggctgacgctgttctggggcagcgagtctaggcccgcgcccgacagccgggccaccctcggagctcgccttctggtccaggttcgggaagcgctcgcgggccgtcaagccacgcggcgagctcggctaggaacgtccagccgcccgcacgaagctcagcatccccgcgggggggtcataggtgaacagccaacggggaagcagtcggggcccgttgccaccaggcggtggtctgtgatgaaggtcagggccacgcaggggtaggttcacagaggccaggagtcgcagacggcaacttctggtgggcatcagccaggcaaacggtgctggcggggttaaaccaggccaaggggaactccgcggggtggagaaacaaacggcgggtccagccgaagatatgcgggttcgcgacctcagttccccaaggggtgtggagccccggggggggggggcgtctccccccctatggggtggaaacgcctgatgtaagaccgggcagacg

SEQ ID NO: 612742 - DNA, 1425 bp, Homo sapiens
ggaatcgctgtgggtgagaataagcggtgttcccccacacttgaagacactcgtggtgacaccgagagtgttgttacgccacgaccacaccacttggtgtgtgagtgctgttaaccactccttgatgtgaaattagcggccagctttgtggtgttttttggggggcggggcgtggtctttgtcttcacacaagaagactgatatggggttgagtatgtcttaagaagttttttgattggcgaagtctgacaagaagtcttcgttcaattcagcactaacgtgtaggtagtagtgtgccggagcccgattttcttgtgggccagcatctgtggtccgcctctgccgctaaaaagccccctagtaatgtccgccaaggagattttttgaggagggccgcccgctcgtttttgaaagggagcctgtgtgatatagtatatcctgcttctccccatcaaggggttgtagaagaaggagttggttgcctctcatttggggggggtctatgaatagagttgttattaaagcctccgcccttatcgcccccttggtatcactttgtatgatgtggtttgggggtgaaatttctgggggaaagtagggcgcctgttgttggcgcccgcgccgcccgcacgtgtgtcgcgcgcccccccccccccccctcttcccccctcttttggtagaccccctgtctcgtgccgccttcttgtgagagaggtagtgaggtacacagtgtgtgtgcaccccctgcccccacttgggctgtgggggccaccgctttgcgcaccggggggatattttctcggagtgcccccgtcgggggccaccgcccacgcgagagacgctcttctcgagaagcgcctcttttctcttgttgaggcccccctctttttgttgtgtgtgttgccactcccgctcgctgagttttttttttctaaatgggagactctttccacgcgagaattttttggtgagatttctccacatagacctcttcccacaaggctccaccacacctctttccctctaatttctctataagaaacttctagaatttgacacacgctttcacacattggaaaggtggcctcgtttgttaagagactctaaccacaccccacgctgaaaagccccgcgcctcactgaccaaatcccttgaaagttcttctcttaagagaaaatgaatgctggtcatcgccagcgttctagcatcttccctgttttttgaatgccttggcgctccctcttgctgagtctcacgtttcctggcttttcctccctcagccccttctcaccccctttgctgtcctgtgtagtgaatttggtgaggagaattcgttgctgcaccccttcccccacgcacccactttattgaggttctccagttttattattgccataaaagtgctttatgccggcttttttcca

SEQ ID NO: 612743 - DNA, 385 bp, Homo sapiens
tcagacaaagtttataatttcttctgataattcttcagagtatatcaatgttaacatttagatgtacactgtatactcagttgcaaccttatacacatatttgtactctagatagaaatgtatgtactattacccgtggggaccccactgtgcctgccctctctgggtgactaatggagtgcggatgggtcctgttcttttcccccttattctttaatcctgccctattccccttatactattcggcttctcattagaatctcaggattcaatctctgtgaggcatgagttttagatttatagaacagagtggggagactggtgcatctcctggattttggaggtcccaaggcacactgcattatttctccatgcctgatccctt

SEQ ID NO: 612744 - DNA, 879 bp, Homo sapiens
ggtctcgatctcctgacctggtgatccacctgcctcggcctcccaaagtgttgggattataagcgtgagccatgacgcctggcctcaaacttgccatttttaaagtgtacaattcaatggtttttagtatatccactatgttgtgcaagcatcaccgctgtctaattccagagcatttctgtcaccccaaaaagaaactccatgcctattagcagtcactcccagttcttcccttcctcggcccctggaaaccagtaatgtactttctgtctctgtgattttgcctgttttggacatttcatttaaatggaattatgcaataatttgtggccttttgtgtttggctttcacttagcatcatgttctcaaggctcatccgtgttgtggcatgtatcagtactgcattcctttttatggctaaatgatgtttcattgtatgagtgtgtaccacattttatttatccattcagcaattaatggacaggaacaatggctttctaacgtattaaacttgtcaagttcaacattacatgtatccacagttattgataactatcaagattatacatggtgtgaccacgaatgctgtgtcgacaatgggtattgtaacactcactcctgtcaccattttcatgttacactgcattcactttcctaagggaccccttctaagcccctggttcaacgcacctactgtgcactgtccgcaatatatcattctaattcacagcttcacgtgcctctacgcctttagcccttccacactttcgcatccactcgcccactctccaaccaccattgcgccccacagttcgtccatcaacccacgttcggcacataattccactctaacaactccacacaggtccataccattac

SEQ ID NO: 612745 - DNA, 760 bp, Homo sapiens
cgctagtccagtgtgacaccctgcacctggaagctaggagggaagctcctcctgtggacactgggggcaacatggtgcagactgaagcagacagggatgcacgcacgtgacagcaaagctggggacagtaaagccgacccaccggtgctagcagctggcaccactgccaatgagattacactagaaccaatcaggccaagttagcaccaaatatgcccgtgggtacgcattgccacacgcgtcaaattgcatgcaggtaaaatggactgaaggaaaagattaagcggccgccctaaagaaaagctaaaagataaccctataactctaagaaggcatgaagacagctgccttaggaaaagctgagagatgagaagcccatttgcgaccagagcacacaaaagtatacacctaagagacctttctcattcatcgatataaaacagacagttgctgaccctgtcatcatagaatgggacaagacatgattgtgagcgtgtcaattaactaagtttagcaagcatgctaataaaagataaaggaatattattcataatgccagacgccccagtcttaatcagagaatggaagagccttattatagatgcttggctcaataggccatataaggcaatgagtgagagactggaccaagataacagtgcagctctaaccaaaacaggtaatggaatatggtttaatacaagtttggtttatttgatagctgcggaaatgtaagactgtacccttataatagggcttg

SEQ ID NO: 612746 - DNA, 232 bp, Homo sapiens
ggcgcggcggagcaccagcccgggggaaggagctgcccggctgctggggactgggacctggagcccttccctacgcacgtacgccctgcctcgagtagcctgatagcagcacgctaatggtatactttgatcggatagttctgtatcaagagatcgaggggtgaaaccactgtgaaagatagacgggatgtctagatagtaaagttgggtgacagtctgggaagcgtcagag

SEQ ID NO: 612747 - DNA, 287 bp, Homo sapiens
aggggccagaatttcctttttttttaaggggggaaaaaacttttttttagggaaaacccccattttgtttatccccttattcattgagggacccttagatggcttcccccttttgggtattgggaaaaaaggggggaaaaaaatggggaaaaaaaaactgtttatgggggggggggcagggggtcatgcctgtaatccccgcattttgaggggccaaggggggggggttggttgggctcaaaagttttaaccccgccggggccacaggggggaacccccttttccca

SEQ ID NO: 612748 - DNA, 280 bp, Homo sapiens
cattatgtcaggagatctgagcacatcctgggctaacatggtgaaaccccgtctctactgaaaatacaaaaaaattagctgggagtggtggtgggtgcctgtagtcccagctactcagtgaggctgaggcagtgagaatggcgtgaaccctgggaggcggagcttacagtgagccgagaccgtgccactgcactacagcctgcgcgacagagtaagactccgtctcgaaaaagaaaaaaaaaacaaccagcactgtattggcaaagggtagcactgcatc

SEQ ID NO: 612749 - DNA, 120 bp, Homo sapiens
  misc_feature (34)..(34): n is a, c, g, or t
  misc_feature (36)..(36): n is a, c, g, or t
  misc_feature (40)..(40): n is a, c, g, or t
  misc_feature (48)..(49): n is a, c, g, or t
  misc_feature (54)..(54): n is a, c, g, or t
tatttcatgacgggactgggctttacttgatttncntgcncgtgtgcnncggtncaacagccgtctgagggggtgggaggtggccgctgctccgaaatctccgctgagctcattcgctac

SEQ ID NO: 612750 - DNA, 338 bp, Homo sapiens
  misc_feature (5)..(5): n is a, c, g, or t
  misc_feature (180)..(180): n is a, c, g, or t
  misc_feature (293)..(293): n is a, c, g, or t
ggaanaagtttcagacatggagatgcatgaatgtatatacacaggagaggccaggcgtggtggttcacaacctgtaaccccagcactttggacaggttgtggagggcagatgacttgagcccaggagtttgagaccagactgggcaacatggcgaaacctcatctctacaaaaaaatatnaaaattggccaggtgttgtggcatgtgcctgtagtcccagctacccagtaggctgaggtgggaagatcacttgagcccaggaggtcaaggctgcagtgaactgtgatggcatnattgtactccagcctgggtgacagaggcaagtgaagaccctgctc

SEQ ID NO: 612751 - DNA, 139 bp, Homo sapiens
aaaaacagaaagagtcaactatcctagtccggcctgttaatcgtacgatgctgattgcttgaagttgtcaggagtggcaccgtctgagggggtgggaggtggccgctgctccgaaatctccgctgagctcattcgctac

SEQ ID NO: 612752 - DNA, 284 bp, Homo sapiens
gtaaaaacagggtttccctatgttgcgcaaaaaattttcgaactcctgcccccaagggatcccccccccttggccccccaaaagggtgggattacaggcatgaaccccagggccccccaaaataaacttttttttttttcgggtttaagcccccaaaaaaatttaccccaaaattttttgggaccccttatggggaaaacctttaaaaccgtttaaaaaacttttaggaaaactaaaaatttccaaagcctcctttaaaaaaaaaaaattccccttttttccca

SEQ ID NO: 612753 - DNA, 123 bp, Homo sapiens
tgccgtcacggtgagtgtcccccagctcccggtgcccggcgcggtgagtgtccccccagctcccggtgcccgtggtgagtgccccccagctcccggtgcccgtggtgagtgtccccccagctc

SEQ ID NO: 612754 - DNA, 192 bp, Homo sapiens
  misc_feature (10)..(10): n is a, c, g, or t
gcgaccctangatctttgagcatcacctggcatagttataatgccagaagtctagcggcgcaggtggcgctatccaatataggtgcatgagtaggtggcctagcagtaatagttagcggtataggcgtacggccagggctatatggttaaatagagtagagctgataggtaatcgataaataaactaagtaa

SEQ ID NO: 612755 - DNA, 716 bp, Homo sapiens
  misc_feature (12)..(13): n is a, c, g, or t
  misc_feature (238)..(238): n is a, c, g, or t
  misc_feature (290)..(290): n is a, c, g, or t
  misc_feature (297)..(298): n is a, c, g, or t
  misc_feature (307)..(307): n is a, c, g, or t
  misc_feature (339)..(339): n is a, c, g, or t
  misc_feature (350)..(350): n is a, c, g, or t
gggcctcggcgnntgaggaaagcaggaggaggtggcggcggcgggaagatggctccttcacctaccaaacgcaaagaccgctcagatgagaagtccaaggatcgctcaaaagataaaggggccaccaaggagtcgagtgagaaggatcgcggccgggacaaaacccgaaaagaggcgcagcgcttccagtggtagcagcagtaccaggtctcggtccagctcgaacttccagctcagngctccagcaccagcactggctcaagcagtggctccagctcttcctcagcatnccagccnnctcaggaangctccagcacctcccgcagctccagctctagncagctcttctnggctctccaagtccttctcaggcgcagacacgacaacaggaggcgctcccgctccaaatccaaaccacctaaagagagatgacaaaaggagaggaaaaggcggagcccatctcctaagcccaccaaagtgcacatgggagactcacccggaatgtgacaaggatcacatcatggagatattttccaccctatggggaaaatttaaaattgattgacatggccgtggaaaggatgcatccccaatctgtcaaagagtatgggtacgtagagtttgaggatccagatgaaaggcgagaagggctgaagcacatggatggaggacaaattgattgggcaggagatcagtgcgacgcgtgtgggccctgg

SEQ ID NO: 612756 - DNA, 385 bp, Homo sapiens
gggataccaaatacatactgagatcacagtgcagtaaaaatagaagactaagaaaattgctgaaaatcatgcaattacatggaaatcaatcaacatgctcctgaatgactttttaataaataatgaaattaaggcagaaatcaagaagctctttgaaaataatgagaacaaagttacaacatactagagcctctggacacagctaagacaatgttaggagggaaatttatagcactaaatcccacatcaaaaagttaggaagaactcaaattaataacctaacatcacaactgaaagaactagagaagcaagacaaaaccccaaagctagaggaagacaagaaataactgaaaatctgagctgaactgaaagaaaccgagacatg

SEQ ID NO: 612757 - DNA, 157 bp, Homo sapiens
ttgcggtctcatatcctggacagaaacccatgcatgtcaatgctccaacttacaaataatggcatttatgatccagatacctgaatatgatgatcctgtgattctacattacaatgtacctgtgttgaagtgtggactggtggctcccagtgacctc

SEQ ID NO: 612758 - DNA, 446 bp, Homo sapiens
ccctttggaggcgtagaaggcggcccccctaactcggggtccaacttcagcttgccaacatggtaaaccccgtgtcaactagagacacacaaaataacccggctgcgcaggagggtgcctgaaaaccaaaacctcagccggctaaaccatgattattgttagaccctggcagtgcagttctccagtgagtggacatcgcgactgtgccctgtactcagggtgccaaaactgaacctctgcctccacaaaaaactttataccatggctgggcgcccgtggctcatagcctggaattccaacccctttggaggcttaagccgatagatccccttaagtccggagttttaaattaacctgacccaccccacaaaaccccgttttttctaaaaattcaaaaattagctgggtgtggtggcacacgcctgtaatcccagctactcgggagg

SEQ ID NO: 612759 - DNA, 261 bp, Homo sapiens
agacgtccattctgggcatttcgaaaatctctttcttttctcttacgcacttcattcagccacacatgaaatatgtccacttttcgcactacctatggctatggcctggctggctcaaataataaaggctagggctgtaattatatgagtagccactatgaactgaatatctactaggtaccgggcatatagcaccttaaaattaccggcgagtgggacactatcatccaggtttaatagatcaggcaagaagggaggtcg

SEQ ID NO: 612760 - DNA, 280 bp, Homo sapiens
taactacatttttgaatacacatccagtacttagaaaggtgatgtttcttccttaaaaaataggctatctctatatccccaaacttattacttaagatgccattattcaattcatatagaaaatgaatcacgtgaatagcaagtcggttgaagtgtgtgtggggggtggagggatgacaaacataacatacctaacacacagtctcaaaataaggtgggatatgtatgcataatagttagtagtggcttatatcccagagaactaggtaggataactcag

SEQ ID NO: 612761 - DNA, 262 bp, Homo sapiens
tatcagctccagattccacaaaccatacagtagagaatactggtcttcaaaaatttctttttggctgggcacagggctcacgcctgtaatcccagcactttgggaagacgaggcaggtggatcacggggtcaagagattgagaccatcctggccaacatggtgaaaccctatctttactgaaaataaaaaaaaattagccaggcatagtggtgggcacctgtaatcccagccactcaggaggctgaggcaggagaatcgcat

SEQ ID NO: 612762 - DNA, 626 bp, Homo sapiens
aaaactacggctaggtacgaggctgggtggtcgctgaggtagctacagagctcccaagaagacagaagtagtgatataccatggcatgtcagcatcgcagaacgaaatactacaaggccattttgatgaaagacctagatgcatttgaaaatgagacggcaagagaaagttacactacatgaacatttggtcccagcttcgaaagtgtgtcggatcacccatattcgtttgatggtgtgtgagccggagaccttgttgaacgttggtacgaccacgctgactgaggctagtgggaagcttcacctgctggataagctactagcattcctgtattctggggcgccactcggagttttactgtttctcccaaagtgacccagatgttggatattctccgagactatttggattacagaggctacagctatgagcgtgtggatggttctgtgagaggagcacagagagtagcacttggccagttaagaacctttggacagcagcccatatttcgttgtttctcctgagtactcgggccggtggagttggcattgatacttaacagcagcagatactgtgattttgttgacagtgactttaatcctcggaatgacttgctagcaggtgcc

SEQ ID NO: 612763 - DNA, 160 bp, Homo sapiens
cctacacatgttctgattggctagctggttgtgccttttttttttatgtgtgtgtgtgtgtgtgtgtgtgtgtgtgtgtgtcactctgtctcccaggctggagtgcagtggtgcgatctcggctcagtgcaacctccgcctcctgggttcacgcgatttt

SEQ ID NO: 612764 - DNA, 254 bp, Homo sapiens
atgtcttaccaaaacgttagcatttattggatcaccctggcctctgaacacgtggtgagttcaagggccactattcacaaagggtcaccttttcaccattttatttgtaccatgaaaataatggcttaaggccagaagggacttacaaggacatcattcttttgaagaaacccctaccccaacatacacacacacacacacacactggccctggaactttggaaaattttacttacattaacaatggattctct

SEQ ID NO: 612765 - DNA, 507 bp, Homo sapiens
gtaatggtggactcagattggaataggagatagttatatatgaaaaaatcgaaatttgggaagaaagtgagtggtattagtaaaaactggtgaataaatcaccagtgattaggtttcctcatgctggcatattattctgtcagatacaagcataaaggcaaataagccataaagacaaacaagatgacatattacgaatgtctaaaatcgcttcttccgaattatccggattctacgggcagagcgaagctttggcatcttctttctcttgttcaaagcttgtgcacatgcacgtttgcaatcctccctgctaacaaagttattgtcattccctccacagccagtataggtgaaagcatcacaggttctgtatcttggattaaaataatagcgagtcacattggcagagcacagtccctcatcttttggactgtagcagaatgatggaatcttgtttggtgcgcagaagcccatacaagtagcttcatcgggaaacctgttctcaat

SEQ ID NO: 612766 - DNA, 506 bp, Homo sapiens
  misc_feature (190)..(190): n is a, c, g, or t
ctgcactctatgggccccgacccgtggtcatcaccagctccgacctgccctccccgcagggcagcaacttccttattgtgttggggagtcaaaggaggaggaatccccctggctccgtggttatggaacgcatccggatggacatttgcaaaatggaccccgtctttgtgggccctggggacctgttttnttccatgctcctggggtggacacacaagcccccccataacctcaaggtggcctgttagaaaaccgtgttttccctgccccccgttttgcaaagggccatccagtgtgcaaaaaccccggccggggaaagagttaggcccagccccattcagctggaacttcggatggtgcaaagccaaaagggcatcgagggcccaaagattgttgttcaggccccggtgctgttagggcccccccccttgcccgttacacccagcgcgttggggtttccgtgtttgtccctgtgaaaacatgtaacgtttgccttaaaaccctta

SEQ ID NO: 612767 - DNA, 493 bp, Homo sapiens
  misc_feature (10)..(10): n is a, c, g, or t
  misc_feature (33)..(33): n is a, c, g, or t
  misc_feature (54)..(54): n is a, c, g, or t
  misc_feature (81)..(81): n is a, c, g, or t
  misc_feature (87)..(87): n is a, c, g, or t
  misc_feature (92)..(92): n is a, c, g, or t
  misc_feature (126)..(126): n is a, c, g, or t
  misc_feature (200)..(200): n is a, c, g, or t
  misc_feature (266)..(266): n is a, c, g, or t
  misc_feature (293)..(293): n is a, c, g, or t
  misc_feature (339)..(339): n is a, c, g, or t
  misc_feature (407)..(407): n is a, c, g, or t
  misc_feature (423)..(423): n is a, c, g, or t
  misc_feature (488)..(488): n is a, c, g, or t
ggcttatgcntccggggccccatcggtctggcnacccaagcttggggccttttnggacacctaccaagggaagttttgggnaaggcntcttngggggaaatggggtggcgcatcaagggggtgggnaagggaaagggggtgactttcccccgctgggaaataagaggaggagactaaggagctcagggtttttccgaagngaaaatgcaggagatgacacacctgagtgaggtccaggtacaatggagtggctcagcgagacttgnggcggctttctaggaagaagctattcnaaggacaagatcatctgagacccagactcttgttctagagctatcncacctcacagggaggaacacacagaatcaactagagtgtcgattcctgtgtatcagcgggtgagccgnagtctaagagtgcttngcaaagctgggacgggcttgcagaacgttatactctaaggactagaggaaggatcccttatggangttgg

SEQ ID NO: 612768 - DNA, 160 bp, Homo sapiens
ggaccttcgattggtgggcacttagtgagactcatctctgcaaaaatagccaggcaaggcgaggtaggagggtcacttaagcctgggaggcagaagttgcagtgagctcagatcaagtcactgcactccagcctagtgcaacaaagcaagaccctgtctc

SEQ ID NO: 612769 - DNA, 112 bp, Homo sapiens
aacatggggaaaactttcgtggttcctaccatacctaaaactttgatactaagaccagtatgcctacatccagtatttaaattacgtaaaatactacccaagtatacttttt

SEQ ID NO: 612770 - DNA, 531 bp, Homo sapiens
  misc_feature (10)..(10): n is a, c, g, or t
  misc_feature (30)..(30): n is a, c, g, or t
  misc_feature (32)..(32): n is a, c, g, or t
  misc_feature (51)..(51): n is a, c, g, or t
  misc_feature (57)..(57): n is a, c, g, or t
  misc_feature (59)..(59): n is a, c, g, or t
  misc_feature (61)..(62): n is a, c, g, or t
  misc_feature (64)..(64): n is a, c, g, or t
  misc_feature (69)..(69): n is a, c, g, or t
  misc_feature (71)..(75): n is a, c, g, or t
  misc_feature (77)..(78): n is a, c, g, or t
  misc_feature (82)..(82): n is a, c, g, or t
  misc_feature (85)..(91): n is a, c, g, or t
  misc_feature (93)..(95): n is a, c, g, or t
  misc_feature (101)..(103): n is a, c, g, or t
  misc_feature (105)..(110): n is a, c, g, or t
  misc_feature (116)..(116): n is a, c, g, or t
  misc_feature (119)..(120): n is a, c, g, or t
  misc_feature (125)..(127): n is a, c, g, or t
  misc_feature (132)..(133): n is a, c, g, or t
  misc_feature (136)..(136): n is a, c, g, or t
  misc_feature (139)..(142): n is a, c, g, or t
  misc_feature (144)..(144): n is a, c, g, or t
  misc_feature (146)..(147): n is a, c, g, or t
  misc_feature (152)..(152): n is a, c, g, or t
  misc_feature (154)..(154): n is a, c, g, or t
  misc_feature (157)..(157): n is a, c, g, or t
  misc_feature (170)..(170): n is a, c, g, or t
  misc_feature (181)..(183): n is a, c, g, or t
  misc_feature (185)..(186): n is a, c, g, or t
  misc_feature (189)..(190): n is a, c, g, or t
  misc_feature (195)..(195): n is a, c, g, or t
  misc_feature (201)..(203): n is a, c, g, or t
  misc_feature (209)..(211): n is a, c, g, or t
  misc_feature (221)..(221): n is a, c, g, or t
  misc_feature (224)..(225): n is a, c, g, or t
  misc_feature (230)..(230): n is a, c, g, or t
  misc_feature (247)..(247): n is a, c, g, or t
  misc_feature (249)..(249): n is a, c, g, or t
  misc_feature (280)..(280): n is a, c, g, or t
  misc_feature (283)..(283): n is a, c, g, or t
  misc_feature (285)..(286): n is a, c, g, or t
  misc_feature (291)..(291): n is a, c, g, or t
  misc_feature (295)..(295): n is a, c, g, or t
  misc_feature (303)..(303): n is a, c, g, or t
  misc_feature (305)..(307): n is a, c, g, or t
  misc_feature (367)..(367): n is a, c, g, or t
  misc_feature (369)..(369): n is a, c, g, or t
  misc_feature (371)..(371): n is a, c, g, or t
  misc_feature (385)..(385): n is a, c, g, or t
  misc_feature (388)..(388): n is a, c, g, or t
  misc_feature (391)..(391): n is a, c, g, or t
  misc_feature (406)..(406): n is a, c, g, or t
  misc_feature (421)..(421): n is a, c, g, or t
  misc_feature (424)..(424): n is a, c, g, or t
  misc_feature (428)..(428): n is a, c, g, or t
  misc_feature (441)..(441): n is a, c, g, or t
  misc_feature (454)..(454): n is a, c, g, or t
  misc_feature (468)..(468): n is a, c, g, or t
  misc_feature (522)..(522): n is a, c, g, or t
gaagacagcnccgcccgcgcaccgccagcnanccccgccgcagactcccancgccanangnntngggcnannnnnannagangannnnnnnannnaaacgnnncnnnnnnaaacanccnnaaaannntgcannaanggnnnngngnnatgantnagntggagcaaatganaaaggaggaannngnngtnnggaanaacatnnnggatgnnngaaaagaatntgnngaatnaaaaatgatgcaaatangnaaatgggatggaaaaagtggggagaataaanatnannaaaangagnaaaataantnnnaaaatggaaaaaatatatgcaatgcaatgggggaaagaataaaggctgctggtaagcgcntncnaggatgggaagctnatnatntgggaaagataaaanaaaaaaaaggtccangcnatcncgctgcgctcctnctgggtaataaantgtgcatacgcgcnctcagggaaatttgtggcctgtggggggttggacaacatatgctccatctaaancatcaaaaa

SEQ ID NO: 612771 - DNA, 345 bp, Homo sapiens
acgagcgcacagacacgctacactgtggaagggtgtagagacctctgtgccaaaaagagcacacttgcatgaaggtgagatcctatgagtctggttaccggttgagtgaagtgctctaagaattctctggctctcacttcctgtggcagagattgagtggctgtcaagcgtttgtggtcagaccggattcacagagagagtgtgagacaggctcctcttcttggagcacccactctttaactctatgacacggtttttggaactctgtgatgtggatctggagaagacaatgtgacagaacttccctcttaggctttatccccacattggtggacactttggggt

SEQ ID NO: 612772 - DNA, 309 bp, Homo sapiens
aagacaaggaggaggacagaagttccggagatctaagaatctaggacctcattcacgggatttatgaaagctgtttaatacaaaagatctccatgctgtgggacccctacacagttatatggcagtcacaaaattataaagagaataataacagggcagaaccgaagctcaacacaaaaccgtttaccacggccctgtctcaagattccatgttatatcacctcacatagcatatagctagtcaagccgctgcaggaagtagcctggccaacaacccagctgacggtgactccaggcagggagacggga

SEQ ID NO: 612773 - DNA, 156 bp, Homo sapiens
cactggcttttaagaccccaactatgtagattgtggctataaatactcagcagcattaaatgttggtataagacactgttgtgggcgtgagttgtgccacctcctaatatcctgttacttcaggatgtgactgtatttgaagacagtaatttaaaa

SEQ ID NO: 612774 - DNA, 237 bp, Homo sapiens
tgatatgctgtcatcatagtatttttacgtttccctcattcctaagtcacgtgcccaggattcctgttctagcaaagcggaacatatgaaaacgtgttctctcgaccacctcccctctcactgcaacctccgtgtcccagattcaagcggttctcctgcctcagcctcccaagtcaagtagctgggatatgtgccaccacacccagctcattattattattattattattattattt

SEQ ID NO: 612775 - DNA, 176 bp, Homo sapiens
ccccatgagtttattgcggcggatatcggttactgcggtggcactctgtctggccagccccttggcactcgcctcgaatttaggggcttcctcactcgtggctttccgaagctgctgggcaagcttgaactagcagaaattccagaaggctatggcccagaacacttgggaatatt

SEQ ID NO: 612776 - DNA, 375 bp, Homo sapiens
tggcaatcatgtcatcattccaacatgatttcagctttgccattcacatgtccgtgcattatcttggctttcccccaggcacatcattacccagttttcatcattcccaatcactcccctctttgccccatctttccatgcaatctgtcagctcacacacttcccttcatttttctcagcacccaagctgtgtgctcccagtatgttacctttcaacttggcacattccccttcccgaatgtctttctcaccctttccagtgccccagcacactctcatcaaatgcattatccctgacttgcccattccccaccacaccaaacgtcccgcatgccttgtcttgtctcactcttgggcccatcttgcattttccca

SEQ ID NO: 612777 - DNA, 158 bp, Homo sapiens
atttcaaataaatagaatcatacaatatgtgaccctttgtgtccggcttcttcacttagcattttttttaaggttcatccatgttccagcatgtatcagtactttctccctttaatggtggaatactttattgtatagataagcaacattttgtttat

SEQ ID NO: 612778 - DNA, 367 bp, Homo sapiens
tttactaaaaatacaaaaagattagccaggcatggtggcatacacctgtagtcccagctactcgggaggcttaggcacaaaaattgtttgaacccgggtggcaaaggtttcagtgaacttagatcatgccactgcgctcctagcctgggtgacagagcaagactccatttcaatttaaaacaaaaaaagaatgtgtttttaattttgttaatgtttgtttgttaaacatagccctgggaccgcaaacattttacttaaacttttaatagcatttttttcgccagatactttaatatttccccttacattaattctggattcacatttttttaattgaaataaatgttaatgacaaaagttgtttgga

SEQ ID NO: 612779 - DNA, 211 bp, Homo sapiens
cgatgtctcaggcaataactctgcctggctgggccgtttacgggagacggacgcgttgtccatggtggcaatcaacaagagaagcgcgtcgctgcggaagcaaacgaatttgggtccggcgttcaacacagctgccgagtcacgcttcttgatcccgaagacttccgagcgtccgtaaacgcccgaatggtcccgatcagggtaccgacct

SEQ ID NO: 612780 - DNA, 176 bp, Homo sapiens
atttaagatagtcagtagcacattagaatgtgcagatgcataagtgtagcagggaaggttatggttgcacatgctcagggtggcgcttccaattaggtgcatgagtaggtggcctgcagtaatgttagcggttaggcgtacggccagggctattggttgaaatggtcgccaatccg

SEQ ID NO: 612781 - DNA, 294 bp, Homo sapiens
gacggggattggtccaccgggtattaggcgccattacatgggagctagcaggctcctagactcagtcaaaagtgtgtggaaagcctggtttacggacaggtgtagtggctcactcctgtaatcccatcattgagttttaataatagcactttgggaggccgaggcaggcagattgcttgaggtcaggagtttatgaccagcctggccaagatggtgaaaccctgtctccattaaaaatacataaattagccaggtatggtgtcgtggtgtcgcacatctgtaatccccggtcga

SEQ ID NO: 612782 - DNA, 115 bp, Homo sapiens
cgaggcgttagtcaattttctaatattttggtaggaatctgtagtacaatataccttgcagctgttacatacacgaaactgaaagaatatttgactaaacacatactgctgttgc

SEQ ID NO: 612783 - DNA, 366 bp, Homo sapiens
gctacgacaaggaaacaaaaaggcaattaaatgagtcggactagaaaagactgatgggaggccggacacgatggctcacgcctgtaatcccagcactttgggaggccaaggcaggcagatcacctgaggccaggagctcgagaccagtctagccaacatggtgaaactccgtctctactaaaaatacaaaaattagccgggcgtggtggcgggtgcctgtaagcccagctacttgggaggctgaggcaggagaatcgcttgaacctggaaagcggaggtctcagtgagccgagatccatacaattctactccagcctggaccacagagtgagactccgtctggaaaaaataaaaggctggtcgacg

SEQ ID NO: 612784 - DNA, 743 bp, Homo sapiens
ttcaacagtgcttggacggaacccggcgctcgttcgccaccccggcggcgcccatagccaggcctccgtcacctcttcagcggaccctcggactgccccaaggcccccgtcccgccgatccagcgtcctggcagcaactgcgcgcgccagccgcgcgtctccttaattcgccgcgcagtgaccgacggcgtcacctcgcagggtgcgccagaagtaccaccaggactcagaggccgccatcaaccgccagatcaacctgagctctacgcctcctacgtttactgtccaatgtcttactacttggaccgcgatgatgtggctttgaagaacctttgccaaatactttcttcaccaatctcatgaggagagggaccatgctgagaaaactgatgacgctgcggaaccaacgaggtgcccgaaatcttccttcagggatatcaagaaaccagactgtgatgacgtggggagagcgggctgattgcaatggacgtgtgcattacattttggaacaacaatgtgaatcagtcactacgtggaactgcacaaacgtgccactgacaaaaatgaccccatgggtgtgacttcattgagacacataacctgaatgagcgggtgacagccatcaacgaatggggtgcccacgtgaccaattgcgcaagatgggagcgccgaatctggcttgggggaatatctcttgacgagcacaccctgggagaccagtgaaaatgaaagctagcgcgggc

SEQ ID NO: 612785 - DNA, 237 bp, Homo sapiens
cccggatagagcggctcctgctggggaatttggatgttggattaaatccagagtgtcagcctactgaaacaaactatcagagaaaaataaaacaaagactcttgtcaacttgaataaaacagatactttaagaaaagataaaggttgattgaggcaaaactcatgcatcataaagtttaagtatataattcaattactttttctaaatgtacagagctgtgagaccatcaccaattc

SEQ ID NO: 612786 - DNA, 203 bp, Homo sapiens
gagtgccccatacgaggacaccctgcgaccggggtccaggaagtgaacaagaccgaacccttcgtccggcttaaccccccgtgctagccccgagttcatgggtgagcaactaccccttccttaggatgatgtgcttgagaaacctccctccccctctttccccatgtgaggaatttgaagccacaatcgccttagggccatga

SEQ ID NO: 612787 - DNA, 873 bp, Homo sapiens
  misc_feature (873)..(873): n is a, c, g, or t
tgatacctttcaagatttgggatccctcggaggtgttaggaggtaacaactgaagatggagaaaggtgttaatgtgttccgaatgtccattgatggactggaaaataaccagtcctcttggtagcaaatatgtcttcaggttacattgttggaaaaactgggttgctctagaggattgtttagtaagccaatctagtgacagtgtggaaggtgatgggaggttttattgagaaagtcccagtttcgcagaaatgatcaggaacatggttcagttagttcagcagggtgttgaattggggtaagagaagaatcaggtttcgaaggcatccaattaggaccaccaaatatgttaggtccaattctcatagttgaaaatgactctgaaaaatgtaagaaacagcgatttgagtttcaatgcactcgctgtccagtgaaaggtcaatgagcgagattaccaagaggatctcattgtttggaaaagagatagagattattgaagatttcagagactgatgaggaacaaaggggtttgttctggcagattgagatgagaacaggatgaagatagggaggaatagaaaggttaatttgtggctttttagactgtccttgaatagagctggagtggtagtggaaagtaaattaagttataaaccttaataaaggatcgaaaggcaaagagtgcagtggaaagaaattgccattggtggcagggtatgccacggggtggtgacaggggggggactaggaaaaggacccaatgggtgtattataacgaggaggaaaaaagagagccactttgcgggacataattagggagggaacagaaaaggaacaagcgattaaacacgtgggttttgtatttatgtaagn

SEQ ID NO: 612788 - DNA, 907 bp, Homo sapiens
tatcgcgttatgtttggatgccataactcgtggattttttgaaattagtggcaatgtttttcctgtttattgaggtaggtgtagggcgttggttagggatgtccttgttaaatggggtctgaaagttgttgactttgttgtctaagtgggtttaatcgcccaaggtgtgcctacttagttcggtttgtaactgacccctactgtgcacgtgggactttggcttgggccccatgtgaaaaaacgccgtatcatcacctgtgccgctctgccggtcttcaaccttgttgtcgaatactcacagagccaacgaaacttggtttgccctgtctacttctacggacgcttgctgcggttggctaagctccccaggtactttcccgatggctatggatgtgagagcctcctcgtcctgcccgtcctggggctctcactaggcccctgtgcaagcgcctgatggcttcacggactgactggggctacagccacgcagtttgaacacatcactgctctcagagaactctgcactgaccgctagctgctgtctgctgcgtcactttatctctgtgtatggctttgagtacggcataccttggagaacatactcccaacattaggaacttgatttaagcctgagagtttgaagggctttaatcctttaaaacttggagaagctggctgggcgcggtggctcacgcctgtaatcccagcactttgagagaccgaggcgggcggatcacgaggtcaggagattcgagaccatcctggctaacacggtgaaaccccatctctactaaaaatacaaaaaattagctgggcgtggtggcaggcgcctgtggtcccagctactcgggaggctgaggcaggagaatacgtgtgaacccagatacggcacgtggctagtgagcca

SEQ ID NO: 612789 - DNA, 276 bp, Homo sapiens
acccctcgttgctgcttgtgctgctggtgctcctggtactcccgggcggtcaaggtattgctggcagcgtggtgtggtcggcctgcctggtcagagaggagagagaggcttccctaggtcttcctggcccctactggtgaaccttggcaaacaagggtccctcttgaggcgggtaggtggacacggttgtcccccctgggttcccattgggccccccccttggatttgggcttgggacccccccttggtggaattcttggacgttgagggggggct

SEQ ID NO: 612790 - DNA, 174 bp, Homo sapiens
acgagccgtactggacatgttcactcagaccgcctgagtgcgccatgactggcatgctcttcattttgggtaaatgtagacttccggacctgcagggtgcccccatgcctgaagagagctggggctgccaccctgtgcccgcacagcctggccttccccttcctcagccaggct

SEQ ID NO: 612791 - DNA, 344 bp, Homo sapiens
agaagcaacatcctaagaattaaaaaaaaaacttaaatattttagcttttggaagcaacattacaggcgaatttcaggtttagagcaactaattaattaattccattaacaccactactcaaaaacagtaggtttttctgtccaggctgtgtgcctcatgcctgttatcccaacactctgagaggcccaggcaggaggatcacctgaagccagccaggctttcaagaccagcctggacaacaaagcaagatcttgtctctacaaaaaaaagttttaaaattaaccaggcattgacggttgtcaccttttattcccagctacttgagaggctgaggttggaggac

SEQ ID NO: 612792 - DNA, 213 bp, Homo sapiens
  misc_feature (192)..(192): n is a, c, g, or t
cttagaggatcccggacgcaagacatggagaagctgtgttcttggacaggtggagccacgccacattgcggagatcatgaactcttcactagaccaatcgcagtggtacctgccgcaagtcctctgctggacccaagggcaaatcctgaaggatgaggattttctgcagaaagctgccggtggcaccaaggnccaacttgttcttcggtcgaa

SEQ ID NO: 612793 - DNA, 149 bp, Homo sapiens
  misc_feature (12)..(12): n is a, c, g, or t
gtgcagattagntgataatagaatagtttttaatgaaaaatgttaagggactcttacaaaagaatgcaggctaatcaataataaagaaaagaaatgggcaggcatagtggctcatgcctgtaatcccaacattgggaggccaaagcaaa

SEQ ID NO: 612794 - DNA, 1204 bp, Homo sapiens
  misc_feature (83)..(83): n is a, c, g, or t
  misc_feature (86)..(86): n is a, c, g, or t
cctcacagggctactcagcctcaggtagctggtgccagaataacacagactcagctgccagagcctgctcttaacacctgtgnttncttttcagatcttacaggtgaacaaggtgatgtccatcttgttttatgtgatatttctcgcttatctccgtggcatccaaggtaacaacatggatcaaaggagtttgccagaagactcgctcaattccctcattattaagctgatccaggcagatattttgaaaaacaagctctccaagcagatggtggacgttaaggaaaattaccagagcaccctgcccaaagctgaggctccccgagagccggagcggggagggcccgccaagtcagcattccagccggtgattgcaatggacaccgaactgctgcgacaacagagacgctacaactcaccgcgggtcctgctgagcgacagcacccccttggagcccccgcccttgtatctcatggaggattacgtgggcagccccgtggtggcgaacagaacatcacggcggaaacggtacgcggagcataagagtcaccgaggggagtactcggtatgtgacagtgagagtctgtgggtgaccgacaagtcatcggccatcgacattcggggacaccaggtcacggtgctgggggagatcaaaacgggcaactctcccgtcaaacaatatttttatgaaacgcgatgtaaggaagccaggccggtcaaaaacggttgcaggggtattgatgataaacactggaactctcagtgcaaaacatcccaaacctacgtccgagcactgacttcagagaacaataaactcgtgggctggcggtggatacggatagacacgtcctgtgtgtgtgccttgtcgagaaaaatcggaagaacatgaattggcatctctccccatatataaattattactttaaattatatgatatgcatgtagcatataaatgtttatattgtttttatatattataagttgacctttatttattaaacttcagcaaccctacagtatataagcttttttctcaataaaatcagtgtgcttgccttccctcaggcctctcccatctgttaaaacttgttttgtgatccggctctcaggagtcactctgtaaaatctgtgtacaccagtattttgcattcagtattgtcaaggccatgactgttgttttagtaaacttgttaaaatcaaaaa

SEQ ID NO: 612795 - DNA, 1505 bp, Homo sapiens
tacgggagtatgtggttttttcgttctgttgccgttggggttgtcccatcaactcgttttttctcttcgctgtggtggtggtggagacttcactgcgctccgttgatcatgtttgtttggtggtcttctctctccttcccctgtcacatcttgttggtgggtgatgctggtcgagcatcttcgttgaagggtcgcttgtttctcttgctactgcttggtgctgttattccatagggtgtttcgggtatatttttttgatctttgtcgcctgcggtagtagactcctgcattttcgtagctcctgcgggagtgctcctgctcataatttttttgggtgtgccctctcccgcgaggtcttgaatagggcgccctcccgctgcgtgctatagtgttggagggaagtttttggtgcgccagacacaacacggggagctttttcatataccacatgtgtggacaatacatggctcacacagtagagtgtttcttctcgttgtgaggaggccgtctgaataaaggggcgatacaataggagatttcggagttttccgcctccgccgcgttgtcttcttctcggggtgttactaaaaagtagccctttgggggagaaaaaaagattgggtgcccccccctcataagtattggcttttttcgaagaatgttttctccggtgttgaagattgctcttccgccacaccttttgtgtttttggaaatatttggggtgttctcacctcgggggccacatgagccgcccccaacataggtgggttttttttttaatacgagagtccatcttttgtccacacaggaaggccttaatagacccaaccccctcgtggttgggggattcacgccgtgtttttgctgtgttgtgtcctcttgtgaataatataggattgtacctacgttacacaccattgtttcccggtgtttgggggtgttctctactactcacataaagtcatctctgggtgacaccacaaagaaataggtttacttctgctcggggagaatcctcttggctccaacaggggtggtccacacccaacagtttttcgtctcccacgcaaagggctctcatcgagaagtgcgctataaatgtagaatatatgtgtattcccctcatagatatacctcggtctcacccccccaccttttctataatctcacgctgggtggggagaagaacccggtttttcacagaacctctgttcttgtttcacaattgtggcgcactttataagtttatagtatagtataaaagagtctgggggtataattgagtaaccacacttgcacttcggtataaaccctctccacagagaaggaaaaggagagaatatttttgtggagccacctcttggttttcttttttggcgtgtggcacgcttttaaggtaattagtttttataaaatcacggaactttttaaatgggaacccaacttggcccacaaaatttgttcccacgaattttgagaccccatttaaaaagtttaatgaga

SEQ ID NO: 612796 - DNA, 251 bp, Homo sapiens
agatatcttgatgagtctcaagctgccgcccgtttgggcgaaacgcttctgagccggaaatccactctccttgcttggatcggcgaacaggaaatgaccgttcgtaaggcagtggcctgagccctaccccgccgtttcggaggtatttcagcatgccctgggaggacacaaacttgattgttacagcatttatggcctgccgaagggcacggtgacacaatagtctattttgatatagaagcatatgacgg

SEQ ID NO: 612797 - DNA, 124 bp, Homo sapiens
tccttcaaaacagagcaatggcttggaatgagactgctgatctggacttgatattggtgcccaggagaaccccttggatatcgccaggatgatcctagctgccgttcacttaatgccgctagcg

SEQ ID NO: 612798 - DNA, 612 bp, Homo sapiens
aacccttttcatcttgtacttagagtgggccaggcccttcagtttgagtcaccaaacagcctgagggccctctctgtgccgggcccatgtgagggcctggggatcagagatgaaatacccgccatgaaggcccccacaggcttgacaagtaaacgggtggggactacaccagggcttgctggggaagcgtcggaactccggttgtacgaggagaagcctgaaggtgagcccaggacgcttccccagaggatgtgacacccaaatcgaacctgattcctcagatccacaccgtcatctttgtggaatcaggggcagtttgggatcgatggatctctgagctgcctgtgggcaccaagatgctaagagcctggtttgaaagtgtgtgtatgacagggagagaaggtcagcactcccctcgacaaggagcacagacagattaagccattgtcacctacttagtggcacctaaacatcattgtttttaatgggtacaaaaaatagaccgaataagaacaagtcttgatagcacagcaggtgactatagttaataataatttaatttgtacgattaaaaataataaaagggcgggcgcagtggtcagcctataatcc

SEQ ID NO: 612799 - DNA, 828 bp, Homo sapiens
  misc_feature (5)..(5): n is a, c, g, or t
  misc_feature (61)..(61): n is a, c, g, or t
  misc_feature (63)..(65): n is a, c, g, or t
  misc_feature (72)..(74): n is a, c, g, or t
  misc_feature (76)..(76): n is a, c, g, or t
  misc_feature (80)..(80): n is a, c, g, or t
  misc_feature (90)..(91): n is a, c, g, or t
  misc_feature (95)..(95): n is a, c, g, or t
  misc_feature (104)..(104): n is a, c, g, or t
  misc_feature (112)..(112): n is a, c, g, or t
  misc_feature (114)..(114): n is a, c, g, or t
  misc_feature (135)..(135): n is a, c, g, or t
  misc_feature (159)..(159): n is a, c, g, or t
  misc_feature (166)..(166): n is a, c, g, or t
  misc_feature (171)..(171): n is a, c, g, or t
  misc_feature (180)..(180): n is a, c, g, or t
  misc_feature (182)..(182): n is a, c, g, or t
  misc_feature (186)..(187): n is a, c, g, or t
  misc_feature (230)..(231): n is a, c, g, or t
  misc_feature (246)..(246): n is a, c, g, or t
  misc_feature (262)..(262): n is a, c, g, or t
  misc_feature (268)..(269): n is a, c, g, or t
  misc_feature (277)..(277): n is a, c, g, or t
  misc_feature (279)..(279): n is a, c, g, or t
  misc_feature (287)..(287): n is a, c, g, or t
  misc_feature (289)..(289): n is a, c, g, or t
  misc_feature (301)..(301): n is a, c, g, or t
  misc_feature (316)..(316): n is a, c, g, or t
  misc_feature (333)..(333): n is a, c, g, or t
  misc_feature (335)..(335): n is a, c, g, or t
  misc_feature (337)..(337): n is a, c, g, or t
  misc_feature (342)..(342): n is a, c, g, or t
  misc_feature (360)..(361): n is a, c, g, or t
  misc_feature (363)..(363): n is a, c, g, or t
  misc_feature (385)..(385): n is a, c, g, or t
  misc_feature (387)..(387): n is a, c, g, or t
  misc_feature (483)..(483): n is a, c, g, or t
  misc_feature (542)..(542): n is a, c, g, or t
  misc_feature (600)..(600): n is a, c, g, or t
  misc_feature (634)..(634): n is a, c, g, or t
  misc_feature (695)..(695): n is a, c, g, or t
  misc_feature (820)..(820): n is a, c, g, or t
ttatnaatttgtgtgaacagtgacagcctgtacacctgtattcactcttgaacaatgcagntnnngctaaannnanatanacgggcttgnnaccngggtgtgtnatcgtcancntgggtcggagctcacggagtntcaagaggaccatcctatccagtngggccangtctnaacggtttntncttnncccaatattttctgcacgtcatcctgaggtaaaccaattattnnatgtagttagttttnagtaaaccagctatgncaattnntactaganantttgttcntnaacccatttgtnttggttttgaatttnttttttcttttttcatntntnttacnaaggcctgtctgtgctcnntngtcaagctgtcatgcatgtctnantggccagcccaaacagtgtattaatcattagcaaatggaactttaaggtgtccttatcattaaggtagtacaagtattttatattgtaaaactgangtgtagcttgatctttaggggacaggaccaccaaccaatacatgcagattttgtgtgtntggacagaaggtacttttgacattcagttttgctatatagaaacagaatgaataaatntttttttttcttttttcttttttttgcaagaggnaagtaaaagattcaatttgattcttctagaggggggaaaaaggagttgaaagtaggtcttnattttgcagtcatcatctgtacgaattcttcatagttgacttgtccgtctccatcaatatctgcttctctgatccatttcatctacttcttcatctgttagtttttctcctaagtttgtcatgangtgacgta

SEQ ID NO: 612800 - DNA, 967 bp, Homo sapiens
gctctgaacttgaaggcgtgacgtgtcaccaatcagcgagtcaccgtcatgatcttacccagcagaacgaaaactgtccatggtgataagggtcggagtcttcgtggaaattacctcgggtgtcggtatccaagagaccgttatgcggttacaacaccgctcgtgatagcaccgttgatgactcgcgagatagtgcggcgctaacagtctgcagtaccattggccctggcatggtctcctgcctttccagactctgtacggagtcgctcttcttgtcgtggcggcctacgtagcgagtgtgtctgcgtcccctgtcagtgttggcgttggggcctgagagctcgtcaagtgccccccgtatgggtgatcttccgagttctacaaagcgcatgacttggttccaccggtgtggtggagagcatcctgcccaccgacgcatcaccacgctctggtccctcctcagtggctcgctcttcctctgtttgtggcgtgccactgcatgtggttgtccttctctgtgggccttattcgttagccgctttggccgccggaattcaatgactgaatgcatgaacctgctgtgcttcgtgtccgccgtgctcatgggcttctcgataagtgggcggtcctttgacatgctgatcctgggccgcttcatcatcggtgtgtctgcggctgaccacagcttcgtgccatgtatgttcgtgcaggtgtccccatagtcgctcgtggggccctggcgaccctgccctgctggcatctctccggcttctcctcgccagggtcggctgactcatcttggcaacccgacctttggctgctgtggctatcttcccccgcccttcgtgccctggtgccttgccgcattccgtctgtctcccccccgaccgccgtgtcccctccgcccctccccctcagacaaattgctccgccccaccccgcccccccccccctccccgcctcctcc

SEQ ID NO: 612801 - DNA, 111 bp, Homo sapiens
taacttctcaggcttttacttcatggatttgttatgatctttctcttctttccacttctatgaacactgctctggctcacgctctcgctagctcctgcctgctacagtcga

SEQ ID NO: 612802 - DNA, 913 bp, Homo sapiens
atgcaggtgaactaccgaggcaggtggtgagcctgatccggatgcggaacccctggggcgaggtggagtgtgacgggagcctggagcgacagctcctcagagtggaacaacgtggacccatatgaacgggaccagctccgggtcaagatggaggacggggagttctggatgtcattccgagacttcatgcgggagttcacccgcctggagatctgcaagcctcacacccgacgtccctcaagagccggacatccgcaaatgtgaacaccacactctacgataggcacctggcgggcgggggagcaccgcggggggctgccgaagactacccagtcgcaccttctgggtgaaccctcagttcaagatccggctggatgagacggatgacccggacgactacggtggaaccgcgagtcaggctgcagcttcgtgctcgcccgttatgcaagaacgcaccgatcgccggcgagcgccgcttcggaccgctgacatggagactattgggcttcgcaggtcgtacgaggtccctccggagctggtgggccagccggccgtacacttgaagcgtgacttcttcctggccaatgcgtctcgggggcgctcagagcagtgcatcaaggctgcgagaggtcagcacccggttccggctgccacccggggagtatgttggtggtgtgcttcaacttcgagtcgcaacaaggagggggacttcgtgctgcggcttcttctcagagaagagtgctgggactgtggagcttggatgaaccggaatcagggcaatttccccgatgagcaagggctctcaaaaaggggatggcaggaacttcaggcgcttcaggcctggcgggggggcttgagatccctgaggggttggggcaactctctggtctttaacaaaccgggcacggtcgta

SEQ ID NO: 612803 - DNA, 409 bp, Homo sapiens
  misc_feature (119)..(122): n is a, c, g, or t
acccggctgcagagcacctcccaccttgcttctgtcccaaaagtacatccctacgtgtggttctctttaacaatcttaatgtctgggttggggaagcatgttaagcgcgtaaaggcaannnntactagcaggcatggttgctgactccaggccgcgttccaggaaatatcggtgggaagaacggggacgggcttgggacccttcattgaggaagtatgatgtgatcttcctgagtccctcctgattcttggatgctgagttctcccatataacatcttccgcctctttttccatgatggtctgggccgagcgccaacttaacctgacaatctggtggaagccgaacacatgctttactttcttcttcaaccatacttttgttttgagatatatgtgtattctgaaccat

SEQ ID NO: 612804 - DNA, 584 bp, Homo sapiens
  misc_feature (30)..(30): n is a, c, g, or t
  misc_feature (82)..(82): n is a, c, g, or t
  misc_feature (99)..(99): n is a, c, g, or t
  misc_feature (157)..(157): n is a, c, g, or t
  misc_feature (214)..(214): n is a, c, g, or t
  misc_feature (240)..(240): n is a, c, g, or t
  misc_feature (349)..(349): n is a, c, g, or t
  misc_feature (393)..(393): n is a, c, g, or t
  misc_feature (429)..(429): n is a, c, g, or t
  misc_feature (457)..(457): n is a, c, g, or t
  misc_feature (481)..(481): n is a, c, g, or t
  misc_feature (499)..(499): n is a, c, g, or t
  misc_feature (518)..(518): n is a, c, g, or t
  misc_feature (571)..(571): n is a, c, g, or t
acaacataaggccaaaggcagggagccggnatttttcaataatgaattagcaggggctccaagaatacaacaagagaaagtnatttttcacagtccttnagaggcttaacctttcccaatcctcctttatttgccaaggtgtgggcttgcccatttnagttacaatattcaagacgtccatgtccctcacttcagtccctggtatactccagancccacatgaacatttatgcatacccnatcattccatcaggcattggagacatgtactgggctcgcctagaacaacaatttggaccaacgtttgcatgttcccatcccagaaacacttgttggttcagggtggttnaatattttgattgttcaaacctggatcatctacctatccctggnattagggatggtttcagttcaatccgaagacagggnaggccatcttagattgataagccatctnatgttcccagtttcttttttaaanaattatattctgagagcnctcgtagtgtgaagctttnttctacatgttaaatttcacagggaaccatgttttttcaaacaaaggcataanacccagggttagg

SEQ ID NO: 612805 - DNA, 1512 bp, Homo sapiens
  misc_feature (270)..(270): n is a, c, g, or t
  misc_feature (298)..(298): n is a, c, g, or t
ggcctcgtgctgggtaccacgcagccgcatgtgtgactaccgggcagcaaccttggtgcgcacagtcgactcaggctgaatgccatgagggttcatgagtcggagttcacctggggctcacgatgaatcatctccacgtagcgaagggtccctgaccacgcatcgattgttcatgtcgatgggccatcgtaacaagactagacgcgtgatggtccacagattccagaataaagcaggagatgtgcactcaatgcattgcatgagtccagnagagtctggagcctagcacagttctctnatgatgagacccctgtttcgactggtggtgaggtatgccgtggggacgcgagagcttgtatacattgatgtaaattctacacacgcatcctcattatcagcataagtgatggtgccggctggcgggaaatttccctgtcccatgggcatcaggggtagcaaatagtgagtgcgagacctttggccttgcgcgtggcaagttccgtagggggcggtgggaccaccgcgaacaaggaagggcagttagtctacgccaaggggacaccacctggacaggaaaggaacgagcctaggcaattgcggaaagggcctttgtgtggacatctaacgtgcgggcgcattgggtacgcgccaactttgaattgtccgcgtaacaggataggcgggatctccattaaggctcatgttatgagcgccaacaaggagacatgatcgagtccagcagagctagaattccagtgtggggcgccattgacatcgcggctggacatcgggagaggtcccgggatggacgacaactttcaagttggaagcctagaaaattgtgcgcccaagacaagggggttcaatgtccacgttataaaaccttttttcccaatggcaaggccccaatgggagcacaaacagacacagggtttgtagcgcattttgggttccccatgtctttcccaaagcaaggggaccccttaagcatgaacattggacagcgtcggtgcacaacacgaatgtgctgagcacaatggcagtcaacccactttgccgacaggacacacgataggtcgtatggtgcccatgaactttctttgcgaggtgtgtcagcaagacgagactcaccgccctccatactccaagaattatgtcgtgtgagcttgccctgagagacaccttattccaccaaggccacaggcacatgtcccaatgagacgccagactcaattccacctgggggagcaacaaaaggggaagcggacggtccaacacacaaacattcgcacaaccacagcaacatcagggtcgtcagacggaacagaacaaagagacaccatacatcgtcggacgaccacgaccacgatgaagacagacactctacgccacactccgagaacaactccgcatccaataaccagcacaggtgacaagtgacaaatcacagaagggacaacagtagtgagtcgcgacaccacgaactgttgatccatttcaccacacgatccg

SEQ ID NO: 612806 - DNA, 185 bp, Homo sapiens
cattctcaggtgactctaaggatccccaggcagttgattcgagtgctgccacgagtgagatgtgcttgggcgccttttaaggccagggaaccctcccaggccccactatgggaagccagggccattcaacgccgtcctagctccaaggtgcggtcgatcacttgaaaccagaagtttcagaccag

SEQ ID NO: 612807 - DNA, 171 bp, Homo sapiens
gagttgtttctcagcttctatttgtgctttgaaaagctctagattctccacggaacacccagtatccagatcgatctcgctcctctggatgtagaagtgtttccaatctctccgataaaacctatgtgcaaattaaacacactcatgattggaatactcaaacagtattca

SEQ ID NO: 612808 - DNA, 113 bp, Homo sapiens
ctagcgttgttctgcttccaattaggtgcaccagtaggctgcctgcagtaactgttagcggttaggcgctacggccaggactattggttgagcagagtcgcgctattgatgag

SEQ ID NO: 612809 - DNA, 557 bp, Homo sapiens
tccggaggaagggttccaagtggtgccgaccttgcaaagagaagattttgatgtggaagcagctgactcagcgggaaactgccttgggaggttattttttgaagcaggagagcggcaatttggtccttactgtggtcatggattccctgggcctctaaatattgaaaccaagagtaatgctcttgatatcatcttccaaactgatctaacagggcaaaaaaaagggctggaaacttcgctatcatggagatccaatgccctgccctaaggaagacactcccaattctgtttgggagcctgcgaaggcaaaatatgtctttagagatgtggtgcagataacctgtctggatgggtttgaagttgtggagggacgtgttggtgcaacatctttctattcgacttgtcaaagcaatggaaagtggagtaattccaaactgaaatgtccacctgtggactgtggcattcctgaatccattgagaatggtaaagttgaagacccagagagcactttgtttggttctgtcatccgctacactttggaggagccatattaccac

SEQ ID NO: 612810 - DNA, 284 bp, Homo sapiens
gttcccttataaaagaaccccagaaaattttttttccccccctttttccccccgggtgaggaaacaatgtgaaatcggtagtttccaaaactggaacttggccaggggggcccccttatatcaaacgtcccgcttccccaactgtgagaaataaattcctttttttttataagcccccccgtttgtagtatcccattatagccccctgaattaaggccttttcccatggggagattttaatgggatgtaatttaaacccaataaagttttttaaaagacccata

SEQ ID NO: 612811 - DNA, 310 bp, Homo sapiens
  misc_feature (24)..(24): n is a, c, g, or t
  misc_feature (34)..(34): n is a, c, g, or t
  misc_feature (36)..(36): n is a, c, g, or t
  misc_feature (50)..(50): n is a, c, g, or t
  misc_feature (67)..(67): n is a, c, g, or t
  misc_feature (78)..(80): n is a, c, g, or t
  misc_feature (106)..(106): n is a, c, g, or t
  misc_feature (133)..(134): n is a, c, g, or t
  misc_feature (144)..(144): n is a, c, g, or t
  misc_feature (147)..(147): n is a, c, g, or t
  misc_feature (151)..(151): n is a, c, g, or t
  misc_feature (155)..(155): n is a, c, g, or t
  misc_feature (159)..(159): n is a, c, g, or t
  misc_feature (182)..(182): n is a, c, g, or t
  misc_feature (213)..(213): n is a, c, g, or t
  misc_feature (267)..(268): n is a, c, g, or t
  misc_feature (309)..(309): n is a, c, g, or t
atttacccaaataaagtataggcnatagacattnanacctggcgcaatanatatagtaccgcaaggnaaagatgaaannntataaccaagcataatatagcaaggnctaacccctataccttctgcataatgnnttaactaganatnactntccnaggngagccaaagctaagacccccganaccagacgagctacctaagaacagctaaaanagcacacccgtctatgtagcaaatagtgggaagatttataggtagaggcgacanncctaccgagcctggtgatagctggttgtccaagatagaatnt

SEQ ID NO: 612812 - DNA, 797 bp, Homo sapiens
tgctgtgtggactgtggacgaagcgggagtatcagtaagcggagatcgccaaagatgacagtggagccccaccctggtgaatgaacatgatctctggcctcagctatggagcacttaatgccagctaccagtgccgtcctggccgagatgcagctttccccctcctcaacagccctggcatgcttgaaccctggctccgccagcagcctgctgcccctcagccactgatgacgtgggtgcccctcgtggagcctgttgcccagcaacaggatagcgagcgagccgctcctctggctctccccgccccgagtatcagccgaccatgtgtgcaggtgacatggaggatccagcagatggcagaggaagacatggcatgcccggtgcctcccctgggcgccacctaatcgccagcgcctcgtgggcctccgggaagacgagaggagcctggaggaggagctggcgggagaatgaactgtcctaagggcctgtaatgaccggcagggctggggtgagacccctccctttccagaatccattgggccccatctacccaccgaattccaccagggcgcctccacgaggtctcaaggaaaagttgcaggaactcagtagcggtgtaggggcctgtggggctagctaggctctcagttggttgagcttgacaacaaacacggtcggggcagggaacgtgatcaccaacacactatgggtaggtacccatggaacttggacccaagaaatggaaatggacggggttacgagactatttaaaattgttctcgatttaagtatgtccc

SEQ ID NO: 612813 - DNA, 230 bp, Homo sapiens
ttatcctgagtcagcctcctgagtagctggggctacaggtgcatgccaccaccaccagctaatttttgtatttctagtagagtcagggtttcaccatgttagccaggatggtctcgatctcttgacctctagatctggccgcctcggcctccaaaagtgctgggattacaggcatgagccactgcgcctgggcaggagcatgtgttttctcatcttgggcctggatcgag

SEQ ID NO: 612814 - DNA, 218 bp, Homo sapiens
tagcagggtatgtgcgtataactaactgtaaccttaagctcccaggtcaagctggtcctcccagcttaagcctcccaagtagctgggaccacagacatgtaccaccacattgggctaattttcttttcttcttcttttttattttttggtagaactgtctcaccttgtggcccaggcggactctagagcccctggcgcaaaaaaatatctctggcctc

SEQ ID NO: 612815 - DNA, 149 bp, Homo sapiens
  misc_feature (24)..(24): n is a, c, g, or t
caggtgcttcaacatcgccagccnctgagctactggatgtgcttcacttctgcttccagttcactacaggtttcttttgtggcgaacttgggcctgggaaacataaagcagaaagaattctgggaagcacagttccagcttagatattg

SEQ ID NO: 612816 - DNA, 104 bp, Homo sapiens
cgacgcgtctctgtagggctgggatcctcctcctcctggtcttggacatcagaattcccggctctctgactatgggagctccaggacttacagcactgccccca

SEQ ID NO: 612817 - DNA, 158 bp, Homo sapiens
catcttagagatcccccggaagcggctactgtagatccgcttcttcctctgattcttctatctgtcagtcagtttctaactcagcgttagccactcgattcacctggaacatagtcttgccttttcccggatactctttgtggttattactctttctt

SEQ ID NO: 612818 - DNA, 894 bp, Homo sapiens
  misc_feature (58)..(58): n is a, c, g, or t
  misc_feature (108)..(108): n is a, c, g, or t
gagtaggctaggtacgaggccttgtgttaatcggcaccgaggcagtaatggcggagcncgcaactcccggaacaacagccacaacatcaggagcaggagcggcaagcngacggcggcacagctcccccaccccgatccccacagtcaccgccccgtccctgggggcgggcggagggggcggcggaggaggcaggggggggtggataaacaggtcacctgcaggtattttatgcatggggttgtaaggaaggagacaactgtcgctactcgcatgacctctctgacagtccgtatagtgtagtgtgcaagtatttcagcgagggtctgtatatagtggagaccgtgcagatatgaacatagcaaaccattgaaacaggaagaagcaagtgctaccagagctaactacaaagtcatcccttgcttgcttcctcaagtctctcatcgatagttggcccatttgttgaacttgaatacaggcgaagctgagtcaagaaattcaaactttgcaactgtaggagcaggttcagaggacgtgggtgaatgctattgaggttcgtcctgggcaagcctactgtgggcgtactgcgcttcctgcaatgaagcaccctgcaggctcagtgaccagggaagaatcagagaagagcaaaccgccgtgggacaaaggaagcaggtgtgcccctattcttgcagtgcgaagtgccgatacgggcgcactgtgtttcctcccgggatcttgtactgtttgcgtgaggtctggctccatggtttgccagaggacgaggtataatcggggttgggccctggagggctgggccatggggggcgcgaggacgcgtcgggccctgcgggctgaagcccgggcggttgagccccatgccccgttggcccgggggc

SEQ ID NO: 612819 - DNA, 211 bp, Homo sapiens
tgaaattaactcgttaaacacagtctctcacttgagctgttaacaattcacaaccacagtgtatgcacctctgcactcacaagaaaaacaatagatcatgtctaatcttggcagagtcctactacagatttttaacaacgagggaggtcagtccatttccttatagcctgtgtggtgatgatttgtacacatggaggtcttcaatgtctgg

SEQ ID NO: 612820 - DNA, 417 bp, Homo sapiens
ccccttaaatgcgcacagaagttagaggagagatagtgttaggagccctttggagaacgccaggtctcccaggccccctgtcatctatcgagtatgctatgttcacaatcatctctgatcttgtgctcagcatgattctttaatagaagttttattttttacgtgcactctgctcatcttgtgggtgagccagtgtaccagcgggagacctgtgccatttcaagggcacatacatttagctttgagtttttgtggccccaagcaactatggtgtaatccgtgcctttttgcattctccactgccctttttgtaaatgctagtttttatatactttttattctctacgtgacctttgggggagcctgagtctaacagtttagtttttctctatcactttctgtgcccgtctcaagggt

SEQ ID NO: 612821 - DNA, 738 bp, Homo sapiens
  misc_feature (738)..(738): n is a, c, g, or t
aatatcattcgatgggcagcacgagataaagaaagcacagttatctatagagaactcgtaaatgctagattcctgttcttcacgagaaacatagtagtgaaagaaattattgatggatgtctttgctgacatctagcaattagctcatattccatgagacagagtggcctacagaatgatttcatgttactctatccttctgaagctactcacttgatgtgtctagtacctttgaaactaagcttttctttctttgttcatgacagtttaattccaaatatttactattttctcttgtaactgttagaacagttccttttgacattaattctttgcctacatatatctttcttaagttgagaccaaatcgttgcaagtgttgagcaagtaacatttatgatgtgtgtcatattggaacaaatgtaaaagggttacaaagattagaaacagagtcatacacaccctggcttgatttactaaaggcattaacttattggtgctctatataatggcactatactttgaactacaaatttgtctatacagtatgtcagccattcttagtaacttctctttgaatcccattttaacatatctaatatttgtacagacttgacagcagtaccattcttcaggcccaattacctatccaaacttataataactttataaaaattaacacttccaaaaattacattcaccctagtattcaagaaccaccagcccctacactgctan

SEQ ID NO: 612822 - DNA, 834 bp, Homo sapiens
acccagagagcgttgtgtggttccccccacacaggccgctcccaggacacgccccgccgagggcatctgtgccgcgtacacacatcaaagagataagtggccgtgcccgcaccaccctctctcttacgtcccttctataggggacgcctcacttccaagagcatggtgtttctcacttaccatccccgtcgcgcaagaaaccctctttgataggggcgcgacacgctctcttgccgccggcgtagcgagacaacgactattctgtctcatcaagcgtgccacctctcgcgcgcacacacaagggagcgggcgatcctccccacgagcgctgccccgcgagtgaaaacgccctccatattaccttcgcccccccacccgcgatgggtatttatcgcccgcccgaccccgcccgcacaaggcccgcgccgcaggatcagcgctctcaacgctcgacgagggctagcgcccgagagccgccgccgcgcgctcacaaacagatatctcgcgtacgagaggaggcgtagccagccagctccccgggcatagatcccccaacacaacgaggagggaggaaacgcgcttcgcgagacaaacaagttcctccccgaccgcgcagtctcccgggccaccccagggcacggcacacaacaaacacagtcccgtgggctcgcgcagtggagcgtggcacatgccaccgccgcaaggcgcgcttcataaagggcgccgactttcggttccgttagcatcagggcatccccactcccctcgcgaaaagacaggaggacgttttctcgtggcacctggaaaaaaacccccgccccatcaaatgaacaa

SEQ ID NO: 612823 - DNA, 106 bp, Homo sapiens
tttccacagggtagtacctccctacagctttgtgtttttagccacacttaaaaaaaaaaaactggttatttaatcatccattcattctttaaaaaataaaataaaa

SEQ ID NO: 612824 - DNA, 819 bp, Homo sapiens
  misc_feature (344)..(344): n is a, c, g, or t
  misc_feature (353)..(353): n is a, c, g, or t
  misc_feature (362)..(362): n is a, c, g, or t
  misc_feature (364)..(364): n is a, c, g, or t
  misc_feature (366)..(366): n is a, c, g, or t
  misc_feature (504)..(504): n is a, c, g, or t
  misc_feature (511)..(512): n is a, c, g, or t
  misc_feature (533)..(533): n is a, c, g, or t
tggccgcatcgttttttattgcttacacatgatcaaatactccttacataattaaggagaacaaaatggaacttaaaaaattgatgggacatatttctattatccccgattacagacaagcctggaaaatggaacataagttatcggatattctactgttgactatttgtgccgttatttctggtgcagaaggctgggaagatatagaggattttggggaaacacatcccgattttttgaagcaatatggtgattttgaaaatggtattcctgttcacgacaccattgccagagttgtatcctgtatcagtcctgcaaaatttcacgagtgctttattaactgnatgcgtgantgccattcntnanatgataaagacgtcattgcaattgatggaaaaacgctccggcactcttatgacaagagtcgccgcaagggagcaattcatgtcattagtgcgttctcaacaatgcacagtctggtcatcgggcagatcaagacggatnagaaatnnaatgagattacagctatcccngaacttcttaacatgctggatattaaaggaaaaatcatcacaactgatgcgatgggttgccagaaagatattgcagagaagatacaaaaacagggaggtgattatttattcgcggtaaaaggaaaccaggggcgggtaaataaagcctttgaagaaaaatttccgctgaaagaattaaataatccaacgcatgacagttacgcaatgagtgaaaagaggcacgggagagaagaaatccggctcatattgtttgcgatgtcctgatgaactattgattcacgtttga

SEQ ID NO: 612825 - DNA, 161 bp, Homo sapiens
gggcgcgctgacaaatacatatacaaccgatatgggttggatgccttatccttatgcgtgtggggtgaggcgcggatcagcgtttcgcgatcggcccgttcgcgcggcagatcggccgtcagtttcccgtccgccatcaccatcacccggtcggccagtga

SEQ ID NO: 612826 - DNA, 391 bp, Homo sapiens
gaaggtaggtcttgttacattggtaaccacccgggcccccatatagtaaggtctatactagataatcctagatgaaatgttagagatgctatttgaaccaactgtggccatgactgaggaaaggagctcccgcccaaagattgggttgttttcccggaggccaaacccaaaaaggtttggcaaagtcagggtcagggagattttgccctgttgcagacctcgggggggacacacgctgcaaaaagctttccttgaaaacaaaggggtttcaaaacattttgcccccccattagcttttttttatttttttaactttttggggggaaaaggatttttgaaaagtttgtcttgcaagggatttaaaaaaaggaaaaaaagtttttccccttta

SEQ ID NO: 612827 - DNA, 202 bp, Homo sapiens
ggggccggaaactaatgtaagaagaatgaagaggtatgatccacacatgattacgaaagctcagatatgcttaaatacaaatttatggataagttgcagcccttttttcatgacatacaacttatacgcacaatgtgaatacctctttctttcctaaccttcttctgacgttcctgggttcaattattttatgtctgtgggg

SEQ ID NO: 612828 - DNA, 970 bp, Homo sapiens
  misc_feature (725)..(725): n is a, c, g, or t
  misc_feature (967)..(967): n is a, c, g, or t
ctattttaagagaatgtttctctctacacataaactgggctgttctgcgtgaggggaagtacaggctgtgagaaacaaaagtgcatgagccatccggcgttcccagtgtctgccgcagacccaaagttaaggtttgcctttaattttatcagctctctttacccgctattttgtagtaaaactcattttctattttcatcatatgcttctcagattctcactagtttgatagcacacgcatatacatcttttactgaaataatactttctaacgtaatgagcacttacattaatagcctaagcaccacccaacacacatccattcctctcagaagctccccagtccctgagcctagaggctcggcctccctcagctccaagtaattcctcctcaaggcaccagtgtggagggcatcgcagaacgcatccgccccagggactgggagctcacactggcagccctccatggggagctcccccttcagatctgacccttttctgattctctggccattgttctttccaccgcaatcaaacatgaaagagcgtttttgccttcctgttcttctctagaattgtgtttatttaaagtccttaagagaacatcaagaagtgaaagaattactattctcagtagtaccaccattctaagcttgcacataaacattgtctctcctgggaggaaatgcctggattacctgaagacccggtcagtgtgttgtggncaggtctcagcctggtcagtgtgtcatggccggtctcagccctggtcaggtgtccatgcaggtcagcctggtccggtgtctggccggtaggggccctcagatctcggcactcaaggcctctaaggtgtgagctccggtttgacgcccttaacgggccggaactgttacggttagcccacgggtcgggccaaccgttgaggccaatgggctttcgcctcctattttcctgtggctggttacanaca

SEQ ID NO: 612829 - DNA, 264 bp, Homo sapiens
tatggtgtgtagttgcaagagtttgtgaaggtttttgacaattattttagccttgtgaagtattcgtaattgtaacaatgcctttcagcgatggtacatgacattgattaaacatctggttctgaacttacacactgatgcgtagtactcatcaaacataatgtgacaggtcctcagcaagggagccatacatttttataacattctgatatgttttaatgcatctgagttagattttactgaaataaagcactctttcaagga

SEQ ID NO: 612830 - DNA, 168 bp, Homo sapiens
  misc_feature (74)..(75): n is a, c, g, or t
tcgactctaaggacttcaacacgcatctgattattattggtatattgaagttagagcatgatcacatatgtatnnaggcattgaaacactgtcatcttcttattcacttcctgtcattgaatcctagattactgaggagactgcccctgtgggaggtcctttgtgggt

SEQ ID NO: 612831 - DNA, 275 bp, Homo sapiens
  misc_feature (55)..(55): n is a, c, g, or t
  misc_feature (66)..(66): n is a, c, g, or t
  misc_feature (84)..(84): n is a, c, g, or t
  misc_feature (87)..(87): n is a, c, g, or t
  misc_feature (99)..(99): n is a, c, g, or t
  misc_feature (146)..(146): n is a, c, g, or t
  misc_feature (162)..(162): n is a, c, g, or t
  misc_feature (212)..(212): n is a, c, g, or t
  misc_feature (218)..(218): n is a, c, g, or t
  misc_feature (223)..(223): n is a, c, g, or t
  misc_feature (242)..(242): n is a, c, g, or t
  misc_feature (255)..(255): n is a, c, g, or t
  misc_feature (258)..(258): n is a, c, g, or t
cccaattttaaaatggttcaggcccccatagctttaggggatgaagaatttgccntactttgcccngttcctaagactgtgagntgncaaatccctagnctgtaagcttttcaaggagcaaaaggggcattttttccgggtcatgnaatttttttaaggggnttggcagccctttggaccctgtggaggactcaggaccttttgtttgatgntgctgncaagncctgaaaaaaaatcccttnaaaaaaaaacccnttnaagggtagcaaaaccga

SEQ ID NO: 612832 - DNA, 559 bp, Homo sapiens
ctcccaaatcgtcacgcagatgtatgacctgatccgggcgttcctagcaaaactgtgcctctgggagactcatttgacgaggaataatctggcccactttcccaccctgaaattggcttccagaaatgaaagcgatggcctgaactacattcccaaaatcgcggaactcaaagaccgaattccagaaaaggctgtcctgatttcaaactctacgaaagcgaactgactctgttcagctccccgttctccacgaagatcgacagtgtgcacgaggagctccagatggaggttatcgacctgcaatgcaacacggtcctgaagacgaaatacgacaaggtgggaataccagaattctacaagtacctctggggtagctacccgaaatacaagcaccattgcgcaaagattctttccatgttcgggagcacctacatctgcgaacagctgttctccattatgaaactgagcaaaacaaaatactgctcccagttaaaggattcccagtgggattctgtactccacatcgcaacgtgatggagagaaaactcctggcagggcc

SEQ ID NO: 612833 - DNA, 221 bp, Homo sapiens
agttgtgtcctgcagactgcacaggaagcaatgctatctgctctgggtgaggcctccagaagcttaccatcatgtgcagaaggtgaaggggagccacgtgtgtcacatgtgtccgagcagggagtaacgagagagaagggggccgtcccacggctgtttctaacaatacagatctctatgaactccctgagaagaactcactccagtggattgtgctaaat

SEQ ID NO: 612834 - DNA, 218 bp, Homo sapiens
gcagttgtgccgcctctgcctctcctgcccccggcacgctccccccctgggccgtggcccccatcgcaggctcccctccgtccttctcgcccgcgtcgcgtcctgcccgcccctggcgcactccgcgcctgccgccgccgtttttttttctggttttcttccccctttcttctttccgcgtttcccgcccctggcctcctgcacacctggtcgcgctt

SEQ ID NO: 612835 - DNA, 620 bp, Homo sapiens
  misc_feature (490)..(490): n is a, c, g, or t
  misc_feature (544)..(544): n is a, c, g, or t
  misc_feature (555)..(555): n is a, c, g, or t
  misc_feature (570)..(570): n is a, c, g, or t
  misc_feature (593)..(593): n is a, c, g, or t
gaaattcaattgagactacccacagtaggatatattatgagcttcctgcctctattcctttgtacttacttaccttttgcttgggcaaatattaacagcaatggaatgaaagtgagagaaacttaacaagttttaccttagagcaaggtaaagctttaaagagagcatcattagagcctttagagttcctcctttgctgtgtttaattcaaatattagttgaaataaaaagcagtactgagttatattccatcaaatgattcttcatctttagaaaacactaagacaatttgcctgaactgaatgtttaccagtttttattgctactcctcctcctctctccaaataaacaaaacaaataaatatccaagactgcaagattacttcatcttccacaggtttgcatgtacaggcatacctcggagatagtgtgcacttggttccagaccattgcaataaagtgaatactgcaataaaatgagtcacaccantttttttggtttcccagtgcaaagttatgtttacactgtattatagtgtattanggcgtgcaaangcattatctcaaaantgtacatacctttaatttaaaantactttattgttcaaaggtggctatga

SEQ ID NO: 612836 - DNA, 937 bp, Homo sapiens
  misc_feature (69)..(69): n is a, c, g, or t
  misc_feature (125)..(125): n is a, c, g, or t
  misc_feature (176)..(176): n is a, c, g, or t
gggtggctgggccggggaaatggcggcttcagcgagagagcgggacttcaggcggcggaggcagcaccnaggaagcatttatgaccttctacagtgaggtgaacaaatagagaagagagactcgnttctaacttcgaaaatcagattgaaagactgacccgtcctgtcctctactncaatttgacccatttgagttcttcagatcagcatcctggacagttacagatgcacgcaaataacacaagcaggtttcggcagttatccatcttggtgcatcctgacaaacaatcaagatgcatgctgacagcagcaccaacacggctctttgaagctgtggacaacacgcttacaagttgctacctggactcaggacgcaaacagacagacgggccctgtgatgtaattcacggcacggacacagaatacgtggaaccagcacctgtgacaagaaggcgacaaaaacaaaccatacttaacagaacggacacggacacaacctagcaacttggtacgacggaacggactgattcctgacgactggttcaatcaaccaacgctggctctactacaacccggacccactgaatacctgctcctggcacgacgcttggcccacctctcccgcctcggccacgacgacgacgacacgcccacaaccaccacttgccttgacacacggcaacactgaccccacgcggccccgacccgacgcctcgcaggctcactcgcaaactccagcggcacatcacgctgccaccatcgatgcaggtgggcaacagacaaccatcactctttgtctggtcacctgttccgacaccttggctctcgtgctgcgccctctgactggcgtcctggaaacggtcccacaatgtccacatagcgaaccggtgtgaatgtacaacctcacgacgctcgacacttcgcgagcctgttcccg

SEQ ID NO: 612837 - DNA, 908 bp, Homo sapiens
  misc_feature (8)..(8): n is a, c, g, or t
  misc_feature (73)..(73): n is a, c, g, or t
  misc_feature (130)..(130): n is a, c, g, or t
  misc_feature (136)..(136): n is a, c, g, or t
  misc_feature (138)..(138): n is a, c, g, or t
  misc_feature (147)..(148): n is a, c, g, or t
  misc_feature (154)..(154): n is a, c, g, or t
  misc_feature (164)..(164): n is a, c, g, or t
  misc_feature (167)..(167): n is a, c, g, or t
  misc_feature (244)..(244): n is a, c, g, or t
  misc_feature (317)..(317): n is a, c, g, or t
  misc_feature (321)..(321): n is a, c, g, or t
  misc_feature (339)..(339): n is a, c, g, or t
  misc_feature (423)..(423): n is a, c, g, or t
  misc_feature (427)..(427): n is a, c, g, or t
  misc_feature (432)..(432): n is a, c, g, or t
  misc_feature (522)..(522): n is a, c, g, or t
  misc_feature (530)..(530): n is a, c, g, or t
  misc_feature (780)..(780): n is a, c, g, or t
  misc_feature (828)..(828): n is a, c, g, or t
  misc_feature (839)..(839): n is a, c, g, or t
  misc_feature (869)..(869): n is a, c, g, or t
ggggtccngggggggtggggggggggggggtccatacccagtccttggagttgggcagggtaggacgctgggnaagggcagtgctgtctcttgcttacagcctgggggctgcgggggcggcgggtgtggnctgggngntcccaatgnngggggnttgggttggngcnccatccccttcctggctgggctctttggagggctcttaaaggggtgggatggggtgcgggcgaggtgctttgggggntgggtggtcaccctattcctgcttaggggtagaggaagaaggtgaaggcggctaggtgcccataagagggggntggngcaatcttcattcccgcnagtgtgatttcagtctcaaaagatgtgtttttggctgagaaatggaagggtactccaggctccctacggtgttgtgctggggcnttgntgggntgcccttgctggctgccctgggtgctgggggcgggcatgcggggcactggggagggtcagggccgcgaggtggggggggatctcagagcncaggctcnccactgagcttggccagcgagctttgggctccttctgaggggctaaaagtgaaggaagatgacatcctcatttctacctgagttgtgctcgcacgggagggacatctgtactcctgtggatgagaaggggaggccgcatacttgcctcctgtgtcctatggaggagatttccatcacatcctttccacccctccctccccggcccttgggcccagctctggccaggaaagtggggaggccataaaggagnaagaacatgcctttcattttcttcctatgtccttatcgtccatacatnccaaatactanggagctgaagaagacggtgactcccaccanggagacagtggcaggtgctgtgtaaaattggcggtaatt

SEQ ID NO: 612838 - DNA, 118 bp, Homo sapiens
cggagatcgcgccactgcactccagcctgagttgacagactgagaatccattctcaaaaaaaggacaaagaaactaaattgcttgtctaacagaagtggtctcctggaggtcttctga

SEQ ID NO: 612839 - DNA, 396 bp, Homo sapiens
ttggtctcaccacgtcggcaggctggtctcgaactccttgacctcaggcaatccgccggcctcggcctcccaaactactggggatcacaggcgtgagccaccatgcccagccggttggtttggtttttggggacagtctcacttttatggcccagggctgggggtgcaaaggcacgatctcggctcactggcaacctccccttcccgggtcaagcggttctccggcctcagcctccggggtagctgggattacaggcatgcgccaccacgccagtctatttttggtattttaagtagagaccggggccttctccatggtgggccaggtgggtctcctccggacttcaggtgatccggctggcctcggcctcccaaagggctggggggtaccgagct

SEQ ID NO: 612840 - DNA, 325 bp, Homo sapiens
gtaacattcggtcacatcaaattcctttaacttagtttcttagtgggtcccccccacacgcagatatcataacttatgagtgtaactacagttccaaagtaccctcatttatatggttttcttcaatttttcactacaaatttctgaatgtttctaaattatccttgcaaagtcagaagacaaattagtacagtcactgggattaaggttgagaagctagtgcttttcctgacaatgatgcctccctagttcatagtcatttgtgtctaggagaaaacatatggacagaatgttcaggacagaatgttcaggacacgaatgttca

SEQ ID NO: 612841 - DNA, 1238 bp, Homo sapiens
ttcctttttcgtcagtagtttttgtgtgaaaaagttactttgtaatccaatgccttcgtacctattttgggttggcttctctgggattttgcgatgtgaaaaggctctgcctgctgatgccaggtcccttggttgtgttccagcgtaaacgttcacgtggtggggtctcattttgctctaggtttttgtctttagcgaaggcccttgtagcccagaatatgtgaaagatcatggtggatggaaaggcgccctgaccccttttgagatgggcgaacgtgagaaagacgtggatgtgagatcgacgggcgttctcaaacagtatgtcaatagagggcttcgacgcgtttgcaatgcaacatagtcttaaatagttgtaagaggattgggtaaagtgaaagtcgtggttatcacagaactcgtgatggtcatgcgtaaatcaggcacgtctactacacgggcattatgacgcatatctgagagcgcacactaattgtatcaatgccgtgttgctaggactttttaccacagtactcaagcatagctcatgtgattagagaaacctctctgtaatactgtgtgaaattgcacgagtgtttgttctgacctttgcgtgttttgcacccgaatttctatgtaattgtaggaaactccagtttgtatcattattatctgcggaaatatttcttgtctaaaagagtgatttctgtcttaatcgcaatttcgttggtaataccacatgtgtgcaaagttagtgaaatcttagtaccttaacttcaaacatttctgcttctacgaataagtgtcccattattcatagagatctcgagactaactataggttcgattggatatgatgtatgtgtgtgatagttgtagtaagctcttctactattattagggtcaatgttaatgggcaacgtcgataggtgttcgtgtcgtagagtagacatagactacgtatgttatcaacgactagtcaatgtgtgtctatgaagtggtatgattgatgaattctatagtttgatatgtctatttaagttatcctgattctcttaaaagtagttatgtgggagtacgagagcaacatcaatataataatatttccgtgtaatagccaccaactgttcaggcataggttttacttacaactgttaaggaggtctttgcttcttctttagataacaaacttgtttgccctaaagaatcctaatttgtacacttaacatgtattaacttcg

SEQ ID NO: 612842 - DNA, 446 bp, Homo sapiens
taccgagactcagggcttcctcgaagaggggggagactctaaagagtatggacacccccgattcgaaggagaggacggccgtaaggaaggcgccgatgcctgcagggccaattgccacctacgagaccgtacagtgtatcaaaggcggacacggcctcaggcggggtttcgtattacttctctgaaggcaactgcaagtaagatacctcgttataacggctcgttaacgatctcacgagtaggcctacctagcactaaaagccagttccaagcgtacatgcgacatctaggtgaccactctgatgtaactggggggaagccagctgcatcccagtgcggactggaagcacgctactaaacgacatgacgtgagaatggctaatgtgctccagagcgacgtctacaaccagtgcgctcgggtccctgatagggagcttagtcgggct

SEQ ID NO: 612843 - DNA, 816 bp, Homo sapiens
tgggcaaggcggccgcgatggctcgtagctcgggcggtggcggcggtggccggaggcggtggtgcctcctcctcctcgccccggcgccggcggtgatccgagctgagcggcctccggcccccgatgagcactgctggcgggctggctgtgccctgagcctggctgtccgtgtggctggcgcggaggatgtggacgcattgcggatgcccagcaccaccccggattcccgtgataccgtgaaacattgaacttatgctggcccaggagatgtggccctgtcagggaatggcacctgaggaggacggcgcagcggaaggggacgaaaccgcaactcaatgatgcgatactggttgtggcacacacgacagaaggaacaaattcacctggcgagaaattcaaccttcgaaggggcttggctccttatggacagccagagaagatataaccccttgcaatccaactgggaacacaaccaggcatctctattctttatagcaaccaaagaatggccacttttgaagcgaccaattcggactgcttggggcactaatactacattccgacacgtttaatttaatatccaatttctccttatacatggggttggccttaccagatacggtggggatatcacaacacagcccccatgagtctttgacaaattggcttcctctaaggaaacaccagattctttaacgtccaaaacgtgggcggttttgagccttaagtcggcacatcggaaagtgacactcccaaagtgggtagcacagggcgggattatacggccaccccgaggaaatttccagggtgagtcca

SEQ ID NO: 612844 - DNA, 452 bp, Homo sapiens
actctagccggatccttatctggccagcacgaatctcccggggttaggcatttgtcgtcaccgccagatgcctgcgccgtcgctgatgggctagtgcatgccctgctggaccttcggttagggcaaccggacttcaaaggcttcggcatacgtgaagagaacggcgagaagtacttggcgtacgaattccagaacccgatgccggtacgcgaactgaacatccgtggcgcacacaaccagtccaatgccctggcggccttggcactcggtcacgcggttgggctgccattcgacgccatgctcgcgagcctgcgcacgtatgccgggcttgagcatcgctgccaatgggtgcgcgatctcaatgaagtcagctattaacaatgactccaaagccaccaacgtcggtgccggcccttgaggccatcgcaggcctgggtgccgatatccgacgg

SEQ ID NO: 612845 - DNA, 1191 bp, Homo sapiens
cgattggttgtcactgattgctccatggcctctccatttctgcttcctcgtcactggagtttcccgcttggttctgcgcttctttggtcatttttttcctctctgtatatcgccttcttttttcgtgtacccgcgacctggggccctgcccctcccttccgcttggcggttttatttcctttttcgcgccagctggttccctcgtgtatgtttcctgtgctctcttttattcatgtccgtcttctgtccttgtccccccgtagtaggtcttcccgcctctgcggccttctctttgtgtggactgtctctctcggattgtgtctcccctttttcggtgcctcttcagatacgggtggtcttgtccttttcgtccttccggggtagatgtctgcataccaatctgcactatggtctcgcctctgtcgcccatggaaaatgtagtccttaactgcataactgttaacgtctcttggtcctggtgctgcctctgtcccctggtgcgcgtctaatttctgatccctctttgtgttgtaaggtccaatccaaggtctctggtcacaggcccatgggtcatgttgatcgggccaccccacctacgccatcttggcgcccacatggtctcctgtccagtcgccatgtatccacctcctggtcccggtctccgtgtatctggcattctctggcttgatggtcgcggtgcacaagtgttacatgcgtgagtatcgtctctctactatggacttgccccgtgggtcgtggtgcagtgtgcatatcccgagcggagcctccagtcgtgtaccatctccgtctctcccggctttccgctcctcgtcgggtgccccactcgtgtgcttcttgtgggctcttcagtccgggaacccctcttcgggaagtatgaccgttgttacagaagcatcatccctcaccgttccgccgccgaactgtgcacaggcacaaggcatggctcccccatcccgcgtctgtcattctcgtgtcagtccgtgcttgatcactgggacgccatctgagctcccacagggatccctcgaggccccatcaccgttatcgcgagacccttcctaccccccattcctgcggcgctgggatctatttttgcccaatggggggggatgggcgggctggcgccaccgaacctgcacataatccacttgatctcaatgacagtatcat

SEQ ID NO: 612846 - DNA, 181 bp, Homo sapiens
ctggcaactaaaatagatggaattccaccattctgaattttttcaaaaaataaataaaatcacatacagttaaaaaaaaaaaagaatggcgaaacacatttgtcagagattacttcaccggtgttcctttaaaggtcttgaaatttggccaggcgcgattggttcaccggcaatttgaatt

SEQ ID NO: 612847 - DNA, 244 bp, Homo sapiens
ccatgcttacgagatcgaaagggacatatatccacacatgccacacagcagcacataccaacgcacagcacactccaacgcacagcacacacgcaaagacagcacacacagcgaggacacggcacacaaccgcgcaggacacgcacccacgtgcacgcacagcacacacactagcacacagcagacacaccaagacacagtacacatggaaggcacacacacgactaggtaggcatgacagata

SEQ ID NO: 612848 - DNA, 448 bp, Homo sapiens
caggctagctcctccgcgcatccacgttcaaccgaggctggtgatgttggagcggccaccagggggcgccacgatgcggtggccggtgcgcctgggattgttgtcatctatctgggcacctgaaagagagcgccaatcgctgctggatgggatctgttagcatcagttccacgctgctcctggaggccatgtactctgccatgcactccaccttagcagaagtcgtaaccccgccccatcttcaggtgttcgccactggacccaccttcattcagggctcagtccaggaccagccatgggaagcctccctggcctccacagagtccactgctccctcttctgtgcccctcagtccctgggctctcccccccttcagccctgaccaccttgtggtgttcttgtcaaaatccccagtaaaatccgacattcctgagacaggtgatcaaac

SEQ ID NO: 612849 - DNA, 532 bp, Homo sapiens
acgcacaggcccttagtcacgtaggtccacgtgatgtcgctttcctaccgtctcaaagcaggttcatgaaagcattgaacagagttcagtcttcattttacacaaaaaaaaattcctaataggggctaaaatctggcaaatttctccattcgattacaatctacaaagataagccagcattcttttctctttctctctttgggttacttttcccctatccctacgggtggacagattaattctttcacacaggtttcaaagcaaatacattatgtgggtttctagtgtatggtacagaatccattctcattcttaagtggctacattatgactcatgaggcagggcagcagtacaggtgcactctcggtatactggctgaaagtcttctggtacacatggcttttggtacccgtcgcttcgggctatgtatcttccggtactctgccctcgtctcaaagtatgtggccacctcaattaatcaggcagttgatttcacatggtgtcgaatactcagggttgatgatagactgg

SEQ ID NO: 612850 - DNA, 291 bp, Homo sapiens
gtctggaactttcaacccacatcaggatgagggggaatgggggtggatgtcaagtaagtattccctggtcctagtgcaaccctaaagcctcgaaaatagcacgcttatccaacctgtctacagaacgcttagattgctgactgtgtaagacctggagcggcttgtccaatccttgtatgagatcttgacctcccgcgagccaacatgtgggttgaagcatcagggcgattagcagcttgatttaaaaacgctctgaacagatcgatcggctatggcgtaagcctaaatcga

SEQ ID NO: 612851 - DNA, 265 bp, Homo sapiens
ctagtgggctaattttgagggtaagaggacactctagctttttgaatttgcagagttcttgcactgattttttctcttctgggtagggttagtgttcctttaactgttagtgtatgttgagtataggcaattggttttgtttctgggatgctttcaaagggttcagggctttctctgtccaggatttttatgtatgcgtaattcttgtttttggtttcacaggtgtatatgtagcaggataaattttgatggaagcgtcgcgcat

SEQ ID NO: 612852 - DNA, 993 bp, Homo sapiens
gcctaatcttattacgaaacagtagaatgtctcatgacttcataatgtgtaccatcctttagtagatgctcataccaccagaattcagatcatgaattgactgcacgagtactatttgtcggcgcagtcctgatttaaaactaagactggcttgtgggttgaatgagtatgtacaggataggaattcttacatagtatagctccgaaattcagtgaaatggtagtcaatgtggatacgccattgtaagagatatgattagacattctgctagtgatgttcaagcattattcacaaagatggtgagtgccatcttgaaacttacgggagatgggatttatatttagatttgatataacggggttatgtgaagtatatttgagatagtggggaaagttgcttgcacgtgtgcttgagaacctaaggcaagatgtgcaactgtgttgtagtgttcagtagttcattaagctgcttaataggccagggttgacatgatttgataaggtagcaatgtgtatgagttttggcttgggtatgccaagtctaattataatgccctgtatagataaatggtttctgttactgattggaagggatataggggggtaggtgtatattgaagattattcaaaggctcacatctggacagatctgtaagggtcacatgcgtttgccagtagttgcaagtccagcgttcctcttgagttccgtttcacgctagttggcctaaggtagtagtttaggagtgctctttagaacggctttgaactaaaccgttgagcgccgtttaatgcggaaggggtttggccgcttgatagaaaagaggggggaatgcaccttgacatcggtggtgcgcggctacacgcgtgtgtagaaaagggggggggaataaccgggcgaaagcacccctttgtaaggtccgaggggagtataaaacgcgtcagcgggaggcaggacgtaccgcccttttgcggccaaacgcaatatgtcgttcg

SEQ ID NO: 612853 - DNA, 167 bp, Homo sapiens
atgtctccagagctcatgacctaccagccttgactctatacttcagtgagataaacgtctctccatgatgcatccatataattctctctccgagtaactcagacagacgaacctttccccagtgcctcggatcaggatcccctatttcgccagaacctcatgtcggt

SEQ ID NO: 612854 - DNA, 238 bp, Homo sapiens
ccattcctgataataaaactttctgtgaatctgtaatactattcaaaatgaataatttctttttattagagacgtggtctccctatgtcgcccagagtactcttgaactcctgggctcaagcaatcggcctgccttccatagtgctgggattacaggtgtgagccaccacagtcggccccaatattcttttaatatacatctcaacgctttatacttctgccttagacattgttcaat

SEQ ID NO: 612855 - DNA, 412 bp, Homo sapiens
ggggagagagagagagagagagagagagagagagagagagagagagagagagagagagagagagagagaccccgtgtgtgtctcggaggctgtctctggtgtgtctgtgtgtctgtgtttttccgtcgtgtacagcagctgtagtgggagatatatcttctgccatctcatcttatcagggggcgtcgtttgggagcaaaaatagagtagttgcagctacttctatctagtgggtggcggctcgtggtagtgcgtaggaggaggagacgcagcagcgaccctcctctagcggcgctctaagcggcgtgggacgccgacgctgctgacccacacatcttcaccacactagtaggtgtcttccagctgtagagaaccgctggggtgctgtagcagagaatcgtcgagttgtcgt

SEQ ID NO: 612856 - DNA, 422 bp, Homo sapiens
aaatcgagctcggaccaagtatgacatgaggtcaaagatacttattggaactttaatacctaacaacgcccgctaagtatggacttacatggggcatatagccctttcattgtgcccaaattctccctttagtaatgagagtatttagcaaagtgcctgtatccccatagtatctttgaagtaaccaacatggttttgattttacactactcataggtggaaaagactagccttgtctctgatgagactttggacttttgagttaatgttggaatgagttaagagtttcggggactattgggaaggcatgattggatttagcaatgtgagaaggacatgagatttgggaggggccaggggcagaataatatgattcaaatttgtgttcctgttcaaatctcatgttgaattataattccaat

SEQ ID NO: 612857 - DNA, 262 bp, Homo sapiens
cacagctaacatcatggcagcaccttgactccttcggctgtgagccagcgccaacattggtctttgcaggccccctgactgtcgtcattgtgttctcgggctctgttcgttctgttcttgaggtcctttagttgacatacaggcgatgtcttgtaggactacgcgccggttcatgactgtctgcctgagacaacgattcatatatcatactaaagcgaattgtatagcatgcaccaaactgaggtctggatacaaacacaaa

SEQ ID NO: 612858 - DNA, 197 bp, Homo sapiens
tcagccttatcccaccacagaatttcttatccgccgaactaacttttataagcacaggagaaatcacgatcctttccagtaaaaagcaaatgtgggtgggcatttgttgccaacagacatatcgttacaataggtattaatattaagggagtactaaacaaggaaatgaattattgttgctagctgaataatctcaa

SEQ ID NO: 612859 - DNA, 187 bp, Homo sapiens
tcgaacagataccagcaagttggcactgacttctgaatgtctgctaggtaccctggtctagagtctcctctgtgtttacagtttgttctggctgagtcacaactgtttccaaagatactcaggagtagtgatttccctaagatgtttttcaagaagtatacagtaggaaaaattacatccagaatat

SEQ ID NO: 612860 - DNA, 145 bp, Homo sapiens
tctgagtgtgcgtcgtgtttacaacgcacggggttatgtatccaacgagggccaggcccgggctgatgaaagaccataaaggggagcagatattaccaagaacgtaataacaaaagagaagaaaacaaagccaaaaggagagaag

SEQ ID NO: 612861 - DNA, 479 bp, Homo sapiens
atccttccctatctcacggctctcccctgtcacgaaataattctgataacgacacatggactttgagaccctcttctattactttccatatgctaatccatctatacctcacagcagccctgggggtgggtgcaatgaggatgcccattttatagaggaggagactgaggtataaagagggtaagtgacatacgcacactacaggggctggggccaagtgatcagagcactcaatccccaaaggcaaggtggatgcagttaccataaaagacagcagagtcaaagctgcaaccagaatagcctgactcgcagcgacctatggtgcctgttgatcctggctttcctagaagtgaaatagataagaagcctgccacatttttactggaactgtgtttgcagaagtggtctaggtcaagtgagcagaagtctaatctgattaataaaaacagagtcacagtccccggtcaatttccagacat

SEQ ID NO: 612862 - DNA, 398 bp, Homo sapiens
  misc_feature (1)..(1): n is a, c, g, or t
  misc_feature (19)..(19): n is a, c, g, or t
  misc_feature (108)..(108): n is a, c, g, or t
  misc_feature (114)..(114): n is a, c, g, or t
  misc_feature (146)..(146): n is a, c, g, or t
  misc_feature (148)..(148): n is a, c, g, or t
  misc_feature (163)..(163): n is a, c, g, or t
  misc_feature (165)..(165): n is a, c, g, or t
  misc_feature (168)..(168): n is a, c, g, or t
ngcggatatgcaaacactnacgggggaaatagggctctagaaaaccggtacacacccgcatctcttaactaccatctgaactagttagtgccagctttccatggtgtngtgtgntgggtctcataactaggtggagtttttctccncngctgaggaaaccgtncnaanttcttttccttgtggcatttgtattataaaacttggtgtgggggaggagccaaaactccagcccatgaacctctgcccaattaagatggtgttgggttaggttacatctggttactgtcctgggaaatcatttttatagagatggccttccagtggttttaaaatttactgaagtttttaggtcaattatgtatgttgactaaatttacaaataaacttgtttatccaac

SEQ ID NO: 612863 - DNA, 344 bp, Homo sapiens
  misc_feature (324)..(324): n is a, c, g, or t
attctagaggaagaagggaaagcaaaaacacagatgtacagttacatacaagccattctcaaccagactgctatatagtcattttccaattgctttgaaatagtgtccagataaaagtaagactttcactctgccttgcaaaagcttgatgtagtaatctacccaccataagtaagcctccttgtatcttttcactgtacaaatctgttcaaaataaagcttcaaatggaatagttcaggatgtgtgcggcagttggagttggtccctcagcagcaaatagtgatgtgtgctcatgaaaactggatgcacaattgcaaaccctngagtcctgaggaccctctcc

SEQ ID NO: 612864 - DNA, 785 bp, Homo sapiens
ccacgcgtcgggaggaggaagatgaagaggacatggaggaagaggagggggtccatggtcccccagtaccaactggctgtggacgactcctcagacgaaggggagctgtttctgaagaaatcaggaggactttgagacatgaagtacaaatttcctgtttcgcaggagccggtactcagtcatcgggtcaagacgctaccctacgcagcgatctgcgtcctccgtgcgccgtaccaggatgagctgctagaataggagaagtagggaagagactcgggtagcgaatagaacgagggacgaaatgccaagaaccgggaacgatgctctaacgcagtctgtaagaacctgaagcaggaaggagattctggccaagctggagaagctgcggaacgtggcaggcgcacgaggatgctgggcctcgaggagggggaccttgaggacgacttcgacccatgtcgccagcacgaccagcgtctatgcacgaagtgctttggggacgtagtactactggggcctgtgcgaggacggagaagcgctactattgtgacgtgaagaacgaagggcttgacgactactgtaactgggacacgtgggacgggcctgatcaggagcggagactggagccagtcaggagctgcactgtgaggacccctaacttcaacattggactgccgactatcgaccctagtccagggcgaggaaggaagagaatgcgcgaggacccccttgactgggcaagaagaagcgcaagtcgcccttcgccgcggccgtggggctaggagaag

SEQ ID NO: 612865 - DNA, 334 bp, Homo sapiens
acgttggcgcagtccaggcacggcggctctgctcgtatcccagtacttgggaggctgaggtgggaggatagcttgaggccaggagttcaaaaccagcctaggcaatatagtgagaccttgtctctataaaaataaaattagccaggcagggtagcacatgcctgaagtcctagctattcggaaggctgaaaaaaaaaaaaaaaccccacaacaaactgaagtttagcagggctttgacgcacttttatagtgattcctcggtcttactataacattccgggtgaactgagggtggtgactattcccatttttatacttgaagaggatgtagaga

SEQ ID NO: 612866 - DNA, 396 bp, Homo sapiens
tgttttacgtatttaactcacttaaactttacagtaaccacataaggtatgtaccattaacattcccaatttcaaattggaaaaattaaggcacagtgagctttcataatatgttgaaagtcttgtagctagtaaatggtatagcagggtcagttcccaacaggaagaagtgaagggtaggcaaagtgtagtaggtacgcactatatattcaatagatcacactatggattacccacattatctaataatcaaggtttggaagtattggaaggcttgtttttatgaaatgctcattaatgcattctacttcataaactgaatgttggcagtggaattttattccatcagcacatttgcatataaagttctttaaatttactttttttaaatgcaaa

SEQ ID NO: 612867 - DNA, 1006 bp, Homo sapiens
acaagaaaggcgttttgagcccctgtgctcaggcccactcccacactgtggagtgtactttcattttcaataaatccccttattccttccttgcaaaaaaaaaaaaaaaaaaagccttagccagaatccaggggctcacgccgtggtaactcccaacactttggggaaggcgagacggacaaccgcgatacaacgcacaccacagacgaccaccctagagcaccaacccacgacccacggcaccaacccaagcccacagcacaccaacaacacacagcaccgcggcgcacccagacaccgcacgacgaaacacgcgcgacgcaacaagcagagaggagagcgagagcgaacgaggggagcaagagtagaaggaggcgagcaccgcggagcacggcccgagcgagaggagacgaagaggcgagagcaagggagcaggagcagggggcagtgagagaggccgggcgccggcgacgcgcgccgagccggcggagcgggggatcggagggcaggcgcacgggagagacacgcggggacgagacgagagaaaagcggcaaggagagcagacacgacaggaagcacacagagaagcggacaacgcgggccaggagcgcgagcacgaacgacgtggcagcggacggacgacacacagacaggcgaagcgagaacccgaaaaggggagacgacagaagaggaggacgggaggaagccaaagccgagcggagaaagcggcaaggaagaagcaagagacgaaggccagagaaagggcggaggggagacgggagcgaaccggagacagcaggcgagaagccgcccgcccagagcacgacagcagcacacagcacgacacgaccagcagcgaccagaccgaagcaggagcggacggcatcgacccacaacacgcaacagagcagggcgaacgagaggacgaaggcaggagcgacagcggaccgcagggaacgacgagcacgacgcaccgaaaggcagacgaagacggcgcgcgcgtcc

SEQ ID NO: 612868 - DNA, 212 bp, Homo sapiens
tgacttgtttgcccagctgctaagcttcaactttagcagacccgctggattgagaaaattcagttgcaaatgctgtagctggatggttccggcctgctcaatttttgggaaggccatgaatcccgccagaatgccatcaacttcgacaaagcggcctgacgattctacaaagaaaaagtatgaatcctgagatataaaaccctctgtatcct

SEQ ID NO: 612869 - DNA, 186 bp, Homo sapiens
gggcgggcttgggtttttgtggtttgtttcttttcggtagtagttgtgtgtgctcgttttttgttctggtttgttatatctttgtgggttgggttttccttttgctgcatttacgcgtccttttcccctttggggcccttagatcgaggtcacagttgacaaagcagctggaaacgcggccagaat

SEQ ID NO: 612870 - DNA, 690 bp, Homo sapiens
cacgcgtcggtgaagcttgaggtaggatgtgggaatgggcttggagtcataggcgatgagagggacattaggatattatgaagcccgtgaactcaacttctgagaaggacacagcagagcgagagaaaaggtatcttcaaaagaggctgatgttcagtgggtacgggcttttcttttgggatgaggaaaaaaatgttttagaacttgtgagaggtgttggttgtgcagcatcgtgaatggactaaatgccaaagaatcgttcactttaaaatggttaattttatgttgtgtgaatttcatcgaaaacaaaaaaataaaaagggtgaatcccaatgaacccgggtcgtttacatttcagaagctctaatgcctaactcagggttgggctcagagtaaatgcttactaactgtttatggacaagaacaacctaacattggcacagtcaacaaagctcttggttatacattagctcatttcattttctaaagaatcctctgaggtgggcaggggtaagcatcctcgtgtcgtacaggggaaactaaggctttgagaggagtgtggcttgccacagtgtcccgctagctagtggcagcactgccagaattcaaacccaaaaagtctctggctccaaagtctgtgctggtcaagcgatactatttgggctacctcaatggttccagagggacaga

SEQ ID NO: 612871 - DNA, 184 bp, Homo sapiens
tccgccaaggaaggaaaggaaaaggggacccagtccctccctccatccttccaacatatatttattgaggacctactgtgggccaggggctggtgggacagtggtgacatagtttctgccctcataaagttgattgtttagtgaggaagccaagcctttttaaaaaataaattttaccttccca

SEQ ID NO: 612872 - DNA, 602 bp, Homo sapiens
  misc_feature (55)..(56): n is a, c, g, or t
  misc_feature (229)..(229): n is a, c, g, or t
ggggctccaggggggggggaggggtgttcccgggggttttccagctccccccccnnggcgctgaggggtggttgtgggccaaaaacggggggttcctaaagtgtgtaccccccccccccttccccccaagggggggggggtggggcgggggggggtttttaaacccggcgctttttttggcccggcgggccccggggggcccccccccccgtttttttccccccttaanaaccccgggggccgtccccccccccggttttttttttgggggggggggggggtctcttttttccccggggaccccctttcccccttgggcccttttgggggcccctttaaacccggtggggccaaaaaaggggggggggggggggggggttttcccgggtttttttccccccccgggcccccctttttaagggccttaaagggggggggcccgggggggggggtccccccaaattttaaaaatttttgccccctttgggggggccggggggggggtttttgccctttttttggaaatttccccaaattttttttttttttttttagggggggttttgggcttttcccccctaacccggtttttttccctttta

SEQ ID NO: 612873 - DNA, 321 bp, Homo sapiens
cagcctcccagctacttgggaggctgaaataggagaatcacttgaacccgggaggcggaggttacagtgagcccagactgtgccattgcactccagcctgggcaacaagagtgagattctgtctcaaaaaacaaaacaaaacaaaaaaagaactctttaaattatttcaaaatgccagaaaagtatattagctcgccatacattcactagtcattagcaagctttcaaggacttattgtaaaagagggtaacaaagaagggctagttgttgcttgaatattttattcatcccagttagaataagttagttctatactcccc

SEQ ID NO: 612874 - DNA, 144 bp, Homo sapiens
atattgattcatttcacagaaattcaccaggatccagcacactcaaatgtacgtttctctccataaagcctcatgttttccaacccttatttcttgggtatctcctgtgtgtcagacactagtacaccataccacttcctcttc

SEQ ID NO: 612875 - DNA, 531 bp, Homo sapiens
  misc_feature (495)..(495): n is a, c, g, or t
  misc_feature (523)..(523): n is a, c, g, or t
aggaggcctgccctccattcagatgcatctgcatcgcccttctgtgtgcagtcacatcgagactgcacacagcatgcatctcctcgttggaaaatatcgattgcctccgagttgttttaagcaattagaatcatggtcgctgaatccccagactgttcagagacttctagggacacctccctcacaagaagcctggcaccccccatctgtgtaccctttgagaggacaaggagtgcgtttgtattcattctgcattctgctattgtcagtggcaacagactctatcaatgatgcaaccatggtctgtgatcatgtgggggcaatcaaataaatctcttatgtaactctcggattctcacattttctgacaaagatcccagaagttgacccagttggccagacccagatctccagggtgatgagtatccccattactttgttgtgaatctgggcactcactattccttcgaagacaattggacatagctgagacanttccccatctaataaagacatctcgcgngtttctca

SEQ ID NO: 612876 - DNA, 153 bp, Homo sapiens
aactatttaatgtaatgagaggtgttctagctatgtaacccaggcgggtctcgatttctgggctcctagcattcttcccacttcagtctcttgaatcatggggataacaggcgggggccttcatgcccagttttaggttttcaaaaggtgggc

SEQ ID NO: 612877 - DNA, 560 bp, Homo sapiens
tactgaactctttattgggtgtgttggggttgtttggagacagagtctcactctgtcacccaggctggagtgcagtgacacaatttcggctcactgtaaccacctcctgggttcaaccaattcacctgcctcagcctcctgagtaactgggactacatacgcccgcccgccaccaagcttagctaatttttgtattttttggtagagatggggtttcaccatgttgtgcaggctggtcttgaactgttgacctgaagtgatccacctgcctcagcctcccagagtgctggaattacagacatgagccactgtgcccaaccttggtagttctgagttctttaaaaaatctccaaactgcttcccacaatggctaaccttatctacattcccaccatcagtgaacacgaattcccttttctctgtagccttgccagcaactgttttttttattttaataggcattctgaggagtatgagatggtatctcattgtagtttggatttgcatttctctgatgattagtgatgttgaggatttttttcatgtttgttggctgcttg

SEQ ID NO: 612878 - DNA, 839 bp, Homo sapiens
  misc_feature (585)..(585): n is a, c, g, or t
ggacagatagaatcatctcgagttatcatggcagaaggtggatttgatccctgtgaaatgtgtttgctctcactgcaacatggcaatgaagaagactgatcaatctgctaacgggcgggtcccagtcctactgcacagacagcagcagtgtcgttgcagcgaagttagcgcggcgacccgtctgcgctgataactggctagtcacgtggttacaaatgattctatgatagacctggatgttttattgcatggatctatgttcttacttgagatcgctcgctacatcgtaatgcacggaatccgagacactagcgctggagaagcgcgagacccacagtcctgcatagagtggcacatacgaatccacacatgtctcgctcctagtggatctaacgtgttgtgatactggcgaacgttgaacacataatgtctaagcagccttttgtcacagacgcaaaaacggaagcggacacggagtgacccacgaagtcacctctttcacagcccccagtgtgaggagagctagtgtcttgtccccttgtgcgtagtctggcagagtactgggattcggtgagtgtgcggccncttcagttcgaacgcatttcttaggaaaaactatatacaggtgtgagccacatgggttgtatttttgccccgcatgtccccttcgcgtgttataaacctcgcgccagttttgcccctgagtgtctaagcctcgttgagttaagtttgtccggagagtttgagacttgactttgagttacttctcttgaaggaggcccacacttttctgcgtcgcggggggggctttgtggtgccggcgtctcgctttcttccca

SEQ ID NO: 612879 - DNA, 231 bp, Homo sapiens
ccgtggtagatcgcttcaggtcaggagtttaaaaccagcctggatacatagtgagacccctccatctctataataatcaaaaattagctgggcatggtggtgtgtgtctgtagtcccagctacttggaaggctgacgtgggaggattgcttgagcccagaaagttgaggctgcactgagctgtgatcatgcaacagcactcagcttgagcaacaggttgagaccctgttac

SEQ ID NO: 612880 - DNA, 159 bp, Homo sapiens
tctaccatacgatcagatgaacccagagtagctatcagtggagtatatttaacttttactctgcagtctatttgcttaggaacaaaaggaaaggcagtttcttgcttgactcaactttcagctttttttttttttctattttggttaattaattggggt

SEQ ID NO: 612881 - DNA, 222 bp, Homo sapiens
taagagcggtctctggtaccacagagtgacccaagccactgcagtaacaatgctggatcctttatccactctgtcacgaggtaatgcctcttaactcatgttacactgctagcattccactgtggtacttgttactcttctttttcagatttttcttggctatatttgcttgcttacttctctatatgaattttagaacagtaatggataattcagaattac

SEQ ID NO: 612882 - DNA, 456 bp, Homo sapiens
gtattagggcgtacagcacatggagagtctcccctcaagctctttcccaaaatccctcctcataaccctccgtgtcctggaagagcttgaaggtgtacgacaggcgttccttataatgacttccgctccatcctccccagcaatctgctgactgtctgtcaggagggtaccctgaagaggaaaaccaagcagtgtgtccagcatctctcaggtcagacctgaacgcggcatgccactttacaacggtgtcacataataagggagttaacatttccattgggaaatgcttcgggaaactcattacaactgggtgaagaagaatcggtagaaggaggctaggtaactccaaaaatatatggattgccattgatagcccgaggtgatggaggccacccccagtgctgatctctactacacttccttcagtgaccctctctacctgaccatgtacaagat

SEQ ID NO: 612883 - DNA, 330 bp, Homo sapiens
tgtaactagccgacggttcaggtcggtccctgcccattgtgcagtgggttacagatccggcgttgccgtgagctgtggtgtagtgttgcagacgcggctcggatcctgcgttgctgtgcctctggcgtaggacagtggctacagctccgattggacccctagcctgggaacctccatatgccatgggagcggcccaagaaatgtcaaaaagacaaaaaaaaaaaaaagattcccagtttccccgtggacccgaggccttgcatccccatttcttcacatccactcagttctccttggatcactatattattcacagcctattattcagca

SEQ ID NO: 612884 - DNA, 153 bp, Homo sapiens
ggttaagtccaggtaaattaaaactaaaaattagggcggcgtagcggcgcccttattcttcctttccactcctcccagccgcctctttgaccagtgtcgttcggagacgcacctgtcggcacctctgatctttccccgacgtctactatccca

SEQ ID NO: 612885 - DNA, 594 bp, Homo sapiens
gatatagaattgaatcagactgtatttctttcctcaggaaacatatagagtactgggggaaacatcaatttgaggacagtgtgatcaatggtgtaattaaggtagatacaaaatactgaagaaattttcaaggaactgcaaatcaacaacaggaaaaataaaaaaacaatgacaagaaacccaatggaaatgtggctaagtacttatgatacccaatgcaatgaaaaaaataaaaaaaaaaaaaaagtgggcaaataactatagataggctttcatgggaaacgagaagttcaagtggggctaatgaccataggaatggaggtcctaacctcttagatcagagaaatgcgattttaacaagtctggacagtatcaggtgggaactctatagatgtccggtgtacgtcatgtgcaaacacaaatcacctggcgtctatcataatcacgggatctatttccccatttttaaaccctaggggtatatatccctgagagagtctggccatagggtcccaaagagataccctccagggtcatgcactgggcatactcggttctcactgcgcctcgggggcctgtcactggcctcactgg

SEQ ID NO: 612886 - DNA, 121 bp, Homo sapiens
cgaaggtaaggaccggggtggggaagagggagagggagagggacctgggttttctttcttttctttttctttttttttgggagatggagtttcattctggtaacccaggcgggagggcaag

SEQ ID NO: 612887 - DNA, 1153 bp, Homo sapiens
ggagccgacaaacatcccatgaggtgttggattcggtcatcatgaggaggtcagagaagtcgaatttatatccccttgaccggaggacgctgcccgcgcccagaatgttccggattgccctcttcgggagcactccccagaacctcacggatgcaatacatccacagagctggcttccggcaagacgtgaacgctacctcgagtgcgtcgtgcagactctacgtcatcgatcgtgacggcggtactctcttcttatgcagctcgcgtaaggaatggtgacaccgatcgtggtcacaatatcttcaagacaaggctctgtgggccctctacttcgcacctatatgcccagtcgaatggatggattgtattgactctcccattgagctccatgtcgtcactcagtggaggacccagtggagccgtgagagccatgactctgtgcttggatgctccctgggggacaacacctcttaaaggcctgttgtgtggtgcactgttcggaacaatgtctgcgtgtctcgtgggccatctcatccctggtgccacggctgacatgccatgatcgaactctccctgtacaaggtgaaggaaacacttctcaagatgagtagcctttgaggcataggagtaggtttagcaaagcttgcctttcgatcttgggggggctaaatgatcgcaacgtgctaggacatggctttggatctgcggtggctacaccatcccaagttgcgactcccaccaagtgtccaaacacgctatcactagggtctccctagggtgctttgtccacagatcctagtgacagggaggtactcccgtacttgcttggtccttggggtcggcacgtgcccaaggggaaggcacaagcaaacagtagagggggcactatgagagagctcaatcctgaaagaacacgtgccggacttgggcccctttcgtcggacgacacttgagaagtgggcgcatcctgtgtggctcctttccgctaacgcttccccttggccttctgttcccttgggcctctggcgcgctattcgagggcattcccttacttgggcattcgccccacaccttttcttttttttccccaatcctaatgattggtgtcgcccgataattttttcctggctggcttgtgggacttttcacgttc

SEQ ID NO: 612888 - DNA, 301 bp, Homo sapiens
gcccggggggtttccccccccccaaaaggggtttttggttcccccccatgggcccttcccggggcccgggggtcccggaaaggtccccagggtgtttaaaacccccctccccccgtttttttggggaaacctgggggcccctttccctttgtttggggccccccccggggggttcccccccccgggggccaaattggtccccccaggtggggggaccccccacttttttttaaggggggtttttggccgggggggggggggggccccttccccagggggcccctttccctttttttgggga

SEQ ID NO: 612889 - DNA, 156 bp, Homo sapiens
agcgagctcatgtatgggtcaagcggaccatgagctctgtaggtccggcggcgcatcgtaggtgcttggttcactaggatatgcgcaacgaccagagaatctacatctaaacccttaagtgcagcattactctctgcgctatgaaagccatgtgca

SEQ ID NO: 612890 - DNA, 440 bp, Homo sapiens
catcatagtcatccctaatgtcacctggaatgataacattatggggagagattcagatgtaagcagccacgccccttccggggggaactcaggccacacttgaattccacatgtcacggtgcaaagtgacttttactctggggggatgtcagtgatccagccggcgggtttctcggtgaacccaaattctgttatcagaagggaccctccccacttggggtcaggggcagattggatcagtttccccatggagtcatggatgaagatgtggtgagaatgatccccaaccctctgtgctaatacagagcactcggtcggcttgggtgtgtttaattatggatccagccacaagtgaggaggggaagtggtgattggaaagcggtcaccaagagattggggggattcagtaacaaaacggcgggaaggtagagagccgggca

SEQ ID NO: 612891 - DNA, 428 bp, Homo sapiens
  misc_feature (40)..(40): n is a, c, g, or t
  misc_feature (134)..(134): n is a, c, g, or t
  misc_feature (269)..(269): n is a, c, g, or t
aatgaaaatgaatgagaaaaatgtccttaaaggtaaaaanccattatgtagctaaatgaaattgtggctgtgtgtgagtacattataatataatttccatctgatgtgtatttacttgaactcatcattccttntgaattccttaaccattaagaaaaagactagattaatcaaaggaattacaaattattccatttttacaaaataccctgtttctatactgcaaatggccatgttgggtatatgtctatatacgccttacttagacnattgtattgtatataaccgtgtgtagaactatagacaatagtcaccaaatagttatttaaatattaattttctttattaatacaacacatttaataagtatctacctatgccaggcactgtgctaagttctattactaaataaaatttggtccctgtca

SEQ ID NO: 612892 - DNA, 205 bp, Homo sapiens
aggattccacatagcaccacgactaggggattcatggataggtttatagcatgttgggtggttggagtaaataagtgaggcaggcagtccgcaagaggtaagttgtggaataaaaatgcattccggatactagtcataagagatcaggttcgtcctttagtgttgtgtctggttctcatttgttttgcagagttagtttgattag

SEQ ID NO: 612893 - DNA, 110 bp, Homo sapiens
aaacgccgatccccaaactgcacacgccgaagcaccaggccgaatcgccgatcttcacgtgcacacgccgaagaaccaaagcgtgtcgccgatcttcacgggggatcctc

SEQ ID NO: 612894 - DNA, 237 bp, Homo sapiens
cggtcccgatattgtggtctgcagactcatgcaatgccctccatgttaatattcatcagaaaatggatattaggggggccagcaaaaatatcaagggtcaaatatcgcacatttctgtttaggccatctatggctttcatctcctctgaagtcaactggaattcaaacaccagcacgttcttgcccttgtagttgaagatgacatgaaccttcttggtgccagaaccacaaatatcg

SEQ ID NO: 612895 - DNA, 571 bp, Homo sapiens
taggcccattggagtatttggtttcaattagggaaatagtgggtattaggattaggatggtggtgaagtatagtagggatgctactggtccaaggatggtaaaggggtagcttacgggtggtcctccgattcaggttagaatgaggaggtctgcggctaggagtcaataaagtgatgggcttagggggcgaacatataatgcttggtggtgggatatatggaggatggggattattcgccaggatgaggatggcctagcactagggcaaggacgcctcctagtggtcagggacggcatcggaaaatcgtgctacgccactacggaaatactcatcccggcctcgaccgcgcggaacgggtgtccacacggggtcggctacgggaataatgcggcggggcacgccgacgcacgccggctgaccaatccggtgtccaaggcctgtaccggaacacaccggccgacaaccacccgacgggaagcctcacgacgcgtgccccaacgggcggcacgggcctccccgcacggcggccggcgaccccaggggcgaacacccgccccgcccaccccacg

SEQ ID NO: 612896 - DNA, 118 bp, Homo sapiens
tctcctacatgtcgtagccctctcctcctgttcacacagcctctcctcctgttcacacagccgtcgcctcctgttcacgtagcctctcctcctgttcatgtagccgtactcctcctgt

SEQ ID NO: 612897 - DNA, 210 bp, Homo sapiens
cctgaagcctcgttttgcctagacactagagggagaaaaacatcttttacatttagccggatgccagagctcgcaggctgcatacataatgagcacgtagccaagcctgtcagataatttaaccacttgatggacttgaagctgagcgcttgagtagcatggttactaactgcgtgactgcctacccacttcatctgacactcatagatc

SEQ ID NO: 612898 - DNA, 148 bp, Homo sapiens
  misc_feature (31)..(31): n is a, c, g, or t
  misc_feature (61)..(61): n is a, c, g, or t
atatatgaaatttttcccaaaaaaaaatatnggggaaaaaatggaacaattaaatactccngtttcaaaattaagaaaaatagcatttatcaggcctctacttgctttactgatatttttctattatcactcatctgtgatatgcaca

SEQ ID NO: 612899 - DNA, 218 bp, Homo sapiens
  misc_feature (18)..(18): n is a, c, g, or t
aatggtgaaagtactttntccagcttaaattgtaaatgtttgataatatcttttttttaattggtggtaaaatataactttaccattcagtgtacagtgtataattcagtggcactaaatacattcatcttgttaggcagctgtcaccaccaaccatctgaactttttcatcatcctgaactgaaactctgtgtccattaaacagtatctgcctccta

SEQ ID NO: 612900 - DNA, 112 bp, Homo sapiens
  misc_feature (75)..(75): n is a, c, g, or t
gccactgatactgtaaacatgggtctgttcacaactgcgaacttcttggctctgcaagattgtgaatgtacaacnaataaaccacacacagttcagcagtcaccttttttgt

SEQ ID NO: 612901 - DNA, 276 bp, Homo sapiens
atctaaatctgtcggcgctggactgagtgatggcgtatgatagtcgtggacacgactacaccctccttagggtcgagtcacctatcatagacactccaagaatcagttttccctgaccgtgacctctgtgaccggcgagacacggcgtctattactgtgcgagagaggtcggattgttcctaccccaagctgactgatgctttagatatcttggggtcacgcggacaacgggtcacctgtctcttcaagcctccaccaaagggcccaatcgggtct

SEQ ID NO: 612902 - DNA, 184 bp, Homo sapiens
tctcggacccgtgcacaccagcgctggaccaggtcagctgaaggtgctgggtgcaccctctgttgccgtacctgatgcacgaacaccatgcccggtgttgactttttaataataaccattctgactggtgtgagatggtatgccattgtggttttgatttgcatttctctaatgatcagcgata

SEQ ID NO: 612903 - DNA, 291 bp, Homo sapiens
ttccgcccgcatggagatcactgaggccaaagttcgagacccagcctggggaacttggctggaacctccgtttctacgaaataaaaataaaaaaattatccaggtatggtggtgtgtgcctgtagtcctatctactcaagggtggggcaggaggatcacttgagcccaggaatttgaggccacagtgaattaggattgcaccactgcactctagcccaggcaacagaacaagaacctgtctctaaataaataaataaaaataataataataaaaaagatgttttccctaaa

SEQ ID NO: 612904 - DNA, 112 bp, Homo sapiens
ctatactgacgcccgaaaggtggaaatgaaccactctgtcgctagacagctacaggtttgaaacctgcaccccagaccactgaggatcggtagtatagataggtcagtatag

SEQ ID NO: 612905 - DNA, 134 bp, Homo sapiens
cagcatcttcagggcacattgaaatcctgagtgagtgctgctgatccagactggagacaaagtgggagccagcgaagccacgcgtgctgaacatgctcaacatctcccccttctcctttgggctggttatccag

SEQ ID NO: 612906 - DNA, 847 bp, Homo sapiens
  misc_feature (501)..(501): n is a, c, g, or t
  misc_feature (586)..(586): n is a, c, g, or t
  misc_feature (726)..(726): n is a, c, g, or t
ggggctgtgcgtgtgtcccagtctgcagttaagggggcatgagtggcgctgctcacctctggtgccaaagggcggcgacagcggatgccgatgctcggccctggaggcgcgtgagtaacatggtgcagcaggttcttgagtgtaccctccggcattcggtcgcgcgttctggcccgtcgcgagtgagggttctcgtggttcacaatccctgcggctcacggtggagctgggctgcgccaggggcgcccgccgttgtggccctcgtgctgatgctactgtaggatgccagcgtctagggcagcatccgcttcctagaagaccaggtcatgatgatgggcagcgcccgagtggcggatgctgctgcgtgctctcaccggtcggcggaagtcctcaacgtgctgccgaccccgaccacgtctcactccgtacccgtgtcactacgctgtccgggagggctcctggacacgctggtggtgctgcaccgggccggggcgcggctgnacgtgcgcgatgcctggggccgtctgcccgtggacctggctgaggagctgggccatcgcgatgtcgcacggtacctgcgcgcggntgcggggggcaccagaggcagtaaccatgcccgcatagatgccgcggaaggtccctcagacatccccgattgaaagaaccagagaggctctgagaaacctcgggaaacttagatcatcagtcaccgaaggtcctacaggngcacaatgcccccgccaaatccacccgctttcgtagttttcatttagaaaatagagctttaaaaaattgtccttgcttttaaccgtagatttattccttcccccattaccgtaaatgtccc

SEQ ID NO: 612907 - DNA, 357 bp, Homo sapiens
  misc_feature (80)..(80): n is a, c, g, or t
  misc_feature (85)..(85): n is a, c, g, or t
  misc_feature (239)..(239): n is a, c, g, or t
  misc_feature (247)..(247): n is a, c, g, or t
gctgaacttttgaaacagatcatctgttggctgatttcacggcgtcccagctggatggaatggcgcgcactccagcctcnccgtncttgttagatctatttacgtagaggaatggcgcacactccagcctcacctggacctcgttaagatgcatttacaggctgagatgtgtgtggaactttgtgtggatggtagttagatgagattttggacttggagttgatgctgaaatggtgaanacttttgnggacactgcggctgtcacttgcacgtcggaggggcccaccatggggcaaattgtcatgcactgaattgtgcccctcgaaaaatgacacatgaacccctaactcccggtgc

SEQ ID NO: 612908 - DNA, 312 bp, Homo sapiens
aacgggtgtcagcatggctcgtacactgggcacgcggggcgcgtgaatggcatgatgttgcctgcccggaggtggccatcgaatggcaggtggttcagccgagcgagcgtggtgtcgtatcgccggtgttctggcggccgagcccgctgtgcaggctcgctttcgtgcctgcaccaaactcgggcaggatgtgctgcacgcgcaggtgttggtgaacaggaggaagcctgaagccgtttgcttcataccagtatccgccgtactcggagggctgtccagtggttgctcgagcgcgttggcgatcgattcgat

SEQ ID NO: 612909 - DNA, 405 bp, Homo sapiens
aggatcgacctctaaagtatcccgatcgggagattactgacagtcttctttgtacataagcacagcgtcaatcgacgctctttccttcctgttactttccctgtgtctcttgagttttacaggaatcaaatcctgtgatatttaacagaagtcgtgacttgcagctctctggcgccacatagcctgattgattaagaaagtctctggtgggatgcggcggctcacgcctgtaatctcagcactttgggaggccgaggcgggttatcacttgaggtcaggagttcaagaccagcctggccaacatggcgaaaccttatctctattaaaaatacaaaaattagctgggcgtggtggctcacacctgtaatcgcaactctttgggaggccaatgcgggtggatcactt

SEQ ID NO: 612910 - DNA, 713 bp, Homo sapiens
cttgggcactcagcacaccattattagggtccctctggtcaaggacatgcagttagcatgggaatgatgtagtagctgacactctgcccagagtgcctctggtgggttgatgctgcactttctaagaaaagaagccaagattgttcctatatgtgctggctctcctaacgttctatctctagctcgattcatattactattacgaaaatatgagacgagcgggacgacgtttgcaggtcgagtcgttcgtgtagagtgcattatggagagatgtgaccaaatccgtatcatttcctgaggaaaaaaatcttacaagatagaattttttttccttttcctttctttttgtttctttttttttcttgttttccacaattatattctcacagctgcgagacagcaatgaacagacatttctaattagtcacctaaaccattggtgcataactagctctgaacgcaggttaaagctgtgcctcggtgataagaacctggaaagccagatgtaataagtggggagtattaggggtttataaggggcgttcaccttaaggattttatcacactgaaactaccttaagtgttacataatttagtgacaaagggaagccacaccaggtgcccacaatgttccgggggacatgtcccaaggtgaaacgccttgttcctaagtggggagccacctttttattgacccatttacgcagtggtgt

SEQ ID NO: 612911 - DNA, 130 bp, Homo sapiens
aagccagctatatgactcacgggctgtacccttcactgatctagagagcgctggtcccatcaactaacaacatgaagtggttccctccatggaatgttgatgcactgagagctggtcagagaaggtgggg

SEQ ID NO: 612912 - DNA, 584 bp, Homo sapiens
ccctccgcgaccggggctgctgagctcctcttccgagcagctgttagtctccaggctctcggcctccgattccaaagccctccagtaccagcagcgcgtcgctcgtttccgtgggttcctccccggccttcggggcgcaacaggcggctgggcttcggaggggccgtctgaggagtacacggacacgggcagcaacccccaccgactgtcttgacccccggccccgccggctgcccgagccccagagccgccaactgcgcctctagtccagccgccgggccccaggtccgctcgagcgccaagcccggcggcagggccttggggtccagggcacagcggtgccggggacacagcagttccgagggtcccggctccggggccgcctccacgtcctcctcctccggcggccgacccacgttgcggaacaccatcagctgcggcggccgggagccccgcgggccgggccgcgcgaggaagggtggcggcggggggccatggcccgggggcggtggcggagggcctggctcgggggccgcctctccatagccaaggaggcggctcaggacgcggtacgaagcggccgc

SEQ ID NO: 612913 - DNA, 321 bp, Homo sapiens
tgggtcggatttcttcttctcctgtctggctccttgggtttcttcctggtattggcccttttccttcctaacttggcgaaatgggagttccggcaaggaactcataccacgcggccggcaccaaagtcgggagcggccgacgccgaaacggccgatacaccgctttggaggacatcgcagagccagacctccaagaagactggcagacaggcttctccacagtggccccggcccacatattcgagaggcaagataggtgtctccaccaacattcgacaagacggtgcaaacagaagctggccgggtgccatccatgcccaa

SEQ ID NO: 612914 - DNA, 145 bp, Homo sapiens
  misc_feature (40)..(40): n is a, c, g, or t
  misc_feature (51)..(51): n is a, c, g, or t
  misc_feature (138)..(138): n is a, c, g, or t
attggatcacgagggcagatttctcccttgctgttctcangatagtgagtnctcatgagaagctgaatggttttaaggtgtagcccttcctcgctgtctctctcctgtccccttgtgaagaaggccttatttctcttntgcgttc

SEQ ID NO: 612915 - DNA, 385 bp, Homo sapiens
ctagaggatctacgagtgcatggctgactgatatagcaacaggaaagtctgaaatctaatctaagacccaggaaagaggctctcatccccaggactaatataggaggatggtactagtattccagcatgatgcatccacagagtcgcgtgaagaagctgggctgggacagaaaggccccaccacagcactgcagtagtcctgggggtccagcacctcatcaagatagggagggagggatatgttggggacatcaggagaaaacagcttctacttcaagtctcttatgaaattaaggacttacagactccctatgtgggggagacgctcgggttagtgtgactacccaagtttgacctttaatctgtttttttattttttattttg

SEQ ID NO: 612916 - DNA, 1477 bp, Homo sapiens
tgtttccggtaaatagcatctttatggttccacggggtgcaaaaaaaaaaactcaataagtgggtgagtgcattttccgtggataaattttacaatgtgaggggtgattacattaaatttatattagactcacaagttttccttttatatacatatttataaacacccaatttattattggactaaattatgtgttccagagaggaaaacaatgtgggttctctataaggggatgtggctgtgagtctccaagattatgtgcaaaatatattagccttctgcgggtttgtgggaccatgtgggtggcttataaaatttcttacaaacgatgtgcttttaattatattctctcataagttttaaggggagaaacatctcgtataccctgtgtggcgcttaatctctgtggccaattttgagggggagacaacgcccaaaagatgtgaattttccacatataccaggatattctccctttatcgtctcataaaaatgttaaccctctacaaaaagccccaaaaagagaacagaacaaaagagagagaaaagagaacagaagagaaagaacaacacaagaaacacacaaaaaacaaagagacgagggggggcgaggcggcgcgagaaagagagaaagactccccagggaagggggagggcccccacagcagcatgcaaggaggcacgcaccccagcgaatctttcgtgcgagcacaacacagaaggcggagcccaccaaaataagaaggaccgcacctgcataaataaaacacgcgacaaagaaacgcgaaggagacacccaacgtataaacaaccacgaccgcgcacacagacaacgtaggcaaaaaccacaggcatacacaaccgcgggaaaaacctactggagaaaaagaacacaccccccacacacgaaggaggagagccggccacaacacacatgaggcgaggaaacacaacaacacaccccacccaagaagacaagcatacaacgccccactctagagggagaccaacatccaaacacatgcataagcagggaacacacggacggccaacacacccagcccggcataatatcaccccgccgcacgcaaaagaaacatgcgccaccaaggagaaaataataatcacagcacacatccccggcgggacggcgcacaaactaaaaacacgagaacgcaccacagcaccaaccacccacagccgcgagcccacaacagccgccaagacagaccgcggcagcacgagccaaaccacagcgacgagccgagcagcacaagcacgcaaacacaacacaaagaacagctacccgcagagaccagcagctacgacagaggaggaccacacgcgggcagaccaaacagacaggcagaagacacggagacagaagaccgaggagcgcgagaacacacaaacggacacaaaagcagggcagcagaaaatcaagcagcgaagaagcagagaagcgccaacattcagc

SEQ ID NO: 612917 - DNA, 144 bp, Homo sapiens
gatttcctcttcgccctcctccccctcccttacttccctctgaaatgtctcagcggctgtctcaccctgtgctggttaccactggggtgtggaagcgaaccagatggtctctgtcccaaatggcagcctggggtgtggggtggg

SEQ ID NO: 612918 - DNA, 750 bp, Homo sapiens
  misc_feature (182)..(182): n is a, c, g, or t
agcggagcggtgcgggaagtccgtacgcagtagctccctgcaagacgagagcgctgatagtgggtatgtttaatccccagcaggatgcaaatgggcggagagtgccctgatgatctaaaaactgcccaatgacagttatcacctaggactcatcaaggcaggtgctccctgcatggtgtcanacttctcctaaaggaggcccggtatcgccatctccgcgaaggctctcagcttgtctttctatgcctgtactgtccacagttcatggtgtcatatagctaagctgttgcgatgtgcacaatggcacaagacgggaatacggcgtgaagttccacttgtatggtgtctctctagtccactggtcatacgatggtagtttccacgacgcattcgtttacctccacttgaaaacgaagtctctgagtaaagacattgattactgctggtgagcaatgaaaaaggcgagataggagcgcctttatgatgctttataacgtatatgaatggacagagatgagcacaaaagacatgctaagacctctcgagagaggcctatgacaaaagaccaggtggatgagggatccatgagtgacacgacgaaagagcagtgctagtaacgaaatatcgaactgatatgaacaggaagaaagttggacattttgaataatggcgcagggttgacctgtggcccccttggataaggtacgccaccttgaaactgaggaccgttgcttacagtgtttgctgtga

SEQ ID NO: 612919 - DNA, 202 bp, Homo sapiens
ctgaggggctcaggcagacgggaatggttatggatgggcctgtactggccctgggtctggcctcttcgacttgccgggacgctgtcagggctgctcacatcgccgcgccatcagcacctcaccctccccccgttggagtcggttccgtggtgtggaagtgcccactttggcttatgcgtttatcagttgacggatagtgggt

SEQ ID NO: 612920 - DNA, 948 bp, Homo sapiens
  misc_feature (247)..(247): n is a, c, g, or t
  misc_feature (306)..(306): n is a, c, g, or t
  misc_feature (335)..(335): n is a, c, g, or t
  misc_feature (472)..(472): n is a, c, g, or t
  misc_feature (475)..(475): n is a, c, g, or t
  misc_feature (480)..(480): n is a, c, g, or t
  misc_feature (524)..(524): n is a, c, g, or t
  misc_feature (538)..(538): n is a, c, g, or t
  misc_feature (541)..(541): n is a, c, g, or t
  misc_feature (580)..(580): n is a, c, g, or t
  misc_feature (617)..(617): n is a, c, g, or t
  misc_feature (641)..(641): n is a, c, g, or t
  misc_feature (656)..(656): n is a, c, g, or t
  misc_feature (679)..(679): n is a, c, g, or t
  misc_feature (757)..(757): n is a, c, g, or t
  misc_feature (772)..(772): n is a, c, g, or t
  misc_feature (777)..(777): n is a, c, g, or t
  misc_feature (805)..(805): n is a, c, g, or t
  misc_feature (808)..(808): n is a, c, g, or t
gccgggagctcccgaactcttcagccgcccggaggccgctcccggagcccggcgtagaggctgcaatcgcagccgggagcccgcagccgcgccccgagcccgccgcgcccttcgagggcgccccaggcgcgcatggtgaaggtgacgtcaactccgtctggcccagaaggaggccggagaaggacgagcccaagagcgggaggaggcgctcatcatcccccccgacgccgtcgcggtggactgcaangacccagatgatgtggtaccagttggccaaagaagagcctggtgtggtgcatgtgcttnggactagcatttatgcttgcaggtgtatnctaggaggagcatacttgtacaaatattttgcacttcaaccagatgacgtgtactactgtggaataaagtacatcaaagatgatgtcatcttaaatgagccctctgcagatgcccagtgctctctaccagacaattngangacanatattaaaatctttgaagaagaagaagtgaatttatcagtgtgnctgtcccagagttngcngatagtgatcctgccaacattgttcatgactttaacaangaaacttacaggctatttagatcttaacctggataangtgctatgtgatccctctgaacanttccattgttatgcnacccagaaacctactggagttanttattaacatcaaggctggaacctatttgctcagtcctatctgattcatgagcacatggttatagatcgcatgaaaantgatcacctgttctntattnatcgatgtgtcatgacaaggaaattacnaantgcaacgcaagaaactattaaggtatcagaaagtgaagccaggcaattgttggcgcaagttcggcattttgataacaaatttgcgtggcaactttattgtcttgaaccaggtcagaaaaacattattgaggaaaactata

SEQ ID NO: 612921 - DNA, 1186 bp, Homo sapiens
gcgccttcgccgccgccgcccgcaaaccttcgtgcccggcccgtcctcgcccccgtttgcgacgacggctcggcgcgagagcttgcaggtcgcacccgtcagacaatgtccgaggtccaagagcgaggcccgacgtatgcttcgttatttcgccgttcatgggcgcctcggccgccatggtcttcagccgccctgggcgcatagacatataggcacagccaagagcggtaccgagcatttgcggccatgtctgtcatgcggccggagcagatcactgaacgtccattatcccagtggtcatggctggcatcatcagaccatctacggcctggtggtgggaagtaccgtcatcgccaactccctgactgacgacatcagcctctacaagagcttcctccagctgggcgccggtctgagacgtgggcctgacgcggacctggcagcccggctttgccatcggccatcgtggcgggaccgctggcgtgcggggcacctgcaccataagccccgactattacgtgcggcatgatcctgattctcatcttcagacgagagtgctcgggcctactacggtctcatacgatcagacctcactctctaccacacagcaggaccctcatccgagccaccagccaacaggaatatcatgtacagaccaccccactcgtcagtccagaacgaacagtcctgacacatacgccacggggccgccgaccccagtaaggtagctcttgcaccattgcgccagtgtactaagttggccagtcgtcttggtacccaggagcagggtcataggcccggcgaagagacagagacacacgggagcactaaggcgacacaggagcaccgccgcacaaaaaacgaaagagagaacagagccaccacactaagcaacgaaacccaacagaagatacaaaaaaaccgaacgaccaacacgcaccaacgccctcccccgccactaaccacgcctacacagaacacagacccgaccacacacacacagatacctaacccgatcaacaccaagaacaaacacagcaccaatccgctacaacctacgacaacatcacacaacaaccacagctaactctgcaccacatacggtcgcggactgagctctccctactcttctccaccactcgtactcccgacaagcccacccacgcagatcgaacaagaaccacac

SEQ ID NO: 612922 - DNA, 967 bp, Homo sapiens
  misc_feature (283)..(283): n is a, c, g, or t
  misc_feature (330)..(330): n is a, c, g, or t
  misc_feature (336)..(336): n is a, c, g, or t
  misc_feature (347)..(347): n is a, c, g, or t
  misc_feature (354)..(354): n is a, c, g, or t
  misc_feature (364)..(365): n is a, c, g, or t
  misc_feature (376)..(376): n is a, c, g, or t
  misc_feature (386)..(386): n is a, c, g, or t
  misc_feature (419)..(419): n is a, c, g, or t
  misc_feature (421)..(421): n is a, c, g, or t
taagggatttccagtctccttctccacttatttcaccgcctcctccacgcgtccgacttataccagtatgggttcctatatggtgggtgattgagaggtgagtgttatcgagccgatgacaatcagcgatgctggctgtgaccccggaagagactggcctccagcgacgttctcagccagcgctcgcagctgtccggggcttctctggcagaagccatgtctctcacatcatgtgccagcctccaccctcacgccatttccaggaacagactgcgggtatgtngcagtgtagtctttaacctgctctgatacatattcagagtatggatngttgtntaaaaagagtngcatgtntaaagagttnngtactagcttntcattatttngtatctagattatcaacaatggggctaccactntnccttggttatatatccattatcctcttggaagtactagtagcttatgtgacctgtaggatagttaccccggactgggcaacctgcaggacgtcagggacagacggcagactgtgagctggaggtcagggctctactgcattagtagtgtagagtcttccaacatgggactgatgggagcagtgggcatcctcatatcacaagggctagccaggatgcgtcaatgaaggaccatacaccaagcctgaacacaaccagaagaggaagagaggagaagaggacaaatcaacagagacaggagactgagtggagtcaacagcagaagaaacactgggagatggagcaaacacaagcaggccagaggaccaacgatggacacaatcaccacgggaaaaagatgacacagcaagggtacagacacagggaccataaccagaaacaagaagaaggaatgacaagagaaacaaccagaatgaagcacataaaaatgcacacaagagaaaaagaaagcaacaagaaaaagtagaagacaaaaaacaaagaaacaa

SEQ ID NO: 612923 - DNA, 757 bp, Homo sapiens
  misc_feature (757)..(757): n is a, c, g, or t
gcggagctgcgcaaggtggagtgacgtgcaggagccaagtgcgagcccaggcagccacggctgtatcggagctcaggactctaaaagtggcagagcagctttctccaggaccggcggtggattcaggtgtgcagctatccgttttcagaataagcctgggcggcagcatggggctgctggacgctagaaagcgctccggcctagcgacccagaggcgccggagcaaagcggcagcagtagcggacgaaaggggcctgcaactggtgggtatcgacccgggaacaaacgaagcgggtgaagccgacaagtccaagtggatacagacagagcccgtgacagctggtaacacagaggggcgggggttaacgggcggaccttggacgcaggcggaaaggggggcacgacgggaaactcctgagcccagaggagatccacgcgccgtaggggtgcatagaagttcccacccccgggttacagggcaggaaccacacgcccgaggttggtggggaacccccaaacggaagggggactccattaggggaggaaaggcgggagacaaggggcatctgagcccgtaacttagggacgcccgtgggggaaaccaccacagcggcaggggaacacaatggggagcgcgctgcgccggtaatcggcgacgaacgaagaaagacgggcgcacagaaacagagccaagtgttgggggggacgaggccagacgcagacgcgcacccgaggcggacagaacagaaacgtgccn

SEQ ID NO: 612924 - DNA, 193 bp, Homo sapiens
ccccaccaccctcctcctgcctcctgacccagaattgcaccagcactgcacacacacacacaccccacatgatgtgtttgctttgtatgaatgcttcacatgtatgtgtgccttgcaacatgatgcttgtgctaactacatgtgcatgtgatgcccttgtgatgaaatgaatgccttgttgcttgttgtgtga

SEQ ID NO: 612925 - DNA, 296 bp, Homo sapiens
gccccaggttggtaaagccccaagttgagaacaataatgaacaattattgtatgaacaattgttagagacagctaatcacaaacaacctgcgggcacaatgacctcattccacacgtagcacccttcagcaggaccctataaaactttcctccagcccttgcctctttgcaggtagccccttctccgctgagctgcccactgcaacatattttcacaatttctctaataaatctgcccttctttacctacaactatcttggtaaatggctttaccacctgcaaaactgaccctaga

SEQ ID NO: 612926 - DNA, 84 bp, Homo sapiens
gttaccccattatattatttaaaatgtttagtatttaccaaaaaattatgacataagcaaagaaatgccagtgtatctctccca

SEQ ID NO: 612927 - DNA, 143 bp, Homo sapiens
ccaaacaacactcaaacatgccttaatatatctagtacaacgggaaaatcttacccatgcgccctctatcttgcaacttagcgcgcaaagcccaagatgaatctcacatacagtattcctttcttctacactaatctcaaagc

SEQ ID NO: 612928 - DNA, 160 bp, Homo sapiens
atcttctttgaatctgcggacacagtcaggaaagccaccattggatggttcaaacttgtcgtgcactgaaaaaccgtctaggcgccagaacagtataacggcagctccttagatttgtctgtcagagactccagatatgaatggtttccgtaaggaacaa

SEQ ID NO: 612929 - DNA, 447 bp, Homo sapiens
ggtcagataagggaataaaagcaggctgcggagccagtagcagcaacccactcgggtccccttccacactatggaagctttgttctttcgctctttgaataaatcttgctgctgctcactcttttgggtctgcactggctttatgagctgtaacactcactgcaaaggtctgcagcttcactcctgaagccagcgagaccacgaacccaccagaaggaagaaactccaaacacatctgaacatcagaaggaacaaactccggacacaccatctttaagaactgtaacactcactgcgagggtctgcggcttcattcttgaagtcagtgagaacaagaatccaccaattctagacacattagcagcaccattcaccacaggcaccatgtctcggcagcaccattcaccacagacccatgtctcagcactgttcaccacagacacctgc

SEQ ID NO: 612930 - DNA, 165 bp, Homo sapiens
acaagatataattcactaggaatgggccacatattgccgacgtgagtgtgcttcaatagttcaggaatttttgttccagaacaataattaaatattcatgggtgaagtatttctgctcccatggatttatgatgcgacagagatcacatattgccttaaggtttt

SEQ ID NO: 612931 - DNA, 396 bp, Homo sapiens
gagagagagtgagatagagacacagcgttagagacacagagcgacacagagcgcttcagagatgtgcttcatatccggtggccgaggattccgactttcccatatcacaacctgtcctatagcggcttctcgaccagaggcgacccaagaccgaggataggtgtggccattggcgaccagatcctggacctcagcattatcaagcacctctttacatggcctgtcctcttccaccaggatggcttcaatcagcctacactcaacagcttcatgggcctgggtcaagctggctgtgaaggaggcgagagtggtcttgcagaacttgctgtctgtgagccaagccaggctcacagatgacaccgaacttcgggtgtgcattcatctcccggcttctgc

SEQ ID NO: 612932 - DNA, 145 bp, Homo sapiens
tgattcgattgagctgtggcatgaaagacagcagctcagtatcagcttttcagagcgtgaagtctgcagaagcctgctggactgagtcaagatgcttagtgcaacttggggagcgcatacaaattttagtgctcagtcgaacgga

SEQ ID NO: 612933 - DNA, 106 bp, Homo sapiens
cctgaggcatacctcaggcctctactagtcaagcaagcctggcttgtagctagataggcttacctagagcagtacataaacttagattaatctcccggagtgcccc

SEQ ID NO: 612934 - DNA, 205 bp, Homo sapiens
  misc_feature (71)..(71): n is a, c, g, or t
  misc_feature (73)..(73): n is a, c, g, or t
gatgatctccggcctagacatgtgatttcacttacactgcataacggttctgatactagggctacttaccncncacactaaccatataccaatgatggcggggatgtaacacgagaaagcacataccaagggcaccataaatcagctgttccaaaaaggccttcgcatacgggataatcctatttattacctcagaaattttttt

SEQ ID NO: 612935 - DNA, 111 bp, Homo sapiens
  misc_feature (40)..(40): n is a, c, g, or t
  misc_feature (47)..(47): n is a, c, g, or t
tcaagcttctaacgatgtacggggacatgcttctcagggntcaaggnctttatgttaaagcttccctgtcgggcgctgctaggtcagcattaaagtaaggcaaccaaaaaa

SEQ ID NO: 612936 - DNA, 376 bp, Homo sapiens
ccgacggcatcctaacagggcagagatacctttcacaagtttccacgggctgacaaaaaggggaacacctcagtataacccccgtaacctcgggcagggacttaagagcccggggctgggaatttctccagggcaccagacccaggatgggggtaacagcacttaagaatactaggaaaccacaatcccgagaacatgggggtaggggctacggagggaccgaacactatccacttccctaggtgagctccatacgcccttctacaacggggagaaccagggaaagaggaatgcatcccgggtgaggctagatgagctcaagcctcccggtagcccggccgggccctgaactcaggcgggctggttttactttctg

SEQ ID NO: 612937 - DNA, 332 bp, Homo sapiens
ctcagcctcttgagtagctgcgactacagatgtgtgccaccctatctggctaatttggtttattttgggttgagatggggtctggtgctatgttgcccaggcggatatcgagctcccgagctcaagtgattttcccacctcagcctcccgaagtgctgagattgcagcatgataaatatggataagagttccaggggtatttaatctaatctcattaaatcctcagaacaattctgtcacaatgggccccatttcacaggtgagaaaccagaggagcagaaatgtggcgtaactggcatgacgttgcaggtaagaaggggcagagaatttag

SEQ ID NO: 612938 - DNA, 105 bp, Homo sapiens
ctcagttatcactgtcctatggtggtaatgagaatcaaaagcagagctcatatagcctgcacccatatataagcgaggacagcagctaaacatggaatcatcagg

SEQ ID NO: 612939 - DNA, 256 bp, Homo sapiens
gggcccctctcctatacaacttgcctcctcccagagatcttcctcagtgctggaagctgtgccttctatcaccattccctatttctctttgccgggctcagccggggccacctttacatgtaattttttttctctctgaaattccgtgtaaaattgtgaagtctatgttcgctatatgtaataagtggattaaaaatgttgcttggggtttttcttttttttttttctttttttttttttccctctttttttaata

SEQ ID NO: 612940 - DNA, 867 bp, Homo sapiens
  misc_feature (180)..(180): n is a, c, g, or t
tccaaaaaaggatattttttttattccaagtaactggcaaataggaaaccaaagagggagccccaggtctgggacaaattcagggcatacccctccccaacagaacagggggaggaggtggccccatacacccttaagtggtcgattcgggcccccgtgctcactcgtgcagtgaagcantccataggggacagggccccaccttcccgtgggacgggggatagtcggtaccacccagaccgtgccagtgccccagccctttttccccacaaagagtatctggggggaggggatcgtgggcaagaacaggacggcaatgacggatgaccattgggacgctggtagcagcagcattgacgtgatgtcgaaagaatggaccatgtgaaccaaaaaccaacacacagggctccagaaggatagttgggtgaacagaggcacaaagggacccagaacctggggggcagggagagacaggaggaggggataggacacggccagggtgagactccgtgtcatcggtgccccatcggcaggcagggggacatgagcagaagaggcgagacagacaacagaacggatcagggagaagaagacacgcagacaactacctaaaggatgagaaggacacaaaggactccatggggcccacaagcgggaacaacaacagatgcaagtggaactctccataccaaccacagaagacattgaacaccaagaaatccaagaggggaagagacaaaggaggagcagggcggacagcgaggaaagcagggacataagaggaaacacacaaccctacgcgactaccggaagcgagaaagggtatgcccacccaatagacgaagacgaacggaaagttgggcataa

SEQ ID NO: 612941 - DNA, 635 bp, Homo sapiens
  misc_feature (14)..(14): n is a, c, g, or t
  misc_feature (39)..(39): n is a, c, g, or t
  misc_feature (42)..(43): n is a, c, g, or t
  misc_feature (75)..(75): n is a, c, g, or t
  misc_feature (82)..(82): n is a, c, g, or t
  misc_feature (86)..(86): n is a, c, g, or t
  misc_feature (89)..(89): n is a, c, g, or t
  misc_feature (100)..(100): n is a, c, g, or t
  misc_feature (112)..(112): n is a, c, g, or t
  misc_feature (115)..(115): n is a, c, g, or t
  misc_feature (118)..(119): n is a, c, g, or t
  misc_feature (126)..(126): n is a, c, g, or t
  misc_feature (146)..(146): n is a, c, g, or t
  misc_feature (163)..(163): n is a, c, g, or t
  misc_feature (165)..(165): n is a, c, g, or t
  misc_feature (172)..(172): n is a, c, g, or t
  misc_feature (175)..(176): n is a, c, g, or t
  misc_feature (179)..(180): n is a, c, g, or t
  misc_feature (182)..(182): n is a, c, g, or t
  misc_feature (184)..(184): n is a, c, g, or t
  misc_feature (187)..(187): n is a, c, g, or t
  misc_feature (207)..(208): n is a, c, g, or t
  misc_feature (233)..(233): n is a, c, g, or t
  misc_feature (238)..(238): n is a, c, g, or t
  misc_feature (240)..(240): n is a, c, g, or t
  misc_feature (270)..(271): n is a, c, g, or t
  misc_feature (304)..(305): n is a, c, g, or t
  misc_feature (307)..(308): n is a, c, g, or t
  misc_feature (324)..(324): n is a, c, g, or t
  misc_feature (332)..(333): n is a, c, g, or t
  misc_feature (342)..(342): n is a, c, g, or t
  misc_feature (345)..(345): n is a, c, g, or t
  misc_feature (353)..(353): n is a, c, g, or t
  misc_feature (360)..(361): n is a, c, g, or t
  misc_feature (370)..(370): n is a, c, g, or t
  misc_feature (376)..(377): n is a, c, g, or t
  misc_feature (386)..(386): n is a, c, g, or t
  misc_feature (389)..(389): n is a, c, g, or t
  misc_feature (393)..(393): n is a, c, g, or t
  misc_feature (397)..(397): n is a, c, g, or t
  misc_feature (438)..(438): n is a, c, g, or t
  misc_feature (456)..(456): n is a, c, g, or t
  misc_feature (463)..(463): n is a, c, g, or t
  misc_feature (466)..(466): n is a, c, g, or t
  misc_feature (469)..(469): n is a, c, g, or t
  misc_feature (485)..(485): n is a, c, g, or t
  misc_feature (490)..(490): n is a, c, g, or t
  misc_feature (508)..(508): n is a, c, g, or t
  misc_feature (514)..(514): n is a, c, g, or t
  misc_feature (522)..(522): n is a, c, g, or t
  misc_feature (526)..(526): n is a, c, g, or t
  misc_feature (534)..(535): n is a, c, g, or t
  misc_feature (538)..(538): n is a, c, g, or t
  misc_feature (559)..(559): n is a, c, g, or t
  misc_feature (575)..(575): n is a, c, g, or t
  misc_feature (613)..(613): n is a, c, g, or t
gcggtggcctccgngcgggtggacgagtcgcgggcgatnggnnctgcgctgcgatgccgtccgctggtttcagcntcggtgnaatngcngccgcgcgaangtccgccagcgntanttnntccgganctttctcgtgtctagccttngggggctgcttgcggtngntctgagngtnnccnncncntancctcgcgctctctcaaggtnnagaaggtacccgctggcggagaagngcagncngatgggcaaagaagccctggagaagcgggnncacgaagcgcgcagagatacgaacacgtcggtnngnncatcgttaaacaactncaggacgnnaagatgggntanatgtgtangcaccgnntgttggttntaggtnntgcggcggnctntgcntgcngggaggctaggggcgccgcgggaaccgcgggagggggtggnagggctgtctggtggggntaggggntcngcngtgggaggtgggggtncaggnaaaggtggggagaacttnctaganagttccangganggaccctnnctngcctgggagcgggtggggatntttgtctggtattctnagtggccgagagtatagtgcccctccaggggagaaaangtgggtgccggagcggacaact

SEQ ID NO: 612942 - DNA, 253 bp, Homo sapiens
agccggcccaggctatcaccctataccactactaacccctagtcacaccattctactttctgtctctaggaatttgactattttaggtagctcatgtcggtggtatcagccagtgtttgtctttttgagtctggctgatgtcatttagcatgctcatccattcaaggttcatgcttgcagaaggcgtaaacacttccttccttttaaaggctgagtaatattccattgtctggatacaccgcggtggtatagt

SEQ ID NO: 612943 - DNA, 323 bp, Homo sapiens
gtgttcgccccatgggagagggtgacaggagtgagtttatgtttgggatctttatgttgtgcgtgttagcctgaacgctttcttattgtggctcgctctaggcctactatgggtgttaatcttttactctctctactacgttttttcctagtgtccaaagagctgttcctctttggactaacagttcagtttaccccggggatttagagggttctgtgggctaatttaaagttgaactaagattctatcttggacaacccgctatcaccaggctcggtaggtttgtcgcctctacctattaatcttcccactattttgctaca

SEQ ID NO: 612944 - DNA, 114 bp, Homo sapiens
agcacacagaaggggatggagcacacaggtggagcacacaaggtggggatgacaaggggacatttaaggggaaatgttgagagagttgcagcgtagagctggagcacacaggtg

SEQ ID NO: 612945 - DNA, 105 bp, Homo sapiens
gctggaccgcttgagcaatctggtgggcagccatctaagacccatcctctcaatacacagtggctctgttaacgctcgggatcctgtcacagacacaaacttctc

SEQ ID NO: 612946 - DNA, 286 bp, Homo sapiens
cagtctccactccacctatccctcaaccccgacatcattaccgggttttcctcttaaaaaaaaaaaaaaaaaaaaaaaaaaaaaaattggaccacagggaaaaaaaaccacaaaaacaaaaaaacggtaattggctccaaatgccgggttgtgttgttttttttgggttacaaaaaaggggggaagtgttaaggattgtgacccattctccagtgataggtaagggccacttgggtcacattgtccgttgaaatggggggcccttctcctgtgtttgaaagcccag

SEQ ID NO: 612947 - DNA, 1098 bp, Homo sapiens
gagcccacttgactgtcatcgaagcgaggagcagcagatggactggtctgagtgcagctgataaaggccctccgttgccttcccgatcctgggctgcgtactgcggtcgctgtgagtgaaccacgattcccttttcccgtactacgtttgatgggtaattgctcggaccgtacctctcgcaggggacgttcatctgtgcatcacggtgaactctgtatctatgttcgttgcacgtagtaactaatcgttctcctaggcgacgtccctttaaggtgagctgttccctctagtcaacaccggcgcatacactatggtgcactcgaactcgtgacaagttgcgcgtgatccctctatcactcagaagaaggagaatacgcctcccctccttcaaatgtagttaccgagtggccttttcttgttgccgaaacattgcaatgcgaggtctatctgggatgtgcgaaggcgagcgacgatggaactaactgctgcgcgggggtacaatccgtccggggcgcgtgaggccgacggagtgggtcctggtgatctgtccccctctggttgcatgccccgcctgcttgggttctgcactcgtgagcccctcacctccgtattgctaccctgcctctcgatcatccgcgatggtcctccctgcgccaccctagatttgcttagcgagctccgtggtcgaggttctgtcccctgaagaaatttctgcgttcctcggtctccatggattgtccttgcacctgcgaggtccatgtctgtcagtgacacccagaacgtactgttttcctaggccctccggcaacacctcgtggtagctgatggccggtgggccttgcgctacacattttccctgggtctactggtgcctgcggggttgtgcgccgttatccccttgatctgaacgggatgcttccggcaatggggttcggtgtccccctgccagggctcaagggtggctgacctgccgctccaaaactgtcccctgaggactctaactgtgacgggcccaggcccctgggcccggcccgggccgcggtctttggccccgggcgtcccccggatgtggccccccccccttttctccgtttgcgt

SEQ ID NO: 612948 - DNA, 160 bp, Homo sapiens
cgcgccatgatcctaagtcacagtcagcatctggggaaaggtgaagaaagacaagtgtggcctatggggaaatcttaccttccttcacactacacactcttaagcttagcgatcactctgcgctcggggctacccgcaggctcgatacttcgctaaatct

SEQ ID NO: 612949 - DNA, 99 bp, Homo sapiens
  misc_feature (16)..(16): n is a, c, g, or t
  misc_feature (74)..(74): n is a, c, g, or t
gaattcgagctcggtnccccattggataagcggatgagggatatgaggagaatgaggagtttctgaggaccatncaccacccgctgctggaaatgctga

SEQ ID NO: 612950 - DNA, 953 bp, Homo sapiens
cagtggtgccgctgtgcacactcttgcgcccgcagttgttgtcttcatccgggggtccttatacaacgttgcgggatccctctccggggttgccaatacaacgggtggaggtgtcgcccaaaacggaaatgttgctcgccaaacagtctcttttctgccagccagaggctcttctgtttaactcgccctcgcgttctggaaattggccctggctgccccaccgataggctccacgctcgtggactgaatacctttgccgcgctctgatatctgcgcggcaaatcttccgggatcacaactgtggacttcccccccggggggtctttttctcaaccacagggcccaccattcgtcgcttctggtcacctccccaacaagttaacctcccacacactccgggtgccgccttctgcaatgagcacatttttttatgggacctgccccctgaagaatgaagtcccccttcgctggcggtttaagcacgcgggtccgccgtgccgcccctcctgagtggcgctagattcaacccacggctccctcttcacctgcgtgccgttaaccccaccgcactgcggggatcttgctgtgtgcaaccccccgccactggtggtctgtggattctcttttccctgttagtcctcggtgtgttcacgagaataatcggccacaaccccactttgttctcccaactcgacatcagactcgctgggctcaggtctctcgtttctcccgcaatctccctgttcttaaaagaagacctggtgaataacctccctttttggaacataaacaccggcgcgccatattcagtacccttgtgtgagatgtttttacgttctatgcaaattgtatcttcacctgaccgccattcttctagattcaattcccgctaccctctccccgcaaaaaaccctattcccccaaaaaaagttggcccgcggcccaacataaca

SEQ ID NO: 612951 - DNA, 471 bp, Homo sapiens
tcttaatggtttgcacaatgaatttttacatatgaatacagctgtgggaccaccagccagatcaaggtggaggccatttcctgcaccctggaaggctggttctcctgagctccattgtaatgaacagtgagggcacaacctcctccctcttgccacaagaggggtatggggagttagccttgtggattctggagttgtagcacagtgagtttgatcccagctccacctcttgggctacctctgtgaacctcagtttccccaccagcaaaataatgacaattaaacatttatatttattagctcatttaattttcacaatgctcccacaaagaagggggcctgttatcattccaaacttttaaacaagaaaactgaggcacaggagaggttaagtaatcagccaaggtcatacagccagtaagaggtggagctggccagcctgggcaacacagggctaccccatctctacta

SEQ ID NO: 612952 - DNA, 1217 bp, Homo sapiens
gttctcctttcgcttgttttcctcactgctgttgtttctcaggtgtctttggtctgtcttcactcctgtatttatggtcgcgtggttttgctttctctgtgggtagtcgtggggcccctgttcacggagctgtgtgtctccttgatctttgtcccgggtgattttcccagggttatgcttgttcttcattgtgggcgtgccaaaccgctacggtggctgcgtgccctgttcacgcggcaggggcccgtgccatctatttttattatgtggagctctagtggttgttctgcccggccccttctcgggaactatccccctggggtttactcttggctcttataggttgggctcgctgtggctcgctttttgggaccttgctccttgggtgggccatatggggacgagtttcgcccaattttgggacctgaaagtgctctttccgcggattttataatgtaatttgtgtctgcgcactttggcccgttttacccggcgtcgccttcgaaggtgtgtactggccgatcgtttctcccatgccctcctagaatgtatgtttatccccggagttttttttgccgaggaatctttggtgaaaatgcccccctgagagtccccacagaggccctcttcgaggcccccacctcccagaggatgatgccctctcccacgaggtgcctttaaagagaggaacccccacctcgtataaaaactcttgaagaattcacttgttttggaagctcgtaaccccacttattgccacagacccaaagccgcccggggaccaccagttgtttccgcccaggcccagaggtatccacccagcctcccgggttggataaagagccacacatgtctggccacaccaacgggccacatcaccaagccccgaatccagaatagtagaaagagcggcggttttccaagggccagaaagacctctgggttagagtgtaagaaaagggaaagaaggcgcgctctcttgtgtggttctaagaaacccagcgaaggaaccctttcggtgggggaaaaaaggccagaccagcttcccaggaaaccacgcccctgaataagagagcctgcacagagatagaaacctatctacccgaggagaagaagcctgctgcatcaatcttttataatttgattattccactaaagaggtcacaatcacttttggacacgctttttttgaataaagacctgattataccggccca

SEQ ID NO: 612953 - DNA, 431 bp, Homo sapiens
  misc_feature (1)..(1): n is a, c, g, or t
  misc_feature (15)..(15): n is a, c, g, or t
ncttgaggacccccngcctcacatcctgaaggcaccatgctgcttctccatctcaatgtgtaccctctagtgcatggcatacttatattcaggaagccatgctgtgcacactggggtggctgctctcactccttgtgaaattgctggttctttacaaccagcttctctggaagtccttctttgtcacctaattagcctatgggctacacagtaacaggatgaggaaacgtggttaacaggaagaagccctcactgcatctgtcctgagctttctgagcaactggctgtcctgagaactcaacaatgcctttccctaagggccttccttgatcatccacaatgactacagccctctccacctggccaaagaaaagtcttcttccaaaagtttgttagaaggtttcagactgtaagggatgcactatggcagg

SEQ ID NO: 612954 - DNA, 1824 bp, Homo sapiens
  misc_feature (1824)..(1824): n is a, c, g, or t
gtgtgacagcgccgagttcaggtgatgatctgttgcatacgtcgttggcgtatggtcgtatactcacggcgcacggataaacggaggcagtacaccgtccattgtgagcgctagttcaggatctgacacatatggggggaagtgtgatgctggacgggtggctcgcagagacgaggcattgaaggtcagcatatttgacccagatatggcatgctcaggaggcatcatctagactctggtgttcaaggagattagcaccaaagcatcatttgcgcgaagacaatgtcctctagttccgcatagcaaccaaccgcatcgattgcaagatccatgtggcgcgtggagcgagcgtggcctctcgaaacaaggtagcgcggctgctgcagaggagtcaagcttggagtgtgggcgctagcgtaggatcgagttctcattggaagctcgtcaagcgcgagagaaggaggaccgccaagggatagcgaaagccaacgctagcccgttgtcgggcgcgttatctaagtagagactgagtgccaacccgtgaaggaatgtcactcaattgggtcagttgggctagcccttccattgagcgaaggaagaggacagacttcaaagggaaacagctcccacactaggggggcccattggcccagtagtcacgcaccaccaaagaggcctagacccctagttgggattcaagttcccgtggactttcgaggacgatggccggcatagcaaagcttaaggaaggcgactctgggtcgcggaatatccgaccctggtggaattcctcccggtatgagaggaggtaaggcacatggcgagtgaggccgaaatggtggcaacgcagagaaacaggaaattccagtgccctgttgggaaagccttagggcaaccctggagaaacagggtggggcttggaacacaagagcgaaggaagacaacaacactaggggaagaaaaacggagcgagaggggagtggagcaagggcgttttcctaaccggttggaaccctaaccgaaagccacccaatcaggtgaaggctttggacttggcttaggcacgcgattgacaaggctatagcttgagtaaagcgtccaatatcccagaaagaaggcattggctagccacagaagagggggacttaggtcgggacgcagggggcaaatggcaaggcgcccttgggggacactaggtggaaggtcaccccattgtggcataggatcatgcccttgagcatgtccaccacagggatgtattgagctccgatgagaaaggatgcgatgtgaccctatggttttcgcagacacaaataaggagacacagacggggtccagcgactacaagagccattatgggggagacacaaatgtacaacgtaatttagtatagaagcagatattggagcacacagagtgagcgttatcgcacgagcggtatgcacgcagagtagtcaggagatccccccatgtgttagcaggaagatgacaccagagtgttggatccccgaaagtgtgcttgtttagaccttatactttggttgctttgtgctgctacagacctagagtatgactttataaaaggcgcgatcgatggcaactaatagtatgattgtttaaaaccagcacaagataaagtgagtgcttacacaataacaacgaaggacaaacatgcataggtagcagaagagtaattatggcaggagcctaatatagtacaagtaagaacaacaacgtgatatgaagagaacggttggattaagaaaaaaaatggaggttgttgaatagatttaatatgttaagaaaagtgaatattaatggaan

SEQ ID NO: 612955 - DNA, 118 bp, Homo sapiens
gcgagcagcaaaccataccgaagtaagtcgaggccaagggttgctaattccgctcaatgtactaggggtacaacacgtttttcgccaacaagagccaggcgcacgccacacgcgcaca

SEQ ID NO: 612956 - DNA, 128 bp, Homo sapiens
  misc_feature (120)..(120): n is a, c, g, or t
gcaccaaacaccaaactcataagaaagagttcttgaaggaaattaaaagtgctgctccagtgaacacctggacaaaacagcattattgctggtatagagaaagtttgagtggcctggatnaaagataa

SEQ ID NO: 612957 - DNA, 744 bp, Homo sapiens
  misc_feature (1)..(1): n is a, c, g, or t
  misc_feature (104)..(104): n is a, c, g, or t
  misc_feature (133)..(133): n is a, c, g, or t
  misc_feature (158)..(158): n is a, c, g, or t
  misc_feature (177)..(177): n is a, c, g, or t
  misc_feature (191)..(191): n is a, c, g, or t
  misc_feature (194)..(194): n is a, c, g, or t
  misc_feature (205)..(205): n is a, c, g, or t
  misc_feature (213)..(213): n is a, c, g, or t
  misc_feature (217)..(219): n is a, c, g, or t
  misc_feature (224)..(224): n is a, c, g, or t
  misc_feature (226)..(226): n is a, c, g, or t
  misc_feature (230)..(230): n is a, c, g, or t
  misc_feature (233)..(234): n is a, c, g, or t
  misc_feature (251)..(253): n is a, c, g, or t
  misc_feature (255)..(255): n is a, c, g, or t
  misc_feature (257)..(258): n is a, c, g, or t
  misc_feature (261)..(261): n is a, c, g, or t
  misc_feature (279)..(279): n is a, c, g, or t
  misc_feature (286)..(286): n is a, c, g, or t
  misc_feature (288)..(288): n is a, c, g, or t
  misc_feature (300)..(300): n is a, c, g, or t
  misc_feature (321)..(321): n is a, c, g, or t
  misc_feature (323)..(323): n is a, c, g, or t
  misc_feature (337)..(337): n is a, c, g, or t
  misc_feature (341)..(341): n is a, c, g, or t
  misc_feature (361)..(363): n is a, c, g, or t
  misc_feature (387)..(387): n is a, c, g, or t
  misc_feature (447)..(447): n is a, c, g, or t
  misc_feature (494)..(494): n is a, c, g, or t
  misc_feature (586)..(586): n is a, c, g, or t
  misc_feature (600)..(601): n is a, c, g, or t
  misc_feature (653)..(653): n is a, c, g, or t
  misc_feature (674)..(674): n is a, c, g, or t
  misc_feature (723)..(723): n is a, c, g, or t
ngagggctttgggatacgattgctgggcccgaggactcaaaagggggccgagggtcactgtcagggggtctgcgtgaccacggggtacagcagagccagacgcncggcaccctgcaccggcagtgggcgtcanccgtagtggaggacgagcccgggcncgccggggaagggcccgcngtgttggcccagcnccncctggttctcncgggtccncgcnnncctcngncgcnggnngccctggctgcccctgnnncncnnggngccgtcctgggggctggnctcactnanccgccctaggtngccgcctcccttgcagagggncnggaggctctctgcntccnccctgtccccggggccctcnnnccacggctgtctctccaggggcanggctgggtccacacgctccgcagctgggggcttctgggcggaggtctccggacctcttgnctgagcctggagtcctctcccactctggactgtcaaactgcactgcnaacgccctggagatgtggtctttcttccactcccagggctgatcatactcatctgctggccgtccatcttcctggggcatccggctctgcgngggcttctgcccannagggggtccatctgctgtctctgggtcctgttcctcacaaggggtgtcacanagctgcacccctctgccgggnagttcactcatgacccattgggcatcgtagggctccatgtacccatcanccgggggtgcaggatgaggct

SEQ ID NO: 612958 - DNA, 336 bp, Homo sapiens
gtttgggcaaaagtatgagtcctgtggcacggtaatgtggttgagccggtggtcccctccacatggccctgcccccctgtgagtgtcctggtgcctgctttcagctttgcgttctttgtggcagcctccagaaaggcttttaggtcaggtttttggcattacaaaaaaggagtggactgtgcaggctgccctcatttttaccccccccagttttgtaaccagaacgaggcacttggcctttgtgttttgagagtttttcccctcagttgtaaagtagaattcgaatacctgtttggcagggtggcggttcggactaaatgaggggcccctggccca

SEQ ID NO: 612959 - DNA, 116 bp, Homo sapiens
tcggtataagggccaatgaagggtgggcagaggggctaatgccgtatcctgtctggggtgctgtgctggttgtagatcgggctacacaaactgttgctgctgctgctgcttcttgg

SEQ ID NO: 612960 - DNA, 903 bp, Homo sapiens
  misc_feature (903)..(903): n is a, c, g, or t
cgactcgtcgctagacgtgcgccgtattgcctctcgggctgggcaagtggtcccggctgccggtcgacgaccgcccgcgtcagtgcggctcctcggcgtggctggccagtattgtctgtgggtgctgggacttcccgtccgtggcgtgtattgttgcagaggaatgtggtcgcttatggtcagaggagcagcctgctcaccctctccactgtggtgggctgtgtacctgggtgaggaggagctcctgcatgacccgatgggccaggacagggcagcagaagaggccaatgcggtgctggggctggacatgcaaggcgatcacatggtgatgctgtctgtgattcctggggaagctgaggacaaagtgagttcagagcctagacggcgtcacctgtggtgctggaggagcggtggattcaaggtgcaacgtccgagagagccttttctctctggatggcgtctgcagcaacacttccctgacagagtaagaggagtattacacagagccagcaagtggcggaatctgtacgcagacccgacgagaggactccaataacactgaaagtctgaaatccctcgaaaggtgaactgtgaggagagacgagcttacaggattagaaaatttcagtctgaatgagtttaacatatgtcacaggaccttatggatctcgtgaatccaaagggcagtgactgtactctagtcctgtttttacacccccgtggtgccggtttgttcttgccagtttggcccctcgactttaaacgtctcttgcccggggcattttccagctccttcactgtttgggcactggatgcatctcacgcccaggcagccttttctagcaaggtttggaaccgtaggtggttctaattatttacatcatttcacggggcgctaaaccn

SEQ ID NO: 612961 - DNA, 1267 bp, Homo sapiens
  misc_feature (752)..(752): n is a, c, g, or t
  misc_feature (956)..(956): n is a, c, g, or t
  misc_feature (968)..(968): n is a, c, g, or t
  misc_feature (1031)..(1031): n is a, c, g, or t
  misc_feature (1110)..(1110): n is a, c, g, or t
  misc_feature (1138)..(1138): n is a, c, g, or t
acgtcacacaatttagcttacgaccgccccgccagtgcagtgaacgcaccacaccaccataccctgagtgtgagtaccaatcgacaagccagttttgaacacgagagagaacataccacgtaacgccacgctcataaacaggagaacacgaacatgtgtccccccccatcacacagatatggtagatagactgatcatgtgttactgggacataagtgggcatgagtgtaagtacggcggaaatacgccaaaggcgccacgcggtccacctgacagttcacaacccacatcaccaattacatgcaatgtcgccacggagggatacacaagtgtagactgttctgattcggagtagtatcaccaacactccaccaaccttgtcttaccgtagtgcgcatcttcccagttaccacaatcatcgcctcccgatcaatgatagaggacgcattaaaacacactcacaccacatatacaatattagtatacccggtcgcacaacaagcctctgctttgcctttaagctcacatacaccgagggtgcatcacgtcaggtcacgcgacgtgtactgtatattagctttgctctcgtcgctcatactgccatgcgcgccatagagctgaagatacatcacacctatgtcttagtaccgagccaccgatctaccttgaggacgacacgaatcacagctctggacagacattatggaacgggcgcttactgtattgatgccagcgtgacgaagaaccgtccncgagacatggacgcggttgtacgacatgtcatcggccccccgctcgacccgcactactatacaccaccatcgtcgtctatagatagatagttcacccgtgtaaagcacaacatactgttcaatcgaatacaacacatgagggtaagaacgagcacgcccaacgtactgccacattccaccatcgccatatcacgttccaatacnacatgatccagnactcatgatgtccaaccgcacgtatgtattccaggtatagctggaaatcacgcgtctccatcnttagcgcgcggatatgatgtatatacagcacacactatcagtacacacattcgatacacagtagtcataccgagacatngcagttagctccgtctgccaccatcaanataccaccgagctcaccacacatgtctacaatcgcatatctcctgttgtggcacttcacagcctacgccaccgccctgcacagatcgtgtgtcccccacctctctagttattcatagccactcgacagt

SEQ ID NO: 612962 - DNA, 481 bp, Homo sapiens
taggccggacctcataggttcgcggatcataggatatagtggagagagggtcagaggtaaacaggtgaacaaaggtctctgcatcataaacaaggttaagaattaagtgctgtgctttagatatgcatacacataaacatctcaatgccttcaagagcagtattgccgcccgcatgtcccaactccagccctaaggcagttttcccttatctcaggagatggaatatacaatcaggttttacatgagacataccattgcccagggacgagcaggagacagatgccttcctcttgtctcaactgcaaagaggcattccctcctcttttactaatcctcctcagcacagaccctttacaggtgtcgggccgggggacggtcaggtctttcccttcccacgaggccatatttcagactatcacatggggagaaaccttggacaatacctggctttcctaggcagaggtccctgcgaacctatga

SEQ ID NO: 612963 - DNA, 1027 bp, Homo sapiens
  misc_feature (5)..(5): n is a, c, g, or t
  misc_feature (67)..(67): n is a, c, g, or t
  misc_feature (72)..(74): n is a, c, g, or t
  misc_feature (79)..(80): n is a, c, g, or t
  misc_feature (82)..(82): n is a, c, g, or t
  misc_feature (98)..(98): n is a, c, g, or t
  misc_feature (105)..(105): n is a, c, g, or t
  misc_feature (111)..(111): n is a, c, g, or t
  misc_feature (175)..(175): n is a, c, g, or t
  misc_feature (256)..(256): n is a, c, g, or t
  misc_feature (263)..(263): n is a, c, g, or t
  misc_feature (360)..(360): n is a, c, g, or t
  misc_feature (383)..(383): n is a, c, g, or t
  misc_feature (693)..(693): n is a, c, g, or t
  misc_feature (706)..(706): n is a, c, g, or t
  misc_feature (830)..(830): n is a, c, g, or t
  misc_feature (854)..(854): n is a, c, g, or t
  misc_feature (857)..(857): n is a, c, g, or t
  misc_feature (866)..(866): n is a, c, g, or t
  misc_feature (877)..(877): n is a, c, g, or t
  misc_feature (885)..(885): n is a, c, g, or t
  misc_feature (894)..(894): n is a, c, g, or t
  misc_feature (898)..(898): n is a, c, g, or t
  misc_feature (900)..(905): n is a, c, g, or t
  misc_feature (939)..(939): n is a, c, g, or t
  misc_feature (942)..(942): n is a, c, g, or t
  misc_feature (944)..(944): n is a, c, g, or t
  misc_feature (950)..(950): n is a, c, g, or t
  misc_feature (952)..(953): n is a, c, g, or t
  misc_feature (956)..(956): n is a, c, g, or t
  misc_feature (960)..(960): n is a, c, g, or t
  misc_feature (971)..(971): n is a, c, g, or t
  misc_feature (988)..(988): n is a, c, g, or t
  misc_feature (991)..(991): n is a, c, g, or t
  misc_feature (1016)..(1016): n is a, c, g, or t
  misc_feature (1020)..(1020): n is a, c, g, or t
caccnacgcgccccgtgaccgcgaccgggcaacagcgcaggggccacagggagaagaagagatccanacccnnngtttnncntcaatcttacaaagtntatcaanaatctntctctctctacattaacaaaaaccaaaggctacaagagcggttgtatatacaaaacacggaganattgcttcacttgcaaacaggttccagaccagatggggagacgagacagaggagggggacagggagggccgagagggcgcntcgcgtncaggagaggggaggggagaggggagagggggggacgggcttctccctgcatcaatcaacaggcagaggtgggaggcctgtgcgagctgctgtgtgcngaggagcgggtgggcgctgagancccggggggtccgcctgccccggcccccgctgcctggttcttcgggctttggcccagagcacggttctgggtggggacgacgggctggctgggccacccggtcacagagggagggaggcaatcgctccctagagtcggccaaggaaaaggggagaaggcggcgccgtccgcccgtcctcctcgcctctggccagccccgtccatcctgccgccctccccaccccgccaagacgctgtggggacccgagtttcatgggtgcagcaaaccggggcttctatgcttttccccgggcaggacggggtagcactngctcctgttcttnctgtggccccggcccggccgttcagagctcactggagggctggaacgagccggccacagagggacagcagggaggggccagaggataccgtggcgggggcgggcggaggacgttcacgcacgcngggtgaggcgcaggggacacaggntcntgcagcacntcagccttttnggcatccnaccgtccgngggntnnnnnnaccttaatttcaccacgtttttcccctgggactngtngntgggancnnggntctncaatctgtttntgtaaacgaatcggganaangtctgtaagaatgtcttgaaatgcntccnctacgtt

SEQ ID NO: 612964 - DNA, 176 bp, Homo sapiens
ggaacgcggctggaggccccaacggtgtaggcacgtacgctgtagtacacagtttcgcagacgcaataaaactcttcaccaaagaggcgctaggacgggacaaatctaccatcaccaacaaacctcctgtcactcatatgagctcatcctgaggccagtagcagcaccagggggat

SEQ ID NO: 612965 - DNA, 476 bp, Homo sapiens
ccttttccaatcatgataatcactgtaacaagcaaacagcagtcctgtaccagccttcatgaggttgctcccccaataccaactattaatctttcatgtaacctcctgggaacacagtttagcttttgcctctaagacttctaacaggaagagcaaaacattaaataaattaattccaagtctgtgctgtactctaggctgaaatttaaccccattctatttatttcctatttcagaatgggaaatattcaaatacagtgcaccagaatgagataaataatagtctaaggctcagcagcctagctatattctacatttaactggaaacttccctcgttttgaagctcccaggaactacaacccatatgttaaattctctctcttttgtatgttaaagtccaaagaaaacattcttctactgttttttgtttttgttgttgttgttattgtgacagagcgagactccgtctcagaaa

SEQ ID NO: 612966 - DNA, 443 bp, Homo sapiens
  misc_feature (381)..(381): n is a, c, g, or t
atagcctagcaagtaccatatattaaatattggatcttccaggttattggttatatggtaattccactcttttgctcacaatcttcactgaatctctagtagcaatcaatgaagtacaagttcaacctggtattctaaaccctgcccaacatggtcttaacctcctgccatgcttctttatttaccactctgtatgtatataaatatatatcatatattcttggccattaattgttccctgagattgcctcatcttttcctaactacttagcttcatccatgctatttctgccacgtggaatgccaccctgcttctgaccatcttctgcttcttgaaatcctaaactggcccttaaaaggaccactggaaaataatccccntcttttttaatggaattccttttccctggagggcctcccaaactttttggaaaccaggtaaa

SEQ ID NO: 612967 - DNA, 114 bp, Homo sapiens
acaccgtggtcaacagaataagaactcacaggctacatgtgctcccccatacatagagcaagcaggctacatcacagcccccgatacatgggcacacaaggtatacacatgcag

SEQ ID NO: 612968 - DNA, 163 bp, Homo sapiens
tgggcccgtcttggcgcacttctgatcaccaattgtgtgaaatcacacacacacacacacacacacacacacacactaactcaatgtacgtttctctattctttcactcgagcgaacaatcaacacggaatattttgtgtgggtccagaagtgcgcctgggtg

SEQ ID NO: 612969 - DNA, 214 bp, Homo sapiens
  misc_feature (145)..(145): n is a, c, g, or t
  misc_feature (177)..(177): n is a, c, g, or t
aattcgcggccgctcgacacggctgcgagacgacagaaggggaggaggggtaaggcagaagcaccagctgtactactagaagggagcttttggtggtagatcccctggtgtctccaacctgactaggttgacagagctcgaggcntcttaccgctagcgaggtgataggacactggnttgccacagaggtctgttcgaccagacatatcctgct

SEQ ID NO: 612970 - DNA, 87 bp, Homo sapiens
ccagaacatttattgcatgactaatcgttgacattcttaagattgcgacgctttccaaacgatgacgttcccttctgtcgtcttctc

SEQ ID NO: 612971 - DNA, 276 bp, Homo sapiens
cctctgactgttttctctttctgagagtacgttttccttccctggtcaggtctgggaggccgatgcgtcctcctgtcaggggctcaggccactacctcgtggtatagcagctcagttgaccttgggcccacatatccaggaatcaactctgaagccgacaccaggcagtcccaccctcagaagggaccaagcacagaggccgcctctgcagaccgactgcacagctggacccgagtagggctcctccctcgggaactccagattgctcctcaccct

SEQ ID NO: 612972 - DNA, 264 bp, Homo sapiens
ggtaatactcctcctcctgggttcacgccattctactgcctcagcctccagagtagctgggactacaggcacccgccaccacacccggctaatttttttgtatttttagtagagatggggtttcaccgtgtaggccaggatggtctcgatctcctgacctcgtgatctgcccatctcggcctcccaaagtactgaaattataggcgtgagccaccgcacctggcctatgagtggtcttttaattaggaacaaatctaatggaac

SEQ ID NO: 612973 - DNA, 811 bp, Homo sapiens
gaatgcagtagcgtgatctctgctcactgcctgcaacctctgcctccccagttcaagtgattctcttgctatcagcctcccgagtagctgggatcacaggcacgtgccaccatgccctgctaattttgtatttttaagtggagatggggtttcaccactgttgtgccattgcaggtcatcgaactccatgaccatcaatgtgatcctcccacctgaagccgtcgaaacaagagcatgggaaaacagtgctgtgagccactgatacccaagaatgggactatgatgtaagttatatgttccaagttgcatagattattacattgagttgccacatagggcaaagaagcacatagccgatgatccccaggacatcagtaaagccacacagctataccattatgcgtacctccttgaatcgcaagcaattgattatcgtgtagaggtatgtattgaacacctgggtacttctaatccaacaccactccacatcttgggtacacattggacaatgggagggcaatgtgtgagttacttggacggttcatgatcgcacgtacataacgggcactactttattcttctcaagttggtgtatcgctcaacaaaggcaaacagtgcttatgcaactataatgtaaacaaccatataatcgcagaaattcttctgcactaccgttggaacttctagtgtcacaccccagacaactacaagcagtaacaatgacgtttcacattacacgcgcatcatagcagtatacacatttgaacatacgaacacgtctaatgaacctcgcaatatgaggtaaacaaac

SEQ ID NO: 612974 - DNA, 177 bp, Homo sapiens
ctgaggatcccgctcacgcccactagactcacggaaagttccaggccccggaagctgcgaacctgtgcagaggagagtcgcggtcctggcgtagggctggggaagcgccaccgtctgtgactagacgctacgccagagatggcaggctgtgctgatgtctctgcggtggcgacttgc

SEQ ID NO: 612975 - DNA, 89 bp, Homo sapiens
cctctttagcggagaccagacgagaggcgatgaaatagagtagaattgagaaaagcagtttctcagacctccctgtgaagtttttctta

SEQ ID NO: 612976 - DNA, 1138 bp, Homo sapiens
  misc_feature (897)..(897): n is a, c, g, or t
tcagctctggttcggagaagcagcgagctggtcgtgggtcagtccgtggtgtaatggtgcgccctcgatgaaacatagttgttgcggggcaaaaagggtcttgccgggcctcgcatcgtgcagggtgcgtatctgggcgcctgagacgcggcgtggtgagccttgggagccggcgcagcagggggcacacccggaaccgggcgctgagctgcccagggaccagtgaacgggggaggccatcttgcaagcgccctttgcccacacattcccttactcaaaactcgccgaccttgcggctaacctgagcctgcgagcgcctcttggcaactgtgtcgtccggcaccgccacgcaagacttggcgcgtccaggtggccggtgaagcaacctgcgacattccagcactccggttgcttcgacaggtgaaacggacacaggatgtcttaagaggaagctgaaatttacgcaaaagctagatataaggtaacatgcgttccaagtttgggaatttgcagatgagcctgaattctggggaatagtacgggattacattgccaaagatgggatcatgacactgaagtcctagataggaaaaagtggaatatctgatgtttgctggggcatttgagatttcgcattcgtggatgaaattggcccttgggtgtaaatttacctggaaatgatgatgcgtgcttacttcatcatgacttgacgactcagaagtatcttattgggccagggaatttcatggttaagatgcagaatttgggaaatcaacgtggtgcaatgatgtactttaaagtcaggaagtagaaatttgtacaacaaggcaggacaatattattgcaactgaaagtatgaacgtgaaagagttaggggccagttataaaggacgcacnatattgcgtatgcgggggatacacaggcgggggtatctgtgacaaagcgttggagacgttagcagcacttgtggaaacgttgattggtcacgggcatgactgtaacaggtagaaggttatggtagcatgcgcggaatagtattatcagcgggggacacagcagaggccttaagcaagctagagcggccgccaaactatacgttgtgagttagagtgtccatgacagagcatctaggaccag

SEQ ID NO: 612977 - DNA, 133 bp, Homo sapiens
cctcacaacctgtgaaagaaaggcagaagcaggaagcagcagaagcaggaggcagaagcaggaagcagcaggcaggttatgtacaaggaggtttttctcttcactggggagaccctggggcagaagcaggaag

SEQ ID NO: 612978 - DNA, 455 bp, Homo sapiens
aggaacatgagaaacagatagaatgaatgatctagaaaaaattttcttttggagatggagcgttgctcggtcacccagactggagtgcagtggtgcaacctcagctcactgcaacctctgcctctggggttcaagcctcatgagtagctgggattacaggtgcacaccaccacacctggctaattttggcatttttagtagagacagggtcttgccatgtcggctcgaactcctgacctcaagtgatcctcctgcctcggcctcccaaagtgctggaattataagcatgagcccctgtgcctgccctaaattacattttcttggctttggttttttttttttttttttatttggaaaaggattcccgctctatggccagggggggagggcgagggcaaaacccgggctcagggcaccctgggcctccagggttcaagcattctgggggccaaagc

SEQ ID NO: 612979 - DNA, 157 bp, Homo sapiens
  misc_feature (150)..(150): n is a, c, g, or t
gtcactgctgagagagactcttgtgcaggtcgggggggcctgctgcgcttcagggctgctcctgggagaggtcatctcttctgggctgaagagcatcttcaccaggtcatctgcctagcaccctgcctgcaatgacaaacccctgcccanttgagag

SEQ ID NO: 612980 - DNA, 962 bp, Homo sapiens
  misc_feature (361)..(361): n is a, c, g, or t
taaatcttccgtgccttattcacacgcagccattaagcccacaaagacattgacttaccaacgctgtggcccctttgcacccattactgtggccttcagcaccttaaaatgtggacaactttgtgtaccttaagtgaccgccccacctgtggccattattatcgtggttgtggcctctctttcctctgtgttcaccagggggtctctatagtctcggttgacccacatgtggctgttgtgttacaggtcggtgcgtggcggttgtgttccccattgtggcgggacattggagggagcactgtgtgtccactgtgtgaatcgtgggttttgtcgcacagattgagtgtgtgagggatctccnattatacacaccgttgggtgtggtattaccgaaagagaggtcgtagagatatgcgatatatctcctctaaatctcaccggaagagacacctcctgttcttgtggggaaacaacacaaagactcttttctttatatttcttcccaaatctttcgtgtgcaaagagagagtctttgtgccaccagaggggaaagaaacaagggcgcgagtataaactattcccgtgtgggttgtgcaaccacatcttccaacgagtgtggtttgtctgctgggaaaaaacccaaaatgccaacaaggtatgttgccctcgtgtgtgtgggggggaaccccccattctcaaggactcttgtgtgtgggtttttgtgcgtagaatacaggcacacatattatattataccagcacaaagagaatttccccccccatcacggagttatacaaattatcaataaacgaaggcttagtgtggggggacacacacagtgggaggaggggagcatccgtgaggattcttagtataaccccccaagggggcacaggaaagtagcatatatgggggtagagaaacacccaggggcatctaacgtatggaaagacttccacaa

SEQ ID NO: 612981 - DNA, 431 bp, Homo sapiens
gctaggctctgagggaagatcctggctgccttcctggctggccgcgccccctcactaggctctaacccaagatcctcgctgcctctccagctttcctggtgcacgcagtgcttggcttgcggctggttcactccgatctctgcctccctctgacgaggccctctgcgattccagtggaccccccaggacagtcagctcccatcttcaggcccttcgctgagcccacctgcagggtccgtggaagggacattcacacgtccgccgactgcaacatgggtatctgtaggaggccattatttagtctacaatagggccactaactactctctagtttacattcaaaatttttcttacttacatgttttttttttctgtgactgctgcatggggacatgaaagtaatgaataaataaaaagctcattcctccaaa

SEQ ID NO: 612982 - DNA, 170 bp, Homo sapiens
cgtctctgaggatcccccttattagcgaggctggaggtactttgaaagtcaagtagaccataaaccctaacaggtacagtgaggatggcaacaggggatggaatgccatatgcagtaaactttttttaaaaagcagaaacgaggaaggcctctcgtgcccacagaatcct

SEQ ID NO: 612983 - DNA, 809 bp, Homo sapiens
gccgtgtgtgcgcccggtccccgcctgccggaccatggagagctaccacaagcctgaccagcagaagctgcaggccttgacaggacacaggtcgaaccgcctacgtactcacgctccatccaaggccaacacatgcggctgggcatctggccaccaccacgatcatgcttgcagcgccgcacgcgatcatcggctgtccatctttttccaacaccatgcgctacaagtcccagagaccccggaatccgcacaatgaccgcatttgtgcatctccaagggccatgcagctcccatcctctacgcggtctgggctgaagcgtgagtttcctggccgcagtgcggacgcttgcttgaatccttgcaggcacagattcaggttcctgacattggaaccgtggcacccagtgtcccgaaaacaagcgtttcaccagacgttgggcactgggtcccttgggccagggcctcggggccgcattgtggcgatggcctacaccggcaaatacttcgacaaggacagctaccgagtctattgcttgctgagacacaggacagctgtcagagggctcttgtactgcggaggccattgtgccttcgaccagcatctatcacgctggaccaaccttgttgcccatacctacgacacattcaatccgcccctttgtgagccccacagaacaggtgggaacccccggggtccacccacaccttgacatggacactcgagtaatgggacacttctaaccacgaacagcggttgcgcaagggcccttcgggtttggctatgccatacatccgtgcgatggacacat

SEQ ID NO: 612984 - DNA, 1010 bp, Homo sapiens
ggcgagccaggattcccggatccaggagacgatggccccggtatggggatggagcccgaaggtgtcgtcagaggagtaacctgggaatcgagagtgtcgacatgcttcgatgacatgaaccttctcggcagtctccttctccgtggtcatctatcgccttatgggtttcgagaagcggctctgcctatcctagtcagacgaggcgcgattcgtacgcttggtaatcaaggggcttatgatggtgactagtttcaagctccaatctggtgacttgggaaaacgggccagattatgccatatcgatttctgccagcatgatttgaaatgagaatcttaacaagccagctccaggccgttgtgtgcctagcgaccgcactcgagagactctggctcgagtccagactacacgacaggtggtcatggctacttaaggaagactactagtgggccgcctccatgttgagcagaccttgatatccgtgggggcaccaaaccggctgacggtggctggagagtgcctgagaacctagcagcatgggaacgctacaccccaacatcatacgagagagtaacgcacctggacacgaagtggttccagactgattgcttcacagccggagataaggctgggcccccgaaattagatgccaagaatcgctgtgtcactaggaatgaccggctgaggaaaatgctcacaaggcagagggaatcccagagggaaccacaggatccgtaatggacactaatatcccgcaaaaagagacaccaaacggcaggaaacggaaccgcacgggataagacacagggcgtggttcaaggagcaacgaaatggcccttcgatgactgtaacctcatggaggtagacacaaaggaacaaggtacaattgaagggggaaaccacccatgccgggaatgctctgtcccaacgaaagggacagacgttcgaaccctgggaaggggaatccggcccagttcatacaatgcaaagtggaacgcgagcgacgcagtcc

SEQ ID NO: 612985 - DNA, 361 bp, Homo sapiens
atccttccctctctgacgccagagattccttggcctctggggtcgtggaagaatgtgcccaggggtattactctttatctccctcttgctaatttataaagcctttacttccataagtactcgcctgattaacaccacttgcattaaaatcttactgtgactttccttagctttcccagcacaacttttttgtgctttattcatgtgcaccattattaatttgtactcgtgtgaatttgtcacagatgatgaggcgctaccctctaatctccctactgtggtgatagatttctttctttgaaaaacagagactttcctgctcaggtgctcattagcccctatcgcctatgggataaaatct

SEQ ID NO: 612986 - DNA, 657 bp, Homo sapiens
  misc_feature (6)..(7): n is a, c, g, or t
  misc_feature (437)..(437): n is a, c, g, or t
  misc_feature (628)..(628): n is a, c, g, or t
aggcgnnaaactgtttattgctcacattattcatactttattaatttattgtttaattgacaagtagtaattgtgaacatctatggggtacagtgtcatgtatcgttctatgcatacatggtataaagattaaatcaagtaatgttttgatctatgcatacattgtagaaagattaaatcaagctaattaacatatctatcacctaaccaacttacctttagtgtgagcgtgatgagaacattaaaaatcctttattaaagcagttttgaaatatgtaacacatgatgattaactctggtcactgtgcagtgcgataggtcactaaaacgtattactaccgcctgagactttgtggcctttgaccaacaccttgtacctgtccccacagcccctgatataaccaccttattactctgtaactatgagatccactatnttagatactatatataagtgagatgatgaatatggatattctgcctaattcagtagaccatatgaggcttgtgacagaaactgcaattaaaactaaaatcgatgaggagacctaggtgcttatgaacatcggtatagaaaaggaccgaatgctgagtaaattcaggaccccaattattaagtgccacattnggagaagtggacagaagtttgctctagta

SEQ ID NO: 612987 - DNA, 107 bp, Homo sapiens
ttggcaggtggtcatccccccgtacggccgtgaacaatccactgctgtgaactttggcgctctagaaattttgaccgcaagtaactgaataaatgtggtgttctcta

SEQ ID NO: 612988 - DNA, 335 bp, Homo sapiens
gatccccggcggcagatggggaaggcagagtccagtcagagaacacagagtgtgaagacggccagtgtcaagttctctcagagagacagtagttagaggctgaatagaaaacattgcataataggcaggctaagaagcagcagtagatcagcatgcttcagagacagctggaagagtcttgctcatgaagcagtcagttggttgatatcaccgagaagtcaagaagaggagaaccaaaaagtatcctttggatttggcaatatagcgtcctgcttaatctgtggagtacattcccagcctcccagtggatgcgtgaaaccatggataggactgaa

SEQ ID NO: 612989 - DNA, 217 bp, Homo sapiens
tgaggattgcgcgagattatggggctctttggatgaagagttttagggcgtcagtgaagggttgtagtagacccggtaggggcctacaaggtgggggccttgcgtaggttgtatatagcctagaatttttcgttcggtaagcattaggaatgccattgcgattagaatgggtacaatgaggagtaggaggtggggcatgggtcgcggttaaggtcgc

SEQ ID NO: 612990 - DNA, 644 bp, Homo sapiens
gaggcagctgtaccctttggccagtgtataacgacggtcagctgataccccagactcgaccgatgataaatagtacaagctaaatcgctgggcgtagtggcaggttgcctgtaatcccagctactcaggaggctgagacaggagaatcacttaacccaggaggtggaggttgcagtgagccaagatcgccccatagcactccagcctgggcgacaagagcaagactccatctcaagaaaaaactcaaacaccaaatacaaacgaaaaaggactggagtatccatttgattgggcagttagtacccttttggagaccaattccagtggattggtagaggtgaaatctggctaatagaactacgtaatatggagaggtcaggcggtaagtcaaggatgggaatacttcaggcatattaattgaaagagtgaccggattaagtaaaagctggagctcagtagagaatgataataaccaaaaagcgggttctgaagagaaaggagtgtgaacatgagcacgggtggatgtggttaagttacatggtctacttctgcagacgtttgctgagcacttcccgtggtgccagccactctactaggtagaggggtcaagcctactagggaaagccaattgagtgagaaagtgg

SEQ ID NO: 612991 - DNA, 114 bp, Homo sapiens
aagacatgatcgaatcgagctcggtaccgcagcgacatctcagtgtgaaatatgtttacagtttggagaacaatagacaatgatcaagcaactgaagagctgagctggtcttca

SEQ ID NO: 612992 - DNA, 185 bp, Homo sapiens
tcccccccccggggggggaagagacccgcctctgtgtttttcccttttttcccacagcacccccggggggggggggggcccccccctgggggggggggggggggggggggggggggccggggggggtttaatttttgggggggttttttttttttttttttaaaaaaaattggttttttttttta

SEQ ID NO: 612993 - DNA, 722 bp, Homo sapiens
  misc_feature (198)..(198): n is a, c, g, or t
  misc_feature (482)..(482): n is a, c, g, or t
  misc_feature (486)..(486): n is a, c, g, or t
  misc_feature (498)..(498): n is a, c, g, or t
  misc_feature (501)..(501): n is a, c, g, or t
cggcggtgaactgcttcctgcaggctggccatggcgcttcacgttcccaaggctccgggctttgcccagatgctcaaggagggagcgaaacacttttcaggcattagaagaggctgtgtatagaaacatacaagcttgcaaggagcttgcccaaaccactcgtacagcatatggaccaaatggcaatgaacaaaagtnggttatcaaccacttggagaagttggtttgtgacaaacgatgcagcaacgtattttaagagaactagaagtacagcatcctgctgcaaaaatgattgtaatggcttctcatatgcaagagcaagaagttggagatggcacaaactttgttctggtatttgctggagctctcctggaattagctgaaagaactttctgaggattggcctgtcagtttcagaggtcatagaaggttatgaaatagcctgcagaaaaagctcatgagattcttcctaattgtggtantgtngttctgcaaaanaanccttccgagatattgcatgaagtctcatctctacttcgtacctccataatgagtaaacaatatggtaatgaagtatgtctggccaagcttatgtgctcaggcatgcgtatctatttatcctgattccggccatttcaatgttgataagcatcagagtttgtaaaattctgggctctggtatcagttcctcttcagtattgcatggcatggggttgacgaag

SEQ ID NO: 612994 - DNA, 783 bp, Homo sapiens
  misc_feature (649)..(649): n is a, c, g, or t
  misc_feature (652)..(653): n is a, c, g, or t
  misc_feature (663)..(663): n is a, c, g, or t
  misc_feature (676)..(676): n is a, c, g, or t
  misc_feature (681)..(681): n is a, c, g, or t
ggtcaccgctactgggcgggggtctggggagcgcagtagccatggcaagccgtctcctgctcaacaacggcgccaagatgcccatcctggggttgggtacctggaagtcccctccagggcaggtgactgaggccgtgaaggtggccattgacgtcgggtaccgccacatcgactgtgcccatgtgtaccagaatgagaatgaggtgggggtggccattcaggagaagctcagggagcaggtggtgaagcgtgaggagctcttcatcgtcagcaagctgtggtgcacgtaccatgagaagggcctggtgaaaggagcctgccagaagacactcagcgacctgaagctggactacctggacctctaccttattcactggccgactggctttaagcctgggaaggaatttttcccattggatgagtcgggcaatgtggttcccagtgacaccaacattctggacacgtgggcggccatggaagagctggtggatgaagggctggtgaaagctattggcatctccaacttcaaccatctccaggtggagatgatcttaaacaaacctggcttgaagtataagcctgcagttaaccagattgagtgccacccatatctcactcaggagaagttaatccagtactgccgtcaagntcnnggtgacgctnaagcccctcggtntctgnaaggcctgggcaagccgaggccttttctgggatccagacaagggcgggcagaaaaaataacgcaggctgtcggtccctcgagaaatggggcccttttcccaa

SEQ ID NO: 612995 - DNA, 752 bp, Homo sapiens
  misc_feature (228)..(228): n is a, c, g, or t
  misc_feature (512)..(512): n is a, c, g, or t
  misc_feature (516)..(516): n is a, c, g, or t
  misc_feature (528)..(528): n is a, c, g, or t
  misc_feature (531)..(531): n is a, c, g, or t
cggcggtgaactgcttcctgcaggctggccatggcgcttcacgttcccaaggctccgggctttgcccagatgctcaaggagggagcgaaagtaagtggctgcacaggcaacaggaatgagcacttttcaggcattagaagaggctgtgtatagaaacatacaagcttgcaaggagcttgcccaaaccactcgtacagcatatggaccaaatggcaatgaacaaaagtnggttatcaaccacttggagaagttggtttgtgacaaacgatgcagcaacgtattttaagagaactagaagtacagcatcctgctgcaaaaatgattgtaatggcttctcatatgcaagagcaagaagttggagatggcacaaactttgttctggtatttgctggagctctcctggaattagctgaaagaactttctgaggattggcctgtcagtttcagaggtcatagaaggttatgaaatagcctgcagaaaaagctcatgagattcttcctaattgtggtantgtngttctgcaaaanaanccttccgagatattgcatgaagtctcatctctacttcgtacctccataatgagtaaacaatatggtaatgaagtatgtctggccaagcttatgtgctcaggcatgcgtatctatttatcctgattccggccatttcaatgttgataagcatcagagtttgtaaaattctgggctctggtatcagttcctcttcagtattgcatggcatggggttgacgaag

SEQ ID NO: 612996 - DNA, 764 bp, Homo sapiens
ggcagagctgactctgggaggcgttagggcccagagtacctggatccgccgcttgctccgcatggagtccgaatcggaaagcggtgctgctgctgacaccccgcccactgagagtaccctaagttcttccatggtgatgaagagattatcgaggtggtagaacgttgaatcccgggttccagcacgtcacccaggatgaccatggcaccactgagatggactgatgtggacgttttgcaggaacaagaggagcgaatgagggcgtgcgaagagtggcgtgtgcttcttaaaagccctatgaaagggtctggtcgcgcagcaatggaccggacccagactgaataacgagcggtcaccagttgctgtagccatcagccattctgtttgatttagtggtcgaacgcgcgttaggattccccaaagtattcaaatatcgctttggcaattgcgaaccagggagttatagaaacgatttacacgaaagacgcattgctgtaataaggcgggatcaaggcaagtggggagctgcatcctttgcattgttgcaggctcataagtgaatctgtgacttgtagctcggttgtcaccctaatgacatccatctcgtgagtagtccagcgagggtgaccatgagtggccccttggaaattgctgctagggtcgtacaataacaggctgagcgtcttctcccttaggaaccgggaaccactggcctcggttcaatcgcatagtccgcgcgacctggtctgtctgggatggactgg

SEQ ID NO: 612997 - DNA, 1433 bp, Homo sapiens
  misc_feature (864)..(864): n is a, c, g, or t
ggtcaccgctactgggcgggggtctggggagcgcagtagccatggcaagccgtctcctgctcaacaacggcgccaagatgcccatcctggggttgggtacctggaagtcccctccagggcaggtgactgaggccgtgaaggtggccattgacgtcgggtaccgccacatcgactgtgcccatgtgtaccagaatgagaatgaggtgggggtggccattcaggagaagctcagggagcaggtggtgaagcgtgaggagctcttcatcgtcagcaagctgtggtgcacgtaccatgagaagggcctggtgaaaggagcctgccagaagacactcagcgacctgaagctggactacctggacctctaccttattcactggccgactggctttaagcctgggaaggaatttttcccattggatgagtcgggcaatgtggttcccagtgacaccaacattctggacacgtgggcggccatggaagagctggtggatgaagggctggtgaaagctattggcatctccaacttcaaccatctccaggtggagatgatcttaaacaaacctggcttgaagtataagcctgcagttaaccagattgagtgccacccatatctcactcaggagaagttaatccagtactgccagtccaaaggcatcgtggtgaccgcctacagccccctcgggtctcctgacaggccctgggccaagcccgaggacccttctcttcctggaggatcccaggatcaaggcgatcgcagccaagcacaaataaaactacaggccaggtcctgatccggttcccatgcagaggaacttggtggtgatccccaagtctgtgacaccagaacgcattggtgagaacttnaaggtctttgactttgaactgagcagccaggatatgaccaccttactcaggtacaacaggaactggagggtctgtgccttgttgagctgtacctcccacaaggattaccccttccatgaagagttttgaagctgtggttgcctgctcgtcccaagtggactatactaaccatgttgttatcatatgccctcaatttattattcccttgcaacatgtagtcatggccatgtgtcacatcagacagtgggacagcaaccatgtagcagtggccatgcgagggcagtgtctacgcttgatgtctggatctcaatgagccctgtcagatagcagtagcaagtcatcattcccagttgtgcttttgcccctatctattcttaccccttgactggggagcaacaagttaacaaaaaccattggaaacaatttacacccaccattatatgatctgcaccacaagcagcaacgcgacaaatcataaccacgggtcaaaaactagatgccaacttaacaggttgagatttatgacctgcttggacactggaaatcctttacaggcaaagaatttcgtc

SEQ ID NO: 612998 - DNA, 866 bp, Homo sapiens
ggtcaccgctactgggcgggggtctggggagcgcagtagccatggcaagccgtctcctgctcaacaacggcgccaagatgcccatcctggggttgggtacctggaagtcccctccagggcaggtgactgaggccgtgaaggtggccattgacgtcgggtaccgccacatcgactgtgcccatgtgtaccagaatgagaatgaggtgggggtggccattcaggagaagctcagggagcaggtggtgaagcgtgaggagctcttcatcgtcagcaagctgtggtgcacgtaccatgagaagggcctggtgaaaggagcctgccagaagacactcagcgacctgaagctggactacctggacctctaccttattcactggccgactggctttaagcctgggaaggaatttttcccattggatgagtcgggcaatgtggttcccagtgacaccaacattctggacacgtgggcggccatggaagagctggtggatgaagggctggtgaaagctattggcatctccaacttcaaccatctccaggtggagatgatcttaaacaaacctggcttgaagtataagcctgcagttaaccagattgagtgccacccatatctcactcaggagaagttaatccagtactgccagtccaaaggcatcgtggtgaccgcctacagccccctcgggtctcctgacaggccctgggccaagcccgaggacccttctcttcctggaggatcccaggatcaaggcgatcgcagccaagcacaattccccaaggctgtgacaccagaacgcattgctgagaacctttaagtctttgacctttgactgagcaggcaggatatgaccaccttactcagcttcaac

SEQ ID NO: 612999 - DNA, 1424 bp, Homo sapiens
  misc_feature (855)..(855): n is a, c, g, or t
ggttgtgagatagcagctcggtcagtgaagattgtgctgatcatactgatctgcagcggtcgcctagatgtgcatacttgagggtgcgtacctggaagtcccctccagggcaggtgactgaggccgtgaaggtggccattgacgtcgggtaccgccacatcgactgtgcccatgtgtaccagaatgagaatgaggtgggggtggccattcaggagaagctcagggagcaggtggtgaagcgtgaggagctcttcatcgtcagcaagctgtggtgcacgtaccatgagaagggcctggtgaaaggagcctgccagaagacactcagcgacctgaagctggactacctggacctctaccttattcactggccgactggctttaagcctgggaaggaatttttcccattggatgagtcgggcaatgtggttcccagtgacaccaacattctggacacgtgggcggccatggaagagctggtggatgaagggctggtgaaagctattggcatctccaacttcaaccatctccaggtggagatgatcttaaacaaacctggcttgaagtataagcctgcagttaaccagattgagtgccacccatatctcactcaggagaagttaatccagtactgccagtccaaaggcatcgtggtgaccgcctacagccccctcgggtctcctgacaggccctgggccaagcccgaggacccttctcttcctggaggatcccaggatcaaggcgatcgcagccaagcacaaataaaactacaggccaggtcctgatccggttcccatgcagaggaacttggtggtgatccccaagtctgtgacaccagaacgcattggtgagaacttnaaggtctttgactttgaactgagcagccaggatatgaccaccttactcaggtacaacaggaactggagggtctgtgccttgttgagctgtacctcccacaaggattaccccttccatgaagagttttgaagctgtggttgcctgctcgtcccaagtggactatactaaccatgttgttatcatatgccctcaatttattattcccttgcaacatgtagtcatggccatgtgtcacatcagacagtgggacagcaaccatgtagcagtggccatgcgagggcagtgtctacgcttgatgtctggatctcaatgagccctgtcagatagcagtagcaagtcatcattcccagttgtgcttttgcccctatctattcttaccccttgactggggagcaacaagttaacaaaaaccattggaaacaatttacacccaccattatatgatctgcaccacaagcagcaacgcgacaaatcataaccacgggtcaaaaactagatgccaacttaacaggttgagatttatgacctgcttggacactggaaatcctttacaggcaaagaatttcgtc

SEQ ID NO: 613000 - DNA, 1412 bp, Homo sapiens
  misc_feature (843)..(843): n is a, c, g, or t
ggtcaccgctactgggcgggggtctggggagcgcagtagccatggcaagccgtctcctgctcaacaacggcgccaagatgcccatcctggggttgggtacctggaagtcccctccagggcaggtgactgaggccgtgaaggtggccattgacgtcgggtaccgccacatcgactgtgcccatgtgtaccagaatgagaatgaggtgggggtggccattcaggagaagctcagggagcaggtggtgaagcgtgaggagctcttcatcgtcagcaagctgtggtgcacgtaccatgagaagggcctggtgaaaggagcctgccagaagacactcagcgacctgaagctggactacctggacctctaccttattcactggccgactggctttaagcctgggaaggaatttttcccattggatgagaatgaggtgggggtggccattcaggagaagctcagggagctggtggatgaagggctggtgaaagctattggcatctccaacttcaaccatctccaggtggagatgatcttaaacaaacctggcttgaagtataagcctgcagttaaccagattgagtgccacccatatctcactcaggagaagttaatccagtactgccagtccaaaggcatcgtggtgaccgcctacagccccctcgggtctcctgacaggccctgggccaagcccgaggacccttctcttcctggaggatcccaggatcaaggcgatcgcagccaagcacaaataaaactacaggccaggtcctgatccggttcccatgcagaggaacttggtggtgatccccaagtctgtgacaccagaacgcattggtgagaacttnaaggtctttgactttgaactgagcagccaggatatgaccaccttactcaggtacaacaggaactggagggtctgtgccttgttgagctgtacctcccacaaggattaccccttccatgaagagttttgaagctgtggttgcctgctcgtcccaagtggactatactaaccatgttgttatcatatgccctcaatttattattcccttgcaacatgtagtcatggccatgtgtcacatcagacagtgggacagcaaccatgtagcagtggccatgcgagggcagtgtctacgcttgatgtctggatctcaatgagccctgtcagatagcagtagcaagtcatcattcccagttgtgcttttgcccctatctattcttaccccttgactggggagcaacaagttaacaaaaaccattggaaacaatttacacccaccattatatgatctgcaccacaagcagcaacgcgacaaatcataaccacgggtcaaaaactagatgccaacttaacaggttgagatttatgacctgcttggacactggaaatcctttacaggcaaagaatttcgtc

SEQ ID NO: 613001 - DNA, 471 bp, Homo sapiens
cagaatggcttttgttgcatgggttgaagaggttgtggcatgactggtgtgactgctgctgactggctcctgggagcttggagtgcaggagctgctccctgtgatgcccactgctccccagtaagctgtgcagtgcatgtccagtcaggtcccccagcccacccagtcctccgatgtctggctggtccgatgatgctgcatgagctggcttgtggctcatgtttcccagcaggctctgcagtgccaccctcaccgcctagcgcagagagttcgtggccgctgcttccgctggaccccagtgccccagtgcatcggggggtttgttcagatactcgttgacatttcctggaaattgctcctcatcctggtctgtcttgggttcctgcatccagaagaaaagccgattggaccctgccttgaacttcagcacgtagaccctcccgctggggcactgcggaacccgcttgaact

SEQ ID NO: 613002 - DNA, 481 bp, Homo sapiens
ccgggccgcgtgcctctcccagtcatcaagtgttatgaagtctgtactctaccccactgctggccatccctacctgtcatgggttttcggtgttcgccatgactaattacaggttcttggttgttacccattcctggggaggagccttcagtcggccctggatgtcagcccatagcatgtgctgtcatagaggtctgtgctgcaggtagcctgccggctgctggatgccctggagttcctccatgagaatgagtatgttcatggaaatgtgacagctgaaaatatctttgtggatccagaggaccagagtcaggtgactttggcaggctatggcttcgccttccgctattgcccaagtggcaaacacgtggcctacgtggaaggcagcaggagccctcacgagggggaccttgagttcattagcatggacctgcacaagggatgcgggccctcccgccgcagcgacctccagagcctgggc

SEQ ID NO: 613003 - DNA, 751 bp, Homo sapiens
  misc_feature (520)..(520): n is a, c, g, or t
ggtcaccgctactgggcgggggtctggggagcgcagtagccatggcaagccgtctcctgctcaacaacggcgccaagatgcccatcctggggttgggtacctggaagtcccctccagggcaggtgactgaggccgtgaaggtggccattgacgtcgggtaccgccacatcgactgtgcccatgtgtaccagaatgagaatgaggtgggggtggccattcaggagaagctcagggagcaggtggtgaagcgtgaggagctcttcatcgtcagcaagctgtggtgcacgtaccatgagaagggcctggtgaaaggagcctgccagaagacactcagcgacctgaagctggactacctggacctctaccttattcactggccgactggctttaagcctgggaaggaatttttcccattggatgagtcgggcaatgtggttcccatgtgtaccagaatgagaatgaggtgggggtggccattcaagagaagctcagggagcaggtggtgaagcgtgagaacttnaaggtctttgactttgaactgagcagccaggatatgaccaccttactcaggtacaacaggaactggagggtctgtgccttgttgagctgtacctcccacaaggattaccccttccatgaagagttttgaagctgtggttgcctgctcgtcccaagtggactatacctgtgtttcttggctcatttttttccttgcaaatgtagggtacgcgggcgccgtaatcagcgtgcg

SEQ ID NO: 613004 - DNA, 994 bp, Homo sapiens
tgggctatccgtcgagccaccgcgtcgatcctgttgctgtttgacagtagtgcaggatccctgggaaggctgccccaagacactgccccaagtgggtggatatctgccttcctgctgcaagtggaggcaggtccagcagccctcttcagagcccctgtaaatgctatcgcagctgagtcctgacgcctaccagttccattggtgtccgtgcaccccttctgtctgtaccctttcatggctgtgcagccgtacacgcatggagctgggcactgtcccatgtgcaatagaggtgcatccccgcatggatgactaagcgtcgcaaggcaagacggctaccccaccgcaatctgcaaacagggcctctccctatgaggttctataacatatgtgaactcattcccgctcatgaagaacgcaccagaactgcccagacaaagcccgacactatacccacaaagaagaggggctgtcatgagatctccagacaaggcgaccactccgacggagcggcggcgggcggcccacagaaagagggagcaagcggacagagactcataccggaccaccgcaacccacacacaacaccaccccataagaccacgacgccaacgcactgaaagtacacccaaatcagccaaacggcaatacacaacaagccgcacctcacagatcactcacggatgcacaccacagacacacgcagcaacatcgaaacccaaaaagacgacgacggaagcgaaaggagaaacgcccaaagcaaaaccacacacaacaacacagcgcagaagcaaacggaagggcccacagacacaaggagacggcgcaggtgaagagaagaaaagaacacggcagaaggagcaggcaaacaggaaagacaacgacagaagagccagaagactacgacaaaaccgagagcgcacagagagagcaagcgccaacggcggccggaggagacgataaacacgggaacaaagcagaaagcccgacggcacgg

SEQ ID NO: 613005 - DNA, 759 bp, Homo sapiens
ggtcaccgctactgggcgggggtctggggagcgcagtagccatggcaagccgtctcctgctcaacaacggcgccaagatgcccatcctggggttgggtacctggaagtcccctccagggcaggtgactgaggccgtgaaggtggccattgacgtcgggtaccgccacatcgactgtgcccatgtgtaccagaatgagaatgaggtgggggtggccattcaggagaagctcagggagcaggtggtgaagcgtgaggagctcttcatcgtcagcaagctgtggttgcaacggtacccattggaagaacggggcctcgtggtgaaccgggaggccttgcccagaaagacaactccagcgaaccctttgaaaggcttggcaccttaacccttgggaacccctctttacgcttaatttccacttgggcccgaacttggtttttaaaaggccccttgtggcaaggggaactttttaccccgcattcggcactcgacgttcgggggccaacatggttgggtttcccccaaggttggaacaagcgccaaagccgaatttccttgcacacaccgatttggcgccgggccccattgcgaaacaggaaagcttggcgtggagcattcgcaccagggggccctggcttggaacagggcctatttggggccattctcccaaggtttccaaatcgccattccttcccaggattgcgccagcattcgcactccttcgacaagcaaaagcccttgggcttttggaaagggtatta

SEQ ID NO: 613006 - DNA, 230 bp, Homo sapiens
atttttgtattttttgtagagacagggttttgccatcatgcccaggctggtcttgaactcctgggctcaagcactgctcctgcctttgcctcccaaaggtttgggattacaggcatgagtcactacactggcctatttctcacttttgtgtgtccacttcctaccttggaatacctactccatctctcttattaaaatcgtccatcctaataatcctccctagtctttgg

SEQ ID NO: 613007 - DNA, 292 bp, Homo sapiens
aggccctcccagcaaccaggataccccccctttgggggctttgtgtacagaggtccgggttttagacctcataggctgcagaaatttggggcagcccccctcaaaaagcccctttcaggggccagaactcctttgccagggtggatttttcaagtcggggctgcataattaaagccgttgcagttttattttttttacagcttttttcccaaaaatgatttggagttgggtgggcagcccttcgccctgatatgtgtgctttaccataaaaacccaatttaatatattttta

SEQ ID NO: 613008 - DNA, 466 bp, Homo sapiens
acattttatagttctgtaattttaaaacaattagaaaataagggagttccttgactgcaattattgctttcataaagaaaacccagactttgagtttagcagtctaattggctgtgttgtgcaaccttggaatgaatcagaaagtctaaagacaatgaacacaatttctgttaattcactagtataatgaattcccttcctgtaggctccttgaagacagagaaggaaacttatttctctctacttcccactgcctagcagggtacccagcactcactaggtggccaataaatgttgactaaatgtcttgattcatgtattcgttaaaaaaacaatgccactgatacttgcctatttgacccttattaattcctttcaccaaccataagaagttaatatacctttgaactgcaactaaaatgaagcaaaatctaaaattaatagacaaagatagagtaagaccaaa

SEQ ID NO: 613009 - DNA, 204 bp, Homo sapiens
tttgacgcgtgctcttcctaaagcccttcacgcagtccaaaaagctgagatggttccttagagccttgagcctggccactctcccacctgctagcatctgaataaaagttgctttcctttcaccacacctcgcttctcctgcggcaagcagccaaacctgagtcagttacaagacatctcaacctcccctgatcccacagcttc

SEQ ID NO: 613010 - DNA, 430 bp, Homo sapiens
gcatggggagctgacggtggaggtcgcggctctaacggggctttctacaagggattcatccaagatgttcatgaagactcccttacagtgtttgaaaatcatggaaccagaacgccaggttccatttaatgaagttagattaccaccacacctgatcataaaaaaagaaattagtgaaggcgatgacgtagaggtatattcaagagacaaatgaccaagagaccagtggcgtcgcggcggcaaacacgtcgctcgagaaaggcgaatagaccgtggcaggaatatgcacgcggaagaagggagtgaccatgacaactcagcaacactccgacaccgaacatcccgaggacagtgctaaaccaaaaaacaaacacaggcccacaaaccaaccccccgaccacacagcccacacgagatagcacacgaacga

SEQ ID NO: 613011 - DNA, 1662 bp, Homo sapiens
  misc_feature (470)..(470): n is a, c, g, or t
  misc_feature (1082)..(1082): n is a, c, g, or t
  misc_feature (1498)..(1498): n is a, c, g, or t
  misc_feature (1511)..(1511): n is a, c, g, or t
  misc_feature (1513)..(1513): n is a, c, g, or t
  misc_feature (1535)..(1535): n is a, c, g, or t
  misc_feature (1618)..(1618): n is a, c, g, or t
  misc_feature (1644)..(1644): n is a, c, g, or t
ggcacgaggcacccaatgcctcactgatctgccccaatgagcaagaggacaggctaccctgaactcctaaagccactgaggccagttgctagatataatcgatggtgagcaggatggtatccagaaatgtccctagaagcctacactcatttcatgccacacctccagcagagggcctggaagaggacccgacatctagcccagtgagagtgtgcaaagccacatgtcaaatggacaacttgacggagatttgcccttgactgactgtgcaggctggttccacttacagcacttgagtttacctttgcacagattcctgtatcagggctcttggactgacttgccacacatctggagccctttcctctcaccacattgccctcctgggcacccccggtggacagcgcccaacattgcaggctccacaactttccttgatgttgcttaaagggtagccagttagggttccngagaggagaaggaggaagaagaggaggaggagaaagaagcagcaacgatcattctgccattgtaaagagtgactctttccttagggatggtggtcttctccccttgccaggctttggactgcagcccccagtcaaaggtctttgcaggacactttctatccttggagttgcagaggaggcctgattggccattccttctgggacagacagagagagggcccatggcctgctctgagctcccttcaatttcaaggaacccttagttctgagaggagagaggaaggctgcacctaccgtggcctcacagctgggacccctcatgggggccaacccctggcctgctgctgtgcttcagtgacacagtaaagcttaagagggtggctgcctcctaggaactcctgggacttctaggtacaaactcaggtgcccttataaagagacccactgcttgccttgagtccagaaagcactgcttctgcagtgaaaaacacacacttactatgtcagttttggccataaaatgccagccaaatccactgctggcctgaactgcccctggacactggactttctgcacagtgactggcagcagagcaagtgcagccagggttngtggccaaagggaagaaagcatagtaaattcaacctctgttcctcatgggagtctgaccgataatctcaggcggaccttaggatcttgggcctggaggcaagagaaaaaagctggaggaagaggagtcgcagagaaacccagtcctctgactggtttctggtgaggtctctattcatcagtgggaggtaagatgcccttttcgttagcgcttttgtttctcagcctggggatcagtggatttgggttcctataacctgttgctaccttttaaaaagatcccctctctccaaagagaaaagtaatacataatcattaaagaaagtttggaaaatagagaaaactatgaggacaaaaaccccccagccattcagagtcccaccacacagaggcaagcactattaacactttgctgctntcctttctagtgngntcttgctatgtcttgcgctganatcaccctgcagttcttgatcagcaggattttggcttgccaccttgtgcaggcatcatactgaataattcatttaagcatctnctaatttggtggacctttcttggctnggttttccccatcccacc

SEQ ID NO: 613012 - DNA, 552 bp, Homo sapiens
acgttgacacttcaggatattgttgttttaaaaacaaaaattggccaggcacggtaataccagcactttaggaggtgaaggtgggcagatcacctgaggtcaggagttccagaccagcctggcctcaagtgatccacccaccttggcctcccaaagtgctgggattacaggcatgagccaccgcgcccagcctgaaaatacttttgtaaatgtaagacacactgtactactgttacttataaagggcagtcagtaaatgctttagttgaatgatgaggcggcacaaaaatttcagtatttacattcttatgatgcttcaggcttttcaaagtgctttcatgtagctgatcccttttgcataacaagccactctaaatccattttggaacaggcaagacaaataaatattggaaagctgagtaaacaggctcagagatgtttaacaccttgctctgggcaaaaagtgaattaaacctagccaagactggcatctaagtggtctgtctgctagccaatgtttcttcaggtttattttttggtgttgttctttgg

SEQ ID NO: 613013 - DNA, 1897 bp, Homo sapiens
  misc_feature (470)..(470): n is a, c, g, or t
  misc_feature (1082)..(1082): n is a, c, g, or t
ggcacgaggcacccaatgcctcactgatctgccccaatgagcaagaggacaggctaccctgaactcctaaagccactgaggccagttgctagatataatcgatggtgagcaggatggtatccagaaatgtccctagaagcctacactcatttcatgccacacctccagcagagggcctggaagaggacccgacatctagcccagtgagagtgtgcaaagccacatgtcaaatggacaacttgacggagatttgcccttgactgactgtgcaggctggttccacttacagcacttgagtttacctttgcacagattcctgtatcagggctcttggactgacttgccacacatctggagccctttcctctcaccacattgccctcctgggcacccccggtggacagcgcccaacattgcaggctccacaactttccttgatgttgcttaaagggtagccagttagggttccngagaggagaaggaggaagaagaggaggaggagaaagaagcagcaacgatcattctgccattgtaaagagtgactctttccttagggatggtggtcttctccccttgccaggctttggactgcagcccccagtcaaaggtctttgcaggacactttctatccttggagttgcagaggaggcctgattggccattccttctgggacagacagagagagggcccatggcctgctctgagctcccttcaatttcaaggaacccttagttctgagaggagagaggaaggctgcacctaccgtggcctcacagctgggacccctcatgggggccaacccctggcctgctgctgtgcttcagtgacacagtaaagcttaagagggtggctgcctcctaggaactcctgggacttctaggtacaaactcaggtgcccttataaagagacccactgcttgccttgagtccagaaagcactgcttctgcagtgaaaaacacacacttactatgtcagttttggccataaaatgccagccaaatccactgctggcctgaactgcccctggacactggactttctgcacagtgactggcagcagagcaagtgcagccagggttngtggccaaagggaagaaagcatagtaaattcaacctctgttcctcatgggagtctgaccgataatctcaggcggaccttaggatcttgggcctggaggcaagagaaaaaagctggaggaagaggagtcgcagagaaacccagtcctctgactggtttctggtgaggtctctattcatcagtgggagctgattttatctgatttcctcaagagtgcattccagaaggggacctgctattcttcgaggggacctgctattcttcgaggggacctgctattcttcgaggcagtggaccctgtttgctgatggtcaacactctggccctgctgccccatgtccctgtggagaagtgtgaaggacgggtgccttaaacccacacttccagggacccttcagcacaggtcctgcctgttcccatggtgcttctcaccctgaaccctcagagctacagccagggatagagcagatgagcagtgagctggtttccaccctctggggcaggaggggcttgggcttccctttgaccctcttccttcctttcccagatcttcaatatttgttgtgatgtaacagccataagagctgtaagaggaactgtgggctttgggagctttcttgggttgaaagaggggtggggggaggggatgcatgcaggggtatgaaggcagcccaaggtctcccagaggctcgggaggaaacccttttggaatacatgtgttattgttgcattactgtgttgtgaagataagaagctgctctgtatgctaaagctttctctcctcaataaaaatataaagggtgtgtaaaaaaaaaaa

SEQ ID NO: 613014 - DNA, 114 bp, Homo sapiens
tcggatagtcgagctgtatggctgaaatcctccaaggtggtctgatatctccatcaatttcaggtcttggcgggtttgcttcaaatttccccggttcactacccacgccgctcg

SEQ ID NO: 613015 - DNA, 1890 bp, Homo sapiens
  misc_feature (470)..(470): n is a, c, g, or t
  misc_feature (1082)..(1082): n is a, c, g, or t
  misc_feature (1717)..(1717): n is a, c, g, or t
ggcacgaggcacccaatgcctcactgatctgccccaatgagcaagaggacaggctaccctgaactcctaaagccactgaggccagttgctagatataatcgatggtgagcaggatggtatccagaaatgtccctagaagcctacactcatttcatgccacacctccagcagagggcctggaagaggacccgacatctagcccagtgagagtgtgcaaagccacatgtcaaatggacaacttgacggagatttgcccttgactgactgtgcaggctggttccacttacagcacttgagtttacctttgcacagattcctgtatcagggctcttggactgacttgccacacatctggagccctttcctctcaccacattgccctcctgggcacccccggtggacagcgcccaacattgcaggctccacaactttccttgatgttgcttaaagggtagccagttagggttccngagaggagaaggaggaagaagaggaggaggagaaagaagcagcaacgatcattctgccattgtaaagagtgactctttccttagggatggtggtcttctccccttgccaggctttggactgcagcccccagtcaaaggtctttgcaggacactttctatccttggagttgcagaggaggcctgattggccattccttctgggacagacagagagagggcccatggcctgctctgagctcccttcaatttcaaggaacccttagttctgagaggagagaggaaggctgcacctaccgtggcctcacagctgggacccctcatgggggccaacccctggcctgctgctgtgcttcagtgacacagtaaagcttaagagggtggctgcctcctaggaactcctgggacttctaggtacaaactcaggtgcccttataaagagacccactgcttgccttgagtccagaaagcactgcttctgcagtgaaaaacacacacttactatgtcagttttggccataaaatgccagccaaatccactgctggcctgaactgcccctggacactggactttctgcacagtgactggcagcagagcaagtgcagccagggttngtggccaaagggaagaaagcatagtaaattcaacctctgttcctcatgggagtctgaccgataatctcaggcggaccttaggatcttgggcctggaggcaagagaaaaaagctggaggaagaggagtcgcagagaaacccagtcctctgactggtttctggtgaggtctctattcatcagtgggagctgattttatctgatttcctcaagagtgcattccagaaggggacctgctattcttcgaggggacctgctattcttcgaggggacctgctattcttcgaggcagtggaccctgtttgctgatggtcaacactctggccctgctgccccatgtccctgtggagaagtgtgaaggacgggtgccttaaacccacacttccagggacccttcagcacaggtcctgcctgttcccatggtgcttctcaccctgaaccctcagagctacagccagggatagagcagatgagcagtgagctggtttccaccctctggggcaggaggggcttgggcttccctttgaccctcttccttcctttcccagatcttcaatatttgttgtgatgtaacagccataagagctgtaagaggaactgtgggctttgggagctttcttgggttgaaagaggggtgntttgtttcattttatttaagattcaacttaccacccatttttataatctctacacataccttactctttacattctaaaaataatctttactcttaaaacatcttgctccctataacctccttaaaagcctctgttctataaacgccttccttattttcatccctcctctgtc

SEQ ID NO: 613016 - DNA, 253 bp, Homo sapiens
cccgagtcagggcgatcccacccgaaatcaacagatatatacactcttctcagcaccacatcgcacttattctaaaattgaccgcataactggaagtaaagcactcttcagcatttcgtaaaagaaaacatatcacaacaaactgtctctcagaccacagtgcaatcaaattagaactcaggattaagaaactcactcaacaactacaactcatagcaaacaacaaaaactcagaaggaagggtctgatttcc

SEQ ID NO: 613017 - DNA, 350 bp, Homo sapiens
tgagccccccccccccccccccgcagccagtaacgtagcctacccccaccagccacaaacaaagcataaaaaacttattaaaagcgaactcaagtacccatataaccttcaacgctcttgttcccctaccgacgtatcaccgtcccaacacctacaacaaacacctcctcagtccctcgtcacaaaacagctcacgcagtaaaacgccgtatagtataatagaatagaatagtaggaggaccataaaaaaggataactaatatcgaggacaacttccctatccgttaggggtaataaaaccatttttctgagggtcggcctagtcggtcttacggtcgagaaaccagttg

SEQ ID NO: 613018 - DNA, 239 bp, Homo sapiens
tcggcgaattcgtgtggtgctcgggaattcgaggtgctggtctggagaattggtggtggtggtacgatgtgtgaagttttgtggtcaggagtggggcatgacacagtatgacgagaagaccctatggatgctttaatttattaaggcgcacagtacctaacaaacccacaggtcgtaaagtaccaaacctgcattaaaaatttcggttgggtcgacctcggagcataacccaatctccg

SEQ ID NO: 613019 - DNA, 926 bp, Homo sapiens
  misc_feature (1)..(1): n is a, c, g, or t
  misc_feature (461)..(461): n is a, c, g, or t
nacttgagtttaatactgtagaatggggatgacgttcttgcaaattacctaagtcaggccctgtaagacaccccgggtggaacttcgggtgggcacaacaccttcgggggacaccggtgattcttgggcaagtgttctccccgccccatattaattggtgggttctttccgcaaatagatcccccaaagagtagtcccccccccacgcccggacccacgacagtggggggtcacccagagggccacctttatataagctgtctttagaatccacttgcggcgatgtggagcccccccttgctttcgagcgcccagggtggacccactactggtacttgtgttcgccagttggttttccacgaaagggtcttgtgccccgcgttttgatcaacgcccgcggccgaatactctgattttcaagagaccacgttttgtgttgcgcgcacggaatccgccatacncacgggtggcggtacactggaggagggcccccgccgcgactcgtgtggttgacacacctactcgggggcctcggatcacaagtccacattccccgtatagcgctcgtacgaccgtaaccgatattcaccacaccttccctggggctgatatccccgaatccccccccggcccctcccgccccggggggtagctcgctgttcccatccgcgcgagttagtattcccggcagcatcggttgagcgggccccgcggtgctcttggttcacccctcaagggagcttcatcatccgttgtcgaccccttcacgcccttggcccccccttgaatacgatggttctatttttgccccccccaggggcggtggaagaagatcggaggaaggctcgactcggggcgcactgtcgactgtggtgccctcctcgacccccccgcccccaaacccctttttttcccccaccataaca

SEQ ID NO: 613020 - DNA, 167 bp, Homo sapiens
ttcacatatatcatcatacaggcaacaacacattcagagtggtgggcaggaagattcaggaccatcaggtaagggtctgttcattcttaaagtcatgtaggattttacaaggacttgacatattcagtaatataaagtggtgagtaattcggtacagtaattcggta

SEQ ID NO: 613021 - DNA, 861 bp, Homo sapiens
  misc_feature (482)..(482): n is a, c, g, or t
ggtgactagtcgatgatagtagaatcgagtgccatgagcctctaacagggggcctctcagcccttcgtagagtgatctccgttgcctgaagtccatgtgatcctcagttccattccataaggctcgctcagagtaggtccgtacgtaagccaaacacactaaactcagtatagccacactgatggtggtgctgcatggtatacacggcatggaagagcgacgatatcgaaggcccaccggcaacaagcaccatgtcccaaaaaggccgtatcggcataccagggaattacatcccttatttgtcattacctgcagcaagttgtcttgtcttcagcgcaggaattggtccttggcagcctgtgtagccacgtccaagcctaagctccgtaggcccccgaatttagggagtggccatgggtggctcctaacagagctatcatgcgcgcgttaaagtcctctctaagacagttcgcgcacgtcanctaatacacctctcggtattgacgtccgcgagtccaaggatggtattcaactcgatcgcatgagcatcgactctactagggatctaagtaggaaaaagaagcaaaatcggagaagccacgctagtacagtgtgcttaggacagcggcgtgtagtaaacgaatattgtacctaggtggtcctacgtaatttataaccacgttctcgtaacagagtgcgcctgcaaggaagattcacctttaccgaagatcgtcacgcgtgtccaggacagttctctcgggacgggtccacatcgtatcgggcatcaatcgaatgttgttctgtcagaccactaggactttcaagcaagaacctttcacggtcccaaatttaatttgggca

SEQ ID NO: 613022 - DNA, 1057 bp, Homo sapiens
atgtatattgaattgttgttattgagtaattattttatgttttatcctgttatcgtgtgaagtaattagttaaaacttgtgattattgtggttcatttttgttgtttcatttaatatgtatgttatattatttgtgggtttattgattttttgtatttattttagtttgattttgtatgttatattggttttatgattttatatttttggtattgttattttttttttctgggattttttggtcatttttacatatttttttttttaatgtttatttatttagtattttagtgatattttttttgtctttttttcttttattatattatttttgtttttttttggcgctcctgtttatctctttgtttgtttaatggctctcttttcgactctttttccacctttcgacttttcctcgttctctagttatctcttactgtgtgttatcctttcgagttgtaatagttcttgcctcttccttctcgttgggcatgttgccatctctgtcatgtttatattgtgtcttttccatccatctctatcctcttatccatttgatgaattgttttcattatgggtgtatggttataatgtacctaaacttttatggccctgcttttgttctttaaatgttctttataataggatatatttgtttgtattttttatttacattttatatttttgtacatattgtttagggtcagtccatttttaatgatctcggatgaccttaatcctagccttcggagcgttctctgtcctacttctgactttacttgtggtgtgaccatgttcagttattaatctcaataggatgttatatttataatcctttgtaaagaaatatgcaaataattgactaacatgaaaaacatatcttattctcgatgcatggccagtaacttttttgtgtatgtacttagctgtactataagtagttggtttgtatgagatggttaataaaggccaaagataaaaggtttctttttttttccttttttgtctatgaagttgctgtttattttttgtggcctaacttgatgagtgtgtgaat

SEQ ID NO: 613023 - DNA, 134 bp, Homo sapiens
gtcgcgctacctgccgagccgctgccgtatggatgatcgagaggatctggtgtacaggcgaaagtttgccgagcaggctgagcgatacgacgaaatggtggagtcaatgaagaaagtagcagggatggatgtgg

SEQ ID NO: 613024 - DNA, 465 bp, Homo sapiens
ggtgttggaactcgccataaggcattgatcaggattatggtttcccgttctgaaattgacatgaatgatatcaaagccttctatcagaagatgtatggtatctccctttgccaagccatcctggatgaaaccaaaggagattatgagaaaatcctggtggctctttgtgggggaaactaaacattcccttgagggtctcaagctatgatcagaagcctttaattatatattttcctcctataagcttaaataggaaagttttttcaccaggattccaggggggctccctccatgctgaaaaatatagcctttaaatcctttttatattataactcgggataatagagataggtcccttttttaaaaatgttttcccccacccataaaaccctatccaagttgttttgggaccaatacatgagaaagaggtttatggagctgaaaataaaatggggtcccaagcca

SEQ ID NO: 613025 - DNA, 243 bp, Homo sapiens
  misc_feature (22)..(22): n is a, c, g, or t
  misc_feature (41)..(42): n is a, c, g, or t
  misc_feature (78)..(79): n is a, c, g, or t
  misc_feature (106)..(106): n is a, c, g, or t
  misc_feature (109)..(109): n is a, c, g, or t
  misc_feature (151)..(151): n is a, c, g, or t
  misc_feature (170)..(170): n is a, c, g, or t
  misc_feature (192)..(192): n is a, c, g, or t
  misc_feature (210)..(210): n is a, c, g, or t
  misc_feature (228)..(228): n is a, c, g, or t
  misc_feature (234)..(234): n is a, c, g, or t
  misc_feature (239)..(239): n is a, c, g, or t
  misc_feature (242)..(242): n is a, c, g, or t
ctttaatttccctatacagganatgattggcatagaattannaggagtccaacattcccagctccccagttctaaganncttttgtcaaacccaataggtttgggncanttctgtttagcacttgacagctgccagctaacagtaattctnccatagttgacttgaactnctgatgcttttattgcccagtnttctctagtgggatccangtgttttgattcctaggngtctgntgcgntana

SEQ ID NO: 613026 - DNA, 220 bp, Homo sapiens
  misc_feature (83)..(83): n is a, c, g, or t
  misc_feature (123)..(123): n is a, c, g, or t
  misc_feature (156)..(156): n is a, c, g, or t
  misc_feature (171)..(171): n is a, c, g, or t
  misc_feature (204)..(204): n is a, c, g, or t
acccccaggtatgaggagggggtggtcttagggttctgttcaggtctgccccgccccctcccagccatccccaggagaacttngaattcaggtgtgcacctgcaggctgaggggctctgtganagagtgctgctcaactagggagttcaggcgccnaagacccctgtgctnctgggataggcctgcttcacttagggagcactncctcaagacaggtaaa

SEQ ID NO: 613027 - DNA, 1034 bp, Homo sapiens
gatggcaagccgttacagccacaacgcaaagtcccggagatccgtgatgtaacaaggtattgatgcgaatctggtgcccactccctactatcgctgggggactggggctgtgacggatgccttggcagcctcgcgtcgggcttcgctaggggcatggtgcggtcagctggcggcacggcggtgcggctcggcgtggtgctggatgatgatccggggaagggaacgattgccgggtcgggcagtccttagttgctggccagccgggcacggggaagacggccatcgccatgggcagtggcgcaggccctgggccctgacacgccattcacaggccatcgccggcagtgaagatcttctccctggagatgagcaatgaccgaggcgctgactgcaggcgcttccggctggtccatcgggcgttcgcagtcaaggaggagacggagactcatcgaaggggaggtggtggagatccatatagatcgaccattaatgggtacggtctccaatggtgggcaaagtgacccttctaagagcacatagatggggaccatctacgaactgggcaccaagatgagaggagtgccgacctagggacgaggtccaggccgggaatgtgattaccatcgagacggcgacgggcaagatctccaagctgggccgatcgtttcggaaagcgtccgcgagttagacgactatgtgctcccagaagcaagtacgcggaagtggcccagaatggggagcttacagaaaacgccgggaagtgggagacacaccgtgttccctggacgaaaaatggaggtcattaaatttagccaacccaggggataaccagggggcccatcaacagggggacacaggggacaatatagtaagaaaccgtgggacaaataacgtccacggtgctagatgcggcgaggaagcaacgggaagaaaccccgagagtaggaacaacgacaggcacacagaggggagaaaagaaacctgtacacaaggaaccgaaaatagataggctgtgataaacaacaacacgctag

SEQ ID NO: 613028 - DNA, 312 bp, Homo sapiens
attttagtcttgaaaaattgcttgcagctgggtctctcacggccctgacggcagaatctccacctgagtgttcggggcgtactgctggcgcgagctgaagcgcctcggccacctgcggggctgctgccgctccttctcatacgattgtcgccccttccagctctagatcttgctccagagcccgttgtccagcacaaagcagtcatcagatatcagcagtacaaggggccaaggagctggagtcaggcacttaggtcaggttcatctgtccagtggcatcagagaccttccccaccgagagagcgtcggaga

SEQ ID NO: 613029 - DNA, 977 bp, Homo sapiens
taacttagaggcaatggaaaactaaaagttgactgtactaaaaatgtatacttgtagccaggaaggtgacctcaacaattaaaagtataattattcggcgggcatggtggctcacacctgtaattccagcacttgggaggccaaggcaggcggatcacgaggtcaggagttcaaaaccagcctgtccaatatagtgaaaccccgtaccctactaaaaaatacaaaaattagctgggtatgtggcatgtgccagctactcaggagactgaggcaggagaatcatgtgaacctgggaggcggaggcatgcagtgagcccagattgcatcaatgacaaccagcctgggtgacagaggtgagactctgtctcagaacaaaaaaacaaaaagaaaaatcagacgcagcagaaacttaaaactacgcatcacaacaccgacccaaaaagggcgcagtgctacaacacataaagaggcagaagacaaggacgagcagaccgtaaaacacaaagaacaaacaaatcaagaaacgaacaacaaaatgcaagagccgcacacgatagaccacgactaacaagacagaaacaagacactcagcaggtggacaaaacaacgaaaaaggcccaaacacggagagacgaacacacaccaatgacagaacaaacacaacacccacacacagaaaagaccgaacacaaccaaaaaaaaaaagaccagacaaacagcagatgcatccacgacacagaagaaagccaaacagagggagaaaggatgcaccgaaactagcaaagaaaacaaataaaacaaaaggcacagaaaacacaaatacaagacacagcaagaaaataaggaacgacacaaacaaagaagcaacaccacaacgaagcagcaaaaaccaaacgagccaggagcacagaaacaaacaaccagaccagcaaaaagaaggtaacacaaattaaagacagaggcgcaacaaaaggaaa

SEQ ID NO: 613030 - DNA, 280 bp, Homo sapiens
agtagagaaaacatcgtgaaaagcataccatcaactatgttttaatattgagattaccataaatgcctcatagactcccataccaccatacacaagcccatacatgtccacagtctccatacagccaccaaatggattatcctaagatgcaattctagatcatggctctatcctgatttaaaggctccagtgactccaaaccccttccatgacaagtctagctcctccacacttcctaccagtatccttagaattcagccctgcctacctatgaagggaa

SEQ ID NO: 613031 - DNA, 791 bp, Homo sapiens
  misc_feature (4)..(4): n is a, c, g, or t
  misc_feature (16)..(16): n is a, c, g, or t
  misc_feature (18)..(20): n is a, c, g, or t
  misc_feature (29)..(29): n is a, c, g, or t
  misc_feature (33)..(33): n is a, c, g, or t
  misc_feature (35)..(35): n is a, c, g, or t
  misc_feature (37)..(37): n is a, c, g, or t
  misc_feature (42)..(42): n is a, c, g, or t
  misc_feature (44)..(44): n is a, c, g, or t
  misc_feature (49)..(49): n is a, c, g, or t
  misc_feature (53)..(53): n is a, c, g, or t
  misc_feature (61)..(61): n is a, c, g, or t
  misc_feature (69)..(70): n is a, c, g, or t
  misc_feature (75)..(75): n is a, c, g, or t
  misc_feature (81)..(81): n is a, c, g, or t
  misc_feature (113)..(113): n is a, c, g, or t
  misc_feature (136)..(136): n is a, c, g, or t
  misc_feature (177)..(177): n is a, c, g, or t
  misc_feature (182)..(182): n is a, c, g, or t
  misc_feature (189)..(189): n is a, c, g, or t
  misc_feature (197)..(197): n is a, c, g, or t
  misc_feature (204)..(204): n is a, c, g, or t
  misc_feature (207)..(207): n is a, c, g, or t
  misc_feature (212)..(212): n is a, c, g, or t
  misc_feature (216)..(216): n is a, c, g, or t
  misc_feature (242)..(242): n is a, c, g, or t
  misc_feature (244)..(244): n is a, c, g, or t
  misc_feature (246)..(246): n is a, c, g, or t
  misc_feature (251)..(251): n is a, c, g, or t
  misc_feature (273)..(273): n is a, c, g, or t
  misc_feature (281)..(281): n is a, c, g, or t
  misc_feature (292)..(292): n is a, c, g, or t
  misc_feature (299)..(299): n is a, c, g, or t
  misc_feature (324)..(324): n is a, c, g, or t
  misc_feature (328)..(328): n is a, c, g, or t
  misc_feature (331)..(331): n is a, c, g, or t
  misc_feature (334)..(334): n is a, c, g, or t
  misc_feature (338)..(338): n is a, c, g, or t
  misc_feature (348)..(348): n is a, c, g, or t
  misc_feature (351)..(351): n is a, c, g, or t
  misc_feature (360)..(360): n is a, c, g, or t
  misc_feature (363)..(363): n is a, c, g, or t
  misc_feature (378)..(378): n is a, c, g, or t
  misc_feature (382)..(382): n is a, c, g, or t
  misc_feature (389)..(389): n is a, c, g, or t
  misc_feature (398)..(398): n is a, c, g, or t
  misc_feature (452)..(452): n is a, c, g, or t
  misc_feature (456)..(456): n is a, c, g, or t
  misc_feature (460)..(460): n is a, c, g, or t
  misc_feature (492)..(494): n is a, c, g, or t
  misc_feature (496)..(496): n is a, c, g, or t
  misc_feature (524)..(524): n is a, c, g, or t
  misc_feature (526)..(526): n is a, c, g, or t
  misc_feature (529)..(529): n is a, c, g, or t
  misc_feature (531)..(531): n is a, c, g, or t
  misc_feature (539)..(539): n is a, c, g, or t
  misc_feature (544)..(544): n is a, c, g, or t
  misc_feature (580)..(580): n is a, c, g, or t
  misc_feature (586)..(586): n is a, c, g, or t
  misc_feature (597)..(597): n is a, c, g, or t
  misc_feature (637)..(637): n is a, c, g, or t
  misc_feature (687)..(687): n is a, c, g, or t
  misc_feature (756)..(756): n is a, c, g, or t
taangggtgcactttnannnaactggtcncaantnantgaanangaaancccnggctgccnccacccanncccanggaaancaaaaaccttcaaaaaactcaagttggggganaaaaaagggggaagggggggcangaaggcccaacaatcaaaaaaaaaaaaaaaaaaaaaatatnaaggngaaaaanaaaaaaantttgcantanaaaantaanacgaaaacaaagcaaacacccccccngngnggacntgggagaggactgggccaatcnccttaaanaaaagtggggnggctttnaggatggcaagggacttcctgtaanaacncanctnaaanttggaaagantanaaaaaaaanaanaaagtgcaaacaaantccncggccanattgtgaantttgggggaagcccgccccaaccgactgctgtaaccttcaccgttccaattttnaaancctnaatcaagccaaaaaaaaaaaaaaaaccaaaannntntttaaaaaacaaataaagccatgccaancncancntgttttcngcgcnagtaagggtttgtcaagaaagggtgtaacgcaactnagtcanagtccgcctanaagcatttgcgggggacgatggaggggccggactcgtcanactcctgcttgctgatccacatctgctggaaggtggacagcgaggccagngatggagccgccgatccacacggagtacttgcgctcaggaggagcaatgatcttgatcttcattgtgcngggtgccagggcagtaatctccttctgcatcctgt

SEQ ID NO: 613032 - DNA, 553 bp, Homo sapiens
atagtactaatagtaaattaaatcaatggtgaagaggctgtcaactcacctcaatgataaactccctgaaagtaagagcccccaggttctgtagtctatacaaattttaaatggaaacaggtctcactcagccgcccaagttgaaatgcggtgatgaatctcttgtcactggagcatgtgcctcctgagctccagcaatccttctgcctcaaacctcctgaataagctagggataccaggtttgacccactactcccagcccatttaagtattaaattagtgaatatatatatagatcttttaaaatgcttgctttataacctggatttattgaaaacatataacttcaaatattgaaaaacacacaatcacccattatccaaccagctaaagagacctgttatagcattagggttacaatgttacaagaccttgtataatgcacatgtgtgcatatgtgttagtgtatgaatacatttgttttaaacagagtgatcaccccaaatgcttgagtaatctaattaaaccacttattgctataacagatttttcc

SEQ ID NO: 613033 - DNA, 192 bp, Homo sapiens
caggacgttatattgataattgttgtgatgaaattgacggaccctaagatttatgagaatcctgctaaatggtaggagaagatggttaatgtctacggaggctccacgggtgggagtagttccctgtctaaaggagggtatactgttcaacctgttcctgctccgtgcctccactatagcagatgcgagcag

SEQ ID NO: 613034 - DNA, 546 bp, Homo sapiens
gccccctgtgagccttggcctcccatgaccaggacaccctggtccagcttctggccagaagcccgtcatgcgctaacaggcccggctccccttcagctgagagacctgtcccgaccgacccgtcttgttctgccactgacctgattccgtgaggtcccaagtaaaaaaaaaagattgacacaaataatagtgtgaacgaaagtgacgccgtaggggcattacgtggcgcgcccagacaaacctggaatccccgcgtagacactcggcgtggctcgcgagaaacaatggcattcaacaatttctcctccaacagacctcataacagcgcattccacttgaccgtccacgcgcgggcgtttccgccaatcggctatctgcgccgtgcgctcgcggaacacacgcaagagcacacgtgccctcccaccccagtgccccccccccacaccaccgcccagagatgcctcccgcggaaccgcgcagacccaccaacccacggcgccttttactaccccagcctgtgccacccccccacgtgactcactggcc

SEQ ID NO: 613035 - DNA, 221 bp, Homo sapiens
cccgcgtatgggatcaggatttagagggaacgagggctcagagaggtccacagatttgcgtgtattatggaggtgttatgttatagtcctcttacagatgtttttatttttttggcgggtgggggccaagggggatagtcatccattctaccccaatccccagtttcccagtgggttggttgcagaaaaggaggaataggcggctctaggagttatggggg

SEQ ID NO: 613036 - DNA, 303 bp, Homo sapiens
cggatggagggaggggtgaagagcgagagcagttatttatgggtcgggatcaccacttttccatgaagagggagacttggtattttggtcaatcattaagaagacaagagtatgttgaacttgaactcggggggagatagacatgggtaatggcctctaagaaacatggccccaggcagctttcagtccgctttactcgatcgaatggtcagcacagcccttatgcgacggccttgagagaggcttcagggggtgccgtccgtctggtgaccccggagaaggtcagccccattgctgaagaca

SEQ ID NO: 613037 - DNA, 318 bp, Homo sapiens
tagtagaaactatcctgctgacaaccatgcagaggaattaaccactataagtcagagccttcctctccatctatgaatacacagctagtcccctggcagcacacaggagggtattaaggacctttgtgaggctaggtacactgtccacacctctttggggcagttacgataacttatttaccatcataattcagtctcttcttattctacagtgtgcacttaatgcctctcgcctatggataataagttgtacagtgaaggatgtcagctgccagaatattaagaagggtctccctttatgtcagtacaactgtaagg

SEQ ID NO: 613038 - DNA, 227 bp, Homo sapiens
aattgagctcactgcacatcaggtatgtgtctcaaggaagtcacacaaaatgggggtcatatatgtcagtaggccagtatgtgcagaaccagtagatgactgattcacatttatttccaaatgtaatgcacactccattgcattcagcccgctctcccagtcatcacagtcaggttaattgatatcctgaaggaagaatcggccacctcagtggtactgcagcttca

SEQ ID NO: 613039 - DNA, 760 bp, Homo sapiens
gtaacttgttcaagttgagtgattgaataaattaatgaatgtctgacagctagtgtggtcttggtcacaatcagctcttctggttccctagctggaaccctgagccctccagaactgattcactgctaataaatatcaattactctacagataaaggaagtggatttggactgagggtgcctggaggactctgagaaagggctctgacaaatgaacttccccaaagcaaaccctctttcccgtctgtgttaaagttggtgaagataaagatggttttctagatagtggctctggggacacactgaagactcaaagattaaaatgtcaccatgtttcagcctgtttcagcttctactcagctatgacactgcttttatttaccactgcactgttttcttcattgggctgtgagggtgggcatggggacctgttattcatttctgttcctgctggtgcctggcatgtaatgggcacatgttttttgggtgaatgaatggataactgaagggacggaagggggagggagtgtgtgttacctctctttgctccctctaagacctccccacccgtccatccttgctttgccagacccttggctaagaaaatgccagccaacactgtgttctcaagtgactctcagttcttagaaacaaaatgatggaatttcagtattggaaaaatgcttagacatgacctcatccctacccaagctggttcatgaatcatccccataaaattcctggcatgccaattaaaacca

SEQ ID NO: 613040 - DNA, 91 bp, Homo sapiens
catggatttgctggtgcagtacaactaggcttaatagggaggctgctgttggtgttaagaagcagaagaagcctctggtgggaaaaaaaaa

SEQ ID NO: 613041 - DNA, 288 bp, Homo sapiens
ctggggtgaatgtggtgccagccacgagagatgtgaactcgttcctacaaacagctgggtaacgtactcctgcacaggcagacaccagatcaatgcatgataactgttgattcaggttgatatcccagatacacagagtggctcgggaggtcattgctctgataaggctcttgccggagtggatcagcttgtgcatggcaggacagaatcacccatcaggtaaccacatacatcctcaacagtgtcaacacgtaagaatccaggcactaaagaatgttgtggaatgta

SEQ ID NO: 613042 - DNA, 160 bp, Homo sapiens
ctaactccaggtactggtatgccaactgacaaaaagaaagtgtgggccatactccaggtgatagtaagaagcaatccagaattgccgtagcaagatgcttcaactcttgtgctgagtgttgggggaggctcgaaggggtctgcttgccagtcttggtcat

SEQ ID NO: 613043 - DNA, 767 bp, Homo sapiens
  misc_feature (451)..(451): n is a, c, g, or t
  misc_feature (532)..(532): n is a, c, g, or t
  misc_feature (746)..(746): n is a, c, g, or t
  misc_feature (767)..(767): n is a, c, g, or t
ccaccacggccggctaattttgtatttttggtagagatgaggtttctccatgttggtcaggctggccttgaactcctgacctcaggtgatccacctgcctcagcctcccaaagtgctgcgattacaggcgtgagccactgtactcggcctgctgtaggctttatatacactgtgcacttaggctacataaacttataaaaaactttcttcaataataaattaactttagcttcctgtaacttttttaccttataaacgttttaattttttaaactgtataacccttttatcataacacttaccttaaaacacaaatacattgtacaactgtacacaaatattttatatttttataagcttttttctatttccacaatttttaattttttaatttctttttttacttcttaagttcttttgttaaaaactaagacacagacacattagcctncatctacactgtcttccaccttcacagcttgtcccactgcaaggccttcaggggcaataacaggcatggagttgccatctnctatgagagcaacaccttcttgtgcaataccttctggaggacctgcctgagggctgtcacagtcaactttttctttaagtagaaggagtacactctaaaatagaccatattggatgtgctatacccttatatgactgacagcacagtaggtttgttacaccagattgacacataccctgagtaagcattgacctgtacgtaagatggctacgtngcactgggcccttagatggtn

SEQ ID NO: 613044 - DNA, 184 bp, Homo sapiens
ggttatatgcgagagattaatctctcaccaaataggcaaaatctggagaatcataaatagcacatctaaggaccaatgggaagggggaggcaaagtctttcgactaacgtccctcacaggagagattccaaggcttccatcagataaacaaaggaagctgatttttctacggaggctgcatgtg

SEQ ID NO: 613045 - DNA, 185 bp, Homo sapiens
aatctttctgggtttgggaagtcagagtaaagacttaggggagtattaaagccagagaccccccttcttttcctttcctgcctcgatctaggcagtcagcaaatttgagaggagtagatttaagctaagctgcttaatgtcttccggggctgtgtttggaagcagcaaggaacagtcactcagct

SEQ ID NO: 613046 - DNA, 598 bp, Homo sapiens
caactcggtgttgcccactgggcgtacagattttgctcgtactcgtgcgcctcggtgcggaatgctctggaacattgttgaaaagccgatatggatgagaatcgacgaaattcgatagaggtcgaggagctgaagaagtacagatgaaggcaaggataatggtccattgctttccaatagaaagcgattggatagcaggagtaaggcaagcagggagaaggtcgaaatggaggcgtgcgccgtggaaatattggagctggtatattccatcaagcatttgccctcgtaatgaagttctcgtcgatctgttgtaactttgtcagatgcaaacgaggtttggatccaaggttaaaatttgagttggttgttgggcccccgtttctcacattcaatatgaatttagtgtgacaaaggtgaaagtgctccgcgggggcatatttggagaagtctggatattataatgcttgggttgtgcaggggtaaagtaataaggaacgttgcattgttgtggtcgaaaagggagagaattgtgggttggaaaatgttggttgtggggacgaatgtagcattctagagtaaaaacaagcgtgggagcaag

SEQ ID NO: 613047 - DNA, 221 bp, Homo sapiens
  misc_feature (153)..(153): n is a, c, g, or t
tgggtcttaaactcttggacctcgtgacccactggccttggcctcccaaagtgctggggataacaggcgtgagtcactggtgccgggcccatacttttaaatataagggggatgctctaggtcacattgtggcattctcttcctggaaacccncccaagctcttaaattttattttaaaggtaggcccaacaaagggttcacgtctggatggctggtggag

SEQ ID NO: 613048 - DNA, 157 bp, Homo sapiens
ggcgactctgagtatcccttcatggtatgtttagataattctgttgatccattcatccaatacagtgaacacttgggtccttacaactttgggctgttgggtgtctgacactgtgctcctagtgctcaatctcgtttattccctcctaatcaagtgt

SEQ ID NO: 613049 - DNA, 678 bp, Homo sapiens
agcggggccggtgtttcgcagcccagagcatttgcagctggctcactccagatctcctgggactttgactcgccgtactcggagcgctcctgctgagggtcgccggcagtatgtcgctacggtgcgccttctaccacggagcctgatccgtgcctgcccgcacgcgccggatgggatccacgcagagtgctctacatagtctccagattgaactattgaatttgctgagagattttagggaaaaggacaaatcaacaggttcccattccatggatcccttaggtgcaccttccccagtatgctggatgtggagtacagctaccaaagctggggtgactcagtgccagagagtgaacttgaaaagttcctctgattagctacagcgtgaaagtatttcaggcaagacagctgttgtcgatcagctgttttctgttatacataaggaccgtcagtggaagaagtggttcttgggcagaggagatgtggccattactgaactgtacagacattggtgaataccagcaattgaacagtctcacagataagaatcctgtgtcagaaaggtatcttcatgcgttgcatgggcctgattggaaggaaagatctccagaaaccttacaagggtgccgaacaggtgaagcaacaattgagaacaaggagggcaactctagctgcccg

SEQ ID NO: 613050 - DNA, 300 bp, Homo sapiens
tgatccaaaaccccctcctttccctaggatgctgccccgtaccggctttttgcccacctgggccattatcgaagaatcacacaaacacaatagcctcatcatcccccacatcatagcccacatcaccctccttcacctctacttctcacctacgcctaatctactccacctcaatcacactactccccatatctaacaatgtacacctaaacagacagtttgaacatacaaaagccaacccattcctccccacactcatcacccttcacacgctactcctacctatctccccttttatac

SEQ ID NO: 613051 - DNA, 400 bp, Homo sapiens
cccggaaattcggccattttggccggaattttccccagcaccatttaacctgttgttggcttaaccaccagggtttcttagcccagcaaatttgcctcataaattaatggatcacccaatgggtaattttaaatccagccagaagcttccatttggggtccacagggcaatgtttagatgttggcccagcttcccatggccggtgcctggtaattggtttccttttggttaagccacatcccttgagggtttggttaatgctaatggctccggtaatttaattaactggactttgccaggcctaattcccaatgcatgggccagtcattttcaaatccacactgtagttaacagagaaaggcagtggttaccagattttaaggggaaagttcaaagtttt

SEQ ID NO: 613052 - DNA, 143 bp, Homo sapiens
acacccccggtttgttctcctcacacagtgcgcccttctttggtggcccaattgaaaggcgggccaccacatttgtcctttgatctcgtagagggtactgcacaccctttggagatcgccggtcgatggtgtgaaactaccgg

SEQ ID NO: 613053 - DNA, 207 bp, Homo sapiens
agctggtacctcggtctactgtcttgttgagcttgactctagtcgcacggtgaagagacatgagaggtgtaggatacagtagggagaggagtttgaggagagaggcagggccagatacaaggagcctgggagcttgtattaatacaacaggagcatgcgatgcggatgttgttggacaggattccgagacaagggtagatgccgacg

SEQ ID NO: 613054 - DNA, 565 bp, Homo sapiens
ccgtttatttgtccccgtctgcgattccgcgcttctctgtgggcttaacattctggttccgccgcccccaggcccttcttagggttgattccccccgggatggcagtcaagccaatggttactccacccctagttgtcctcttccccccccgctctccctcgttaggggccctcgccccccgattcaccgcggttgtttctccccagtggggccgccctcttttgcataaggacttccccttaccgcattagccgctatgacaattccccaccctcacttgttccgccccgtctacgcccctccttaaccacttcattccttatcgctgagccgccgttgattgagtactcccccctcacttctcaccccttatcctcccccaattgttttccacccctctctcaactaacatgcccatgttggcacaaacccgaccccccccctttcctctccccccacctctctttcttgcccctctcccacgcgtgcctcatctcactcactcttattcctccctcttttaatattataatatttctctccacaacaaataacaaaacaaca

SEQ ID NO: 613055 - DNA, 178 bp, Homo sapiens
gtactgtagtggatcaataggccgcctttctgcggcggtataataaatgtaatccataagttaatgctttcaaccgccgcagggcgcaatggggcgcccgccgcgtgatacactggccgctgaatgagcgagagggcagcagtgatggaagcggtacgcgcagcgatagaaaaacagg

SEQ ID NO: 613056 - DNA, 286 bp, Homo sapiens
tgaacaactgattttgataaagatacaaaggcatctttttcagtagagcaaagatgggtcttttagaaaaatgttggctgaaacaattggatatacaaaaccaaaaacagaatctcaattcatacctcactatgtatcatatctaaatatgcatttcaaatgaggccaggcacgtcggctcatgccagtaatccccgcatcttcggagcccgaggcacgcgactcacttgcgcccaggactctgcgaccagcctaggcaacctcgacagcccctctctctgcccac

SEQ ID NO: 613057 - DNA, 180 bp, Homo sapiens
tagatacaattagctgggtgtctgtggcacacacttgttatttccaactacttctgaggccgaggtgggaggagcacttgagcccgggaggcagaggttgcaagactgggaaagaggcagtcttgctcttatgtgactactaaaacagcagaatgctagcctggtgctgccggtgaaact

SEQ ID NO: 613058 - DNA, 766 bp, Homo sapiens
  misc_feature (54)..(54): n is a, c, g, or t
  misc_feature (57)..(58): n is a, c, g, or t
  misc_feature (67)..(67): n is a, c, g, or t
  misc_feature (75)..(75): n is a, c, g, or t
  misc_feature (78)..(80): n is a, c, g, or t
  misc_feature (83)..(83): n is a, c, g, or t
  misc_feature (95)..(95): n is a, c, g, or t
  misc_feature (99)..(99): n is a, c, g, or t
  misc_feature (104)..(104): n is a, c, g, or t
  misc_feature (106)..(106): n is a, c, g, or t
  misc_feature (110)..(110): n is a, c, g, or t
  misc_feature (234)..(234): n is a, c, g, or t
  misc_feature (255)..(255): n is a, c, g, or t
  misc_feature (272)..(272): n is a, c, g, or t
  misc_feature (315)..(315): n is a, c, g, or t
  misc_feature (666)..(666): n is a, c, g, or t
  misc_feature (671)..(671): n is a, c, g, or t
  misc_feature (673)..(673): n is a, c, g, or t
  misc_feature (678)..(678): n is a, c, g, or t
tcttggaacccaccacacagtataagtattgcacatcaattgccaaaagcaatnagnnacaatattnaagccccnttnnnatnaaatgaagaatngagncctgncngaanaccccctccccttctaattactaacttgttctcatggagtggctattcagcattggcagtaaccacattctggtcaaattaaccaaactggcttttttctttttctagtgaagttaaacaaacnttgggataccgacaccagacnacttgagcaccagtttntttaatcttttaatccagtgtagctatgtgctgctgctgctcnagagctggatcccataccaggttgtgtgtcatctgtcctcttgaggttcaggagattctaaattgaatattccacggtttgggacagcatccggaagttttccctatgactttatattttgtattatgtcaaatgttatggcagggcccaaatagcatagccacaagtttggtttatgtgggcataaaattctaaccaaaccccagacatagggagtcatttggagaaagcctgtatgtggtgttttaacctaataaagttgatgagagagaaggggagaggaagcgaacataaagcgggtcaagtgtagtgcatcttttgtatctcaggcgtggcttcttcagtggaccnagctncnatgcngtattgacttgaccgagcctctacttctgtctccaaatggctcccaatgatttctgtactgccaaataaagcccaattctggaaacta

SEQ ID NO: 613059 - DNA, 530 bp, Homo sapiens
accgccagcgattaggttcaatcgattctcctgctcagccttagagcagctgggattataggcatgcgcaccacacacggctaatttgtatttttagtagagatggggtttctccatgttggtcaggctggtctcgaactcccgacctcatgtgatccgcccgcctcggcctcccaaagtgccgggattacaggtgtgagccaccgcatccagcctttttttcttttattacaacagtccttatgctgaattcacttatcttgaaatggtgaacaaccacagctgtggacctcaaactatgtacaaactgagcaatttttcttgtaatgttctaacttttctctgcctcttaggggaacttccagcaacactagtggcactagtgggtcccatagtattactcaaggtttactgtattgcactaaacacaatgaaaactatacaagaaccatgagagatcaatttttactgtgatacacaattagctggagagataaacactcacatggtgatgactagcgtcacacaac

SEQ ID NO: 613060 - DNA, 995 bp, Homo sapiens
  misc_feature (47)..(47): n is a, c, g, or t
  misc_feature (103)..(104): n is a, c, g, or t
  misc_feature (148)..(148): n is a, c, g, or t
  misc_feature (463)..(463): n is a, c, g, or t
  misc_feature (484)..(484): n is a, c, g, or t
  misc_feature (501)..(501): n is a, c, g, or t
  misc_feature (544)..(544): n is a, c, g, or t
  misc_feature (895)..(895): n is a, c, g, or t
  misc_feature (900)..(900): n is a, c, g, or t
  misc_feature (902)..(902): n is a, c, g, or t
  misc_feature (907)..(907): n is a, c, g, or t
ttgaacagaaattgttagcatcagtgacctcctgtaccaaaagactnggaacagaaagccagatctttattccccgcacatatgatgccaccactcattttgnnacaacgtgtgatgacattaaaaacatctataagaggatgacagnatcagatttgacttgaggaaatgaagcgcaagaagaatgacatctatgggaagactaacagcagtacatgttattatgtaattaggacacatttaaaatttggcaaataatgcatataatgaaatcaatattgtaaggcctgcttttgtaatgaaaatggagagaatgaagagcgctgtgccagtaaatactccccctccccttctaattactaacttgttctcatggagtggctattcagcattggcagtaaccacattctggtcaaattaaccaaactggcttttttctttttctagtgaagttaaacaaacnttgggataccgacaccagacnacttgagcaccagtttntttaatcttttaatccagtgtagctatgtgctgctgctgctcnagagctggatcccataccaggttgtgtgtcatctgtcctcttgaggttcaggagattctaaattgaatattccacggtttgggacagcatccggaagttttccctatgactttatattttgtattatgtcaaatgttatggcagggcccaaatagcatagccacaagtttggtttatgtgggcataaaattctaaccaaaccccagacatagggagtcatttggagaaagcctgtatgtggtgttttaacctaataaagttgatgagagagaaggggagaggaagcgaacataaagcgggtcaagtgtagtgcatcttttgtatctcaggcgtggcttcttcagtggaccnagctncnatgcngtattgacttgaccgagcctctacttctgtctccaaatggctcccaatgatttctgtactgccaaataaagcccaattctggaaacta

SEQ ID NO: 613061 - DNA, 307 bp, Homo sapiens
gtttggcatgatttgtatttgaagaatctgtattgactactgtttatcacttgggtttcccctagatactcataaatgactgccttaataattgtcctcacagcttaccagatattgaaattaaatttatgagtttaattccctgagttccctggggacttttttttttttttaaagaaaaatggaacacagcagtttcatgactcacaacaactcttccataataaccaatgtgataaaaacattttttcagggaaacaaatttcagttttagccttccaaatgactattacgaaaattaacaact

SEQ ID NO: 613062 - DNA, 471 bp, Homo sapiens
  misc_feature (27)..(27): n is a, c, g, or t
  misc_feature (76)..(76): n is a, c, g, or t
  misc_feature (109)..(110): n is a, c, g, or t
  misc_feature (116)..(116): n is a, c, g, or t
  misc_feature (123)..(123): n is a, c, g, or t
  misc_feature (151)..(151): n is a, c, g, or t
  misc_feature (288)..(288): n is a, c, g, or t
  misc_feature (358)..(358): n is a, c, g, or t
  misc_feature (451)..(451): n is a, c, g, or t
gacgggacgataagcgatatcgaattngcggccgcgtcgactacgggtgcgagaagccgcagaagggcatattaanattgtatactcagacctgttttaagaaaaaccnncaaggnagtaaanccaaagcagcagcccggcgccaggcctnaaaccaggcctgggcctgcctggcctaaacccagtagttaaaaatcaactcataacttagaaaccgatgttattcatagattccagacattgtatagaagaacattgtgaaactccctgccctgttctgtttctctntgaccaccagtacatgcagcccctgtcacgtaacccctgcttgctcaaatcaattacgaccctttcatgnataatctttagtgttgtgagtccttaaaagggacagaaattgtgcactcagagagctcggattttaaggcagtagtttgccgatgctcccagntgaataaagcccttccttgc

SEQ ID NO: 613063 - DNA, 313 bp, Homo sapiens
tcagaggattacgattttgacgcgttctcctaggggaagtgggagaacaccacatcaagggaacacccagtgggacaaaataatttaaacagtagtccttgaatcccagatcttccctctgacatagcctacccaaatgagaaagaaccagaaaaacaattctggtaatatgacaaaacaaggttatttaacacccccaaaatataccagctcaccagcaatggatgcaaatcaagatgaagtctatgaattgccaggaaaagaagtcagaagattgattattaagctaattaaggagaacgcgtcaaaatcg

SEQ ID NO: 613064 - DNA, 153 bp, Homo sapiens
tctacgagcgccagatcgaccagcgtaagaagagctggagcacaagtttgacgtactggacgaaaaccagagcaagctcagcgaggacctcatggagttccggcgggacgcatccatgttaaatgacgagctgtcccatgttcagccgcgcgt

SEQ ID NO: 613065 - DNA, 239 bp, Homo sapiens
cccacccgcacacttaacaccaaccagccccggcttcatataccatctcacttgttgaccaggctggtcttgaactcttggcacccaagcgatccttttgcctggaatcccaaagggtgagatttactgaagaatatttcattgtaattactttctatactttataggtcaagagctctgatttaaagacaaaatttatctgaatataccttttcaaacaaagtttcatgttctaaatc

SEQ ID NO: 613066 - DNA, 136 bp, Homo sapiens
gtgcaggtatccaagctctccttccagcgctccaggcccagctgaggcaccacgtccaggagcaccaccagagggcctccctcgatcagccagcgcccgaaatacaccttgcagcccttgctgttcatgaaatccg

SEQ ID NO: 613067 - DNA, 277 bp, Homo sapiens
  misc_feature (41)..(41): n is a, c, g, or t
  misc_feature (51)..(51): n is a, c, g, or t
  misc_feature (97)..(97): n is a, c, g, or t
  misc_feature (166)..(166): n is a, c, g, or t
  misc_feature (216)..(216): n is a, c, g, or t
aagggcgcgccactgaactaaagtacttatgccggagccanaactactgtnaacgtattaagacttcaaacaaaccttatttaactttacagcctanaaataaacagtacaagcaatacaccgtagttgatagctgctaaaccgaatccgaaagaagatggctttngtgaaggtatttatagtggtaacagtgatggggctgaaccacagaaaatngagctatataaactaaccaataagaaagttctggaatggttagcgtaatagtttatgctgt

SEQ ID NO: 613068 - DNA, 213 bp, Homo sapiens
tgtctcactggtgcaaaacaaaaatcataatggtgaggcatttccggctaaatttacaaggaaggtgatacataaattatatagatcacaagttttcttttatactatttaaaacccaattatatggataaattatgtccagggggacaacaggggtttcttaatgggagtggcggagttccaacttagtgcaaaatcatagcttctgggttt

SEQ ID NO: 613069 - DNA, 259 bp, Homo sapiens
attttttccatttttaccttatttaacttaaaaggttccgccccgccaaaggaaccatccgccgggttaaccggccattccccgggttgggggaaatttttcccattttttccttttgccaaaggattggaacccaaattttccacggaccccaaccaatttgccaggaaaaaaccaaccgttccctccaaaatttggcttagggccttgaccggccattttccaaaggaggttttccaattttttaccaacctttgga

SEQ ID NO: 613070 - DNA, 847 bp, Homo sapiens
  misc_feature (258)..(258): n is a, c, g, or t
  misc_feature (305)..(305): n is a, c, g, or t
  misc_feature (362)..(362): n is a, c, g, or t
  misc_feature (393)..(393): n is a, c, g, or t
  misc_feature (400)..(400): n is a, c, g, or t
  misc_feature (411)..(411): n is a, c, g, or t
  misc_feature (419)..(419): n is a, c, g, or t
  misc_feature (425)..(425): n is a, c, g, or t
  misc_feature (469)..(469): n is a, c, g, or t
tcaagaaagtcagcccagatggaaggtgttcaggaaaggtgggctgccttttcccctgtccttatttagcgatgccgccgggcatttaacacccacctggacttcagcagagtggtccggggcgaaccagccatgggacggtcacccagcagtgccgggctgggctctgcggtgcggtccacgggagagcaggcctccagctggaaaggccaggcctggagcttgcctcttcagtatttgtggcagttttagtttttngttttttttttttaatcaaaaaacaatttttttaaaaaaaaagcttngaaaatggatggttggggtattaaaaagaaaaaaaaaatttaaaaaaaaaaagaccntaagggccaggtgagtgggagtctcagggcnggggggnagtttcccttnagcaaagnagccanactttgaacgggtgtttcctttcccggggcgcagggtgcagggngtctccggatctggtgtgacctgggtccaggagtcctattggtcccgggggagggaggttccggtggcccggggttccgggggtcatggtgactttctcctccatgtgtctggcgcaggcactcatttctgggggctgtcggccagagggaatgtccgggagctgccaaggcgcggagggaggactcgggtgggtaatccccgggatgaacggtggctcccattcgaccttcccctcctcgtgcctggcctgctcctccaacgccccgctgttaagggagcgccaaagaggagccatttttcgccagaccttggtttcccccaccggctggggcatggttgtgtcccgtgccccggtgggcctcccggtggttccata

SEQ ID NO: 613071 - DNA, 150 bp, Homo sapiens
aaactgctcccaaggatgagaaactgaaaacctcttatactgctgctagggatgtacaatggtgatgtcacttcggaaaacagcctggcagctcctcaaaaaaggttaaacatagattaccatatgacctagcaattcctcatccttggg

SEQ ID NO: 613072 - DNA, 1154 bp, Homo sapiens
aacgccatgaacgcaggcacagtacttcctattctacaccacatagtaggctcccttccccatactcatcgcactaatttacactcacaacacccgtaggctcacgtaaacattctactactcactctcacatgcccaagaactatcaaagctccgtgagccaacaacgttaatcatgactagcttacccacatagcttttatagtaacgatacctctttacagactccactatatgacatcccataaagcccatgtcgaagaccacccatcgctgggtcaatagtacttgacacgagtactcttaacaactaggcggctatggtataatacgccatcacactcattctcaaccaccactgaacaaaaacacatagacctaccccattcctatgatactatcacctatgaggcactaatgataacaagctccatctgcctacgacaaaccaagagctaaaatcgatcatatgaataactctacaatcaggacacaataagcacatcagacagtaaccaagcacaatacatacaatccaaaaccccatgaacgctatcacacggcagcagcaaatactcgataaatcggcaccaccaggcactctaccttccctccatatacatagtaactagacctagacaaaacctcaaaagcgtcacgacaccgcaactcaaaaggcacagacattcatcacatccctcttcatacacaggaagctccaaagtcataaaatacccacgctaaatacgccttaattgatagaactttctaacacacagggcaatacagactaacacctcggcactaaaccacccaccctactacgccgataatgaagcagacacctactggacaaagtaaaccacacgtaccatacagaatcacaaatcaacacacaataagtacacagcaaacacacactactactgtcccgcaggcgatatgctaccacccaacacatatcgctgccaacaacaacacaagggaactacatgacacacccacaaattatcacaaataaaacggctcaagactcaagcaacaacaccttaggtatcaaacagacatcaacatgtgcacctaaccaacacaaaaaaatataccacgtaccccctacagaatgaatctacacactacgacacaacaaacaaagt

SEQ ID NO: 613073 - DNA, 622 bp, Homo sapiens
  misc_feature (248)..(248): n is a, c, g, or t
gagtttttaaataagggaaaaacctcttccccccaagggaaaaaaaaaaacccgaggtttttttaagggggtgctcttcaaccaagcaaacattgattggaaaatttttgtggtgtgtgccccaacgcccctttttaacaaggcaatttaaaagttgggggcctcactccccccagttttgggatagcccatgttttttttggctggggtttttcccattccctttaaccaagctaaatgcaaaaccntttcccaggttttttttttttttttttcagacaaagtctcgttttgttcccaagcttgcagtgcagtgcacgatcttggctcgctgcaagctccacttcttgggttgaccccattctcctccccagtcctccgaagaacttgggtttcctgttgctcccccccccacccagtaatttttttggtccttgacaaaagccggggtttcaccatgtaagccagaatgttctcgttctcctgacttggtaatccccccgcatggacctcccaaagtgttgggttacatgttgtaagcctccacgcgtgccggcttatgcattctttttccatggccattttttagggtttaataaggtaatcttgcccctggtgccga

SEQ ID NO: 613074 - DNA, 792 bp, Homo sapiens
acaggctactctcctcggccccctccatcgggctgaggaagcacagcagcatcttcaaacatgtacaaaatcgattggctttaaacacccttcacataccctccccccaaattatccccaattatccccacacatagaagaaagtcaaaacagttaacactaaccccgcttccgcccccccacaggcaacccctcttacaaacgtaagttggcgttcattagaaacaccccacaaaagctcagaaagtggcgtgttaacaagaaacaaccaccacaaagaacaaactcaattgggctaacgacaaaagaacgtatttaacaacacgaccatggcgctgacgaacacacattgggcacaaactaacaggaacatctggccaatcccccaagcccccatcattcacatcttactcccctgggacaatcacctgagctacaaactgtggccttggaactatatatcccctgaaacacacgacaacacagtccaacgacaggaacccccaagagaattccacatgggggggacacagcatcgcatagacaccacgaacaatcatcccagccaccctaacggggggaacatccaagcgaaacacagggacaatccggaaaaacataccaaacaacacacaagaggcggcgaccatacaatcaccattaacccatgcacaaaacaactaaccaaagaccgacaagagggaccacagaaagacccaaagaaagacggaaagaaccatgcaaccacaaaaaccaaggaaaagaacggaatgcgacgaccaaacacccaaa

SEQ ID NO: 613075 - DNA, 1012 bp, Homo sapiens
  misc_feature (114)..(114): n is a, c, g, or t
  misc_feature (146)..(146): n is a, c, g, or t
  misc_feature (168)..(168): n is a, c, g, or t
  misc_feature (187)..(187): n is a, c, g, or t
  misc_feature (223)..(223): n is a, c, g, or t
  misc_feature (270)..(270): n is a, c, g, or t
  misc_feature (272)..(275): n is a, c, g, or t
  misc_feature (280)..(280): n is a, c, g, or t
  misc_feature (610)..(610): n is a, c, g, or t
  misc_feature (1009)..(1009): n is a, c, g, or t
caagcccgcgtccccagcagcgcggatcccgggccagccgcccaggcagcaaagtcaggcgatcggcttcgccagcagccgatgagtctcatcctgtggattgcccagcgccangggatcaggatccggagaggtgtccaggaggngcagaccctcagaccaggtagnctgtgcactcggtgacccntgacgccatcccaagggaagctccgccatcccgcgnccagtgcctgagctgcaactgcaaactgcgcgtcctggcacgagcancnnnnggggncggtgggggaaggagcgagtgactctccaggcgtcttccgctacgtgacaccagccaggcagcccccagggccagagcgtcagcgccgaagccaggctcatccgggaagccactccggtggccgcggggtgcccatgccagcaccagatctctcttcggaaggaggagcggggcgggctacacggccaggcgggccctccccttaaggcggggtggccgcgcgcctgcgattttccgtccgtggtcctggggcagcccgggccagcccaggagaacccgcgagcccagcggcgcctgcacctgcggcctccgggagccgggcggcccccncggtgcaggcgcgcgcctaacggctttgcgaggctcactaggtccgagaggtcggaggccgccagtgtcgctgctgaagggtggaccaggcgggatcgcggattctgggctagatcgcagacttgaattcgacaccaaattttggaacttaaaaagaagattcttaaaacttacaatccaggttgttcaggctgagaaggaagagaggttggtcttgctgtctctgggttgcagaggcagaagaaaatctgcatataaatgaactcctgcagctcaaacccttgctgttcaagggtgaactgtattacctgttaatttgtgtcactaaggaagtatctttagaaccgggaactcaacaatccctttctcgtagaataaataaatggcagtaagaactgnaaa

SEQ ID NO: 613076 - DNA, 425 bp, Homo sapiens
acttcatacaagagaaactgacagtttaccatacatttttggaatttaaagagttgttgtggtgtgctttctttttgtgcaaattatggaatagatgaaagtgacagagtgatgacaccacctaaatggaagcataatgtagacggttattgcagatgccttaccacacagctctgccagcgcacatgcttcctgcaaacctcctgcaatttaaacccttgggctccttcaactaatgacgctaatttgccaatggagcaatggctttcttcgctaaacactcacctacaaaggagtatgtattagccgacaatgtatgtgctcagtaaaaactggcaatataacatgcacattttaaatataaagaccactttcatcactacattaaatcatagggattgatttaataaatcacagtgtaaata

SEQ ID NO: 613077 - DNA, 377 bp, Homo sapiens
  misc_feature (374)..(374): n is a, c, g, or t
cgaaaagctctcacctaaaactgtccgttttacatccgtatccacctgtgtagatcggttctttactgaaggttcttagaaggaaacttggaagtgggagaattcgacaccaaattttggaacttaaaaagaagattcttaaaacttacaatccaggttgttcaggctgagaaggaagagaggttggtcttgctgtctctgggttgcagaggcagaagaaaatctgcatataaatgaactcctgcagctcaaacccttgctgttcaagggtgaactgtattacctgttaatttgtgtcactaaggaagtatctttagaaccgggaactcaacaatccctttctcgtagaataaataaatggcagtaagaactgnaaa

SEQ ID NO: 613078 - DNA, 548 bp, Homo sapiens
  misc_feature (35)..(35): n is a, c, g, or t
  misc_feature (65)..(65): n is a, c, g, or t
  misc_feature (198)..(198): n is a, c, g, or t
ccttccccggtttcttttctttttctgagacaggntcttgttcagttgccccggctgaagtgcantggcaagatcatggctcatgcaacctcaactttctggcctcaagtaatccctcccacctcaacctcctaagttgggagggactacaggctgcaccacctgctggctatttttttattttttgtagaggcaggnttcccctatgttgtccaggctggtctcaaactcctgggatcaaacagtccttctgcctcagccccccaaagtcctgggattacaggcatgagccatgtgccaggcccaatgttttattaaaaatgcaatgatgctattcatatcatttgtcaactagcttttcatgcttaaaaatatatattgtggccacctgtccttgctggcaagatagttctggatcacacttgttaaacactgtgatattctagtttatggatggtctagaatacttttttttttttgagacagactctagctctgttacccaggttcgcaccactgcactccagcctgggtgacagagagactcc

SEQ ID NO: 613079 - DNA, 400 bp, Homo sapiens
  misc_feature (192)..(192): n is a, c, g, or t
ggagtctacggacgaaagaagcacgactcactatatgcgtggtgtgtgagaaggcggcagtttcagctgacgaactgcgagtctgaagtcctgcacacaggccttcgcagacgctggatggaatgtcctatagggaccttcgtccattcttgaattggacgggtccactgagcccattgaggcagctgtggncaggttcttctcagccagctgtgttccccgtgcagattaaggacagttcccccacctgtgtcggctgtgtgcggggacaggggaaaacaaatgtgccttctcctcccaggaaccgtacttcaactactctggtgccttccagtgtctgagagacggggctggagacgtggcttttatcagagagagcacagtgtttgaggacctgtca

SEQ ID NO: 613080 - DNA, 211 bp, Homo sapiens
atgtgagagggagttttctgtcacaggttgcagtgagccaagatcaggccactgcactccagcctcggggtcaagagcgaaactctgtctcaaacaaaaagaaagagaggaaggagggaaggagggaaggaaggaaggaaagagagaaagaaaagaaagagcagaaatgaaagaggcaagaaagaagtgctatgtggcgagtcgagtcagg

SEQ ID NO: 613081 - DNA, 96 bp, Homo sapiens
tctgaggctgctcctgctgcccccgctgccgcgccccctgcggagaaggcgcctgccaaaaagaaggccgccaagaagcccgccggggtgcgccgt

SEQ ID NO: 613082 - DNA, 1016 bp, Homo sapiens
  misc_feature (857)..(857): n is a, c, g, or t
  misc_feature (862)..(862): n is a, c, g, or t
gatgtaacaggcttaccctaactgatcaatcaacctcgtgacactgtgctctgtaaccttgtgataatgtaccttatgacattcttcccctgcccgcaataaacggctcctaactgtaactttccggtgcttacctctaactgataaaactagctccaacccaccaccctcgactgacttccttcgcactcagcccactcgcacccgggtgaataaacagcctttgttgctcacacttagcctgttcaagttgtctcttcaattagatgctcgcataacatttggtgccgaaagcccgggataggggaactcctccggcagacctctcctctatcctcccggtacccacgttctcccatgcaagagacttccctcgccctcaggacctcagaccagctccgcgagcactccggcctctgtctatggatatgaaatccaacaccggtcacggactcttcttggggagacagccttccttcagtgttcggtcaatgcccgggacgcccgccttggccatttgccagccacacaacccaggacctccaatggggacgcccactgaggatcctagtggtgctcttttcctgtgtctctttctttccccccagtctttccttgttctatcatgggcaatttcccgccttccatccctctttcttctgtctggcttgtgtcctcagaaacctcaaactcttcaccttgcaccaaatctaaaggctaaacgtctaattttttctgtaacacgtcctggccccagtataaattagaaaatggggctcagtggccagaaaacagcacttccaattctctattggtggggacttagacaactctatgggcacatggcactgggctgngaccnactcagcggtttacatcacacttctcagcgtgttcaaggagcatccccatttttttctgtgtacccccttcagggggggcatgtgtggacaccatttccacacaaaggtttcgaataacacatctcccccactaggccacacacgaaggagaca

SEQ ID NO: 613083 - DNA, 958 bp, Homo sapiens
  misc_feature (765)..(765): n is a, c, g, or t
gatgtaacaggcttaccctaactgatcaatcaacctcgtgacactgtgctctgtaaccttgtgataatgtaccttatgacattcttcccctgcccgcaataaacggctcctaactgtaactttccggtgcttacctctaactgataaaactagctccaacccaccaccctcgactgacttccttcgcactcagcccactcgcacccgggtgaataaacagcctttgttgctcacacttagcctgttcaagttgtctcttcaattagatgctcgcataacatttggtgccgaaagcccgggataggggaactcctccggcagacctctcctctatcctcccggtacccacgttctcccatgcaagagacttccctcgccctcaggacctcagaccagctccgcgagcactccggcctctgtctatggatatgcataaaaagacaggaatgttaggtcctctgagcaggcggcgccatggtcaagccattcgtgacccctgtgactcacacgtacacatccagaaggtctcctggagccaagaaagtctgggacgacaggaaaaccaacaaaaagaacgaaaaacggctagttccctggtcttagctgatcagccaaccttggtgacatttctatcatggtaaccaggctgtaccctaactgatcaatcaacctcatgacactgtgctctgtaaccttatgataaatgtaccttatggacattctttccccttgccctcaataaaacagctccgaactctaactttnccactggttaccctaaagtataaactagctcaacccaaccactttcctttcggatacagccaccgcaccagtgattaaacaacttgtggtcaacataataaacaaaaaaacaaatctgatggcgcagcactcggagaatttaaactcggtgggcgcggccaagaatgtacaggccaacgtcacataacggttg

SEQ ID NO: 613084 - DNA, 1053 bp, Homo sapiens
gatgtaacaggcttaccctaactgatcaatcaacctcgtgacactgtgctctgtaaccttgtgataatgtaccttatgacattcttcccctgcccgcaataaacggctcctaactgtaactttccggtgcttacctctaactgataaaactagctccaacccaccaccctcgactgacttccttcgcactcagcccactcgcacccgggtgaataaacagcctttgttgctcacacttagcctgttcaagttgtctcttcaattagatgctcgcataacatttggtgccgaaagcccgggataggggaactcctccggcagacctctcctctatcctcccggtacccacgttctcccatgcaagagacttccctcgccctcaggacctcagaccagctccgcgagcactccggcctctgtctatggatatggctagacataaaatctgccaagctgccaatttcctgttacctactccagagacccagtgatatgaagacaccctagctggactgtcagttctcgttaagaacctaacccctcaaagctctacaagcctctgtggacaggatcctacctggtcatctatagtaccccaacagtggtcagtctacagaatcctccccactggattcatcgctccaggataaaactatgcccatctgacgcacagccatagctactccacctcctcctggaagtcacaagtactctctcctacttcccttaaacttacccggattcctgaaaacagagcaaataaccctgtaatacccttgttatttacagtagacctttacaacagtcagccgagtatttaaactctgtctacgttatgcccctaatacaccattcctcagctaattctagaatgccgtgcttttggttctatcactgcagttcacgcattttcctccagaagcattggtagtagatacctccatggagtcaccctccagtgggttacccttaagtctctcatagaagtggcatagaagaccttttgtggaaagtactctccaatttccatctgatgagtcataaaataaaacc

SEQ ID NO: 613085 - DNA, 937 bp, Homo sapiens
aagcgggacacactatcacaccaaaacacccaaaccaacctaacccccaccaaaacccataccgcataagcaccacaaactaccccacagaaagacaaagaacaccaaagaaaacacaaccaagcaatataggcctactaaataatcaagcatctaggatggactccaacatatagctatacaagccccggacccctgaccgggtctcagaagcagatatccagaaagcaagcaacataagtatagataaaatgcaattgggcatttgccaggccccaaatagaaataataccaactacaccagaccaaggaatacttgtagggcccagcagaacataaacaaagaaacacaaaaatgactaacagcaataaggtaccatttgacaacataccccaacaacataacagaaaagacaggaaacaacaaaccaaaaaacattatgtggagaatcagaggtacccagaccctaccaaagtcccagtcctgttggaaaaacaggaagatgggatatacaataaaatatcattcctagatcatctaacttaataacatttctagattatccatttttatttctttttatatcttctttttatcctttattcatatattatatcctgttttatttctatttattatgttattatttttcctgtatcgataatattattttttattatttataacttttttttgttttttattatcttttctctttaaacaatttttttctgtattttatttttatttttttttttttttattttatacttattctttctatttttttcttatattattattttttatattttgatttttggttgtttatatttttattatttttttgttattctttttttttctctttttattttttttttttttttttattttttttctctttttttttctttttttttttttcttattttg

SEQ ID NO: 613086 - DNA, 326 bp, Homo sapiens
acacacattattctctatcctactccacatgtccgcgcccatacatatcatggttagggaaatggcgagaatcgattccccttaaactgcacgtcagcaggtgtatcttatacagtaaactagagacaaaattcatacacaatagtacttaacaatgatcttctttacttggtaaactcacaagggaaacaccttcgcacactgcatttaggtgaaagtatcatgtcactacaatgtcagcaaaacactagaactcacacaactcatcgcaacacagtcgaaacaattcctataatatatttcattcctgggtacaccactcacca

SEQ ID NO: 613087 - DNA, 154 bp, Homo sapiens
aggactttattttgttggacagctccttccatctcttttatcaggttggggggtcacagttctggtaccaaagcccaaatcccattatgcagaggttggggtcttcttagtgaggggaggaagagccagtggtaagatgcttactcgtacacag

SEQ ID NO: 613088 - DNA, 420 bp, Homo sapiens
gggtttgagacgagggatctcaatgtgtcgcccgggctggagtgtactggcgcgtgtcacggctcgctgcggactctgcctcccgggctcgggtgatcctcccgcctcagcctcccattacaggggtgcaacatcatacctgaatagctaatttaaaaaaaaatttgtagaagtggagggtctcacgtatgtagtccaggctggtcttgaactcctgggctgaagtgatcctcccactgcgtggggttagaggcatgggccaccgtgcgtagcactcatggctattcttaataaagacgaacatactggtccgggagcgccgaggcgggcgtatcacgaggtctggcgagatcgagaccatcctggctaacacacgtgaaaccccatgtctactataaaaactagaacacaaagcgggca

SEQ ID NO: 613089 - DNA, 245 bp, Homo sapiens
atccccgcgagttcactgggtagtgtggtgctgaataaattacgagtagggtggtggggtggggtgggtaatgggattcagataagccagaagcatgttgatttttagtttgaatagtaaacattattcagcttccacacgctgctggggaatgtggaatgttctagctcttacatgttaactgagaccagagaagtgcatcatagcctatacgtgcagccctgtctacagaatccttcattatt

SEQ ID NO: 613090 - DNA, 164 bp, Homo sapiens
gagacctggacttgttacattgttctaatcaatggcactactcacacttaccaactcaggacccggctgcgcagtccctcatgatcatgaacaagatgaagaactttaagcgccgttactacctgtcaagtgacccgcatgagaccattgaagaatccttggct

SEQ ID NO: 613091 - DNA, 983 bp, Homo sapiens
  misc_feature (267)..(267): n is a, c, g, or t
  misc_feature (281)..(281): n is a, c, g, or t
  misc_feature (287)..(287): n is a, c, g, or t
  misc_feature (290)..(290): n is a, c, g, or t
  misc_feature (412)..(412): n is a, c, g, or t
  misc_feature (416)..(416): n is a, c, g, or t
  misc_feature (421)..(421): n is a, c, g, or t
  misc_feature (453)..(453): n is a, c, g, or t
  misc_feature (469)..(469): n is a, c, g, or t
  misc_feature (483)..(483): n is a, c, g, or t
  misc_feature (488)..(488): n is a, c, g, or t
  misc_feature (505)..(505): n is a, c, g, or t
  misc_feature (544)..(544): n is a, c, g, or t
  misc_feature (547)..(547): n is a, c, g, or t
  misc_feature (579)..(579): n is a, c, g, or t
  misc_feature (597)..(598): n is a, c, g, or t
  misc_feature (613)..(613): n is a, c, g, or t
  misc_feature (648)..(648): n is a, c, g, or t
  misc_feature (662)..(662): n is a, c, g, or t
  misc_feature (676)..(676): n is a, c, g, or t
  misc_feature (700)..(700): n is a, c, g, or t
  misc_feature (703)..(703): n is a, c, g, or t
  misc_feature (716)..(716): n is a, c, g, or t
  misc_feature (737)..(737): n is a, c, g, or t
  misc_feature (744)..(744): n is a, c, g, or t
  misc_feature (753)..(753): n is a, c, g, or t
  misc_feature (759)..(759): n is a, c, g, or t
  misc_feature (776)..(776): n is a, c, g, or t
  misc_feature (778)..(778): n is a, c, g, or t
  misc_feature (802)..(802): n is a, c, g, or t
  misc_feature (813)..(813): n is a, c, g, or t
  misc_feature (815)..(815): n is a, c, g, or t
  misc_feature (817)..(817): n is a, c, g, or t
  misc_feature (819)..(819): n is a, c, g, or t
  misc_feature (821)..(821): n is a, c, g, or t
  misc_feature (828)..(828): n is a, c, g, or t
  misc_feature (840)..(840): n is a, c, g, or t
  misc_feature (845)..(845): n is a, c, g, or t
  misc_feature (861)..(861): n is a, c, g, or t
  misc_feature (973)..(973): n is a, c, g, or t
gtatttgccctgggtgatcctgtttccctgtgctgtccccatgctgtgttggaggaggaagtggctctccttccaccaacaaagctcctgctctaccctcttcctcacatgtgctgcgacctctctcagggctcccccagccattccttctttccttcctgccttttagctctaaccacattaagctaagacaaggccagagggtgcgattgaatgagtattgagactgaggagaatgatagagagtgaagcagaaacaggagcgcnaacctctgctgtcnctttangcnaacaaactattccctccgcacaactaacctgccctgcctctccatctcgcaccaaggatgcgtcaaaagcacaaaaggctccccggacccggagggggccagaagacatgcagcctcctggntccncatgnttccattcctccggttagactcggaaactttngaccccgttttccaanttttcttataagtngcatngctttgggaaaaaaaanatttaaaggaagcctcttgtttttggaaagggcgtgtcntgntgaattgaacagtgaaaatgttgtaagtgccnatatggggaccacagaannggaaattccttgcanaatgcctcgatgcctgggtgtggggccatgggganatggcatggaaaangatctgttatgccngggcagcccaggggtgaagggcancantgtgggtgaacanccgcaacttgggagtaatgtnccgtgtnagaaaaaangaccangttccttaaaccagccnanaatggggagtgctgtctcccacantttccagggcncngnanantttgtantggtttgttttnttgtntgtatgtgtttaatantgaagtggatcatgagatgtaaagaaaacaataatggcaatgacttatattcaaatctgtatttgtttctttatcaatgtaatctgctgagggccttttgtctaaaatcaantatgtttaag

SEQ ID NO: 613092 - DNA, 107 bp, Homo sapiens
gttctaaaggatgcgtagggatgggagggcgatgaggactaggatgatttcgggcacgatagttcagacggtttctatttgctgagcgtacataaccgagcgtggca

SEQ ID NO: 613093 - DNA, 216 bp, Homo sapiens
cgagtattgggaggtcacgcacggctgcgcacgtgtcgacggaacttgtacagggacggcatgcacctacagtggtgaatacacgtcgaccaggctccatcttaacgatcttgggaggtcagcacggttctcatgtgtcgaaggaacttgtccaggaaggcatgcagcgcacgtggtgacatacacgtcgaccttggtggcactgcatgcatgctc

SEQ ID NO: 613094 - DNA, 274 bp, Homo sapiens
atacagcaaaagcagtactaaacaggaaagtttacagttataagcacctacatccaaaaaagaaatatttatgcaaaatcctcaacaaaatactagcaaaccaaaatcaacgacacgttaaaaaattattcatcctgaacaagtgggatttatcccaggcatgcaagaatagctcaacatacacaaatcaatgtgatagagcatatcaacacaatgaagaacaaaatccatatgatgatttcaactgacgcagaaaattcagtattccttcatg

SEQ ID NO: 613095 - DNA, 703 bp, Homo sapiens
ttgtggcaagacacccagagaatctctctgcaccatgtattccagctggaggtggcgtcagcaattctcggactgcttcctccatcttttcagtgcctcattcagtgatgtcaagttaaaaccagaaacgatgggtgttcaccaggttctggttcttatgaagggacatggatggagctgtgaaacacttcatgctccagtcaaactaatgcaggcaacagaaaaccaagaaccacatattctcacttcataagtgggcagctacacatgtgagaaaacatggacacatgtgggtggaacataatacatcaccggggcctgtggctgaatgctaggccagggtgaggcgcagagcatcgggaagaacagctcaatggatgctgggcttattacctaggtgatgggttgattctgtgcagcacagtcacgcgtggcatcatgtttaccatatgtcgagcaaattctgctactagtcctgcacctgtacccctgaacttagaagtcgaggacgaaatagaatatagattgtgcatagtagtaatttttagcgattacactgttagggtcaatacatttcatacggtttctagcgtatggctcatcttaccctacaaggacatatcgggacatagtctgggggcaaaagagcctgacctttgtgctgtcatgttgacaagtcttgtgaggaaagcggcctggaaag

SEQ ID NO: 613096 - DNA, 608 bp, Homo sapiens
  misc_feature (5)..(5): n is a, c, g, or t
  misc_feature (90)..(90): n is a, c, g, or t
  misc_feature (159)..(159): n is a, c, g, or t
  misc_feature (183)..(183): n is a, c, g, or t
  misc_feature (187)..(187): n is a, c, g, or t
  misc_feature (192)..(192): n is a, c, g, or t
  misc_feature (196)..(196): n is a, c, g, or t
  misc_feature (211)..(211): n is a, c, g, or t
  misc_feature (241)..(241): n is a, c, g, or t
  misc_feature (249)..(249): n is a, c, g, or t
  misc_feature (260)..(260): n is a, c, g, or t
  misc_feature (318)..(318): n is a, c, g, or t
  misc_feature (375)..(375): n is a, c, g, or t
  misc_feature (394)..(394): n is a, c, g, or t
  misc_feature (597)..(597): n is a, c, g, or t
caggntacccccagcccgcttcttccctgcttagcccaaaggaggagacagtagaggtgatgggggcagctgggagggaggggccaaggnagttatgcttttgggtaagaagttgaggctgaggctgggggcacagggaggagctgcccaggtgcagtnaccattgctcagtgacaaaacctnaaancttgnacanagctgaaggtaccanaagggatgataagagtaaaggaaggcaaancgggaagngcatagcaagnaaaagagagctgggggaagggccggagctcagggctagccctctccgctctaactgangacctgccgaggtcgtccgtagcctgtcatgccggcctgggaggcccctttttcgcngcccatctgaaggccaatnaaatgcttcccctcctgcagccggctctctgtaaatcccctctaatgcccctgcgctttcttcataaaccagttgggatctccacggtagtacccatcaatcttggtcactgccaagccgcccaaagccatcagggtcctctgcactgctgcgatgtctttaccttcaaagaggtcaacagtctggaacatgttagttttgangaccccatagt

SEQ ID NO: 613097 - DNA, 419 bp, Homo sapiens
  misc_feature (100)..(100): n is a, c, g, or t
  misc_feature (366)..(366): n is a, c, g, or t
tgtaccagaagtcagcctgtggtctgccaccaatgcgccattcttggtgcacgcgttcgccgccgctcatcagaaagtgatacgctgcctccgagttaancttcgcggtgcgccattgtcttctgggcctggacaagatagaaccagccttcctcagccttgccctctttatgaagatctcgggccatggagagcaggatgccaaccctgtgcagctcgtctggggttagatggaccccccatccgctaacgcgagccccatctgtggtttggtacagggagttccccgaagaacgtccccaaatggttttgcctgatctggaattatggatggtaagaacgatcggacatcttccatgactacgncctatgcgatttctggccatggtcatgtcctcagtcttaactgtccagtcgtg

SEQ ID NO: 613098 - DNA, 144 bp, Homo sapiens
gcccgacatcatcgagtatggtatcataagcatctgcgaatgaagcatcaaaaggatgatgaactgaatcgcagggatcagactgtgcttggttaatattgccatgtgaaaggggcgaaatgtccatatggcagtaatcaaaat

SEQ ID NO: 613099 - DNA, 692 bp, Homo sapiens
cgaaaaattctaggctatatacaactacgcgaaggccccaacgtgtaggcccctacgggctactacaacccttcgctgacgccggtagagaactcttcaccaaagagcccctaaaaacccgccacatcgtaccatcacgcctctacatcaccggcaccggacacttaggctctcacacatcgatcttctactatgaaacacccccgagccacatacatcaaaggccacagggtcaacacatcaaaactaggacagtagctaatattatatctagaccacactctggaactaagacagaaggacggtcaaaagcaatactgactcaagggctgaggcacttgagagaacaatagaaagaagaatgaaaaaagatggcaaaagcataagaaaaggaaggcgggacagacctgagtcatcgatcctgaacaggtcaaccagaaccacaatacagaaccctcacctagagaagcaacaagacgcaactacagcagagccccagtgcaagatgcgaacgtcccagacacccttgcatcaccaaacgacgccgaccatacgaaacgacagggacatacccagacaaagcacaaacagacgaccgccatggcgaccaacacataagagcaatagatcccacagaaactagaccgagacaaccggcagcaacgccgaaccaacccacgcgggaaggaaga

SEQ ID NO: 613100 - DNA, 673 bp, Homo sapiens
agcggagggtcgggaagggggtgagcgggggtcctgggagggtcaaggggtccaaaggggaaggtggtacgggcgccgagctgaagggacaggatggacagagatcgacaacagccttacagctcactggctaactggactgtgctgagaccatggagagaagtctggagatggcgctcaggacccctgaatctgtgtacctccttctctcacctctgggcaggagcaggagggaccatagaagcttacggaggagggtatatggcactgcccagaatccttgacctgggaatgatagatggctggagacacgaactctaaaagcgcttcggcaagtaactgtgtggagactgttcccagcgttcgagggttcgcaacgtgcggcatgattgcgccacacatcccactgttcaagcatgcggccacctgttcgaacatccattgtcgaatgaattggctcccgacctgggctctcagacattcccctggtccaaggccccagggcatcaagatgtctcaggagagtgcggctagacacccgaggagagactcaaagtgaccatgtgcggaacgggatgttgtgcaggtgacaggcaggagctcaggggcggagaggcgaggtcctgggggctggagggggtcgacttggcctgatgccaagaggctgagggtg

SEQ ID NO: 613101 - DNA, 1459 bp, Homo sapiens
  misc_feature (522)..(522): n is a, c, g, or t
  misc_feature (788)..(788): n is a, c, g, or t
ggactcccgctgtgggaagcaatctcctctcctcttcggctccgaccatctcctcgggaggcgggaagcatgtagacatgcgatgagtgcactctaccattctcatcgggttggcggcgcagcgtcgtggatgctctcgacggatttggggcatagttgccgtcgtcggtgtgcagccatcctacctgggcccttggaaacgaatcggtcattcttctaggccgcgcgaatggccatgatgcttgaagaggactatgaccatggatggaggagattattacctttaatgaactttcttaagtgagcactggggagctagggtaaggcgatgtgacccacaggcggctaggtgataagtaagcactttggaaacccgatcagctacagtctcgatcgaaacgttgcggcgaactggcggcgactcgtaaaccgccgcagcttctatccaatatgccttgaaggcaaatttcagtcacaagggcataaatgacaaagaattgctttcgccaattatatctagtncgcccaaggaggtgacagctacgaaacaagttttgggcaaatggaccgattcagattcgaccatcgagattgtttcgtagcctgataggtatcgagcatattgcctagaggccagatgcaccgatagcaactggaggtcctccccaagggtgatatcctttcgcgcgtgtttccgactaggggccatatctaaggctgaggggaggaaactgtagaggtgtcctcgggcgactttgcgaacaccattaccggcgttgggcatccanttgggggaagaaccaggtgcttgctgcgagagtttggacctcttacttgtggcacacgagagaggatcgcatagggccataggggacggtttccttccttaaatttgatatcgccgcggaccggcgcctccccaaaggggtttattatcgccagcaaggggccttaggtaaggattattagaagggcccctcattaacaaaagcttcccccagtttccccgtgcaaccacaaaagcccacaaggcagaaaacccattgggtatgggcaacgtacctggcaatttagttggtccatttacacgtggggtaatggaatcaatacttgactgtggcccaatttcctatagttagaagcgaatttctctcgggtgcaggttacagtgagaacacccccttcccggtatggaattggggatagcagatttcccataagacctttaattaacctttagagtccccttggacacagtatagggaggtgtgcaaactcacatggcggtgtccgaacaacattgtggttggcgttccccttgccgcaaagtccataaggttggggctatttctccccctttgaaggaaatgtttgtggcacttggcgaatgaccccccttggaagaattggtttttgataccctttgagccgggaacattttcccaggagatgcgaaccg

SEQ ID NO: 613102 - DNA, 177 bp, Homo sapiens
ttatattcgtaaatattctgtttaatttgtctggcttacgttccaccatacagtgacggctagcagtaaaatctgatttagaaacagataaaacaacacctcaggccacaacacaggctgtgaagacacacacacacacacacacacacacacacacacacacacacacacacaccc

SEQ ID NO: 613103 - DNA, 373 bp, Homo sapiens
tacaactatccaccatttggcaaaagactcgaattgccacgagggcgctgcctcgagaatgcgtggtatctgccctgatacactagactacttgactatacagctgtccagacaaggaatcctaccatatcctcagtcatctggctcctgcatccaataaccattacacaatacactgccggtttaaatgggcagattcaatacctcaactcgtatcatgacattttaaccaccgtcttaaataggcctccagtctatcttataggctataaagccaaagccaggcagaaaagttcttctcacagcacaacctgctttaccaggttttagtatagctgttcatttgcttgtttggtttttctgtcacccaggc

SEQ ID NO: 613104 - DNA, 220 bp, Homo sapiens
cacgagggcgactcggcagccggagctttgccacgatgagtggggcccattacgcgtcaaaacctcaccaccagggagtagtttcaccaattcctgggagccaaagggaacgagaagacttgccgggaaaccgacttaggaaaccctgctggcaataagctggctaaacctgaagataaacggttacgactggatgatggacagacggcggacgggcaga

SEQ ID NO: 613105 - DNA, 342 bp, Homo sapiens
tatactggatttgtgtattccaccactctggaagactaagggtggtatgtacaactggaaatgctgatccatcttattgattgattgatggagtttatgctctattcacacaggctggagtgcagtggcgccatctcagctcactgcaacccctgccttccagtttcacgtgatactcctgcctcagcctctcgaagtgctgggattacaggtgtgggccaatatgcccagcctcagccattatcttcctgtacctggaatttgtgatataaagaacaatgtacagccaatcaatagcttatattactttaacataaattcttttattattattcatgagac

SEQ ID NO: 613106 - DNA, 103 bp, Homo sapiens
tccgtagaatcagaagcagtgacaggtgtgcttaagatgactctgcaatcacaccaatgtgtgaagtgacaggcgggcgtacatattctgtgtgtgctccaag

SEQ ID NO: 613107 - DNA, 227 bp, Homo sapiens
tataaatgtgtgcgtgctcactctctgattttaaggtcacgataaaatagaaacaatcgtcttccttaatgctgtgactgggcgaggttgggatggtttagggatctggatgttacgacagccaccgctgtcctccaaacactaggaaatgtggtgctctggctgctgctgtgtgtgcggaggaccaagcaaattaacattgagccagggcactttgaagggactgg

SEQ ID NO: 613108 - DNA, 430 bp, Homo sapiens
aacctccacctcccgagttcaagcgattctcatgccttagcctcctgtgtagctggaattacaggcacacaccaccacacctggctaatttttgtatttttagtagaggcgaagttttaccatgtcagccacgctggtctccaactcctgacctcaaatgatctgcccgccttggtctcccaaagtgctgggattactcgtgtgagccaccacacccggccaaaggtgtttttttgttttgttttgttttgttttgttttttttccagcaaacttgtttagaggaagacttagtccaaggaataactccatcctctctttgcctcgaatgttacaaactctttgcttaactttttttttttttttgagatggagtctcactctgtcacccaggctggagtgcagtggcgcaatctcagctcactgcaacc

SEQ ID NO: 613109 - DNA, 395 bp, Homo sapiens
gggctggtagagaccggatagccagtgtagcccagtgctggtctcaaacctactgggctcaaacaatcctcctgcctatagcctcccaaaatactgagattacaggtttgagccactgcgcccggcccaactttgtttttttttttttaaaagagataaggcctcactgtgtagcacagccgggtcttaaactctggggcccaatgtgatcctcgcacctcagtgtctcaggtggctggcacttacgggtgcttgccaataatgggctcatattggctttatccaaaaattcatataaggggatttatacggtggtgtcgggatggtacaaattcgcataatacgttgggcgactcatacatgtggtatacatgtagtaggtccctttccatggc

SEQ ID NO: 613110 - DNA, 313 bp, Homo sapiens
tttagagataggatatcggtggggcgtgatggcttatgcctgtaattccagcactttgggaggccgaggctggcagatcgtttgagctcatgtgtttgagaccagcccgggcaacacggcaaaactccatctctactaaaaaaagaaaatacaaaaattagctgggcacgatgacgtccacctgtagtcccagctactcgggaggccgaggcgggaggatgactcgagcccgagaggttgcagtgagccgaaattgcatcaccgcactccagtctgggcgacagagtcagacctcgtctcaaaaaaagaagag

SEQ ID NO: 613111 - DNA, 1719 bp, Homo sapiens
gcaggggctcagcaccgagagacgacgctaggcctcggcgtcggcggattggccgcgcctgagctaggtgagttggtctgacaacaccagatggacttgatgactggtggtccggtgccacgctctatctggcaaccgaggtccgtctgatggtggacactgggcgaggtcacgccgtgagcgcgaggcacggccctcaccgagtgacccgccatcttcactcacttctcagtgcgtcgccgtgccgcgcacaggacatcgacatcgtaggggcacgttgcagtgtgcatgagagcgacatggtgtgtcacgcacatgagcctcctgatactgagtgtgccgccgtgagtgtatggccaggacgcacgaaccgggaaagaacctgccgaggatgccatgacaggcgcccccgaacccaatagggccatcatgcgggtacgcacacatagtgtgcactgcggaaacccatcgcgaaaacagtggaggcgacagcgggaggcacctgggggatggcgcgagactacacggagggcaccacacaggagcgacgacctaacccccgtgccgaaggaccaagcggcgagacggactgaggcaatctccacggacaaggggaaaggaccagcaaccgaccagaatagacgaggtacataggacggggcgggagagcagaacgaccttcaggaaagcaaacaccacatccggtcacccgcgctaaggagaacacaccgtgtgccgcgcccacaagcgaattggcacgccccccaacggcaaaacctagagaggtgtgattacgaaagaaccgggggtcaacgacccatgcagcccatcgggagggatcaccaagatgcacacaacggcgcatatggacatacaactccccaaggccgacgacggcgtcgcccaaacaggggacaccccgaatgaggatatacagcccagacggtcactgtcggcacccaggaataaacatcccaacacttatgcggacacgaaccgtgcccaagttggcatatagcgagaagaaccccaccagcacgtaaacacgcgccacatacgtgcggaggacacgaaccaaccgcgacacgcgattcgattgtgcgggcaccacacagtggtcaccgtaaatccggcaatgtaggcaagtgaacccatgtggccacacggacgaaaaccgacagaccaacgatagaggggcagcggaggcagatagccacaattggagccgacaaccaacaggaccgcaccaagatgcgcaaagggggacacacactgtgatgaccgacctgatcagccagcaaagatgcccctatgcggatcagcactagcgtgcatagaccatgaaatcgatcagataaagtggataaacacaacacgggaaaaccatccacgcacagtacgacagatagcaccgacacgaacaacaaccaagtcgtatgagagtgccaatcgataataagtacagagatgagagatatatgcgacacataggacacgaacggagagcgacgatacagtcgagacacgacacgaaagagacgagacggcaccaacaaaacagacacgcgattgatacagagtggtgaaaagcggaagaattaagagaagagcgagcagcgagaatcaagagccaaggtgaagattgacaacaccacgaagaagacaccaccaggttggacgaccctataaagagacagaccaccaagaacggagcaaatg

SEQ ID NO: 613112 - DNA, 424 bp, Homo sapiens
aaatggctgctttaggaacgtctgtcttttacagttgtagataagggatgaaaaaagtcccggtctcccgttgcgctcccaggcttattaggaagaggaaattccctcctaataaattttggtcagaccggttgtctgctctcaaaccctgtcccctgataagatgtcatcaatgacaatgtgtgcctgaaacttcattagcaattttaatttcaccccgtcctgtgatcttgccctgcctccatttgccttgtgatattttattaccttgtgaagcatgtgatctctctgacccccaccctattcatacactccctccccttttgaaaatcactaataaaaacttgctggttttgtggcttagggggcatcacggaacctgccaacatgtgatgtcttccctggacaccaagctttaaaattt

SEQ ID NO: 613113 - DNA, 339 bp, Homo sapiens
ccatctctactaaaaattcaaaattagctgggattacagacatgtggcaccactcccggctaattttgtatttttagtggagatggggtttctccatgttggtcaggctggttttgaactcccgacctcgggtgatccgcccgcctcggcctcccgaagcgttgggattacaggcatgagccactgcgcctggccttgatgtcttaataaaaaaataacaccagtaagatttgatgattatgttgtgatagagttggctttctgagtcccattgatggcagtgaaggctatatttcagtcaaaaacatccattatatcccacctctttacagcctgggg

SEQ ID NO: 613114 - DNA, 979 bp, Homo sapiens
ggatcggagacgtcctgcgtgtcgggacgtggctgatgaactgccggggcggtgctgaactgttaagctgaaagagaaggagacgcaggcttggggaggagtccaggagcccagcactaggtgacaacatccgggaattcttgctgagcgctcagatactttcgaatcttcatcgccctgtggaacatcttcatgatgttctgcgatgatgtgtgctgttcagggctcttgaatcccagcaggatgtaagcgcaggaactctactttcccgggatgccgagtctccattcctccattcctgatgactgtcacgaatgtttgtggaccagaaatagccgagcaatcttcccagaagagtccagaagctctgtggtgggtggataagagtgttcgccaaggtgtgcatggtttcccagccacgtccctgttgttcaaggatagtgtcacttttgggtctctgataagttgaagagtgctgtctactgaagagggtttcaggagcgtttatgtagaggggctgtgatgaaattgattccccatagataaagagaataatcatttctatccagagatctgagcagaaggatgggttgttaggtttaacacatgccggttgaggacattcagtgtgacttgcgtgagtctgacagactctggggccggcaggggcctgttaacaaagtgttttcaggatcccagacaagggtctggtggcaatcaggcagtgcgaataaccctagggttaaggaagggccaactgtaacagagagcagcttcgtttgaccgtaaatgttgcagagtgttgagtagtctgcgagtgttcccagagcattgaggtggggggaataggagtgactgatggccctgtacttagattgtgacttgtaaaatgataaagaagagaaaaaagtacagagaaaaaggggtaaaaggaggaaatgaagatagaagaagaagaaaggatggacaacaagaagcc

SEQ ID NO: 613115 - DNA, 417 bp, Homo sapiens
  misc_feature (17)..(17): n is a, c, g, or t
  misc_feature (31)..(31): n is a, c, g, or t
  misc_feature (71)..(71): n is a, c, g, or t
  misc_feature (87)..(87): n is a, c, g, or t
  misc_feature (263)..(263): n is a, c, g, or t
cagcacacacagcagcncacacacagcacancagcagcagcagcagcagcacagtagtaactaacgcctancactaacgctggcgancacagcatctttaccagcagttcttaacctgtgggtataaacccctcagggtatctactgaccctttcaagggctcaccgaagaccatccgaaaacacagatatttatattacagttcagagcagtatcaaaattatagttgtgaaataacaaccagggctggagagatggctcanaggttaacagcagtgacggctcttccacaggtcctgagttcaaatcccagcaaccacatggtgactcacaaccatctgtaatgggatctgatgccctcttctggtgtgtctgaaaacagctactgtgtcttcacatacattatataaataagta

SEQ ID NO: 613116 - DNA, 1213 bp, Homo sapiens
  misc_feature (716)..(716): n is a, c, g, or t
  misc_feature (718)..(719): n is a, c, g, or t
  misc_feature (722)..(723): n is a, c, g, or t
  misc_feature (725)..(727): n is a, c, g, or t
  misc_feature (731)..(732): n is a, c, g, or t
  misc_feature (734)..(734): n is a, c, g, or t
tgcttaacatgttgagattaaatggagaaagacttaagcttttacttttgtgattgacacttgcttcaataatgtaaccttgttctgtgtttttatcatttattaacaaatttcttttttcttaagggaagcctccaaaatcaaagaaaagtgagttacaatccataatgaatatttgccttaccagcctactggaacacattcatcaagaacttaagaggaagaaagttttctgccttcctccttcctagtgctctcagctatcaactttgaaataagtttaaacaacacctactgaaaacaaaaaccacttagtataaaaatatcccccaccagaattgggtcccccatatcatttctacaaaacagttctggagtggatcaaagtctcatcagatcagcttgccccttcttgtttgggcaggttctaggagaagctgctgtaatacaaaaactgaaagatgaaatcgtaaagctagataatgataatgatatttagtggggaaggctacagtatgttttcccataggcatttaaacactcactttttccaacgctttatactttgtccctatagcctttgtaattttaactttgatgacagtttaacttaggataacctgaatatgggtattactgttagtcatttgtatttttatcatttaacattttaaatgaatgtttaatttgctgggttgagtaatgccaagggaatnannctnnannnaaanngntgtgaggttagtaaaagattaaagttacaatttatgatacgagaacttcttactataggaaagtaggtaaatgaccctaaaaggttttctcagaaggtaaaagttttacatcagtctgaagacatataactctaacatttcagtttagttactgaaatgactttttctggtgtcattgagatactggctgtttgttccaagccattttaggctgagaatgactcttaaggtcttctaatgcatttcagagggttctagaaacaacaaactgaacatgatatgaaataacaacatagaatggccccgcatatactctggctacagctccttatcattgaaacaatacaatgtttgtcttttggcacaagcaaacagaagaccagcatgaactcgaacaacacaaaccaacacacacgcgcgtaaaacaagaaactagggggcgggagagcaggcagggagaaggggaggttgtcaagacg

SEQ ID NO: 613117 - DNA, 208 bp, Homo sapiens
ctcggcatgtacgggtaccgtgtctagggaccttctcaatggctagtctctcaggtcttcctgcagcttgacgtctctttcaatgaggctccacttgtgcaacgaggacaatggacatcctttggtggaaagcactgttctcatttacggtgaatatcttgttcatgtccctaaaggcctgtatgacagatggcccggtacatgacca

SEQ ID NO: 613118 - DNA, 977 bp, Homo sapiens
atgaaacttcggctcactccttggatgcctgcctgatacctccaaatcaccacaggactatgcctacccatgcactactcaccagacgcctcaaccgccttttcatcaatcgcccacatcactcgaaaacgtaaataatggctgaatcatccgctagccttcacgccaatggcgcctcaatattctttatctgcctcttcctacacatcgggcgaggcctatatatacggatcatatctctactcaaaaacctggaaacatcggcattatcctcctgcttgcaactagtagcaacagccttaccataggctatgtcctcccgtaagagccacatatcattctgagtgggccacagataattacaaaacttactatccggcatcccatacattggggcagagctaattcattgaatctgaggaggctactcagtagacagtcccaccctcacacgattcttatacctttcacttcatcgttgcccttcattattgcatccctagcagcactccacctcctattctttgcacagaaacggagatcaaacaaaccccctagagaatcatcctccacataaccgataaaatcaccttccacaccttactacacaatcaaagacgccctcgagttacttctctatccttctctccttaatgacattaacactattctcagcagacctcctagggcgaaccccaagagaagttataaccctaaggctaacccttaaacaaccccttccctaaatagcccgaaagatatagtacttattcgcgctacaaaatgctctgatccggccctaagaataagacagggtcctgaccctatacaaaacatcagtctaagagatcccatctcagataccaacaaaggtaaattggcgtaacacaagattggactacggagacccttcacgaaggagaccggaacttgacgaagatagataataatagaacacctggaaaggaaaaaaaaag

SEQ ID NO: 613119 - DNA, 943 bp, Homo sapiens
acctgagaaccctgaagggcagacaggaggggacggggcgctgcggttcctcggccgggagggaaccctgtgtgtgtctcgggctgtgtatgcgtgtgtatgtagcggggagcgaaggatcgctctcaagcagcggcccaagagtcagcgcctcctcctgagaaacacccgcgggcggagaagaaagcgagtgggtatgttgatggggggcggccaaacttcctgtcccgctctggagctgcttccggcgggagccggaagacgccgtgtgtggacgggattcggggctgactgacggacggacggctgcccgagactggaaggttaaattgattaccaacctagttcagcatcttacaggaaaagtgtaatgctttttaaagggatatgaatataacaggaaggtgtcattgactgaattagacttgaacctgtccctgatcagctacaggatttcagaagctgaatcaatgttatcagatgagttagaatccaaaccagagctcctggttcagtttgttcagaatacctccatccccctgggacaagggctagtagaatcagaagctaaagacaattacttgcttatccctccttccagtgaccgaggcctcagaatgccagcgactaatgttaccagatgaaactccccaaatcatggctaaattcttcccaaggagggtgccctttcttcagctggtttgagggagcctcaggtgtaatgtgggcccaaggcggaaaaagaacagggggccccatgtgcaaaaagtctcccgaggtctgggacaccgaagtgcctctaccgggggaaaattacgcgcaggaatggcctctatctttggggaccaaagaaaagggggggccccccgcacacgggggtgtgcgcaagaaacagcggcgcgccctctcgcggccaccagagaccggtccggtgaggccaaaa

SEQ ID NO: 613120 - DNA, 443 bp, Homo sapiens
cacagcagataggcactatgattggcatttagattgattccatgtctttgctattgtgaatagtactgcaatatatatgcatgtgcatgtgtgtgtctttttaagagactaatttatatttctttgggtatataccaagttatgaggttgctgggtcaaatggtaattctgcttttagttctgtagttctgtgaggaattgttacactgcttttttttgactgagtcttgctctgtcacccaggctggagtgcagtggcatgatcttggcctacttcaacctctgccttccaggttcaagcgattctcctgcctcagcctcctgaatagctgggattacaggtgcctgccaccacacctgggtaatttttgtattttagtagagacggggtttcaccatgttggtcaggctggtcttgaactcccgacctcaggtgatccacc

SEQ ID NO: 613121 - DNA, 151 bp, Homo sapiens
gcagcaaggtggcatttgaagctggtttgaagatcaacaggtgggtaacattaatccatatgggtgagtgggggagtgcaggtggagcggtgaggccgtggccagacgtgtgaactcacagatgcaccttttaggactacagtagggatga

SEQ ID NO: 613122 - DNA, 427 bp, Homo sapiens
  misc_feature (11)..(11): n is a, c, g, or t
  misc_feature (36)..(36): n is a, c, g, or t
  misc_feature (91)..(91): n is a, c, g, or t
  misc_feature (140)..(140): n is a, c, g, or t
  misc_feature (157)..(157): n is a, c, g, or t
  misc_feature (261)..(261): n is a, c, g, or t
  misc_feature (280)..(280): n is a, c, g, or t
  misc_feature (283)..(283): n is a, c, g, or t
  misc_feature (422)..(425): n is a, c, g, or t
  misc_feature (427)..(427): n is a, c, g, or t
attaacctcantgagcagggggtgaatttgaagtanaaatgggggcaggttggcccctaagccgttccccagcttgactttccccctttanccctagtgatttggggggccccaaggtttattttccctttcgccgttanttcgcccactaatgtgnccctggtgtcttctctcctcagcctgtttctcatccctggaaactgaggttgtctggcgcagggcgatagcgcagtggggtggggttgggaggaaacccttatnctgtgcgatggccctccgntgntctattattaaaactctgggaaactgctattcttaatttatttttaaagaccctgagaagcaaatctttaatttttttttttttgtgagatcgcaccattgcactccagcctgggtaacaagagtgagattccatctannnntn

SEQ ID NO: 613123 - DNA, 377 bp, Homo sapiens
  misc_feature (4)..(4): n is a, c, g, or t
  misc_feature (9)..(9): n is a, c, g, or t
  misc_feature (22)..(22): n is a, c, g, or t
  misc_feature (32)..(32): n is a, c, g, or t
  misc_feature (42)..(42): n is a, c, g, or t
  misc_feature (49)..(49): n is a, c, g, or t
  misc_feature (64)..(64): n is a, c, g, or t
  misc_feature (70)..(71): n is a, c, g, or t
  misc_feature (87)..(87): n is a, c, g, or t
  misc_feature (117)..(117): n is a, c, g, or t
  misc_feature (122)..(123): n is a, c, g, or t
  misc_feature (128)..(128): n is a, c, g, or t
  misc_feature (131)..(131): n is a, c, g, or t
  misc_feature (142)..(142): n is a, c, g, or t
  misc_feature (162)..(162): n is a, c, g, or t
  misc_feature (167)..(167): n is a, c, g, or t
  misc_feature (170)..(170): n is a, c, g, or t
  misc_feature (180)..(181): n is a, c, g, or t
  misc_feature (188)..(188): n is a, c, g, or t
  misc_feature (212)..(212): n is a, c, g, or t
  misc_feature (241)..(241): n is a, c, g, or t
  misc_feature (243)..(243): n is a, c, g, or t
  misc_feature (258)..(258): n is a, c, g, or t
  misc_feature (265)..(265): n is a, c, g, or t
  misc_feature (280)..(280): n is a, c, g, or t
  misc_feature (285)..(286): n is a, c, g, or t
  misc_feature (293)..(293): n is a, c, g, or t
  misc_feature (304)..(304): n is a, c, g, or t
  misc_feature (307)..(307): n is a, c, g, or t
  misc_feature (363)..(363): n is a, c, g, or t
tcanttaanttttttaatgggnctaaaaattntgtgaaaaanttttggncaagttgtttccatnaaaaannaatgattttaaaaaanaaaaaattaaaaatgccaaaagcaaaaaanaaaannaaagnggnccaaaaaaaantctcctttccttctgaaggntttangangcattgttannattaaanagttttttaataaaaaaattaaangggcaattgaaaaaaaaagttctgagaangntcttccaccaatgantaagagnggggggggagggatnagggnnaaaattnatttagccttntgngctttctggggagaattggggaccttgccagccccagcagcctttttgtccactgntttgatgaaaccca

SEQ ID NO: 613124 - DNA, 479 bp, Homo sapiens
cggtcctataagtttagcccctgttaggttctagcacaacaggttgatattagttccacagtatggctcggcattgaaaccactaagatcgcacgcatgctctgatgagacgtgttcaatctgcattcactagtgtacgcatcagcaaacacttgacaaagacatgcccgttgccatatcaacggggtaaaggttccagtattgtttcctcagacagcaccttgtaagttggcaagcatagtaacagcctgcttagccggtatacatgcatgccaaggcattaggcttgggttcacacatcgtgtaaagcaagcggcagaatccttccgacccacgtttctctcacatatctttccaatcaataggtctacgtataggaagtttccgaaaacttcgtgtcatggtctgcacatatatgttcgtgtgacagagtgctccccatgagggtttagatgtatactctatgtcgaacaatcgct

SEQ ID NO: 613125 - DNA, 848 bp, Homo sapiens
cgtggtggctcacgcctgtaatcccagcactttgggaggccgaggcggcgcagatcacgaggtcaggagatcaagaccatcctggctaacatggtgaaaccccgtctctactaaaaacacaaaaaattagccgggcgtggtggcaggcgcctgtagtcccagccgctctggaggctgaggcaggagaatggcgtgaacccaggaggcgtagcttgcagtgagccaagattgcaccactgcactccagcctgggcaacacagcgagactgctaaaaaaaaaataaaagagaaaatcattgaggagaaacgctatctgcctaccgggtctcaaaatgcagaatgacggtgcccgtatgccgagagaaacaaaaacaaccaaaacacagagcaacaacaagttgtggcggcgagcctcgagccccaccacccgacacatgacacacaacaaacaatagaggggacgccgcggcgacaccaacagaaagagaagataaaagaaggagaacaaaagggaggacaaccacggaaaaaccaccggccagacaagcagacaagaagaggacatacaccacccatcccaaaactgcaccgaagcacactcagaggcgacgcagaagcagaaaacagatccccaaacacgaagcaacgacggcgcggcggcaagaacaaacaaagacgaacaaccaacagaaaaaagcacaaaaacacgacccaccccacacgaacgccaaaacacaacgacgcaacagccggcgaccgcacgaaacacacacaacacacacccagacagcaacatacaaacaaacagacacgacccagcagggcaaaaaagaagaaagagggaaaac

SEQ ID NO: 613126 - DNA, 748 bp, Homo sapiens
gcagtggtttgcccccagcgcgcgaggctggtgagtctggcagcacctgttggtagccggagggctggtttccatggttgcgcgattatgaaccatgcagctgtgtgcatgctcgatgggccagggtgtgtgcgtcctatggtggctacgagcagtctaggaactgcaaggcctgagcctggggccagacaccctggtctcccggccatggtcaacgaacctccaagtacctgcgcttactgtgggcctcgaggtaggtgggctcaatgtcttgtgtaggacgtgcccgctggctggtgctgcagttatggggtgctcttctgttaccagtcctcctttcagcgtctggggttgtcttgtcttccatctatggactccattctactattcctatatttccgaccagtctagccgaccattcagcccgtgtgcgatttctactacaggaccgactgtgattcctccagtcatctcactctgactccgtttccctgttgccaattgtctcgactgagctaaagggtggacagttgatcgggtgctgatggtatggacaggccgtatcgtgttagcttaggagcttgaagctgccagagtgccctgtgaatcaagatttgggcatgttccttggtcaaccatttcctggtacaccagaaggtggccagaatcatcttccactttcttcgcgttcgggtgatgctgcattaccgggtcagagctgctcagatgctggacacagttggttctt

SEQ ID NO: 613127 - DNA, 154 bp, Homo sapiens
tcatcgagctcggtccctaattatgcacaattacctgggggtggtggtgcgctcctgtaatcccagccactaggaaggctgaggaaggagaatggcgtgaacctggcaggcggaggttgcagtgaaccgaggttgcagtaagccgagatctcaa

SEQ ID NO: 613128 - DNA, 122 bp, Homo sapiens
ccgaggacacagccgtctattactgtaccacagacttggggggggcctattgtactcgtggtgtgtgttattacgagacttttaaatactggggccagggagtcctggtcaccgtctcccca

SEQ ID NO: 613129 - DNA, 145 bp, Homo sapiens
gctcggtaccggtctgctgatgtcaacattctgacactgcagcaatctcctgggattgtccctcgagtcccatatcaactcaggcgagtgcttcattcccgtcctactggcgctcgtgcccgtgcgctgaggcattgctcgtagt

SEQ ID NO: 613130 - DNA, 193 bp, Homo sapiens
  misc_feature (4)..(4): n is a, c, g, or t
gacntgggagaggtggtgggccaggcaagacaagaaaagggattagggttggaagtttgacttccaatttgttctgtgtctagtcctttagatgatacatttgttctatctgttttctttttattggcaatgctttaaaaccttgtatctgtcctgcagagttacagtctttctctcaggaagctacagcggg

SEQ ID NO: 613131 - DNA, 258 bp, Homo sapiens
ggtggcaacacgttggtcttcccaatagtgaacaccatcaccatgtgacccagaatttccttccttttccagactgagtaatactccagcggggtgtactgccactttgtttgtctatgagccatcaacagacacagcctgtttccacatttggtcactgctaacaacgctgttatagacgtgggaatacgcacatccgcttgagtctgtgttcagctatttcggatacataggcagggcggaatcctgtgttaaaat

SEQ ID NO: 613132 - DNA, 316 bp, Homo sapiens
agctctttgcctgtgtgtgcgataccagttgcctccctgcttgaataggcctctcctaggctaggccggtgttcagaggcatgccggtctgggctggggacgggcgtcttctgaaatgggagttaccaggttttaaaattctgctattgtttaatttaccatttaaggtcttttctataatatctaagtaactagtcagtttttcttacagtgctcatagcatttgtatttaaatggtatttccagtgaaattggtttaacattgccatttaaaattggcctttaacagcttcccaacacggctaccgggataacg

SEQ ID NO: 613133 - DNA, 102 bp, Homo sapiens
cagccggtaccagcttctctttgtagatagctaataaaatcacttaattcacggcaccttcatatttctttggatttagcttcgtgttggcttccagatggt

SEQ ID NO: 613134 - DNA, 408 bp, Homo sapiens
  misc_feature (137)..(137): n is a, c, g, or t
  misc_feature (140)..(140): n is a, c, g, or t
  misc_feature (185)..(185): n is a, c, g, or t
  misc_feature (237)..(237): n is a, c, g, or t
  misc_feature (255)..(255): n is a, c, g, or t
  misc_feature (276)..(276): n is a, c, g, or t
  misc_feature (302)..(302): n is a, c, g, or t
  misc_feature (308)..(308): n is a, c, g, or t
  misc_feature (326)..(327): n is a, c, g, or t
  misc_feature (343)..(343): n is a, c, g, or t
  misc_feature (349)..(349): n is a, c, g, or t
  misc_feature (356)..(356): n is a, c, g, or t
ggcacgagcatcttatctaacagggtggccctcccctagctacagattccagccactctcggtcatgaaaacaagggtaactaatattagcaacaagcgggatggaacgaacgaagtgaaatgggctttttcacgtnttnctccttggataccactcggccagctataaatctatccctataacncggcttcatggggattttattaattcaatagcagcttaatctaaaatcgganggtcctaatgataatgangtttctagagccaagccacanggctctttctcaatctggtctcttangggtcncaaagtctctaaggagannactaaattaacaagtnagccangcatcgngtaaggatgtcgggccggcacgagcatcgtgagagagaagcacatttggatg

SEQ ID NO: 613135 - DNA, 593 bp, Homo sapiens
  misc_feature (2)..(2): n is a, c, g, or t
  misc_feature (477)..(477): n is a, c, g, or t
antcacaaaagggacaaaaccagggcagttttcgccggtatcgcttgtagcgttggagctgatcgccaacacaaaaaaagacccacgcttgctactggcgtacttagggttggccaggcatacgaccatgagggatttggacggccgtggccctaacatgctgactggtgccggtgcggagaaggtcagggtgctgacaggctgtggaacgcctatggccacaggcatagttaacgccttagccggcatggggctgatcaagaagccagcggcagggctaccacccaatcaggcccgatgggcgatgcagcaccaaggaactgtgaatattcctcatgcgctgatagacggtgggataggaaatgcggacggcattggtcgcttattgaaagacggggccactgatgaggttgtcgtctgcgctgttatgttgctgattaactgttacgcagtgcacgatctagaaatgttcggcgngattgatcaccagcagatatggcgacattggaaccatatggtcagctctgaggctgaaggggtccgggtgacggctgagccaatcaacgacacagcccaagcaaaatttatcagca

SEQ ID NO: 613136 - DNA, 198 bp, Homo sapiens
tctcacattggatgattgtcataaggtttttagcatgttcctccttttttccccccctttttcataacaagaactcagtaggaggtggttccaggtagatgttcctcagcatttcataaaagtgtttattaatcaacaactctcaccatgatgtgaagagtttccaaatctttcaaaataaaaagtaatgacttagaa

SEQ ID NO: 613137 - DNA, 121 bp, Homo sapiens
gagttgtggtgaattggagtcccagtcagttgttgggtgttaacccaactgttcaagggctgcaatcagttgtccgtggtcacccctgtattaagcttttggcgccaatgggaccattctg

SEQ ID NO: 613138 - DNA, 220 bp, Homo sapiens
  misc_feature (197)..(197): n is a, c, g, or t
cgcctgcctcagcctcccaaagtgctgggattacaggcatgagcaccacgcccggccaggcatggggcattttagctggtattgttccatccaccaaagggggctgcagcagaccctggaggggcagagtctacgacctgagaggcacagagcagccagccgctgggtgtgggctgcccaagataatggggaaggtngccagaggggcttgccctgcccc

SEQ ID NO: 613139 - DNA, 523 bp, Homo sapiens
ccgaggattaccacctgctcatcactcgcgctgatgtcctatcccctcatgtggctgacatggactgctggcctgtgcgccctgtgtttggccaccgttgtgcccttaggggtccggcgcttgaggtttacaactggtatgactgagtgtatcctgcggtggctggcgtgctgtgcatggggcctgctcacagacagcatggagcagggaagggctgtctgtgcccatgctcagcatgccttgaggggaggaggtgatggccatgggttcctgatgtcggtgcaggagctgaaggtaagtggagtgctgacaagaatatgcccgactccccaggacaagacagaactttgtaacaaacagtaccaattgataaaggccgagagtaaaagctataatataccagttaatgacttagtgaacattcccaggtatagaagcctctgtggccttaaatgtggctcagtgaaagagagacccagaatagccaggacagtatgaagcacttcacgcacagcactcagaa

SEQ ID NO: 613140 - DNA, 257 bp, Homo sapiens
agacacaggctcaatattgttggtagtgaggaaacataagcactaaacactatgctgtcgcaacagattgccttgtgctgtctctgggcagaataaggactggtgacttgagcggggtggtccgcagtgtacattatattccagtgggaaactgcttccaagtttaagcattagctccccctaactggagaaaacatattttgcttttctgagaccactatcataatacagacacttgctctagatggcaccatgtg

SEQ ID NO: 613141 - DNA, 441 bp, Homo sapiens
cttggctcaccgcaagctctgcctcccgggttcacaccattctcctgcctcagcctcctgagtaactgagactacaggcgtccgccaccacgcccagctaattttttgtatttttagcagagatggggtttcactgtgttagccaggatgttctcaatctcctgacctcgtgatctgcccgccttggcctcccaaagtgctgggattacaggcgtgagccaccgcaccacacccagcccacattgcttgatttttgaatgttgaaccagtatggcatacttgggatatatcccacttggtcaaagtgtaatttttatacattgttggatttgatttgttaatattttgttgataatttgcctctatattcatgagaggtattggtctgtagttttcttgtaatatctttgtctaatttgggtacccttctgtcgtcttctc

SEQ ID NO: 613142 - DNA, 80 bp, Homo sapiens
cttgcccctacttttcaacaattttctatgttagtcgtgaagaactaaggtgggagcagtactacaagttgagtaatggt

SEQ ID NO: 613143 - DNA, 101 bp, Homo sapiens
tcgcaagctggtatcactgcaactccacctcccaaagtgctgggattacaggcatgagccactgtgccgggtctgttactttttaaaaaaaagggcggccg

SEQ ID NO: 613144 - DNA, 101 bp, Homo sapiens
ccgcgcggatatgctggagttaaaagggaagttgtatctccttcatcaagactacttgccagtgggtccatactgcaggaagatgaagcatacacactgct

SEQ ID NO: 613145 - DNA, 438 bp, Homo sapiens
ggatcggagagcggtatccatcgcgatacaccctggccgagatacctgtgatggctgtgacccacagcaggtcagagctcactttcaccttgataagaaaggtgaatgtgagtaaggtccaacactaagaagaacaagattctggaaataagaaagataatttgtaaacatgtgagtcccctatggttaacagaatacagactatgaagatgaatagacacctagagcgtccaaaatataaaaatagcagctggaaaatgtagtgagaagataggcaagtgaaggaactttccaaaaagatgatgcttctgcatctattcattctgaaattactgacagcaacaaaggtcagaagacgttgaagaagatgggttggaaaaaaggagatggactgaggaagatgatgggagaatgaaaactccaatttagtgtacagtt

SEQ ID NO: 613146 - DNA, 237 bp, Homo sapiens
  misc_feature (117)..(117): n is a, c, g, or t
gtaagcttatgctgtagatgagttacagactgatgggttcatttgttttgtttttgagatggagtttgctctgtcgcccaggctggagtgtgatggcaggatctcggctcaccgcanactccggctcctgggtttaagcaattctcctgcctcagcctcccgagtcgctgggattacaggagtgcgccacaatgcctggctaattttgtatttttagtagagaaggggtttctccat

SEQ ID NO: 613147 - DNA, 297 bp, Homo sapiens
cttttttaattgtttttataatatttaatttgaaaaaggagccccttctctctctactctttcatagactgaagtttgaatatgaaataggccttacccctcctgttgcctcccccgtcaaaattttaggttggaaatttggttttattctttcagggaattgcttatttgacccgatcccttcctaaagctttaaaaaaagtgattcaaatgtgtgttttcccccccgttttataacaaatggattgatggccgtcaaatagccccggaataaattcctgtttcaatggtttttta

SEQ ID NO: 613148 - DNA, 786 bp, Homo sapiens
agcgggtctctcgggcctgggcggcgcagacgaggcctgaggcggcggcgcgaggcagtatggtttgaagtggtgaacatggatttttctcggcttcacatgtacagtcctccccagtgtgtgccggagaacacgggctacacgtatgcgctcagttccagctattcttcagatgctctggattttgagacggagcacaaattggaccctgtatttgattctccacggatgtcccgccgtagtttgcgcctggccacgacagcatgcaccctgggggatggtgaggctgtgggtgccgacagcggcaccagcagcgctgtctccctgaagaaccgagcggccaggtgagcaccgctgcacttcctctccatctgatctctaacaccagttaaaaccaagcttccatactttttggtctgtaaagccgcaccctgtctcgagcttaaggatatgtgtgtgtatgtgcgtgtacagacacacaaacctgccatataaagtggtagtttgctgcaaataaagactgaaaggaactctggaaaaaaaaaaaaaaaaaaaaaccccggggactcaatgcgggggcgcggaaaaaagcggagggtaactggacgtggggccttgggccaataggcgtgtcacctggaccaaggttttctggtacaacggggcagatccggcgggccccctataggggagcggataaatcccgataagccaggtacctggatgaggacgccgcgacacgggacaccaacacaacgacaagcacacacacaccacacagcacgc

SEQ ID NO: 613149 - DNA, 147 bp, Homo sapiens
  misc_feature (98)..(98): n is a, c, g, or t
gtgtgaggcaggagaatcgcttgaacctgggagaccgaggttgcagtgagctgaaaccgtgccattgcactccagcttaggcaacaagagtgaaactntgtctcaatcaatccatcaatcaatcaataaaatagaggtcatgctgac

SEQ ID NO: 613150 - DNA, 908 bp, Homo sapiens
aaaagtattgtagcattgcttggcatccatgaaaaatgtatttcagtgggctttaaaatttccatttgcagaatttggtctctcaggctgtttgggagctcttttattcacattagttctccttgtacacctattttattggtgtttaatagtaaaggtttaacatctgtagacttttccaggttattatgtaattcttatggagggtgagaattgggctgtcacccattgggaagtaaaagctgaggaaaggcataaaccaaaaaatctttcggcaaacctgtgctttgggaggcccgaactaattatgggctgatatgactttcgagtatataatagtcgtcgaatactccccgtaatgtggtgtggcgggggcttgcattattatcagcgcttcgcgttattccgcatagtgcccttggttgtataggggattgggctaattttaaatccttatttgtacgttctgatagagaagaagtatcggaacatgatatttgcttatttgaacctggtgtgggtgatacgtgaaggataagacagtggggaaggatgtctaatccaagggcggaggggggggggaccctcggtggcatcacatatactgggggtgaacggacggataggctccataaagcagagagtccacaatttaaaattctctccagaacggctctgggggaacggaactgtttccaactgcggagacacggacggaagggccccggaggataactgggggagggagcagcacccggtattaccaaacctgctggctaccacggtgggctggcaagcgggaaacctgcgagaacacttcaggacggaaggaaacacggcatataacctggagaggccccacttctggcaacaaaataaagtggacatccaaacctcgtagcaagagt

SEQ ID NO: 613151 - DNA, 3808 bp, Homo sapiens
agcgggtctctcgggcctgggcggcgcagacgaggcctgaggcggcggcgcgaggcagttccagctattcttcagatgctctggattttgagacggagcacaaattggaccctgtatttgattctccacggatgtcccgccgtagtttgcgcctggccacgacagcatgcaccctgggggatggtgaggctgtgggtgccgacagcggcaccagcagcgctgtctccctgaagaaccgagcggccagaacaacaaaacagcgcagaagcacaaacaaatcagcttttagtatcaaccacgtgtcaaggcaggtcacgtcctctggcgtcagccacggcggcactgtcagcctgcaggatgctgtgactcgacggcctcctgtattggacgagtcttggattcgtgaacagaccacagtggaccacttctggggtcttgatgatgatggtgatcttaaaggtggaaataaagctgccattcagggaaacggggatgtgggagccgccgccgccaccgcgcacaacggcttctcctgcagcaactgcagcatgctgtccgagcgcaaggacgtgctcacggcgcaccccgcggcccccgggcccgtgtcgagagtttattctagggacaggaatcaaaaatggaaggcagcctctggagtgttctggtggctggggattggatggtaccagtttgttactttgatttcttggctgaatgtgtttcttcttaccaggtgccttcgaaacatctgcaagtttttagtcttgctcatcccactcttccttttactagcaggtctctccttacggggccagggcaatttcttttcgttcttgcccgtgttgaactgggcaagcatgcatagaacacagcgggtggatgacccccaggacgtgtttaaacccacgacttctcgcctgaagcagcctctgcagggtgacagtgaggcttttccgtggcattggatgagtggcgtggagcagcaggtggcctctctgtctggacagtgccaccaccatggtgagaatctccgagagctgaccactttgctacagaagctgcaggctcgggtggaccagatggaaggcggcgctgccgggccgtcagcttcggtcagagacgctgtgggacagcccccgagggagactgactttatggcctttcaccaagaacatgaagtgcgtatgtcacacttggaagatattctgggaaaactgagagaaaaatctgaggccatccagaaggaactagaacagaccaagcaaaaaacaatcagtgcggttggtgagcagctcctgcccacagtcgagcacctccagctggagctggatcagctaaagtcagagctgtccagctggcgacacgtgaagaccggctgtgagacagtggatgccgtacaagaaagagtggacgtgcaagtcagagaaatggtgaaactcctgttttccgaagatcagcaaggcggttctctggaacagctgctgcagaggttctcatcacagtttgtgagcaaaggcgacttgcagacgatgctgcgagacctgcagctgcagatcctgcggaacgtcacccaccacgtttccgtgaccaagcagctcccaacctcagaagccgtggtgtctgctgtgagcgaggcgggggcgtctggaataacagaggcgcaagcacgtgccatcgtgaacagcgccttgaagctgtattcccaagataagaccgggatggtggactttgctctggaatctggtggtggcagcatcttgagtactcgctgttctgaaacttacgaaaccaaaacggcgctgatgagtctgtttgggatcccgctgtggtacttctcgcagtccccgcgcgtggtcatccagcctgacatttaccccggtaactgctgggcatttaaaggctcccaggggtacctggtggtgaggctctccatgatgatccacccagccgccttcactctggagcacatccctaagacgctgtcgccaacaggcaacatcagcagcgcccccaaggacttcgccgtctatggattagaaaatgagtatcaggaagaagggcagcttctgggacagttcacgtatgatcaggatggggagtcgctccagatgttccaggccctgaaaagacccgacgacacagctttccaaatagtggaacttcggattttttctaactggggccatcctgagtatacctgtctgtatcggttcagagttcatggcgaacctgtcaagtgaagacactactcattatttttgtacatttttgtatatactgggacagcgtgaaacactggaatccttcatggacgagggcatatacaatgatgggacagtgccacactccttcaataaacgtggctgctggccagaggacgtgagcgtgtgacgggcgccttggcgccacctgttgggtgctcactgcctctgcaggtgcagaggggtcagcagcaggagaagcgtgttgaacacgtggctctcagacactccttgtttttaacgggaagctctttgcatttgcatttcctcaacaaaggagcaaagcagaggaagctgagagtctggcgtgttcttgacgctttggtcttcagccttgcactggctcttctaaaggacttttggagggcagataatttcatctgttaaatccaacacacatttctttcagggaaaaacaatgtcaccaaattttcagagttctaaactcctttccttcaagccggaattttccttttttcagcaccagtaggtactaagtctccagatggggaaataactaaaatgtgtttttctgctttgttcgctcttacttctgaggaaggtttccagtcaggactcgctgtaccaatatccatggaggaatatgggagcgtttcgctctccttgtaggctgaagtcagtctgacttgaaggggcctggtttggatctaagcaaacacccagatggggttctctggtctcagcaaggcttttcctgttgggagtcacagtaaacagaaacccaaaaatctcatcttgggtgttttcagggcttgttttgagttttgctgaatagggagcgcaagacgccctgagcctccctctcactggtggtgataagaggagccgtctggtgtgtcagggtcacgaacccgttacatttcaggacgatcctttttccttcagcagcatttcttactggctgtggctggaatctgccttttatcacagctgtcaccattctcacgtgattcttgtgagactctttttggttataattactatttaatatttagactattttactgagcagactttataaatgagatatctacaaggcacttaaagtgttacagatgttttaccttaagaattatttaagttgtgttgggttaagacagttttcagtgtaccgtaaatgttgtgttttcagaaaaagacaaaacgatggtgctgactggttttctgtatattgcacaacagtcctcaaatacactgatgtatgaaactattcatacatcaagcagcatttttttcactctccttagaattggaactatgcagttaaggcagataaaatgtacagatgtttcatatattacaggttacatatataaatcaaaatttcctatataaaactgatttgggatttggggtggaaatattttgaatattaatttatttttaaagatgcaagataggactttgtgcaatgtatttttgtaaatgcttttcaaaatatctgtctttggtagtgcttctgctgctgccaccaaattgataagatgctattaagaggtttaaataaagagttttaatttttaaaa

SEQ ID NO: 613152 - DNA, 471 bp, Homo sapiens
  misc_feature (39)..(39): n is a, c, g, or t
agctaattgggaagctgaggtgagaggatcacttgagcncaagaagtcgatcaaggctgcagtgagccatgttcataccactgctctccagcataggccacggagcgagaccctgtctcaaaaaccaagaagccacacacattctagttttcagattctaacactagatattcaaatagagaaaggggattaggccaggagcggtggctcacacctgtaatcccagcactctgggaggaggcggcaggtggatcgcttgtgcccaggagttcacgaccagcctgggcaacatggtgaaaccctgtttgtataaaaaatacaaaaattagccggatatggtggtgtgcgtctgtagtcccagctacttgcggggctgaggcaggaggatcacttgagctggggagatcagcagccatgttcacgctattgcactccagcctgggcaacaaagtgagaccctgtccccaaaaa

SEQ ID NO: 613153 - DNA, 105 bp, Homo sapiens
aatcagtaatatatctcaagtcaaactaaggcaattttgcttaattatccaactaatcctacaggcgtgaccctatccaaatcagaagttaaagcgattgcggaa

SEQ ID NO: 613154 - DNA, 2183 bp, Homo sapiens
agcgggtctctcgggcctgggcggcgcagacgaggcctgaggcggcggcgcgaggcagtatggtttgaagtggtgaacatggatttttctcggcttcacatgtacagtcctccccagtgtgtgccggagaacacgggctacacgtatgcgctcagttccagctattcttcagatgctctggattttgagacggagcacaaattggaccctgtatttgattctccacggatgtcccgccgtagtttgcgcctggccacgacagcatgcaccctgggggatggtgaggctgtgggtgccgacagcggcaccagcagcgctgtctccctgaagaaccgagcggccagaacaacaaaacagcgcagaagcacaaacaaatcagcttttagtatcaaccacgtgtcaaggcaggtcacgtcctctggcgtcagccacggcggcactgtcagcctgcaggatgctgtgactcgacggcctcctgtattggacgagtcttggattcgtgaacagaccacagtggaccacttctggggtcttgatgatgatggtgatcttaaaggtggaaataaagctgccattcagggaaacggggatgtgggagccgccgccgccaccgcgcacaacggcttctcctgcagcaactgcagcatgctgtccgagcgcaaggacgtgctcacggcgcaccccgcggcccccgggcccgtgtcgagagtttattctagggacaggaatcaaaaatgcggtgcgtctttctacgtgaataggattttgtggctggccagatacactgcatcatctttttcatcatttttagttcaactttttcaagtggttttaatgaagctcagttatgaatcagaaaattacaaattgaaaactcatgaatcaaaagattgtgaatccgaaagctataagtcaaaaagccatgaatcaaaagctcatgccagttactatgggagaatgaatgtgagagaggttctcagagaggatggccacctcagtgtaaatggggaagcgctgtgtaagtatggcttcgttttcctgtgggcgtcggtcgtggagttggtcccacacgctgtcatgttgggtactagcagtagagaatgaacggcccgtgtgacatggtggtcctcactgatgacgacgggctgttggagctgctgcttaagccctcaccacagaagctcatagccaccagatcgcatttgctttgattgttgactgtctcgtgtgtaattgagtttcccagtttctacagactgccattgctatgcacggctgagatggacagagtttgcttgtgaatccgccacactcactgcctgtcaccacacctgcaggcgacgactgtaagggcaagaggcacctcgacgcgcacacagccgcccactcgcagtcgccacggctgcccggtcgggcagggaccctctggcacatctgggcatgtgcaggttgtctctcgccccgtctccgtctcatctcgccctgtcaccatgctatttgtgtcttgtgtggtttgtgcttggaattcaagtgctttaaagtcttgctgtaaaaactgacaggaatagtattaactttggtttaaaacagggtgaatctctctcgaaaagctcccttgtaaatattttttggaagcggagtctcactctgttgcccaggctggagtgcagtggtgcaatcttggctcactgcagcctccacctccagagttcaagcaattctcctgccacagcctcctgagtagctgggactacaggcgcacaccaccacacccagataatttttttgtatttttagtagagacagggtttcactgtgttggccaggacggtctcgatttcctgacctagtgatctgcctgcctcggcctcccaaagtgctgttggcatcttaaaaaaaaagttagtttcaaaaataattgtctcacctgctaatgaataaacataaagccattgatttttcttttaaattctcataagccatatttctttgcatgtcaaccatgttgtaattacatagttgcaggaattcacaagcaggtgttaagtcactgtgaggagacagccacccacagtgagaactggaacaaaacttactttgggaggctgaggcgggtggatcacttgaggccgggagttcaagaccagcctggccaatgtagcaaaaccctgtctcttaaatta

SEQ ID NO: 613155 - DNA, 1028 bp, Homo sapiens
acgggagggagaccttgtctcaaaaaaaaaacaaaagagcaaaaacagtatggtttgaagtggtgaacatggatttttctcggcttcacatgtacagtcctccccagtgtgtgccggagaacacgggctacacgtatgcgctcagttccagctattcttcagatgctctggattttgagacggagcacaaattggaccctgtatttgattctccacggatgtcccgccgtagtttgcgcctggccacgacagcatgcaccctgggggatggtgaggctgtgggtgccgacagcggcaccagcagcgctgtctccctgaagaaccgagcggccagaacaacaaaacagcgcagaagcacaaacaaatcagcttttagtatcaaccacgtgtcaaggcaggtcacgtcctctggcgtcagccacggcggcactgtcagcctgcaggatgctgtgactcgacggcctcctgtattggacgagtcttggattcgtgaacagaccacagtggaccacttctggggtcttgatgatgatggtgatcttaaaggtggaaataaagctgccattcagggaaacggggatgtgggagccgccgccgccaccgcgcacaacggcttctcctgcagcaactgcagcatgctgtccgagcgcaaggacgtgctcacggcgcaccccgcggcccccgggcccgtgtcgagagtttattctagggacaggaatcaaaaatgtaagtctcagtcctttaaaactcagaaaaaggtgtgttttccaaatttaatatttcctttctgtaagtctcagtgtctgcactatttgtcttggagacttaaaattatcccttgaaagcataagaagtacaccccaaaccagctttgtccttcctgtcctcttctagtttacattttatgtggttagtaattttgtacctaaaagtatttgaaattctataaatttggacttgacgtgagcaaaagaaaatttctacgtaagcgaaactaataaaactacagtcactttcaaaaaaaaaaa

SEQ ID NO: 613156 - DNA, 590 bp, Homo sapiens
ggaacccgtctggagctatcctgcccgccatcgatcctagtctctcgtcgcccgttgccatccctagcgcgatccgtttaccattgaccaggacggagggtccgacgatcccctcccgttacccatccagaatccaattggcccaccccatgggtactggaacctacgaagtaccccgacttcggcggacataattttcgaacatccgtacgatacttctcccccattattcctaggaacccggcgacctgcaaactccttgacgcttgacccactcgagtagtatactcccgagttgaagcccccactttcgtataaataattacactcacccagacgttcttgcaccttactgaggctgtccccaccacttaggcttaaaaaacagaatgccattcccggacgtctataagcccaaccaacctttcaccgctacaccgaccgcggggtatactacggtcccatgctttgaaatctgtggagccaacccccgtttcatgcccctcgtcctagaattaattcccctaaaaatctttgaaatagggcccctatttaccctatagcaccccctttaccccctttagagccca

SEQ ID NO: 613157 - DNA, 378 bp, Homo sapiens
cggcacgagggtgagttttgagggtgacctgagttgagttgcgtgtaggcagctcaggttgactgagacaggaatgcgctcgatttcctgcccgttaaaacactctgcatttctttcccgccctctgcagtatggtttgaagtggtgaacatggatttttctcggcttcacatgtacagtcctccccagtgtgtgccggagaacacgggctacacgtatgcgctcaggtgagtgtgcacctgcacgtggggtcctggccttgcaatgcccactcgctgtcgcggtggcgtggaccttaacaggaactccatagtactaccgactacatgctgtattttgaaggtgaaaaaaaataataaactgtatcttatggcttta

SEQ ID NO: 613158 - DNA, 1403 bp, Homo sapiens
  misc_feature (719)..(719): n is a, c, g, or t
ccccggggcagacctcttcgttttctgcggggtatgtgctgctctctgcgctgaggtgatacactgcccggccgcctgtgggcgccccttgtggttccggcccctagtgttctttccacctctctgggctctgtgcccctgttcctcactcaggggcttccgctcaagcctcctcgggcacccactttgggcgggctcgcgtcctcccctgggtctcggtggttggctgccgggggggaccctttggcgtccttatcctacccctcctcctagtgtccaactatttgtttgggggtttatgtttggcctttacgaggtcccttcgacgcccgtttattcttcgggggtttccccgggcgtctcgggtcggctgggggggtcatcacctggggcgtggccccccggggccacccccttttggaggttctctcgatgggcggccccaccaatggggtcccccaccgcccgtcctctgtgccctctcggctttgttgtgcttttgctgcgggtagaatgtggaaaggggtgtttaagggcgcgttccagaggggacccccatgcacagactcattctctccgtggagctttgatatcaaagcgacttctgtggcactttgcgccccttggattttgtttgccccatacacgatgcgaacacacgccccgtgtttttccacccacaatgcgccccgtgggggcccccccggtctctctccgantgtccccccagtctctcctctctgcgcgctcggtcccctttgagtatgcccccccgagtattctctctgtgaggatctctctctccctgcggtcttgtggtggtgtatatgccccctcgcggattttgcgatattgcgcaagtctaggcgctcctctcttctggcgggctctgctccctggtctctcccgctacactcccagtgctcttatctccctgggggccctgtgccggcgcgcgtctcttctccgccgggagtgctcccttatgcgtggttcccgccatgcgtcttccaacgcgcctctttgcggtgcctcttgttaacttcgcccggcgcccttcccctgtctgtatctatagccacgctttcacacccacacccctggcattccttcttttttatacttcgccacagccccttccccgcctggcttcccttcccgcttctcccaaaccccaacctgctttcccgcgaacggggccacaggtgcacgccacaggaagccaaggcctgctgcttcaccacagccgttcccctccacagccggccccttgaaagtgtccctaaatttgttagtagccatgagacgtctggcttctgagccacccttggtattcttggtcacggcttttgagtgggaggcctcgtatccgttaaacgtgttataaaaatttcccatcaccc

SEQ ID NO: 613159 - DNA, 746 bp, Homo sapiens
  misc_feature (653)..(653): n is a, c, g, or t
tcgtacacatggttggttgtactaatttccatcccacaacagtgcgtgagggttccctttctccacatcctcgccagcatttgttactgcctgtcgtttaagatagaagccattgcaactggggggagaagagatctaattgtagtttttacttgcatttctctgaatatcagtgatgtcgagcacttttcttggaaacattttaataaatcctgaagtggtgcagtactattgcttccaaaatggtggaactgggcactgagaccgacctgaacttggctttaaggtggcagcatcttgagtactcgctgttctgaaacttacgaaaccaaaacggcgctgatgagtctgtttgggatcccgctgtggtacttctcgcagtccccgcgcgtggtcatccaggtgagtggccgccggtggccggagctgctcctcttcagcatggactcggttagtgttcacgggtcgtaggtccacagctccgtggaacttcgtaagatgaacacgtctgtggaactggtaccacaagaagtggcagcgttcccacaccgaggagtcccccgtgtccccgtgtagcctccacgctacacatctgttggcttgggtttagcgtcacacagatgggaccgtgtggcacatgctggtcctgtcangcttcctccctccctctgttgggtgtccagccatggtgtgtgagtggagtgttctgtcgggcggggttccggagagatgcatgtgtctcaggt

SEQ ID NO: 613160 - DNA, 139 bp, Homo sapiens
gcctggaccgccaagcactctttcttccatggatggagtgcggcttgggactgttggggagcatgaactcctgtggtgtggactgtgtcaagcgaatacctgattccacagctatgtggtggtcgtgctgccagtcacg

SEQ ID NO: 613161 - DNA, 1268 bp, Homo sapiens
  misc_feature (951)..(951): n is a, c, g, or t
  misc_feature (960)..(960): n is a, c, g, or t
  misc_feature (973)..(973): n is a, c, g, or t
  misc_feature (977)..(977): n is a, c, g, or t
  misc_feature (979)..(979): n is a, c, g, or t
  misc_feature (1007)..(1007): n is a, c, g, or t
  misc_feature (1053)..(1053): n is a, c, g, or t
  misc_feature (1059)..(1059): n is a, c, g, or t
  misc_feature (1081)..(1081): n is a, c, g, or t
  misc_feature (1107)..(1107): n is a, c, g, or t
  misc_feature (1143)..(1143): n is a, c, g, or t
  misc_feature (1158)..(1159): n is a, c, g, or t
  misc_feature (1175)..(1175): n is a, c, g, or t
  misc_feature (1187)..(1187): n is a, c, g, or t
  misc_feature (1190)..(1190): n is a, c, g, or t
  misc_feature (1227)..(1227): n is a, c, g, or t
  misc_feature (1231)..(1231): n is a, c, g, or t
  misc_feature (1247)..(1247): n is a, c, g, or t
  misc_feature (1258)..(1258): n is a, c, g, or t
cctgggaccgtgctgtcacagattctcatgtgctgggattacgaggcttgagcaactgcacccaacccagaactattttaagcaggccaatctttgtattgtttgggccacacacacgattcagccagagggtgggggccctttcacgtctcttctcgtggcccgggccctgtcagcggcattcacctgtgtggtaggagccatcggctgtgggaactctgtggaagtggctagccttgcacatcctctgatcatgttgacttcatcagggtgcgagaagcacttgagcttggcgtcggtgagttccctaagcctcttttgcgtgtgttgcagctcatgccagttactatgggagaatgaatgtgagagaggttctcagagaggatggccacctcagtgtaaatggggaagcgctgtgtaagtatggcttcgttttcctgtgggcgtcggtcgtggagttggtcccacacgctgtcatgttgggtactagcagtagagaatgaacggcccgtgtgacatggtggtcctcactgatgacgacgggctgttggagctgctgcttaagccctcaccacagaagctcatagccaccagatcgcatttgctttgattgttgactgtctcgtgtgtaattgagtttcccagtttctacagactgccattgctatgcacggctgagatggacagagtttgcttgtgaatccgccacactcactgcctgtcaccacacctgcaggcgacgactgtaagggcaagaggcacctcgacgcgcacacagccgcccactcgcagtcgccacggctgcccggtcgggcagggaccctctggcacatctgggcatgtgcaggttacttcttgctgcagattctgcgcaggatcggagctgtgggccaggctgtgtccaggacggcgtggtcggccctttggctggccgtggttgctccagagaangcagctctngagtgtactagtngctngngatagatagtacaatatgtactatgatntctctctgatgtgatctctacaagtgcttcgaacatctgcaatatnaatctnctcatccactctcctatactancagtctctctacgcgcaggcattctntcgtctgcctgtgactggcaacatctagacacagcngagatacccagacgnntaaccacgctccgctnaacagcactcangtnacaatagcttctgctgatatgctgacacagtgctctnctgnagtcacacaagtaaanccaaactacantactaaaact

SEQ ID NO: 613162 - DNA, 323 bp, Homo sapiens
  misc_feature (49)..(49): n is a, c, g, or t
  misc_feature (67)..(68): n is a, c, g, or t
  misc_feature (80)..(80): n is a, c, g, or t
  misc_feature (85)..(85): n is a, c, g, or t
  misc_feature (87)..(87): n is a, c, g, or t
  misc_feature (94)..(94): n is a, c, g, or t
  misc_feature (157)..(157): n is a, c, g, or t
  misc_feature (240)..(240): n is a, c, g, or t
  misc_feature (243)..(243): n is a, c, g, or t
  misc_feature (266)..(266): n is a, c, g, or t
  misc_feature (275)..(275): n is a, c, g, or t
atctgggacccacctgccccacccagaagtggcccagtcctgggggccngggcgaccgggggggtgnngtggggggggcnccgtncntcctcgngtgctggggggttggagcacaccacccccttctgctgccctcctctgggctccaggaaggagngcagctgaaatctcgggcctgtggcttctccacaccactgccccccaggttggagggggcgctaagagatgggagaaggggtnggnggcagagaaaagatgttgatcangaaagatgngaaccaggggtgagggctgaaggagaatcaaagataaaataccagttt

SEQ ID NO: 613163 - DNA, 4397 bp, Homo sapiens
agcgggtctctcgggcctgggcggcgcagacgaggcctgaggcggcggcgcgaggcagtatggtttgaagtggtgaacatggatttttctcggcttcacatgtacagtcctccccagtgtgtgccggagaacacgggctacacgtatgcgctcagttccagctattcttcagatgctctggattttgagacggagcacaaattggaccctgtatttgattctccacggatgtcccgccgtagtttgcgcctggccacgacagcatgcaccctgggggatggtgaggctgtgggtgccgacagcggcaccagcagcgctgtctccctgaagaaccgagcggccagaacaacaaaacagcgcagaagcacaaacaaatcagcttttagtatcaaccacgtgtcaaggcaggtcacgtcctctggcgtcagccacggcggcactgtcagcctgcaggatgctgtgactcgacggcctcctgtattggacgagtcttggattcgtgaacagaccacagtggaccacttctggggtcttgatgatgatggtgatcttaaaggtggaaataaagctgccattcagggaaacggggatgtgggagccgccgccgccaccgcgcacaacggcttctcctgcagcaactgcagcatgctgtccgagcgcaaggacgtgctcacggcgcaccccgcggcccccgggcccgtgtcgagagtttattctagggacaggaatcaaaaatgcggtgcgtctttctacgtgaataggattttgtggctggccagatacactgcatcatctttttcatcatttttagttcaactttttcaagtggttttaatgaagctcagttatgaatcagaaaattacaaattgaaaactcatgaatcaaaagattgtgaatccgaaagctataagtcaaaaagccatgaatcaaaagctcatgccagttactatgggagaatgaatgtgagagaggttctcagagaggatggccacctcagtgtaaatggggaagcgctgtgcgacgactgtaagggcaagaggcacctcgacgcgcacacagccgcccactcgcagtcgccacggctgcccggtcgggcagggaccctctggcacatctgggcatgtgcaggttacttcttgctgcagattctgcgcaggatcggagctgtgggccaggctgtgtccaggacggcgtggtcggccctttggctggccgtggttgctccagggaaggcagcctctggagtgttctggtggctggggattggatggtaccagtttgttactttgatttcttggctgaatgtgtttcttcttaccaggtgccttcgaaacatctgcaagtttttagtcttgctcatcccactcttccttttactagcaggtctctccttacggggccagggcaatttcttttcgttcttgcccgtgttgaactgggcaagcatgcatagaacacagcgggtggatgacccccaggacgtgtttaaacccacgacttctcgcctgaagcagcctctgcagggtgacagtgaggcttttccgtggcattggatgagtggcgtggagcagcaggtggcctctctgtctggacagtgccaccaccatggtgagaatctccgagagctgaccactttgctacagaagctgcaggctcgggtggaccagatggaaggcggcgctgccgggccgtcagcttcggtcagagacgctgtgggacagcccccgagggagactgactttatggcctttcaccaagaacatgaagtgcgtatgtcacacttggaagatattctgggaaaactgagagaaaaatctgaggccatccagaaggaactagaacagaccaagcaaaaaacaatcagtgcggttggtgagcagctcctgcccacagtcgagcacctccagctggagctggatcagctaaagtcagagctgtccagctggcgacacgtgaagaccggctgtgagacagtggatgccgtacaagaaagagtggacgtgcaagtcagagaaatggtgaaactcctgttttccgaagatcagcaaggcggttctctggaacagctgctgcagaggttctcatcacagtttgtgagcaaaggcgacttgcagacgatgctgcgagacctgcagctgcagatcctgcggaacgtcacccaccacgtttccgtgaccaagcagctcccaacctcagaagccgtggtgtctgctgtgagcgaggcgggggcgtctggaataacagaggcgcaagcacgtgccatcgtgaacagcgccttgaagctgtattcccaagataagaccgggatggtggactttgctctggaatctggtggtggcagcatcttgagtactcgctgttctgaaacttacgaaaccaaaacggcgctgatgagtctgtttgggatcccgctgtggtacttctcgcagtccccgcgcgtggtcatccagcctgacatttaccccggtaactgctgggcatttaaaggctcccaggggtacctggtggtgaggctctccatgatgatccacccagccgccttcactctggagcacatccctaagacgctgtcgccaacaggcaacatcagcagcgcccccaaggacttcgccgtctatggattagaaaatgagtatcaggaagaagggcagcttctgggacagttcacgtatgatcaggatggggagtcgctccagatgttccaggccctgaaaagacccgacgacacagctttccaaatagtggaacttcggattttttctaactggggccatcctgagtatacctgtctgtatcggttcagagttcatggcgaacctgtcaagtgaagacactactcattatttttgtacatttttgtatatactgggacagcgtgaaacactggaatccttcatggacgagggcatatacaatgatgggacagtgccacactccttcaataaacgtggctgctggccagaggacgtgagcgtgtgacgggcgccttggcgccacctgttgggtgctcactgcctctgcaggtgcagaggggtcagcagcaggagaagcgtgttgaacacgtggctctcagacactccttgtttttaacgggaagctctttgcatttgcatttcctcaacaaaggagcaaagcagaggaagctgagagtctggcgtgttcttgacgctttggtcttcagccttgcactggctcttctaaaggacttttggagggcagataatttcatctgttaaatccaacacacatttctttcagggaaaaacaatgtcaccaaattttcagagttctaaactcctttccttcaagccggaattttccttttttcagcaccagtaggtactaagtctccagatggggaaataactaaaatgtgtttttctgctttgttcgctcttacttctgaggaaggtttccagtcaggactcgctgtaccaatatccatggaggaatatgggagcgtttcgctctccttgtaggctgaagtcagtctgacttgaaggggcctggtttggatctaagcaaacacccagatggggttctctggtctcagcaaggcttttcctgttgggagtcacagtaaacagaaacccaaaaatctcatcttgggtgttttcagggcttgttttgagttttgctgaatagggagcgcaagacgccctgagcctccctctcactggtggtgataagaggagccgtctggtgtgtcagggtcacgaacccgttacatttcaggacgatcctttttccttcagcagcatttcttactggctgtggctggaatctgccttttatcacagctgtcaccattctcacgtgattcttgtgagactctttttggttataattactatttaatatttagactattttactgagcagactttataaatgagatatctacaaggcacttaaagtgttacagatgttttaccttaagaattatttaagttgtgttgggttaagacagttttcagtgtaccgtaaatgttgtgttttcagaaaaagacaaaacgatggtgctgactggttttctgtatattgcacaacagtcctcaaatacactgatgtatgaaactattcatacatcaagcagcatttttttcactctccttagaattggaactatgcagttaaggcagataaaatgtacagatgtttcatatattacaggttacatatataaatcaaaatttcctatataaaactgatttgggatttggggtggaaatattttgaatattaatttatttttaaagatgcaagataggactttgtgcaatgtatttttgtaaatgcttttcaaaatatctgtctttggtagtgcttctgctgctgccaccaaattgataagatgctattaagaggtttaaataaagagttttaatttttaaaa

SEQ ID NO: 613164 - DNA, 255 bp, Homo sapiens
  misc_feature (2)..(2): n is a, c, g, or t
  misc_feature (56)..(56): n is a, c, g, or t
  misc_feature (70)..(70): n is a, c, g, or t
  misc_feature (72)..(72): n is a, c, g, or t
  misc_feature (74)..(74): n is a, c, g, or t
  misc_feature (81)..(81): n is a, c, g, or t
  misc_feature (123)..(123): n is a, c, g, or t
  misc_feature (137)..(137): n is a, c, g, or t
  misc_feature (141)..(141): n is a, c, g, or t
  misc_feature (143)..(143): n is a, c, g, or t
  misc_feature (166)..(167): n is a, c, g, or t
  misc_feature (170)..(170): n is a, c, g, or t
  misc_feature (202)..(202): n is a, c, g, or t
  misc_feature (210)..(210): n is a, c, g, or t
  misc_feature (219)..(219): n is a, c, g, or t
  misc_feature (222)..(222): n is a, c, g, or t
  misc_feature (228)..(228): n is a, c, g, or t
  misc_feature (236)..(237): n is a, c, g, or t
  misc_feature (242)..(242): n is a, c, g, or t
cntttttttagattttgtgcagttaatacttaacatctgatttcattttcttaatncatttaaatattantncnacctccncttaaaataaactacgcctccttaggtaaacactactaagancttgatactattcnctcncnccttactatacgtacttcactcnnccnaccccactacttaccaccaaaaaccgtactangaaaccgnccttaacgnacntttccnccctcccnngggcntaaactgcactac

SEQ ID NO: 613165 - DNA, 4716 bp, Homo sapiens
agcgggtctctcgggcctgggcggcgcagacgaggcctgaggcggcggcgcgaggcagtatggtttgaagtggtgaacatggatttttctcggcttcacatgtacagtcctccccagtgtgtgccggagaacacgggctacacgtatgcgctcagttccagctattcttcagatgctctggattttgagacggagcacaaattggaccctgtatttgattctccacggatgtcccgccgtagtttgcgcctggccacgacagcatgcaccctgggggatggtgaggctgtgggtgccgacagcggcaccagcagcgctgtctccctgaagaaccgagcggccagaacaacaaaacagcgcagaagcacaaacaaatcagcttttagtatcaaccacgtgtcaaggcaggtcacgtcctctggcgtcagccacggcggcactgtcagcctgcaggatgctgtgactcgacggcctcctgtattggacgagtcttggattcgtgaacagaccacagtggaccacttctggggtcttgatgatgatggtgatcttaaaggtggaaataaagctgccattcagggaaacggggatgtgggagccgccgccgccaccgcgcacaacggcttctcctgcagcaactgcagcatgctgtccgagcgcaaggacgtgctcacggcgcaccccgcggcccccgggcccgtgtcgagagtttattctagggacaggaatcaaaaatgcggtgcgtctttctacgtgaataggattttgtggctggccagatacactgcatcatctttttcatcatttttagttcaactttttcaagtggttttaatgaagctcagttatgaatcagaaaattacaaattgaaaactcatgaatcaaaagattgtgaatccgaaagctataagtcaaaaagccatgaatcaaaagctcatgccagttactatgggagaatgaatgtgagagaggttctcagagaggatggccacctcagtgtaaatggggaagcgctgtgtaagtatggcttcgttttcctgtgggcgtcggtcgtggagttggtcccacacgctgtcatgttgggtactagcagtagagaatgaacggcccgtgtgacatggtggtcctcactgatgacgacgggctgttggagctgctgcttaagccctcaccacagaagctcatagccaccagatcgcatttgctttgattgttgactgtctcgtgtgtaattgagtttcccagtttctacagactgccattgctatgcacggctgagatggacagagtttgcttgtgaatccgccacactcactgcctgtcaccacacctgcaggcgacgactgtaagggcaagaggcacctcgacgcgcacacagccgcccactcgcagtcgccacggctgcccggtcgggcagggaccctctggcacatctgggcatgtgcaggttacttcttgctgcagattctgcgcaggatcggagctgtgggccaggctgtgtccaggacggcgtggtcggccctttggctggccgtggttgctccagggaaggcagcctctggagtgttctggtggctggggattggatggtaccagtttgttactttgatttcttggctgaatgtgtttcttcttaccaggtgccttcgaaacatctgcaagtttttagtcttgctcatcccactcttccttttactagcaggtctctccttacggggccagggcaatttcttttcgttcttgcccgtgttgaactgggcaagcatgcatagaacacagcgggtggatgacccccaggacgtgtttaaacccacgacttctcgcctgaagcagcctctgcagggtgacagtgaggcttttccgtggcattggatgagtggcgtggagcagcaggtggcctctctgtctggacagtgccaccaccatggtgagaatctccgagagctgaccactttgctacagaagctgcaggctcgggtggaccagatggaaggcggcgctgccgggccgtcagcttcggtcagagacgctgtgggacagcccccgagggagactgactttatggcctttcaccaagaacatgaagtgcgtatgtcacacttggaagatattctgggaaaactgagagaaaaatctgaggccatccagaaggaactagaacagaccaagcaaaaaacaatcagtgcggttggtgagcagctcctgcccacagtcgagcacctccagctggagctggatcagctaaagtcagagctgtccagctggcgacacgtgaagaccggctgtgagacagtggatgccgtacaagaaagagtggacgtgcaagtcagagaaatggtgaaactcctgttttccgaagatcagcaaggcggttctctggaacagctgctgcagaggttctcatcacagtttgtgagcaaaggcgacttgcagacgatgctgcgagacctgcagctgcagatcctgcggaacgtcacccaccacgtttccgtgaccaagcagctcccaacctcagaagccgtggtgtctgctgtgagcgaggcgggggcgtctggaataacagaggcgcaagcacgtgccatcgtgaacagcgccttgaagctgtattcccaagataagaccgggatggtggactttgctctggaatctggtggtggcagcatcttgagtactcgctgttctgaaacttacgaaaccaaaacggcgctgatgagtctgtttgggatcccgctgtggtacttctcgcagtccccgcgcgtggtcatccagcctgacatttaccccggtaactgctgggcatttaaaggctcccaggggtacctggtggtgaggctctccatgatgatccacccagccgccttcactctggagcacatccctaagacgctgtcgccaacaggcaacatcagcagcgcccccaaggacttcgccgtctatggattagaaaatgagtatcaggaagaagggcagcttctgggacagttcacgtatgatcaggatggggagtcgctccagatgttccaggccctgaaaagacccgacgacacagctttccaaatagtggaacttcggattttttctaactggggccatcctgagtatacctgtctgtatcggttcagagttcatggcgaacctgtcaagtgaagacactactcattatttttgtacatttttgtatatactgggacagcgtgaaacactggaatccttcatggacgagggcatatacaatgatgggacagtgccacactccttcaataaacgtggctgctggccagaggacgtgagcgtgtgacgggcgccttggcgccacctgttgggtgctcactgcctctgcaggtgcagaggggtcagcagcaggagaagcgtgttgaacacgtggctctcagacactccttgtttttaacgggaagctctttgcatttgcatttcctcaacaaaggagcaaagcagaggaagctgagagtctggcgtgttcttgacgctttggtcttcagccttgcactggctcttctaaaggacttttggagggcagataatttcatctgttaaatccaacacacatttctttcagggaaaaacaatgtcaccaaattttcagagttctaaactcctttccttcaagccggaattttccttttttcagcaccagtaggtactaagtctccagatggggaaataactaaaatgtgtttttctgctttgttcgctcttacttctgaggaaggtttccagtcaggactcgctgtaccaatatccatggaggaatatgggagcgtttcgctctccttgtaggctgaagtcagtctgacttgaaggggcctggtttggatctaagcaaacacccagatggggttctctggtctcagcaaggcttttcctgttgggagtcacagtaaacagaaacccaaaaatctcatcttgggtgttttcagggcttgttttgagttttgctgaatagggagcgcaagacgccctgagcctccctctcactggtggtgataagaggagccgtctggtgtgtcagggtcacgaacccgttacatttcaggacgatcctttttccttcagcagcatttcttactggctgtggctggaatctgccttttatcacagctgtcaccattctcacgtgattcttgtgagactctttttggttataattactatttaatatttagactattttactgagcagactttataaatgagatatctacaaggcacttaaagtgttacagatgttttaccttaagaattatttaagttgtgttgggttaagacagttttcagtgtaccgtaaatgttgtgttttcagaaaaagacaaaacgatggtgctgactggttttctgtatattgcacaacagtcctcaaatacactgatgtatgaaactattcatacatcaagcagcatttttttcactctccttagaattggaactatgcagttaaggcagataaaatgtacagatgtttcatatattacaggttacatatataaatcaaaatttcctatataaaactgatttgggatttggggtggaaatattttgaatattaatttatttttaaagatgcaagataggactttgtgcaatgtatttttgtaaatgcttttcaaaatatctgtctttggtagtgcttctgctgctgccaccaaattgataagatgctattaagaggtttaaataaagagttttaatttttaaaa

SEQ ID NO: 613166 - DNA, 160 bp, Homo sapiens
agtactgggccgcgtcacagcttctcaaattgctgggattacaggcatgagcactctgcctggccacaatcatattttattctctttttaaaaattggttttattttattttattttttaacagaatctcactatgttgcccaggttggtctcgaactcc

SEQ ID NO: 613167 - DNA, 400 bp, Homo sapiens
acagatagtttcttttgtgagaaactgtaatattctcacaaaaataaaagtacagactggttactgagacttcagattggaaagtcaggagagattttcaatcttcgtttcttcccactaaatgtactaaaatagaaactgttgttgtttttaactaaaatcagagcagactggaattacggaaaagaatattatgaatggttctatatatatatatatatatatatatatatatatgtagacagaacttaacatttatgtttttttgttatttttaaagtccttgctgagagcttttaggagggagtactctctaatgaataatactaataaaaataataacaataatagatccttactatgccagacctattctaagacttttgcatttagttctcac

SEQ ID NO: 613168 - DNA, 4538 bp, Homo sapiens
agcgggtctctcgggcctgggcggcgcagacgaggcctgaggcggcggcgcgaggcagtatggtttgaagtggtgaacatggatttttctcggcttcacatgtacagtcctccccagtgtgtgccggagaacacgggctacacgtatgcgctcagttccagctattcttcagatgctctggattttgagacggagcacaaattggaccctgtatttgattctccacggatgtcccgccgtagtttgcgcctggccacgacagcatgcaccctgggggatggtgaggctgtgggtgccgacagcggcaccagcagcgctgtctccctgaagaaccgagcggccagaacaacaaaacagcgcagaagcacaaacaaatcagcttttagtatcaaccacgtgtcaaggcaggtcacgtcctctggcgtcagccacggcggcactgtcagcctgcaggatgctgtgactcgacggcctcctgtattggacgagtcttggattcgtgaacagaccacagtggaccacttctggggtcttgatgatgatggtgatcttaaaggtggaaataaagctgccattcagggaaacggggatgtgggagccgccgccgccaccgcgcacaacggcttctcctgcagcaactgcagcatgctgtccgagcgcaaggacgtgctcacggcgcaccccgcggcccccgggcccgtgtcgagagtttattctagggacaggaatcaaaaatgcggtgcgtctttctacgtgaataggattttgtggctggccagatacactgcatcatctttttcatcatttttagttcaactttttcaagtggttttaatgaagctcagttatgaatcagaaaattacaaattgaaaactcatgaatcaaaagattgtgaatccgaaagctataagtcaaaaagccatgaatcaaaagctcatgccagttactatgggagaatgaatgtgagagaggttctcagagaggatggccacctcagtgtaaatggggaagcgctgtgcgacgactgtaagggcaagaggcacctcgacgcgcacacagccgcccactcgcagtcgccacggctgcccggtcgggcagggaccctctggcacatctgggcatgtgcaggttacttcttgctgcagattctgcgcaggatcggagctgtgggccaggctgtgtccaggacggcgtggtcggccctttggctggccgtggttgctccagggaaggcagcctctggagtgttctggtggctggggattggatggtaccagtttgttactttgatttcttggctgaatgtgtttcttcttaccaggtgccttcgaaacatctgcaagtttttagtcttgctcatcccactcttccttttactaggtaagtcaaatctggctgagttgcctccgatggctaagcggtacacacatatgtgtaacttagtggaaaaaaatgagcgtgtaagtccatgtttgagaagcgtggtgtacctgtgtgtgtgtggtggctcttctcttttagcaggtctctccttacggggccagggcaatttcttttcgttcttgcccgtgttgaactgggcaagcatgcatagaacacagcgggtggatgacccccaggacgtgtttaaacccacgacttctcgcctgaagcagcctctgcagggtgacagtgaggcttttccgtggcattggatgagtggcgtggagcagcaggtggcctctctgtctggacagtgccaccaccatggtgagaatctccgagagctgaccactttgctacagaagctgcaggctcgggtggaccagatggaaggcggcgctgccgggccgtcagcttcggtcagagacgctgtgggacagcccccgagggagactgactttatggcctttcaccaagaacatgaagtgcgtatgtcacacttggaagatattctgggaaaactgagagaaaaatctgaggccatccagaaggaactagaacagaccaagcaaaaaacaatcagtgcggttggtgagcagctcctgcccacagtcgagcacctccagctggagctggatcagctaaagtcagagctgtccagctggcgacacgtgaagaccggctgtgagacagtggatgccgtacaagaaagagtggacgtgcaagtcagagaaatggtgaaactcctgttttccgaagatcagcaaggcggttctctggaacagctgctgcagaggttctcatcacagtttgtgagcaaaggcgacttgcagacgatgctgcgagacctgcagctgcagatcctgcggaacgtcacccaccacgtttccgtgaccaagcagctcccaacctcagaagccgtggtgtctgctgtgagcgaggcgggggcgtctggaataacagaggcgcaagcacgtgccatcgtgaacagcgccttgaagctgtattcccaagataagaccgggatggtggactttgctctggaatctggtggtggcagcatcttgagtactcgctgttctgaaacttacgaaaccaaaacggcgctgatgagtctgtttgggatcccgctgtggtacttctcgcagtccccgcgcgtggtcatccagcctgacatttaccccggtaactgctgggcatttaaaggctcccaggggtacctggtggtgaggctctccatgatgatccacccagccgccttcactctggagcacatccctaagacgctgtcgccaacaggcaacatcagcagcgcccccaaggacttcgccgtctatggattagaaaatgagtatcaggaagaagggcagcttctgggacagttcacgtatgatcaggatggggagtcgctccagatgttccaggccctgaaaagacccgacgacacagctttccaaatagtggaacttcggattttttctaactggggccatcctgagtatacctgtctgtatcggttcagagttcatggcgaacctgtcaagtgaagacactactcattatttttgtacatttttgtatatactgggacagcgtgaaacactggaatccttcatggacgagggcatatacaatgatgggacagtgccacactccttcaataaacgtggctgctggccagaggacgtgagcgtgtgacgggcgccttggcgccacctgttgggtgctcactgcctctgcaggtgcagaggggtcagcagcaggagaagcgtgttgaacacgtggctctcagacactccttgtttttaacgggaagctctttgcatttgcatttcctcaacaaaggagcaaagcagaggaagctgagagtctggcgtgttcttgacgctttggtcttcagccttgcactggctcttctaaaggacttttggagggcagataatttcatctgttaaatccaacacacatttctttcagggaaaaacaatgtcaccaaattttcagagttctaaactcctttccttcaagccggaattttccttttttcagcaccagtaggtactaagtctccagatggggaaataactaaaatgtgtttttctgctttgttcgctcttacttctgaggaaggtttccagtcaggactcgctgtaccaatatccatggaggaatatgggagcgtttcgctctccttgtaggctgaagtcagtctgacttgaaggggcctggtttggatctaagcaaacacccagatggggttctctggtctcagcaaggcttttcctgttgggagtcacagtaaacagaaacccaaaaatctcatcttgggtgttttcagggcttgttttgagttttgctgaatagggagcgcaagacgccctgagcctccctctcactggtggtgataagaggagccgtctggtgtgtcagggtcacgaacccgttacatttcaggacgatcctttttccttcagcagcatttcttactggctgtggctggaatctgccttttatcacagctgtcaccattctcacgtgattcttgtgagactctttttggttataattactatttaatatttagactattttactgagcagactttataaatgagatatctacaaggcacttaaagtgttacagatgttttaccttaagaattatttaagttgtgttgggttaagacagttttcagtgtaccgtaaatgttgtgttttcagaaaaagacaaaacgatggtgctgactggttttctgtatattgcacaacagtcctcaaatacactgatgtatgaaactattcatacatcaagcagcatttttttcactctccttagaattggaactatgcagttaaggcagataaaatgtacagatgtttcatatattacaggttacatatataaatcaaaatttcctatataaaactgatttgggatttggggtggaaatattttgaatattaatttatttttaaagatgcaagataggactttgtgcaatgtatttttgtaaatgcttttcaaaatatctgtctttggtagtgcttctgctgctgccaccaaattgataagatgctattaagaggtttaaataaagagttttaatttttaaaa

SEQ ID NO: 613169 - DNA, 317 bp, Homo sapiens
gtttttaaccccccccccccggggggggggcccctttttttaaaaagggggagggggggggcttttttgggggtccttttccccccaaaaaaaaggggatgaaagggggggggggggggccccccccggggggggggtttaaccctttgaattttggggggggggtcccccccctttgggggcccccccccttttttccccccggggggggggccgggggggggttggggcccccccccccccccggttaaaccccctttttttccccctttttgggggggcccttttttaaatacccgggggggttttttttttta

SEQ ID NO: 613170 - DNA, 125 bp, Homo sapiens
catctgtgtgctgtgtgtgctgtgcgttagtgtgtgtgcagtgctcgtgtgtgtgctgtgttcatgcgtgtgctgtgtgtagtgagtatgtaactgcggggatgcataaagtatgagtgctaaat

SEQ ID NO: 613171 - DNA, 373 bp, Homo sapiens
  misc_feature (98)..(98): n is a, c, g, or t
  misc_feature (333)..(333): n is a, c, g, or t
  misc_feature (341)..(341): n is a, c, g, or t
  misc_feature (371)..(371): n is a, c, g, or t
aggcaacccccagcacatcaccattctcaatcacctgattcagatacatgccaccggcacgtgaaaggcgagtccgcatcagctttgtatcatcacgntttccggcatgttcgccatccggcacgatgatcactctctggagattgaatttatcgcgaatttgcaaagcagcgtcgatagagccaaagacattcacatccaggttgatatgaaccagtccattttcccgggctgtttgcaggtatttgacaaccgtgacgcgggacacccccatgatagctgcaacttcagtctggcttttgccttcctgatagtacagccatgttgcatgangtacgggntcatcattgaacaggctgctgtttgttganct

SEQ ID NO: 613172 - DNA, 117 bp, Homo sapiens
agcggctgaggagggcgggcgcccgcaagccgcagtgtctcagctgcctccgcgcgccaagtcaaaccccgacacccgcggcgggccggtgagctcactagctgacccggcaggtca

SEQ ID NO: 613173 - DNA, 179 bp, Homo sapiens
ggggccctttttccccatttaaggggggaatttccccccccccccgaacccatttttgggttttttttttccaaaaaaaaccggcccgggttttccccaaggaaaagggcccgggtttttaaaacccaaaaaaaagggcaaggccggccccccccaaaaaaaaatttttaggccgggga

SEQ ID NO: 613174 - DNA, 170 bp, Homo sapiens
acatgagcagttttcttatacaggtacactcacgtcacggggagttgcttgtagattatttagtcactcaggtatcaggcctagtacccattagttatttttcctgatcctctccctcctcctgccctccaccctctcgcaggccccaggtcgacgcggccgcgaattta

SEQ ID NO: 613175 - DNA, 147 bp, Homo sapiens
cctcctgacagcacagaggaggggaagagggcggggctgtcgggaatgtgttcctcgttgaacttgactgagacttcgtagtcacctggctcctggaccacatagccacaccacaggagccaccctgtgctgtccacctcctctgtg

SEQ ID NO: 613176 - DNA, 113 bp, Homo sapiens
  misc_feature (19)..(19): n is a, c, g, or t
ccggctgactacggggagngcgggaggtctcaggaggtgggcgagagctgtcgcacatcagatggagacattgtaggtatagcttgtgctagagtggggtgggtcctgggggc

SEQ ID NO: 613177 - DNA, 593 bp, Homo sapiens
tgtggtggtggcgcgccctgtagtcccacctacttgggaggctgaggcaggagaataggtttgaacccgggaggcagagtctggcagtgagccgagattgcatccatctgcctcgtccagacctaggagacagagccgagactctgtcttcgaaaacgaggcaaacgaatacaaagcaaacagaaaacagggttaaccaaaagtatggaattgcaacttgcttttgttatatgctgcagtccatgtatcctgccctagatttggctgggctatggtggttcacgccgtgtgatcccggcacttagggaggctgaggcaggcggatcacgaggttagggagttcacctgaccagcctgagcaactatggtgaaacctcgtctctagtaaaaatacaaaaaatgagtcaggcttggtggcccactccgtgtaaatcccagctacatcaggaggctgaggagcatggactaatcccttggaacccgggaggcggaggttggtagtgagccgagatcggaccgacgggactccagccgtgggtgactgatgtaatgagactcctgtctcgacatttgtaaaacttctttgcacgttg

SEQ ID NO: 613178 - DNA, 297 bp, Homo sapiens
gcctcccagccgcggcccgggcaggagggcggcgggtgggccgcccagcagcagcacgtcggggactttgtgctgcccctcgtgcccgcatgccgccgtcctccgccacgccactatccgacagccgccgcgcatcactcgctcgccctcccgctatggggggcggggctcggtccattggtgggggctttgagctctccagactgtgcccttaccgccttccccgccacaccgtctctgtcttcccactgatcccccccatcccgggcagggcccagtgggattgagggggctggg

SEQ ID NO: 613179 - DNA, 270 bp, Homo sapiens
  misc_feature (87)..(87): n is a, c, g, or t
  misc_feature (93)..(93): n is a, c, g, or t
  misc_feature (102)..(102): n is a, c, g, or t
  misc_feature (174)..(174): n is a, c, g, or t
  misc_feature (192)..(192): n is a, c, g, or t
ggctctcgtgaactctccgtgaactacgctcccagagccggccagaaacctaacctggacagcaatgcaggaaacagcaaaaacatnggcaangtaggtatnacgtaccagaaagtgtacctggcatgattggcaatcttctccatcggctgcttttcaacataaagccagatnagtgtcaggagggtgatnaacggcagtgctgcaacaaatccaccgagcttatcgcttcgctttgcgcttctgacacgataatcaccagtctctcgg

SEQ ID NO: 613180 - DNA, 168 bp, Homo sapiens
  misc_feature (21)..(21): n is a, c, g, or t
cttcttaaccggccgtccttntctcatgtgagggcattaaaattattataaaatccgttcaggatactgttaataggttgttcaaagaagttggggtggtggtggggtggtagagatacgaaacgaacgggtctgagggaagtgggaaaggagacgataatggcgaat

SEQ ID NO: 613181 - DNA, 144 bp, Homo sapiens
gttagaggatcccccatagttattatgaagtacaagtagcaggttaccaggtaaggtgtcagacaatttagttccagtcactttggaatccatgttctataatctaaaatttattctctttccctaagcgggtacggagctcga

SEQ ID NO: 613182 - DNA, 393 bp, Homo sapiens
gtcaagtttaccctttgttggtgctgccgtgcaccccagtaaagcggggtcctctccgcatccgaattcctcttgtgtaattccgatcacaatcggccgcaatttttaaaaggctccccctgacagtgcacgtttttccaatcagaatacactgaatttagtcaaatcctcccggaaacctggaacgctccgcacatcttgacccttgtgggcctttttgaatagcatagggcaccacgcgcatattgccccatccgtttagctgtctcatgaatatcccacaccttatggttctgtgggtttaaagttaaaatgtgcgccctatatcaaaagtgggttctctaaatagagtcattatctacacaacaaagagagaatacagctccccttctt

SEQ ID NO: 613183 - DNA, 647 bp, Homo sapiens
caaccccccccaggttaaggtcggggggagctcgcgaatcccttccgggtcgtggaaggttgcccaggaaatacaacgagctgttaaagtcctcccaggggaagaggctcaaccctccccccttgtgggaccagctgaacgagcagtttaactgggtgtcccggctggccaacctcacgcaaggcgaagaccagtactatttgggggtccccacggtggcttcccacacttttgaatcggacgttccttccggggtcactgaggtggttgtgaagctttttgactttgatcccatccctgtgccggtccccgtagaagtctcccggaagacccctaaatttatggagaccggggcgaagaaaagcccggcaggaatcccccaaaaagccccgggaggagtgaaatgtggatgttgcttttgcccccacgggggcatttgagtccagctccccccaagatgaggtgcagccccccagaaagagctttgcacgtccccaagtaaccaggccccagcctccaggcccccaactccgcccagcctctccccgctttgggtcctgccctttaaccctcgactttgctggtcatgggaagaacagaattgctcccgcatgccactaattcaataaaactgttttgtgggctga

SEQ ID NO: 613184 - DNA, 394 bp, Homo sapiens
cccctgggcccggcctaaaacaatttactttttaattgaaagggaaaagaaagtattttttattactgaggggattttttgccccccccgtcgggaaatttttttttaattacaaaggcgggggaaaggaaatccaaagttatctatacccccattactttttttcccaaggttagccaatttaagattctttttttttttttttttgagacaaagtcttgttttgtcccccaggctggagggcaggggggtgtttttgactccccgcaagccccccctcctgggttcaccccatttttttgcctcacccccccgagtaggggggcccccagctgccccccccccccccctttttgtataatttaaaaaaaaaagggtggggcttttgttttta

SEQ ID NO: 613185 - DNA, 368 bp, Homo sapiens
tgtgcttaaagactatcgcgccaaccaagacttctgggtactcactgcatctaagctacccgaaagcgtgtttaaggacatgatgcacagcctttatgcaaatgccatactaaacctaggacaatggcgaaaggcatgcgacatctatgtaaaacaaggcgattgggaaagtatggagtgggccatgcgcaactatcgaaacctggccggcatcaaacgcatatataaggaagaccccaattcgcccaccctaacctacctgttgcattatttcgtgaacggcggatatggatgggagtacaattacgaaagctcgttaaaggccgaccgtcgacgcggccgcgaatttagtagtagtaggcggccgc

SEQ ID NO: 613186 - DNA, 417 bp, Homo sapiens
gcgaaatgtaaccctcatacattgctggtaggaatgtaaaaatgatgcagccacttgggaaactttggcagttcctcaaaaggttaaatgtagagttactatatgatccagcagttctactcttaggtgtatacacaagataaatggaaacatatgtccacacaaaatttgtacacaaatgttcataggtgcattattcatcatagcctaaaatggaagttactaaaatgtccatcaactgatgattggataagtaaaatgtgttatagccatacagtgaaatattatttggcaataaaaagtagtaaagtattggtacttgttacatcatggaagaaccttgaaaacattatgccatgtgaaagaagccagtcacaaaagagcatatagtgaaatatccagaataggaacacttag

SEQ ID NO: 613187 - DNA, 148 bp, Homo sapiens
ggacaggtttcctggccacttttggtggatagcagatggatcaatattagttaaacccatccaagattgaactgtgaaagagaggttccagggtatctccctcagctgccgagttactaacgtgatgtgttacccaggatgcagcagg

SEQ ID NO: 613188 - DNA, 184 bp, Homo sapiens
agcggatgataatctcaagaaccttcgagcgtcagctcactcccttccacctcagctccaccctcagcagatgataatattaagacacctggcttccaccctcagcggatgatctcaagaaaccttcctgagcgtcagctacacatccccttaccaaccgtcagatccaaccctcagaaagatg

SEQ ID NO: 613189 - DNA, 177 bp, Homo sapiens
ggcactgtggccctatggccatggctgtcgtgagcaccaagagaatgagttacagaaatatctgcaatacactgacacgcatctcctggacagtggacagtcgctgtgacacacacacacactttaaggctcacacaacctaacagccttaaatatctgaagaagcagaatcacgac

SEQ ID NO: 613190 - DNA, 424 bp, Homo sapiens
cagcaggcggatcacttgagtccgggagttcacgaccagcctgggcaacgtggcaaaaccctgtctctacaaaaaataaaaaattagccaggtgtggtggtgcacacccataatcccagctactcagggggctgaggcaggaggattgcttaagcccaggaggtcaagcctgcagtaagctgaggttgagtcactgtactccaggttggatctccagcttgagatcctgtctcaataaaaaagacagacagaaacagataataaagatgctggccaagtgcctaagaatggatgaacaaactctgcgtgagggggctcaatagtgatacgtgagtgactgtgtgggacacttaggaagacattctagccgctcagatcttggacgggctactgtatgctacgacagcccactgttctttataat

SEQ ID NO: 613191 - DNA, 196 bp, Homo sapiens
aagtaaaaggctcaggtatgaacacaggtgccttcctcagcacagaacaagccttacaacattctctggggcccaggctagggggataggaacggggcagcacagacgtcttgcctgcctgactgacacatttgagcaatagctacaacagaacttgagggcttggctccattccagaagaacatcgtggatcctc

SEQ ID NO: 613192 - DNA, 350 bp, Homo sapiens
cctctgtgtgctgacatccccatcacaacattgctcattgtatttctttagatacctaattgtacatctttatacttctttggacatggaaagaatagttattgcgggtgcaaagacagatggctgaacattatggggaggcatattgattccttttccttttttgatcatggccattttattgcgttgtattcagtgtacatgaattttttttcctctactgctcttttttctttgctattgatatttctttatgtattgattttattatactgtaagtcttagggtacatgtgcaccatgcaggtttgctacatatgtatacatgtgccatgtggtgtgctgtacact

SEQ ID NO: 613193 - DNA, 411 bp, Homo sapiens
gaaaaactgtctctcttcactgatgatatgattctgtacccagagaaccctaaagagtctgtgaaaaaactactgggaccgataacttcagtaatgttttaaaatacaaaatcaatgtactaaaatcagtagcatctctatagaacaataacgttcaagctgaaacccaaatcaataatgcaatcctatttactatagccacaaaaagacaaaatacttaggaatacatttaagcaaggagataaaaggtctccacaaggagaattacgaaacactctaaaagaaatcataaatgacacaaacaaatggaaaactattccatgctcgtgaattaaagaatcaatatgattaaaatgcacatattgcccaaaccaatctacagattcaatgctattcctaccaaactaccat

SEQ ID NO: 613194 - DNA, 637 bp, Homo sapiens
tggtggccagggcgctcgggaccgggctggtgtcccccgcggcttgcaagcccaagaatcaccctggccagaagaagaagaaatatacaaagaggaatgagggaggattggggccaaagcccccgggggggcgcccggttggccccttgaaggggggccggtttgaagaattttggccggaattggtcccggaaggggtccaacttttcaaacttgttcccaatcttgggcccgggcttttgggggtgggtaaccggcaaccgggatccttggaacaaccccccccggttaaagggcaagttggggccaaacagggggttgccaaccttgggggctggaattgaaccaatgttgccttttaaggacccccgagggcccaaggacccggggccccgcgggggtggggccaaacaaagacttggcaaaaggggcgagaggagggaacgagcgggcgccgggccactcggggctgagctgggggcgagcgggggcaggcggctgatgttttataaatgtaaaataaaaaaaaaagaaatctaaaatctgggactttattttggcagagagaaaaagcgcctatttaagtatgcttggtgtttctcctactcctttttttctttttagtgtagaaatggaa

SEQ ID NO: 613195 - DNA, 176 bp, Homo sapiens
tatagatacgctgagttatccagctctctcacactgcctccatttggcatgccaggctgtgcccgtaaagtgttgaatcactgttatcctaatttacatagtgtttactaccgtggacactgtgatgaggggctggcaagagcagcctcgtgccttccgagaaggtgccaggagcc

SEQ ID NO: 613196 - DNA, 216 bp, Homo sapiens
cgctgcacagcgccaccgcaccgggagagaagagcaagaccaccacgccgccctcctgcagggtctggcgctgcgcgtgaaacctaaccacgggcccctgcgcgctcagttcacgacggctccacaggtctacggccaccgcagcggcagctgcacaggccagacgccaggccgcaccaggcgctcgaaacccgagtcatcggctgagtagaggag

SEQ ID NO: 613197 - DNA, 256 bp, Homo sapiens
taaaaaattgaaccttgttttttaattacctttttgccggttttttaaatagccttttacctggataaaattttttttgtcattttttcctggtaaaccttttggggtaaaaattggggatgggttttgtaagaaaattttaaagtttttctttttaaaagtggacctaacccattttttttgtttttgacaaatgtgtttttttgttttttgtttgccgggagctttttggtttattaacgtgggatttcccgga

SEQ ID NO: 613198 - DNA, 418 bp, Homo sapiens
tgggacagatacaggttggtagagctttgagctctgctagttgctagctgtgtaacctgaggcaagttaaccttcacaagctttattttctttatccattgtggccaataatattcaccacagaaggttgttcatttatttatataataaatttttattgaatatctgttttatgttagacacttttttgagcactgggaaacaataatgagccctcactgagcatggatattctggaattactgaagctgaagcaacatatggaaactccttatctcagtacctggctcattgcagctatttaaccaatagctgtcattttattagtccgagatataagaatgtgttgattacagtcctatgatctggagtcagatctggatttaagttcttatttagaacattagatccatagctt

SEQ ID NO: 613199 - DNA, 130 bp, Homo sapiens
taggagaatccacgccggagggctggtcgcgactacagtgcatattacagacaaactgaagagctgcgaagtcagattaaggatgctcaactgcaaaatgctcggtgtgtcctacgtcttgattgacact

SEQ ID NO: 613200 - DNA, 406 bp, Homo sapiens
atatttagattttcatattttgctgcaataaatatactcagcagatgtgtaggatacaggcctgaaagtggaattgatagtttcagtattccaaaatctagtatgttttagagttcatctcttatactcgtggataaactttgatctgattcttacatagttttccataatatgcatgggatgggtatgcacatttaaaattttaatatatatctacaagttgccagctaaataggctgtaccaattaaagcctcctccatcagtgtttccctgtatccttacccacactgtcatctttttttttttaaattgctttggagtaaattacttttttttttcttgaggcggagttttgctcttgttgccactgcactccggcctgggcaacagtgagagcctgtctca

SEQ ID NO: 613201 - DNA, 407 bp, Homo sapiens
  misc_feature (117)..(117): n is a, c, g, or t
  misc_feature (120)..(120): n is a, c, g, or t
  misc_feature (171)..(171): n is a, c, g, or t
  misc_feature (335)..(335): n is a, c, g, or t
  misc_feature (349)..(349): n is a, c, g, or t
ccaccaacattgacaacagcacgaccatccagaaactgttcaagcgcatcaccaaacagttcaaggccatgttccggcgcaaggccttcctgcactgggacacgggccagggcatgnacnaaatggagttcaccaaggccaaaagcaacatgaatgacctggtgaccgagnaccaacagaaccaggaagccacaaccgaggaggagggcgagttcaagaaggaggctaaggaggaggtggcctaaagccttcagtcactggggaaagcagggaaacagtgtgaactctttattcactcccagcctgtcctgtggcaagacccactgtgtgcaccngctgttttccctgnccacatccatgctgaacagacaccaccattaaagcattttcatagtgaaaaaaaaaaa

SEQ ID NO: 613202 - DNA, 313 bp, Homo sapiens
tgcatgagtaggtggcctgctcttatgtttgcgcgcttaggcttgcggcccggcctcttggttgacttgagtaggctgatggtttcgcatcctaactatgtatgggtgcataaggggtgtacggtgtgccttgttggtatagaagtgggcttagggcactttttccgtctttcgagactgaaagccttacttagtcactgtcgcccgtctcactaagagggatgcgcccatgggctagcgctttactagattcgtttgggtaggcttggctagtcacaatgagtctagtgccaggcatgtcccgatgggagcg

SEQ ID NO: 613203 - DNA, 1498 bp, Homo sapiens
gatttacaacaaaacccagcgggagaagtttgcctgggtccatgtgacatggctgatgaagactatgagttttagccagctctcaagcaggcagagcttctgtgcaagaggaacagtgctggtttgggaaagcatggataaactgagcctcacttgccctcgtgcctggcgggcacgacgagcgcacgcaacgcctcctctaacaacaccaaacactctctctgcgcacacacagataacaccctggcagactacttactcaccgcgcgcagacgcctgagccccacgcttgctccctactgcgcacacaccctctacctctcttccaccacacactactctctcacgcacctacttccaccccacctctcctacgcccctgcctccctgccactctcctgcctctctctgcacaccctcctcgctcttctcccactttctctcacccgccacgcgcgccccccgctgccgcactgcgcgcaaccctctctgctcccgccccgctctccctaccccccgcgcccacccaccttctccccctgctctctcacccctgcacacacctgctctctgcgccacctctccctctctctccgcccctcacctgctcactgcccccacacgcctccccgcaccttcactccctccgcgcctcgccgcttctctccctcccacgcttcagcgccgctctccttcgccaccctcacccccttctcccctcacttacctccctctacacctacgcacacacctacaccacctctccccctaaacaccactcccccatttcacaccatcccttcctcctcccaactcttctccacgcggcaaccctccctacacccccatcttcacacggcctaccgcaaacacacaacatacacaccccctacccctgacaacctccttgcttataccccacggccttcgctcctcccctccgtcccttacttctggctccacttgcccgcggcacttccacctcttctctccacttcctccaccgcctctctgccaccgctcacccccccgcttggcccccttctctgggcccaacgctggctccctccggcgctctttccacgcaccaaccccttgctctcccccccagcttccccccctcgccccttcgccttgcccgcccacccccctcattttctccccctgtccccctctgtcacgcctgcgttcccctctcctctccacccttgcctcgcacctttcctcccatcccccctactctctacccttccacttcccccacacccctacttgcaaactccccctttctttcactgtgacacccactcacgacccacatccccagcctaccaactctgcacgcgcgttctctgcccacaccgccacccgacaccccgcccccacatggcaccctccacaccgggcctaccgctatcaactaccaccctccccgcgcccctctcacacacacctcccccccacctccctctccccctagcccactccacccacctcc

SEQ ID NO: 613204 - DNA, 131 bp, Homo sapiens
agagaagaagatcgcgtgcccctgtagtggcttgccgctggtggtggtggttatgtcgggctaacaagcgcagcgtgcgctggggccgggaggcagggtggcgggggagccagaggggcggaggaggaacc

SEQ ID NO: 613205 - DNA, 695 bp, Homo sapiens
acaacagtgtgaatgtatttaatgccactgaattgtatgcttacaaatggttaaaaggataaatattgtggcatgtatattttactacatatagacacacagattgttggatgagctgaatgagcagaagacagggttccactactggacattgatgtgggcacatccctgtgatccagaggtcagcaagttgctactgcttccacagcctaagccctgtagtatcctcagttcccacagagctgctgactgagtgcaggctgctgtatccaggcaggtgcctctatggaatggcagagctgataaccagacactgtaaatgccgagtctggctgcacacactcatgagctgcaagagggaggcttccatctcacttttagcttccaaatctcatatcctggttctgcctggaatcagattttcacttaagaaccctgactgctagtcagtttcgtaaacgacgttcttaactttataggccctgtggactataaaggcgagaactgtctggtaagtgcctctggcccatcaccatagtgttccaaagcacttccgaacgctctttgtaccggcccccattaccgtggagggcataacttggcttccataacccacctctcgtcggttcggcgtgttcccatcactaccagtgcccttactgtctctcagcaccacaccgctcctttggttcccc

SEQ ID NO: 613206 - DNA, 1147 bp, Homo sapiens
ggcggcgacatgtattttttttgtttttgttaaataaacgaggtttttgtggtggtttggggggattggaatggacatggtttaattaaaagtggtctttaaaattctcatttaaaaggctaaaggacattatattaatttttctcttacccatggcgtttaactggatataggtatgaatttcaggcccttaaatttccttctaaatttgtgggaagatttttcctcagaatattctctacacccatgtggaacagcagaaacctttagcccagaattcttcagggaaacaacagaatatatgggctttttccaaaacctttggaaagcagttcctctaaaggggagcacgagaacacccacgggcatatcaaaacaactggcctggaaggagggaggtggcgcaccgcattcaggcacaccaggggttatatgggaccaaagcaaagggttgcaggtagaggaacccccatatttatcaagcactgggaatattcaccacgttggctgggtgaggaaaaaatttctacaaatgggagtaaaccgggcgaaaaataatcgaatgtgagtatatcccaacgggggacagaaaagagggcccgatgtttggattggaaagaaatcccagtgaggaaagagcttttagcagagttatgggcctgtgtaatccgaggtaagatatcgcaagagaaagaagtgggactacagaaacttttccaactggcacaaggcaagaagggccggtctggcaccagtgtcccagcccgtgtggctctcctacacgaggattaagacactcccccaaggtttacacacactagttcacagaacgagggatattcctaactcacagggtgaaaaaggcgcggatgtttaaaaaaccttccacgacacggtcgcacgaaccttcttggtatgacatgtggttaggaccccaggttgtacaaattgtggggaaagtccaaagccttcgcccatgtgttggcccacaacacatactagtacccggaaagggcacagaattgtccacggggtcgtggtcccaagaccattagttgacagcggccatttatagagcgacgcctgctaaactatcatcaatgagggtgacagacgagactttgcagcataggggtcacagtacaga

SEQ ID NO: 613207 - DNA, 469 bp, Homo sapiens
  misc_feature (41)..(41): n is a, c, g, or t
  misc_feature (46)..(46): n is a, c, g, or t
aaatcagccggtccttcagcaacgcaacgcccatcactgantaganctggtaagaaaatgtggcacatatacaccatggaatactatgcagccataaaaagggtgactttatgtcctttgcagggacatggatgaagctggaaaccacacttctcagcaaactatcacaagaacagaaaaccaagcaccgaatgttctcactcataagtgggagttgaacaatgagaacacatggacatagggaggggaacatcacacaccagggcctgcctgagggtagggggtatgggagggatagcattaggagaaatacctaacgtaggagacgggatgatggttgcagcaaaccaccatgccacgtgtatacctatgtaacaaaactgcacattctgcacatgtacctcagaacttaaagtataataataataaataaattacagtgaacacaaaggtttggcgttggctggaa

SEQ ID NO: 613208 - DNA, 398 bp, Homo sapiens
aaagatttttccctttttagaagaaatatttcttttaaacaaacataattcctatcaacctaaaataatcaaaagtcagaatgtagtttaaaagagaatttatttggcccaggcacggtggctcacacctataatgccagcactttgggaagccaaggcaggcagatcacttgaggtcaggagttcgagaccagcctgactaacatggtaaaaccccatctctgctattaataaaaatacataaaaattagctgggcatggtggcatgtgcctgtggtcctggctactcaggagctgagccatgaaaattgcttgaacccagaaggcggaggttgcaatgagccaagatcatgccactgcactccagcctcagtgacagagcaggactcctggttatt

SEQ ID NO: 613209 - DNA, 215 bp, Homo sapiens
aacatgtcgaggctagcggctggatgctcgatttcctctgcctctctctattgccaggcttaccgcgacggccgtccgagacttccgcaggaccgcaacagcgcaaaggtatactcatggactatccagtctaacagcttgccagttgagaacgatatacctatgtcagtttttgacaagaatggcagcaggaaaaacccttgatgcacagtttg

SEQ ID NO: 613210 - DNA, 296 bp, Homo sapiens
ggccagcttggctggtctcgacgtgaaaaacagaggctggtcaactgtaatcccatccactcagaaggctgatgacaggagaatctacctgaactctggagagaaatgttgcagcgagccgagacagtgccactggactccgggtgtgtacgacaaaacaaaagtctttccacactcagccagctgagtgagttgcgtaaatccgtctgcattattccacgacacgcttgtgccagagtgactggaggacaagctcgagctatactctcgtcttgtgtgatacccgtctgagtcac

SEQ ID NO: 613211 - DNA, 382 bp, Homo sapiens
aatccgtcaggttgttgaggaagatacctggtgggaggtgactggatcatggggacggtcccccttgtagatctcatgacagcgaatgagtctcaggagatctgatggtattataaatgtttgacagttcctcctacacacacacttgctctctttcgctggctgccaggtaagacggacctacttccccttccaccatgattctgtttcctgaggcctccccagccacgtggaactgtgagtcaattaagcctcctttataaattacccagtctcgggaagttttttggtttgtttgtttgtttttgagacagagtctcggtctgtcacccaggctgtagtgcagtggtacaatctcagctcactgcaacctccacctccc

SEQ ID NO: 613212 - DNA, 116 bp, Homo sapiens
ctgcaacaatttgggctctacagctgaattggcaaagtaaggtttacttcacaagcccctctttttcttctgatatgcggactcaatggaagcacactccccagcacatggggatc

SEQ ID NO: 613213 - DNA, 197 bp, Homo sapiens
cgtacatggctataccaccataccacgaattctcatggaggtagtgcttttcttatactgtaaaatggtgaaggtggggagtggtagtgagttttaaggtgtggtatggtggtatcagctcagctataccaccctataccacggaattctgatccctaacactccccaccttcaccattttacacgtcgtggtatag

SEQ ID NO: 613214 - DNA, 649 bp, Homo sapiens
tgaaacaaggtctgactctgtcgcccaaaactggagtgcagtgatacaatttcggctcactgcaacctctcgggctcaagtcatcctcccacctcggcctcccgagtagctgggactacggtggacgtcatcgtggccagctaatttttggtattttttttttttttttatgtaaaagatgggatgttttgcgcctgtgttcgcccgggctggtctcaaacacatgacgctcaaacagatctcgccagcctcggcctcccaaagtgctggaattacaggcatagagccatcacgcctgaccggattatcctatctctaaaaaaaaaaaaaaaaaaaaacatgcccagcgcacggggcgcctcccaccctggatgatcctcgaagcctttgggagaacgcggtaagggcgacggaaaacatcatgagagggcacaggagttaccaaaacacaccgccggccactatggtgtgaaacccccctcttttatatatagaaaattcgaaacaaaactagccggggacagtgtgcccgggcgcggaatacacagacagtggtaccccccacatgtgcacacccaaaagggggcgtacacgaggtcagagaatacaaacacgtcgggtacggagagcccccctctcaactcacagt

SEQ ID NO: 613215 - DNA, 240 bp, Homo sapiens
  misc_feature (44)..(44): n is a, c, g, or t
tgcagctccacacgactacgcttcatcccaggtagctgggcagnctctgcaggcttggtgtgctggctggactgaggggtcaggcgacagagctggctgtacaggaatgtcacgagcacagcaggtgatcttgaggcttgcgtcaccgtctttcctttgtttccagcatttggctgggatgtgaaggggagcactcctgtcccatgtccgggctcactggcacaacataacctgtctttg

SEQ ID NO: 613216 - DNA, 364 bp, Homo sapiens
tgagacggagtttcactcatgttgcccaggctggaatgcaatggcgcaatctctgctcactacaacctctttctcccggattcaagcgattcttgtgcctcagcctcctgaatagctgggattgcaggtatgcgccaccatgcccagctactttttgtatttttagtagagaccaggtttcaccatgatggtcaggctgatctcaaactcctgacctcaggtgatccacccgccttggcctcccaaagtgctgggattacaggcgtgagccaccgtgccaggcctagatccaaaatattatcacctaaacatatattcaatttttcaaaggttatgtcgacgcggccgcgaatttagttgtagt

SEQ ID NO: 613217 - DNA, 1448 bp, Homo sapiens
gctgtttttatgttttttctcttgttccttgtctcctcgtctctctactcttccttgttttttgcttgttgttcgtcttgttttatgtgcttccttcttcttgctgtctcgttcttctcttcttttctttgcttgtttttgttctccttggtggttaggtctggtttctttgtttcttcgtctctccttgttttgttctgccttctggttctgtttccctttttattcctcctttttgtttttctggctttctcctgttgtcttattctcttcttcctccgttttctggtttgtctccctctattgtttgtttttttcttttctctgcagtttataattccccttgggtacaacctgtgtttgtgttcgtttgctatgtaagttcttcttggggttttgcctttggggttttttcttcgttgtgtggctgcccccccttatttttgtttcaccgtatgtgtattttattgtatcgtttgttactcacttctcgttgcattattttttctccctccctgtgttctccctggttctttttgtggccttgttctctaccttctcggtgcgtcacatagttattgtttgttctggtgtctttctcgctcccccctcctgtctcctccttgtggaggtctcgtttttggtgtgttattgtgcttctttgtctgtcgcatattggtctttctgttggttcccccttgttgggattttctactttctcttttcctgttgttcctcaccccccgtttgtgcttgtgtccttttatgcctcggctcttctggtgattttttcgcctcaaatactttcgtatttcacgctgtatgtacctgtctcgttaactgtatcactgcggacacaccgtttctttatctcttgttgtttatgcccccacctgtctctctcctattgttctccctatctctcattattggaggacgctgttattgtgtgcgccttctattgatggtaggcttttcactttctccttgaattctccccctctatttttctccactggcgtattcacactctctatagagccacaaatcctatacccgcacaaaattccacttttcacactattacaataatgttcacttccggcgtataaattcgtaaacttttcttttcccccacacaccacactctttctcggccctatttcccgaaatttcccccaaccttatactcggagtatctcccgagtgcactaacacccacacactgtaaacactcctattcaattctttataggctcacattcacattgttttttacacgccgttaatattaataattttcactgagtttgagagagccttcgctttgaagcgataagtcctaatatgtatgaagaaccctccactaaccctggagagtgaactatattggatgccccccacccttccacacatttgaagaacccgtatacattaaatttagacca

SEQ ID NO: 613218 - DNA, 334 bp, Homo sapiens
aaatggaagcctgcgaagttaatcatgcaagacattgatgccactcacgtctttgtaatagcagaatatgattaacatcctcacaggagcgagcgggtgaattaatggaccaaaatgcttattcccttacccagaaatgaaaatactcaatatggaccattcaaggaattataagcagcaaatgtgaaagactagcacactcgatatatatagaagacagattagacgtagagggttgtttatagttgatttaggagcataccacgggaaagaccaaagagaacatttgttcagaaaaaaacatggaactgattttgttataccatagaattaa

SEQ ID NO: 613219 - DNA, 511 bp, Homo sapiens
aaggcgccgacaccacgccggctaatttttttgtattttttgatagagacggggtttcatcgtgctacccaggatggtctcgatattctgaccttatgatccgcctgcctcggcctcccaaagcgctgggattacaggcgtgagccatgtacccggcctcatctatttattgatattactatttagccacttcccagcagtgtgactgctgtaacaagaacaggactcaatttctaaaggtaataaaataacaaggccatcatagacagaacattgggaacactccttacagggaactggcttttcttttccagccaggtgccaggtagcattcctgaaatacccgccacctggtccccaaacagaggcacatcttcgctcatcccagccccgggcttggggggcagtggtattctggatggccatctccctgacccctccccgcaaccaactgaccttgtgatccacatgagctcggactcccaaagtgcccagcactttgggcttacag

SEQ ID NO: 613220 - DNA, 323 bp, Homo sapiens
  misc_feature (19)..(19): n is a, c, g, or t
  misc_feature (48)..(48): n is a, c, g, or t
  misc_feature (67)..(67): n is a, c, g, or t
  misc_feature (101)..(101): n is a, c, g, or t
  misc_feature (107)..(107): n is a, c, g, or t
  misc_feature (130)..(130): n is a, c, g, or t
  misc_feature (146)..(146): n is a, c, g, or t
  misc_feature (182)..(182): n is a, c, g, or t
ccccggctccgggggctcnggctgcccctaaggggccccctggcccangggccccaagacccccaancccataaatatcatccccctgtggtgaatcaggnaaaatncccataagactaattttaaaaantatagcctgtagacantcatgtagtgctgtttcccttcacaaggtgatttantctcatagaagtgttgccaattttgaatttcctgctgacttaattatacttgcctgaccaaggtcaaaaaaataaaattctttctcaacttctgctaggtcaggctaaactgatacattcagttcctttaataatagtctt

SEQ ID NO: 613221 - DNA, 271 bp, Homo sapiens
ccccctttttttttttgggggggggggttggtttgggcccggggttttaaccccccccggcccccctgggtgaatccccttttttttttaaaccccaaaaaaaaaccgggggggggggggcccccccttttttccccctggttgggggggttggggcggggaattccttttccctgggggggggggggttccgttgccccaaatttggcccccgcccttttgggcccccggggggggccccctttcccaaatttatttattttttttttta

SEQ ID NO: 613222 - DNA, 243 bp, Homo sapiens
aaatataggaatatgagtaggtaaagggtgtttgggcagtgtgtggatgtcagggagtagacaatgtttaagttacataatccctggatgtcatgggtgctttagagatttccccccaggagcatggtttctttggcggattaggactgaattattttattataaaaggtaggtaatcatgctatagagattttggagaatggaaaaaaaaattacctataatctcccccatccacaaccgga

SEQ ID NO: 613223 - DNA, 294 bp, Homo sapiens
atcaccatcacctccaccaccacttcctgggctgctggattgtctcgttctgttttgtttttttgagacggagtctcgctctgttgcccaggctggaatgcagtggtgcaatctcagctctctgcaagctccacctccagggttcaagtgactctcctgcctcagcctcctgagcagctgggattacaggcgcgtgccaccatgcccagctaatttttgtatttttagtagagatggggtttcaccatgttggccaggtcgacccggccgcgaatttagtagtagtagtcgacc

SEQ ID NO: 613224 - DNA, 759 bp, Homo sapiens
agcggggtagtcttgcaaccttgtggaattgcttcctgagtaagtggatatacaacctcagcaatgacaaggaagaagtgtggaaacagtacttggaactgaggaagctggacacagctcctgtagaaacaagtgcccttttcatgatcgaaactgggttatttaattggaagaaagtaagaaaaaaacatagacatggacatatacgcagagaaaaaaggttattggtcgcctggtggtatattgccaatggctcaataaaggctcggggggtccctggttctattaggaatacctgaattaagccaacacaatgatcttcggtttcaagtatgtggcggatcttatttttgtcaaaagcaaacattaaacagaaaggctcaagatcctggctggttatgacttatagggggggtaaccctaatagacggaaactggtgagcggtaatcacgacctcttttatcacttttctgggtgaaaccttgagaaccacactctgtgttgttaacagatctcatgagccttgtcctggtgtctatattacctgaggtattgccgcactctatcagtggcttgtttggtcccatttcccttttgcccgtcccaagttccttttctccccagtaacaaaaactgatggcagcatgggggaaatttgctgcctgcgctatatatgttttgccactttccggtgcccccgttggtgtgcttgtaccttggagcacgaaaactatttggctcctatccccggtaaaccc

SEQ ID NO: 613225 - DNA, 229 bp, Homo sapiens
cacgaggtggatgggtctccttcctcaaatcataagggaatagtcaactacctctggactctaaatgtggggaccccatcaacatgggaggtgttaaatcactcagaacatcatcctatcctttttctttcaaacctgcatgagggaacctactcttttcacctgaaagtgaccgatgcacacggtgagagtgacacataccggaccactgtggaggtgaaacctgatc

SEQ ID NO: 613226 - DNA, 206 bp, Homo sapiens
  misc_feature (51)..(51): n is a, c, g, or t
agtatcgccaacacacacacacaaacacacattatattctttttttcttgnttgagaaacagggtggctattttggcaagctgtctcaccctcctgacctcagggatctgcccacctcagcctgccaaagtgctgagattacaggtgtgagccactgcgcccagcctataagacatagctcttgacttagaggcactgatacaaat

SEQ ID NO: 613227 - DNA, 178 bp, Homo sapiens
acaacattataaatacacctctagttaaaaacctccagtgtctatctctcccataaagtcttaagtataaaatggtttacatttttcccatctcaataaaacatacagttgtattttggtaacagtactaatcaaattaaaaattacacctagtgatgttgcctttcggagaagaggg

SEQ ID NO: 613228 - DNA, 563 bp, Homo sapiens
aagagatatgcagaaacacgtaaagccagtgctgattgggtgagaagaaatattgaactgagtagttaaaacaagagtcatgttttagaacaccaatacatgtattcacttttaatacaagataaatgtatggagtgtaaaagaataaatctggtaaaaaaagcaagaggtgtagatgggtaaagtgatatgggggggtcgtcctgaaagatgagtatgagtggattaacagaatatggatgttgtatctgcctaaaagactgagtacagtgtcatgggagatctcgatcattgtcactcagacacggaaaatctcgacatcatagcacagcaagcaagtccgtcgccttaaaaatagctcgtgactccgctatcagtctacgcatcgtcactacacccacaaggacccgccacagaccaccataggggaaggcaagagacccccacgtgccctccaccaccgccgggaccgcacgagggacgcaaacggcacgcccacaggcaacccacgcgcacccacaggggaaatgaacacagagggcaccacacgagaacacaggccg

SEQ ID NO: 613229 - DNA, 228 bp, Homo sapiens
aactagatacagtgtttattgttcaacaaaaaacaaaatacaaaacaacaacaacaaaataaaaactgcctgcggagaatgctgagccttgtgtgtccccaagggaagaaagtgtcgttcccatacagccctttgcgcttgggcccctggggaacctagttgtctcatgtttcgaacccatgtggttgtgctgtctggccacatagtgggtaccccaatgtcgtgaca

SEQ ID NO: 613230 - DNA, 426 bp, Homo sapiens
  misc_feature (9)..(9): n is a, c, g, or t
  misc_feature (91)..(91): n is a, c, g, or t
  misc_feature (107)..(107): n is a, c, g, or t
  misc_feature (137)..(137): n is a, c, g, or t
  misc_feature (141)..(141): n is a, c, g, or t
  misc_feature (143)..(145): n is a, c, g, or t
  misc_feature (147)..(149): n is a, c, g, or t
  misc_feature (152)..(152): n is a, c, g, or t
  misc_feature (175)..(175): n is a, c, g, or t
  misc_feature (184)..(184): n is a, c, g, or t
  misc_feature (187)..(188): n is a, c, g, or t
  misc_feature (192)..(193): n is a, c, g, or t
  misc_feature (209)..(209): n is a, c, g, or t
  misc_feature (223)..(223): n is a, c, g, or t
  misc_feature (251)..(251): n is a, c, g, or t
  misc_feature (258)..(259): n is a, c, g, or t
  misc_feature (263)..(263): n is a, c, g, or t
  misc_feature (267)..(267): n is a, c, g, or t
  misc_feature (270)..(270): n is a, c, g, or t
  misc_feature (272)..(272): n is a, c, g, or t
  misc_feature (276)..(278): n is a, c, g, or t
  misc_feature (282)..(283): n is a, c, g, or t
  misc_feature (287)..(287): n is a, c, g, or t
  misc_feature (294)..(294): n is a, c, g, or t
  misc_feature (298)..(300): n is a, c, g, or t
  misc_feature (331)..(331): n is a, c, g, or t
  misc_feature (336)..(336): n is a, c, g, or t
  misc_feature (356)..(356): n is a, c, g, or t
  misc_feature (370)..(371): n is a, c, g, or t
  misc_feature (374)..(374): n is a, c, g, or t
aaaaaaaanaaaatatatccactccactctgtactaaaggaaaaaaaaagctttaccaagtacaagaaatcaactaacttgatcatctttntaaggcaatgattgancttttcatttcacagagcataatccatcantttncnnntnnngcnccctagattataaagccaaagangccaacccncanntcanncccccccccataaaanccgtcaccgtcccncccccccccccccaggcgccccccaccnaccacanncacnaccnccncnaaannncccnnaccncacccanttcnnngactccaattccacttgagagtctaggaganaaccngtgaatgcccactacatacngaagaggagagaannagngagcaattgcaccaaaccgcaatcaggatttggacccaatgcaaatgtgcac

SEQ ID NO: 613231 - DNA, 540 bp, Homo sapiens
cacagtgttgagatcatccacatcactgtcttcgacctccacaccttgtcccactggaaggtcctcagaggcagtaatgtgcatggagatgtcatctcctagggcaacaatgcctccttctggatacctgcgaaaggccctgcttgaggctgttttacagttaactagtttttgttttgttttgttttgttttataagtagaaggggctggtgctgtggcttatgactgtaatctcagcactttggagactgaggcaggaagatcactcgaacccaggagttcaataccagcctgggcaacttagtaagaccctgtctcaaacaaaattttaaaaattaacctggcctggtggtgcacacctgtggtctcagctacttgggaggctgaggaaagatcatttgagcccaggaggtcaaggctgcaataagtcttgttcacaccactgcactccagcctggacaacagagtgagactctgcctctaaaaaataaataagtaggagtacactctaagataacaattaaaagtgtagtatatta

SEQ ID NO: 613232 - DNA, 652 bp, Homo sapiens
  misc_feature (532)..(532): n is a, c, g, or t
  misc_feature (536)..(536): n is a, c, g, or t
  misc_feature (544)..(544): n is a, c, g, or t
ctgttttcttttcctctcttcctttttgagggagtggttacatgtctccatggcttccgataatcgcttctcatcaataaaagggattaacaccacagcttcccattcctgttgtttcccatttaggtcagttttaaaatcaggtgggtaatattctataattggtgagtcttcattggtcatcaaatgctggtagcatgcaggaagtaaatttttgctggctgctggaagtacagcaagaagctgttcaaatggcttaaaaggttttcctagttcaaaatggattttgagtgtactgatgttgtgtatatcagacaggaaaggtgcataatgataaggataataccagctccaggactgaactccatgatagtaatagtgcaaaatccactgtattgcctgaacataacatgcagcttgatcagccagaaagtcatcagatactacgtcaacccccatcttcgtcatgtaatatgttcttttatattgtctaaactcagtttcaaataggtcatcatcttcagtctcatcntctnaattatcnttagaagttatcatttcgccttcatttttgtctaaagcagtccaatacagagaattttcctggccctttaactttttcttttccttgtagttcctggcttcttcagct

SEQ ID NO: 613233 - DNA, 180 bp, Homo sapiens
gggatcctcttgagtctccctgaatcattgcgagcagcggccgagacaattgacagtcaccgttgtgactgtcaaacagccgctagcttcagcccacacctccacacccgcatctgcctccccaatggctgtcagttcggtaaagtcaccctctccttctactctgtatgggggatctcg

SEQ ID NO: 613234 - DNA, 720 bp, Homo sapiens
ggagcattgccggaaagtcaatcgagtatctagaacaacccacccgatgtcctggggcgctgggggccagcggatatgctagcgagcacgaacgtctctgcgctaggcggtgagggtggcctgctagagccgtgctcgaggaatacgatgagccatcagccagctcatgcaggtcatcggatcacagccggctcggaggagctgggatgggcatgggggcccggtgactggacctggcctggcagcttactgggagcagtgggcctccaggagcagctcctcctccagctcccggagccagtcggaagggtcaccccgtcatccaccagctcttccacccgtgccagcccagccccttctgctccagcagctggctcagcaacgtagcccgagcccggcgccgaagttccggggaatggagccaagcacagcgagccagcccgaccacaagccgcatccaagtgagcgacctccagagcatccgtggccacgatgaacggtacccagctcggggccagcaggctgtgccacgcaaagtgggaccgtggccagttgtgctgaccgccgggagataatggctcccatccatacggacaaacggcggatgtccaggagcgcctggttcccgtaatgtgccatctggggagtcgcttgccgcaagaccggggataaatccaaaataccttgaactcgcccagttccagcaaggcctgggcatgt

SEQ ID NO: 613235 - DNA, 406 bp, Homo sapiens
ctgttttcttttcctctcttcctttttgagggagtggttacatgtctccatggcttccgataatcgcttctcatcaataaaagggattaacaccacagcttcccattcctgttgtttcccatttaggtcagttttaaaatcaggtgggtaatattctataattggtgagtcttcattggtcatcaaatgctggtagcatgcaggaagtaaatttttgctggctgctggaagtacagcaagaagctgttcaaatggcttaaaaggttttcctagttcaaaatggattttgagtgtactgatgttgtgtatatcagacaggaaaggtgcataatgataaggataatacctataaaacacaactgagtttaaacagtggcatctttatgaattaggctgagacagcaaa

SEQ ID NO: 613236 - DNA, 928 bp, Homo sapiens
ggtccttcttacctttatgtcttgtagagcccggtgatggcttgcatgccgaaagtggtgcaaggttcatgaacatgctgtggcaatagtggtgcttgaccgtgtgctggtacgctatctccggaggcaaagctgactatcgtgacgaacattgatgatgtgcaacctcacgatcgccccttacagccatgctctggttggctgggatttgaccgtgtacctcccgccaaagctgcagagcttgcccagtgggcaaagaagcaagatcgaccaagcatgatcacacgataaatatcgttgtgtgaaagtgtctaacgtacaattcaacctagttgccgcacaaggtacgtctgtggtatagtcccctttggacaaaaactgtctgtcctattaaggatgtcttcatgagatcgctgctcgttaatgaggcaaggtcctcggatggggagggccaaatggtccaagtttgacagagagcatataaggactaggcaaatgaatcacggttggttcttccatgatagacctggcggtcatccagaattgcttatgtctgggagtctattatgaacatttcacaagggggaaaaccttcaaaaccacaggataaggtagagtacagttcgcggcagtgactcacgcgtcgcgcccaatacaccttggcaaaaccaataaattctgcgtggtctgtcgtgcgtccatgggaatattgggcccttattaccacgtgtcgtactatacgggaagtcaagctgcagaatgagaacaaccgcgtgatatgttgaggccataatggcggtgcgtgatggggctctccgaacgcagcgtataaaagaccgttcactcggttgtgcacaacgggttcagttctctctggatacaacgccgctgcaatttgagatataagcgagtgccatttacagagggc

SEQ ID NO: 613237 - DNA, 1478 bp, Homo sapiens
  misc_feature (343)..(343): n is a, c, g, or t
cggccgcccttttgggtttttttggcaacatacgttttaattactcaaggacaaccgggacgtcaccaatggcccagctatcagggggggcatagtagtggtgagactcacggctggaacacaaaatcactggtggaaggcctggtgctaacagcccgagggctacttttgggacaccgcaaaagagacactgtcgggtaacatgtagaaacctgtgactatgtgcgttcgtgaaagacatgtgttgaatacatgtgttctttattcctctgtgaaaatgtgtttccctttcctcgtgtgtctgtgccagtgcttccccaagatttttaggtagcctgtctcncagaggggacattcatcgaatgtggtctgtgggtatacacataggctcttgtagggccttaagtcttagaaaccttgtggggcttaggtgagccccttctgtgccaacaaaactcgaggtgccctgtggggccttgaaagggccgtgtaagcttatgtgtggggccctcccgaaaagccctgtgaacctgtgggctctggggagaaactgtcgggtcagtgtgtggccgcccccaaaggtgagagtgggccctgtgggctttgtggcaaaggggcccaaacacggaacctataataggggcccacagacctccggcagagggattccccccacaagatataaaaaaggtcctgtgtgcaagaacgagctgtgggtcccccggaaagcgttattctgtgcagcagtgtagaggagatgccgtatggaactccggaaacattttccgtggggaaggcggaaatctctacaagaaaaaggatttaccatgcggcgacaatcttccatgggcgccatgaaggggacctgttggaaccccagtttgagaagagcaccttttgaaaccagtggcgccatataacttttgcacaacactattttccccccacaagggggggtatatatccacacatctctctcgtggagcacaacagcgggggtgcctttatgggcttccttttgtttcaacaccccccgaaggtgtttgtggaaaggtttcgcgaaggtcgtacttagcacagttacatttggagagctccacattgtgagaaggtgtcttcggaaacctcttcccccaaaggaattaaagagagaatcccgtcccctgaaattacgaaggccttacccccaagcaatgctctgggggtgaccccacagggctgtgtggggcgcatacaccacggcccaaggagacagaagtgcttaacacaaaaactctctctggggcgcaagaacacgagcgggcctccacaccaagtgtatggccccccgagaagaggccatagacccaacagtggggccaccacgaggagaaactcgacgggctatgggcgccaccacagagggtgggggaaaataaaagggtgatgacaccccggggcccggcgcacgagttccaacttagacacagtataaaggc

SEQ ID NO: 613238 - DNA, 115 bp, Homo sapiens
agtctcaaactcctgagctcaataacctgcctgcctcagcttcccaaaatgctaggattacaggcatgagccatcgcgcggggcccttcgcatgttttcaatgtgcctctttgtg

SEQ ID NO: 613239 - DNA, 136 bp, Homo sapiens
gcactgggcgcgggatgtgataggggcgaccgtctgcgatgtatgtggcaaggtgttcagccaacgcagcaacttattgaggcaccagaagatccacacgggtgagcgaccattacgtgtgcagcgagtgcggccg

SEQ ID NO: 613240 - DNA, 358 bp, Homo sapiens
  misc_feature (105)..(105): n is a, c, g, or t
  misc_feature (124)..(124): n is a, c, g, or t
  misc_feature (135)..(135): n is a, c, g, or t
  misc_feature (167)..(167): n is a, c, g, or t
  misc_feature (261)..(261): n is a, c, g, or t
  misc_feature (288)..(288): n is a, c, g, or t
  misc_feature (343)..(343): n is a, c, g, or t
atggcacatgcagcgcaagtaggtctacaagacgctacttcccctatcatagaagagcttatcacctttcatgatcacgccctcataatcattttccttgtctgncttcctggtcctgtgatgncccttttcctnaacactcacaacctaactgaattactaacatnctcagaacggctcagggaaataggaaaccgttctggaactatcctgacccggccatacatcctagttcctacatcgccctacccatccctacgnatcctttacataacagacgaggtcaangatccctacccttaccatcttcaattggccaccatggtactgaaccttacgagtnacaccgactggaggg

SEQ ID NO: 613241 - DNA, 329 bp, Homo sapiens
ccaggatggagatccagatggcaggcaggtggaagccgcatattgggactctgcaacggatactagaaaatgaacaagacgggaagaagctgaggaatataaagaagcacggttagtactggagttcagtgaacgttagaacgcctgaagacttttctcgatactggggtggttttatgcatttacagtccgtggggtccagttttacaagtccagttattttgtgaccacgtgctattgtgttcacagtagtatgagaatgtgattgtattatatctaggttacatatacaatttctgttgtctatatttaatatcgtcaacataaat

SEQ ID NO: 613242 - DNA, 204 bp, Homo sapiens
cacacaggagttgtgggggaccgggtgtcgtgcactcctcgcgcccggtacacagttgcccggttgggcatgtgcttgggctgcacctgcgggcatctgcctggtcttccagctcaggaacacgacatttgacagaggcttagcgtgccggggcatcaaagaggaggtagtgatttggtcgaaggtgcctggtttagtgcggta

SEQ ID NO: 613243 - DNA, 278 bp, Homo sapiens
gcacccaggcgcacttctcccccttgttttctttttgtttgtttgttttttaaagacaggtctcgctctttgcccaggctggagtgcagtgccccgatcacagctcaccccgatcacagctcactgcagcctcgacctcccgggctcaggtgatcctcccacttcagccctccaagtagctgtgatcacaagtgcacgccacacactcggctaatattttttagttttttgatagagatgggggtctcaccatgttgtccaggctggtcttgaactcc

SEQ ID NO: 613244 - DNA, 551 bp, Homo sapiens
  misc_feature (495)..(495): n is a, c, g, or t
acttatattgacagactgaggtttgagtcccaggcgtggtcagtgtcgacagactgtaataaagaggacattactagtatccacttcatctcgttatgatgcgaaatcaagagacaatgtagttgccagttcctgacggcagaatgtacacatgttggcttcccatccctccccaaattacattacatatttagagtaccaaaaaggaataagtccactaccatgaaaaggtgagggtacgctcatcacttgatgatacatttatactcgatctgaaagtttgaaaacaaattcacatgacagacagaacagtgacagccacagccaaaaaatacattatggaggactaggatggaggctaagcttatctgcccatcagaacccttgggagaaaagaaggatgaggtctcagagaaacaaaggcagaagtaagaagaggggcagaaaatggggaaactagtgccttctccactctatgaacaccgagtatagatnaggagagtacagatactgaggcaaaaagattccaaggtttttctagaaatagcaca

SEQ ID NO: 613245 - DNA, 815 bp, Homo sapiens
  misc_feature (365)..(365): n is a, c, g, or t
ttcagcagattctcccttgcagccctcagaagcagccaaccctgccgacacccattgacaccttgatcttggattctcagcctccggaactttgagacaatacatttctgttatttaagccacctagcccgggtacattattacggcagccctattaagctgacgcaacaccataatactccagataaacacactggaaatcactgcttgaggaatcggaagcccagaggtcctattcttggctttgccactccaagccactccacatcccaggaatgcctgggatatttacatattttaatagagaaaagagaatgacacttgagtaagtcacttcctccttaagcctttgtttcctccttcanaaaagggcaagatcccctccaacatgaacagcttgtatttctgtggcccctagacaggaccaaggacaactgtccacgtcagccacaacctaacagtgttgtcactgtgaaaaatccccatgtcccaacattcaaacacgctgacatcccagtgtcccaccggacctggccacattagactgtagcttccaaaggacagggccagtggattccccactatcaggtccctaaatgatggctgacagggatcctgtcccaggctgtatcatggagcatccttagctctctcaactgcctatctagaggtctggaccctacatccaataaatgctcataaaacttaacattcaagtttacaaatacaaaggcatattttacacattaaaaacctatgcggccaaggttttgttttttttttttttttctcccaactcctaccctcatgaaccc

SEQ ID NO: 613246 - DNA, 120 bp, Homo sapiens
tgtgatagtatagactctagtggccatctcccagctctgcactcacttggagctgtcgctccctatggcaggtcacttaacctctgtgtctcctcttacctcctacatcaaacgaaggat

SEQ ID NO: 613247 - DNA, 793 bp, Homo sapiens
gccgcgcccgcatgagggagatcgtgcacatccagttgcgggccagttgcgggaaccagatcggcaccaagtttgggaagtgatcagcgatgagcacgggatcgacccggccggaggctacgtggggagcactcggcgctgcatggctgggagagaatcaacgtctactacaatgagtcatcctgtccagacggtgtgcatgggaacaactgggcgaaagggcactacacggagggcgcggagcttggtggacgcagtgctggacgtggtgcggaaggagtgcgaggctctgcgactgcctgcaagggctccagctcacgcgactcgctgggccggcggcacggggctcaggcttggtggccagcgctgctcactcagcaaagattccgtgaggagtccccgggcgccgcgtgtcatgaacaccttgaggcgtcatgcccttcgcccaggggttgtcgcaccagcgggtggtgggatgccttacagttgccacacttgtcgggtgcaccacgcttggttggcgaataacatgacgagacctattgcttcgactcgcgaggcgctctatgacgtctggttccgggactctgaagctgacaacgcccacttacggggacctcgaaccaccgtgggtgtcggccaccatgagtgggtgtcccagcgtcggatgcggcttccctgggccagcttcagtgctgaccttgcgcaagctggcggttgaactggtgctctttcccgcgccttggattttcatgcctggcttcgcgccgtcaccaaccggtgcgcccaggtc

SEQ ID NO: 613248 - DNA, 414 bp, Homo sapiens
ccctcctagaaagagcagagatcatggtacctctttgttctccttctttgatgcctgttcttaaaagtctgaaagtcaaactatcattttctaatccttttttgtatcagagagcaaaaatgaaataactaagaaacacaatataatcttactgattgattaaccatgtgcactaaaaaagtaatagggaccggttcataagaactgtcctactctgacttttcaagccagagttcaaagattctttagacaaaggctgaatgagtaggcacttcaactctaacctgtagaatcactaccagctgactatgatacagaaactgagagtagacacaacatgcgatctataacacggcagaaaaatccacaaaagctcatgaggagccaacaaatccagggatctgctgagcagta

SEQ ID NO: 613249 - DNA, 266 bp, Homo sapiens
  misc_feature (147)..(147): n is a, c, g, or t
atccctcatcacggtctcattcacattttctggtatttggtgtgtctagctatgaaccaggtagatccacagaagattcgagagtttgactttctgataaataactgacatgacatcgtccccttctactcactggcattgtgctgntgctgcagctgcattcagatgagggatgacaagccacagctacgaatgcagagcagagacagaatgaactgatctgtgatgacctcatcatgcctgtatcagccctggacagcttgttg

SEQ ID NO: 613250 - DNA, 108 bp, Homo sapiens
agcagctacaacatggtcatcccggaggacaatcagaccaaccgccttcaggaggctctgaacctcttcaagagcatctggatctaacatgtggcttgcgcaccatct

SEQ ID NO: 613251 - DNA, 729 bp, Homo sapiens
  misc_feature (81)..(82): n is a, c, g, or t
  misc_feature (91)..(91): n is a, c, g, or t
  misc_feature (94)..(95): n is a, c, g, or t
  misc_feature (101)..(101): n is a, c, g, or t
  misc_feature (106)..(107): n is a, c, g, or t
  misc_feature (112)..(114): n is a, c, g, or t
  misc_feature (116)..(116): n is a, c, g, or t
  misc_feature (118)..(119): n is a, c, g, or t
  misc_feature (123)..(123): n is a, c, g, or t
  misc_feature (136)..(137): n is a, c, g, or t
  misc_feature (140)..(143): n is a, c, g, or t
  misc_feature (146)..(147): n is a, c, g, or t
  misc_feature (149)..(149): n is a, c, g, or t
  misc_feature (151)..(151): n is a, c, g, or t
  misc_feature (154)..(154): n is a, c, g, or t
  misc_feature (159)..(160): n is a, c, g, or t
  misc_feature (165)..(165): n is a, c, g, or t
  misc_feature (167)..(167): n is a, c, g, or t
  misc_feature (169)..(169): n is a, c, g, or t
  misc_feature (177)..(177): n is a, c, g, or t
  misc_feature (179)..(179): n is a, c, g, or t
  misc_feature (189)..(189): n is a, c, g, or t
  misc_feature (191)..(191): n is a, c, g, or t
  misc_feature (194)..(194): n is a, c, g, or t
  misc_feature (197)..(197): n is a, c, g, or t
  misc_feature (217)..(217): n is a, c, g, or t
  misc_feature (219)..(219): n is a, c, g, or t
  misc_feature (262)..(262): n is a, c, g, or t
ttattgatattaaagtgtgggtttttatgaaatgcttcctcaatactgaaccttagttgacattaatacagtgcggggggnngagagaggnggnnagatgntgaannggcgnnngngnntagncgaaaccgaatcnncannnngcnnangnccnagaannagaangntnctgacacncncctccacacngnctnaangtcaactaagaacggaaatntncagtgtccaggcacggtggctcatgcctgtaatcccagcactntgcgatgccaaggcaggaggatccctggagcccaggagtgcaagaccagcttgggcagcagagcgagaccctgactctacaaagttagctgggcatggaggcgcacacctgttgtcccagctactcaggaagctgaggtggaggagtgctatagcccaagaagacgaggctgcagcgagctgtgggtagaatgtctgcactccagcctgggtgacagtgagaccctgtgtcaaaaaaaaaagaaatgatctgcctattcatacttgtcgcgaacacagagagcacgaacacaactgaaaaaaattcgcggcgcatagacgacgctacatcaacggccacaagagaatgtgacacaggctgcatgacacaatcatgccaggtagatgggcacgctttatccttgtgtacaagcctgagcatcggctaagacaagcactacccgctgacgcgtctggccacggcccctc

SEQ ID NO: 613252 - DNA, 380 bp, Homo sapiens
ggtttgaggtagcaccccgccatttctatgatcgagctctgccaaaattgataagccacagaagagacctaaacacaaacgcattgatgccatgtttggattcttcgtgaacgtgcacctaaactgtcaagactctaagaacaagagtagtgagacaaattaaatcttcctcttgcaacccagaggtctatataagtagtggcacatcagtactacgtgctgtgtttagagtgccgactaccatgccgaatgaccacgcgcacgatttgtccggaatacactcatctttcttggtgaaatataaactcgacgttgacataactttaaacaaaaataaagaaaaaaaaataagattgtgcggccgcacagccttattccct

SEQ ID NO: 613253 - DNA, 310 bp, Homo sapiens
  misc_feature (51)..(51): n is a, c, g, or t
  misc_feature (89)..(90): n is a, c, g, or t
aggtaggcggccaggcacggtgccctcacgccccagtgcctccaacccccncaatcccacactttgggaggccaaggcgggcagatcanngaggtcaggagttcaagaccagcctgtccaacatggtgaaaccctgtctctactaaaaaaaatagaaaaattagccaggcacggtggtgtgcacctgtaatcccagctactcaggaggctgaggcaggagaatcgcttgaacccaggaggcggaggttgcagtgagctgagactacgccattgcactccagcctgggcaacacagcaagactctgtctca

SEQ ID NO: 613254 - DNA, 1069 bp, Homo sapiens
acacgtgtttttgcatacgcgccataaatttagctgggacattcgggcgttgtgggctctatctgccctgtgtggaagtctcctcctagtggtttacgcacataacaccaacccctgtggtggcatcagccccaataggtggaagttagattcctgcgtctctccactatattacatctcaattcaagtggggtggagcccgtctggggtggtatacttgctcaaccaaataaacgggtttcactttctgggaagagaactttcgatactggccccaatatgctttttaaggttggctccagaactaaacaccggggaaggccatagcatccgggtgcaagcgatacaaaggcgtgcgcccatttctccaatgcctgatccaggttttctatcacgaagtcggccctttttatgctgaaaagacttatctgctggcaaacttgtcgattaggaggacatttaggccacgctctatagggtgtgtcaaaaaccctctcttccgttttgcacatttttattcggggaaatttctaggtacgcgaccatgcagcccattcttgctatttacgatattttgctttatgttttcccgctagttactgcttatcgtgggtcgtttaataagtggtggaaaaccccgagagctaaccgttacacacttccatgacatctcatagttgacctgttctattctttggtaaccagatcgaagtagctgccccagtgtatattctcgcgtttctcgcgcgtccatttgttggaaagaaggtgagattgcagtcgagcagtcccatcctagctcctcattacctacttctatccttttccaggtcctgacagtagtcaggtggaagagtccctgggtttatgtcccaaatcttagcagccttgcaattgttgggatgtggactggacgtgtgtataatagagagagagagaatatgtgtatgtgtgtgtgcgtctgcgagcgcacacacatgcacaagtgcgaaggagattgcgcttgctccatgttctgactaagggctatttgattgtgcactgtggggtctgtctgtacagtttactc

SEQ ID NO: 613255 - DNA, 196 bp, Homo sapiens
gacaagtatggtgtatcatagagcagtgagaagatgaacctgagatgaagcagtgtgactgtctgacagtcagccctggagcgaggggatggaataacccagatatatccactggctcctctccaagcttcagccatgccatggctggcacatcactgcctcgtagcagcttgggtcctgtgtttgggtccggact

SEQ ID NO: 613256 - DNA, 787 bp, Homo sapiens
ggcgtggcagtggaccacgatggtgttgtcacaagatgggtcgaagctggaatgattgaaggttgcgtgttccgcgggtgtggaggaggtaagttgcccctggggtgcgacggaatggctcttataagtggggtggtttgcccatagaagatgttgccccgttgggaatgcgtgccggtcgtcacatgggctgagaatccaggtttgttagataggtatgaggcggaacgggaagatggtgctttgccctcatgttgcgtggctgtagagccacgggggttttgttgtgcacgggttgttcagcggggtggcaaacgctactttgggtgtttcaggccgtggagggagtctttctacgtgggagtgtttctcccctgatgtccctttattttcgtggccgtgacataggaatttcttgttaatgatcttacgttcactttccactaggctgaaggtgtgcgaaggatatgggctgagcataccccacagtagcccgctggttttcacgccaacagaagaaagccttgatgtcttttcatatatcctgagttgtcagaaaatgggggaacttgtcacgaattttgagcaacagcgtaaacggtgtagtaatggtagcccacaaatggctgtttaactatcttgggaaaggaggtaattccccaatagattcccttttttttttttttgagacggagtttcacttttgttgcccccggctggaggttgcagtgaccgagattgggtcattgcactctagcctgggtgacaaggtgagactccgtttcca

SEQ ID NO: 613257 - DNA, 368 bp, Homo sapiens
caggcacaacgtagagagaacgcccgaacgaggatgctgccgaaccagcaggatccgaggcaagcgatcccctcccgtccgagctgagccaggctgtgcccccgccacatcacaatacttacaaaacaaaaccttttctgcttggcgggataacaaatcataaaaattcgacataataaattagaggtttataaaatgcgggtgggcgggtcagaggccgttgccactgccgtgctggaccagagccaccttgctcagctccaccacggccgagcgcggctcgttctgcatcttgggcacccgctgcactagctgatgtgcctcgcggtaggcgtggcgcagctcattctttcactgcactagctcag

SEQ ID NO: 613258 - DNA, 839 bp, Homo sapiens
  misc_feature (836)..(836): n is a, c, g, or t
ggagggtacgtggatcgcggtgcggagactgaggttagaaggcacaggtggcgagatgagccgggtaccagcgttcctgagcgcggcgaggtggaggaacacctccgaagtccagcctcctcatcccgcctctagagacggcctggccaaattctccagcggtcccgaagagggtgtcatgcagccgtgcgcaacgtgtgccgggtgaccaagcacaggggcttaccctgggggtcaatgcccgctacagtgctgcagaggatgcactgaccacaagtggtcaccttctacgaggacccgggggatcaacctcggtcgtcccttcccaccaggtactgtggctactcttgtgagcccagaatgcacccctgcttgggggtcatggatggaaatgtcataatgcaaagagaaacagttgcagttctgccatgtgccaccaagggtaagatgaattggttggttgtatcaattaaggtgagctgtcaaggtggggtctggtgtctcaatcttgaggagataagggagagggggacctatttgggttcctggtggacttagctggcatcccgatggccatatatcaaggatcaggcatgtttagcgccccattgtgggctttgcacgatttcacgggcctatggctatatcaattcccaagttgggaacgagaggagtactcccctccggcgatatggccaacatggtatgcggccaccaaagtggggaataaagcatccggcgccggtgcggcacacacgacacaagactacaccacaccgaaggacaacctcttcatgctggtggtgcggcctggcgctgtgctatgtcggctgggnttg

SEQ ID NO: 613259 - DNA, 282 bp, Homo sapiens
taattcccgccaccttgggaggccctggcgggccagatccaccaggtgaggagttcgagacccgcctggcccaacatagtgaaacccgtctcccacttaaaccaccacaaactagctgggcctggtggtgcaggcccgtagtccccagctactcgggaggctgaggcaggagaactgcttgaacccgggaggtagaggttgccatgggcccaaatcgccacccctgcactcccagcttaggccaaccagagtgagaccttctatctccaaaacaaaaaaaat

SEQ ID NO: 613260 - DNA, 657 bp, Homo sapiens
  misc_feature (14)..(14): n is a, c, g, or t
  misc_feature (66)..(67): n is a, c, g, or t
  misc_feature (98)..(98): n is a, c, g, or t
  misc_feature (100)..(100): n is a, c, g, or t
  misc_feature (104)..(104): n is a, c, g, or t
  misc_feature (113)..(113): n is a, c, g, or t
  misc_feature (116)..(118): n is a, c, g, or t
  misc_feature (122)..(122): n is a, c, g, or t
  misc_feature (146)..(146): n is a, c, g, or t
  misc_feature (154)..(154): n is a, c, g, or t
  misc_feature (156)..(156): n is a, c, g, or t
  misc_feature (166)..(166): n is a, c, g, or t
  misc_feature (183)..(183): n is a, c, g, or t
  misc_feature (194)..(194): n is a, c, g, or t
  misc_feature (200)..(200): n is a, c, g, or t
  misc_feature (206)..(206): n is a, c, g, or t
  misc_feature (212)..(212): n is a, c, g, or t
  misc_feature (249)..(249): n is a, c, g, or t
  misc_feature (268)..(268): n is a, c, g, or t
  misc_feature (306)..(306): n is a, c, g, or t
  misc_feature (311)..(311): n is a, c, g, or t
  misc_feature (313)..(313): n is a, c, g, or t
  misc_feature (377)..(377): n is a, c, g, or t
  misc_feature (419)..(419): n is a, c, g, or t
cccagccccacccnggcccttcttggcattcttcctcttcacgcggcccgggcggccacccccgtnnaggagcgcagagagaagtcgatgtgcttttngnaatncaggcgganaannnaggncgggatgttcaccacctgcttgcngaccctgntntggggctggngggtcagcacgcgagcntggtggatggncttggnaaaaancagcangaagttttgggtctgcaggcgtctctctaagatatcntctatcttcaggcccaggntgtaatctagcttcatcttgccctcatccagcaccccnatgtngnccagccgccgcagcagggcgttgccttcgaacagacgccgtgggtccttctcatcaagcgtcanagttcccgggcggccttgcgggtcttggccagggtaaatttnaccctccagacctcacgtttgttccggagcccatactcgccgatcagcttcagctcttggtcgagacgagatttctcgaagggtctccgcggggtcacataagttttgcgacaaacccagctccgggccactggcatgttggctccgcttccccgtctgcgctcatggaaactcggaaggcccgggccaccatccaacccaaaccctagagaaaaagcacaccaccgcaccgcaccta

SEQ ID NO: 613261 - DNA, 801 bp, Homo sapiens
  misc_feature (801)..(801): n is a, c, g, or t
gtaggaactttaattatcacaagtccagaagaggtaaagtatacttgcccaattgccacacagcaagcaaggtggcctgtccaggatgtgatcttaggttggtctgactgcaggagcccccaccctcactttccaggtgtgttgtgatgtgggtgtcatggaacagatggtgatggactattggtaatgctgtgatgccccatggcactggtatgtgtgtcctgggagaaataatgtggtgtgcatggtgtgtgccatggacgctcaacatgggtgtgtcccctgtgccctgtgtgcctgggagaaaatgtgatgccgagattgatatgtgttgtgatgtgttgcaagtgtgtgcatgctttgggtgcatgctcgtgatgggatgtggggtgtcatgtgttgagatgtgcgtgtccttgatgagatgtgtgctttacactccatgggaacccgtggtcctattgtggggcgcatgtagtgtgtgtctactcaatgctttgtgcatgacaaaaaacatctgcggcgtggtccacagtgagcaggtgtcccaacagcggggtacagaagttaccatgtgtgtggtctcccccaaaagtcaacaggggggccaagatgcgtggataagtacccatgtgtgtgcacctgtgtacgtttcgactggtggacgaacacctgggctcaatgtggggcttgcaatgtttgggaccatggggcaacagcacaagatgcctgggtgggttaaccaacacagaaaattgtgactttgagaagtccttcctttgaaacccttcccagggattn

SEQ ID NO: 613262 - DNA, 783 bp, Homo sapiens
cggcctctcctcaccgcgaccgtccacaatcatacatcatctccatgaatttgttctagctgaggtgttgagcacacgcgcgatgaggagatcctattgactggaccaaggatcgagcccagctgtcaacttcctcaagtcgcctcaaagactaccgtggaagaccccatcggggaaagtccgtagcgggcccctgacggggtgagcgcgggttccagctggttttgtgcgttctcctgggcatcgttgtatgcgcagtggtagggtcccgatggtgttccagaatgcggcagtgatcggaacaagcgctatctactgagttggcgcctccggtaggggcctagtccctgggcccaggatgcctaatgtgaacttttgtttttgtacacgggattataaagagaacaagcaagatgacgattatttcgtgtaagcgtgtttcataataaatgagttaaagtattttcatacattttgcttcttgcccagaagggacaggtggcagagccgaggcttagggtctggcaccccccacagctggagacggaggctctcctggggaaaggtgtatccaggagcaggggtctgtgtctacagatgggctgtggcccctgtcaggcagctgttgacgctgggcggtcccccggcactctggggtgggctcctgggacgctggggaagtgctgttgtttggctggtgtgtggcacgtgtggcgacgggtgaggccgtgaactgggagccgcgggccgtcctgtgcaccttggctgcttcctggcagagta

SEQ ID NO: 613263 - DNA, 182 bp, Homo sapiens
  misc_feature (16)..(16): n is a, c, g, or t
  misc_feature (24)..(24): n is a, c, g, or t
  misc_feature (67)..(67): n is a, c, g, or t
tacaatagcatcaatngtgccatnacccagttctcttgcaacatctcccacctcagcagcctgatcnctcagctagaagagaagcagcagcagaccaccagggagctcctgaaggacattggggacacattgagcagggctgaaagattcaggattcctgaaccttggttcacacctccaga

SEQ ID NO: 613264 - DNA, 295 bp, Homo sapiens
  misc_feature (149)..(149): n is a, c, g, or t
  misc_feature (151)..(151): n is a, c, g, or t
tttacccccccccccccccccccccccccttttttcctttttttttttgggggttaggcccaaatttggggggaaagaaagggtttgggtctttgggcccaaaaaaaaaaaggcttgggacttttttaagggccccccccccccggggncnccggtttttttccaagggggggccaaacccccgggggtttaaattaaaaaaatgggctttttccccccaggggaatttcttttgggttggtttttttaaaccggaaaaccccccccccccttaaaaaattttttttgggggcca

SEQ ID NO: 613265 - DNA, 148 bp, Homo sapiens
gggcaacattgtgcctcgaccagaccctgtcaggactgtcgaagaagccctgctgcgatcatctgtgcctgtcatgcacaatgcttgtacctgctgtgcactgctgtgcgattttactgttgctgctggttgactgattgcaacatgc

SEQ ID NO: 613266 - DNA, 121 bp, Homo sapiens
tagaggatccccataaagccgaagatgtggtacgctcaagtttgcagacctgacagacgctgctgcccgcaacgcgggagctgctccgccaggccaagcacgaagccaaccgtggactagt

SEQ ID NO: 613267 - DNA, 486 bp, Homo sapiens
tcccgaggtcggtggatggagcaaggttgaacagactatatcaggtatagttgtgcatatgaggactcccataataccctcagaggaactcagatcccaatcggtattatccaaagacacgatcgtggccagttaggcagaggagatatttgcctttctctctctaccagttcctcatgggaggaggatgcgctggaggccggggaacgagtaacagagatgtgtaaaaggctagtaacccaggccttcctgtttagaatccaagttagagctttgcctgaccaaggcaggaccttacataaaatcaaaattgagtttgagaactgaaatgtagattgatcaggctgggcatggtggctcgcgcctgtaagtcccagcgactttgggaggctaaggtggttggaccacctgagttcgggaatttgagaccatactgaccaaattggagaaaccctgtctctactagaaatacaaaattagctgggc

SEQ ID NO: 613268 - DNA, 114 bp, Homo sapiens
ccatatgggtcatgatgcaggctccagttgtctcgatgcgtggtggcgtggctcagacggacaatcgtgctcgaactggcgcgcgtcgacctgcgccttgttcgaactcgaacc

SEQ ID NO: 613269 - DNA, 298 bp, Homo sapiens
agtgtcggcacgtggcttaatgccatgggtggaggaagcagctactcctatgacagtggtcttggcgttggaagtggcttcagttccagcagtggcagagccatagggggtggcctcagctctgtaggaggcggctgttccaccatcaagtacaccaacacctcctcctccagcaggaagagctataaacactaaagtgcttctgctagctcacggacacacagtcctcaaggcccaatctctgactgcagagccctctcctcatgtagcctttcggaaaagaggggatcctctaaag

SEQ ID NO: 613270 - DNA, 1352 bp, Homo sapiens
tcgccgtttcccattcgctgggcgagcaggtgtctatggcgagcacccgccttagtcgccgccgcgtaccggcaccgccaccgccaccgccggcgagtgctgtctctatggcgaggaggaggaggaggagcgcgagctcagcgacactaagtacgagtaaataaaggataagagatatattatgaaacaaatcttcaatcaatgtataacactttagagtgcttgagcgatctagacgtccgcttggtgcccatcactatgcccacgcgcgcaacttgtgagatcactagccataccgtcaacttctcgtgaacgtttgcggctcttgccaccttggactgcaacgcagattgacaggaacatatatgcgctcacagctatatccgacgaaatactaattacggtcgactactcggaacgaccgcagttttcccatggtgtgcgtctggcagagaactccgattggcacgcaatgccaggtagccagatgcctgtacgtatccacataccaacacgtactcgggccgcgctgcctcccccgctgaggaccgtgtgctcttaggccgacacctaacttcaggcccgtaggagacctgacaccagttggcactgcaccgtgcagcccgaccgggcacgcacactaccccggatccgagggcacaccctgccatacgcgcttggcgcccaaggataaaagagcttcatcgagcacgtcttccacgtctccgcaccgcggagccgaaggacctggctcagtgcccccacgagcaaccgttccttacatgagcagccgctaaccgttaagcataacacgagtcctaggggtaacttcccaagacttgtgtaacaggctccacatctcactggcaacgcggacagcggccaacgcgcccacatggtggacaacaatcgccgccaaagcctaacgtgaacagacgacgcacagcaattatccctcaccttggcagcttcgctagtggccacgacctcgggatttccccatcccattgcctggcccagcgcagcgggcgtcccacaaccgcggccgttctggaccacaagttctgccacgatacagcacggcggcgacatacacggaagcccttttaggcgcacactaactctcatcgacactccgcagctgtcagcatcacatgacacgccgcaggcttctgctacacgctgtcgacgtgcctggaatacgccagctgaacacgttctgccacccatcctccgtcgtagacccgcactccactctcccgagacatgggaccactgagacaccggggcctgcactatcaacacgacacacgagcgtgacgcaagcctaacctacgtctacgtcgtacacg

SEQ ID NO: 613271 - DNA, 147 bp, Homo sapiens
tacaaaagcagcagaaagctcatagatcgagcgtacaaaggaatgcccataaacatccgggagcccgatgtggtcagtcctcctgaacacagagaaaatgcagttgaaaaaacccggaaagataacagaatcatgaaaggcaaaggg

SEQ ID NO: 613272 - DNA, 339 bp, Homo sapiens
agtcgtactgatgacgaccgtttcgttgactcacctgtttaccacaccaaacccaactaaatatcatgccaccatgccagagactaaattatcctatactatcacggacacataaaaatcctgactaaatatatgtaatacttgtgcaaatcagaaggttctgttgcttctgcatgcgatgaaacctagaaggggcagacacacaagaccctctcccactacaggcaatataaggatccagtgaactgtatgtaacttaccaaaaagaacatttcttaaaaaaactgtgtctataaaagatggtataatagtagtacacaatacagccaagttaaaaag

SEQ ID NO: 613273 - DNA, 855 bp, Homo sapiens
gagcggacaggatgcaggcgacttgagacactaaaaagagaagctgtcctctcgtgatccaggcattgcctcgctgcgtttctatttctccaagacgggcatgagcgacttgtacagctcatagagcgagaggttgcgggctcgtatcgcgtatcgcttacgactactgacatctttggctgcaatttccccccatcgtcctctgattctcccacgatttgccatgtgagaacccgtgagaagtggagaatggcagagggcggcatgcctgctccatctgacgaccgatgcctacgttccctcgatgcctcggaccccaggaccgaggctcattctcggcaagcgtagtaaacattgtggcgattaatcttatgacacacatctgaatagaccgccgagtgtacccttttactagtgctacctcggtttaattcgcctcatagctttaatctaaccccaaatgtagcatagacgaacattggtcggcaccctagggtcatttgagttttccattgtgccttctccgaagaatccgcgagttaagctccatgcacgaagtttacattgaattcgacatccttttccaatagccccactttcaaatcttcttgggcaattacttaggtgcacggcgaaccagcggatggaccttgtccgaacatgttaacttgcaacctactctggttgggtaaaggtcttccttattccgagaacttgtgctcggaatcaaatcacttgcacacaacactaggtggagtcacacgtataatataaacgggcggtgaaacacacggactctccgttgcctgcgtcacacatgcgaagttacaactcaccacgttccccctcaccgtg

SEQ ID NO: 613274 - DNA, 118 bp, Homo sapiens
ccagttaaagcctttaatgctttaaggtgaaaacgaaatcccatccggttttcggtaagatcgccttctccgagcgtatatggacgcctcatgcatacactgttgtatgtacttggaa

SEQ ID NO: 613275 - DNA, 299 bp, Homo sapiens
cggaccgaaactgacatgaggcaggtggatcacctgaggccgggaattgggaccagcctgaccaacatggagaaacctcgtctctactaaaaacaccaaaaattagccaggcgtggtggtgcatgcctataatctcagctacttgggaggctgaggcaggagaatcacttgaatccaggaggcagaggctacagtgagctgagatcgtgccattgcactccaacctgggtgacagagtgagagagagaaaaaaatatatatatatatatgtattcttactgcttgggtatactaatatc

SEQ ID NO: 613276 - DNA, 451 bp, Homo sapiens
  misc_feature (37)..(37): n is a, c, g, or t
  misc_feature (45)..(45): n is a, c, g, or t
  misc_feature (71)..(71): n is a, c, g, or t
  misc_feature (125)..(125): n is a, c, g, or t
  misc_feature (235)..(235): n is a, c, g, or t
  misc_feature (258)..(258): n is a, c, g, or t
  misc_feature (299)..(299): n is a, c, g, or t
  misc_feature (302)..(302): n is a, c, g, or t
  misc_feature (346)..(346): n is a, c, g, or t
  misc_feature (364)..(365): n is a, c, g, or t
  misc_feature (370)..(370): n is a, c, g, or t
  misc_feature (424)..(424): n is a, c, g, or t
ggacaaaatgacttgagtccacaaggacacaaacacntgagtagntgggcagcccttggaagggtttaagngaggaagtaaaaatgatctggcgtagaaatttaagggaactctaggaagaggcntaggtttttaaaatcctgtctctttgtctgaccaaaagaggatgagcctctattaatttttaagaagggccagttgtgttttatgttctgggaacttcattcatttttanaatgggttgttgatcagggcagnaatttagaggagcggtttatgtttggaggtaattggtcctntgnccaaaaaaatgagatgtaagtctaaattaccagtttatcttttnggaaaaaaaaagtggacnntttantggaaaagaaaacagcaaacggcacagaacagttgaatagattaatgaaaaacnacagtaaaagctatggtaaccactaaa

SEQ ID NO: 613277 - DNA, 193 bp, Homo sapiens
ctatatggtctaaaagtgggaggaaccctcagttccaggaattgcccacccctttctgggaaaactcatgaataactcactgcttgtttagcatataagcaagaaataaccaaaacactagccaaccagcagccctctgcctatggagtaaccaatcattctaagattactttcttaataaacttgcctattc

SEQ ID NO: 613278 - DNA, 111 bp, Homo sapiens
  misc_feature (86)..(86): n is a, c, g, or t
catgcaggagagagaactgcaacaaatatgtgagtgcagatacctcttagggatactgatttcctatattgttgggtatatacctnatgcagtgggactagctggatcata

SEQ ID NO: 613279 - DNA, 335 bp, Homo sapiens
ctcgggttagctgttgcgcttcctattcacatctcctacaattagcactgttgccatccactctttcgcctttgctaccaggctgctacccatacgattgctgtggtgccgcgttgtgggcgatctgaacaacctccttcccctctgcgacattaaacggcgtgcattcgatagtgagcttggcagttctgcggctgggttccagaaggttagaagtgaggctgtgagctggacctccttccacgggacatgcaacctgcagggagcgggctgatgcgggtcccatggtctctgttgtcttctctgtccacctctttgttatagtatccttcagc

SEQ ID NO: 613280 - DNA, 202 bp, Homo sapiens
  misc_feature (15)..(15): n is a, c, g, or t
gaaaaaacaatgcgnatataaataaataaaaaagggaagggaacttgaacttatgtccgagcaaatgcaggtctagaaacatatgctagtctagattacttttgatttaaaacagaaaacacaaaaaatagtaaaatataaaacaaattaatgttttatagacccggggaaaagaattttcagccaaggtacaaaattttaa

SEQ ID NO: 613281 - DNA, 119 bp, Homo sapiens
caacttgctacagaaactcagtgaacccaaacctatttttttcactctgaatattgctgcagcaaaaccaactccaccaaaaagccaggtaacattaacaaaagaattccctgtatcat

SEQ ID NO: 613282 - DNA, 407 bp, Homo sapiens
tctgccaccgtttacaggcaatgagtccaagctccttagtatggcattgcgcatatatggcccgtgtgttgtgttctctgccaacctctcctgccccatcccttaacagacctcaccttgtactgtgtcattgaacctcagtgacctagatgaatttctgccttctccactctctgcacctaggtttatgtcctttctttggctgagtgcagcgtctggattcttaattgtctggcttagtcttatttgtttaacacaaattagctctcttcttccaggatgggatcttgctcctctagtctgagttaagtggttctacatattttcctggcaggaactatcatgtgtcaccatagtactcaccaccttctactgtagttgtcactgtatcccgctgttacctatgc

SEQ ID NO: 613283 - DNA, 200 bp, Homo sapiens
gcaggatgtatacagtggtgtgatcgtgactcactgcagactcaacatcccgggactcaagtgattctcccacctcagcctcccaagtagctagtactacagacacacaacacgatgcctggctacaattttttttgtagggagacagtctcgcttaatcacccaggctggagtgcagttgcccaactggtcgagacttc

SEQ ID NO: 613284 - DNA, 2262 bp, Homo sapiens
ggagggactggcatggtggggcctctagactgtggcggaggccgagccggtttagcgtatggtggtcgacgggtggcgcatctagtttcaacagaaagccaccgatgagttagcgcataccgtgcagccggcagcactgcggccgcgccatcggacactgtgcgtggcagccaggctccaccgcgagcaggccctcgagcacttgccctgcgccaagcatatgtgcgtgccgaggcttctggccttgtcgcccgccttgccccggtgcagccagacgcgaatggcgctgttgcgagtgcggcggatgagcgagcgtgtcctccgcgagtgcatcggtcgactcgttggcacaccgagtagcgtatcgaccgtgaggcggcgtctctcaccgacggcttggtcatcgtgtcgtctaggatagctccgacgtgcgtgctgtccttcactgtttccgacgtcgtgaccctggcgcactcgcctggcaccgtggctccgctacgtaggaggcgctcactgccgtttgcgcgtgggctgccccgcttttggggaccgaagggctggagctcgggtgattcctgtcgcgtggccgcaagccgttcggttgagtcccccttcgcctggcttgtctcacggcacggtccaccgcgcgttccgaagccctgtccgccgccgcctcggcggcattcgaccccttgcgctcgcaatcgtgggcgtcgccccccggcccccgccttgtatcgccctcccaccgtgactgcctggacgcgctcactttgcgagccgccctcgtggatcatccctgagcgcgtccactgcgttggcgctccacgggcgccccgctcgctcgcgcccccatgcgccattgtccgcggcgccgctatagttccctttttgcacgccctgtctcccacccctcccctgtgccggctctccgcgcctccctcatcctttccccagctcgcagccactgccccggttccctgccaccgtcgccagccgcctggcctcgcacacggcctgcggcactcacccggtatatgcctgcctttttccccacctctgcttcgccctcacagcacacctgcttccggacgcgtccctgagacctcgcgagcggtccttcacactcgacacctgcgccacccttgcgcctggctctgagtccctcactcctatactccgtcctgctcacacttgccgcgaccccccctcggcctcctcgccacaatccccgtccgcctgcccccccccgctctccgctgtcctcccgcctcttcctcctgctcctccttgcttccacccgacggtcactgttcgtcgtggcgccctccttaccctccacgcccctcctctccctccccccgtccctcttccctcctctccctccctccccacccgcctctgttctcccagcactcacacactaccactaatagtcagcacaccattacacttcatcctcatccctccatactacctcttaccacttctctccactcgtactatctcttactatcctatttccactaccttgtatctacatcacttctccatctctatatactctcttcactccttctactctacttcctactctccctctctccttctctgctctacttttcctcttactcattactcataccatatctccacctctttcacctctctcccaccttcgctcccctctcatcgcctcccactcccactccttcaccctctacctcctccaccttcactacccaccacactccacactctaccagcagatctccccattcactgcaccctcactcgctcaccacccactcccactccctccccacccatcactctccttcactcttccctgctcactccatccccccttcctcctctccacagtcaacatctaccctctgcctcttcccccccctctactacgtctcccactactactacacactccacactctccattccatacccctcgaccgccacacacgtcctgccaccatcacctcctcccatcatccccaccctcaccctcccaaccaccctgtactcaactcatcatttcttcacttcactctctcctcactccgcctcttacgcttccttcctctcacgccagccatcatccggcactcagctcgcctcttacctacgcaattccatcaatcaacagcacctagcacacgcacccacctcacctcgacccactactcaaccacgccgccccattcctcccctccccaccacccatctccaccatcctcacgt

SEQ ID NO: 613285 - DNA, 183 bp, Homo sapiens
ccatgttgggcaggatggtctttaactcctgaccttgtgatccacctgccttggtctcccaaagtgctgggattacaggcatgaaccaatgcgcccggctcaacttggtcaattcttgttaattcttttttttttttctttttttttggagacaaagtcccacttcggtgaggtctgggatca

SEQ ID NO: 613286 - DNA, 222 bp, Homo sapiens
aatggcctgcagaataaaatcgttgattgaggggatctgaaggtttgccggggttgccgcacggttcgcgtagaccgaggtccaatcaacggcgcgctcgacagtaaattgtggcaccgtggcattgctcaatgtcatcgagcgtgccagggcgcgtcgcatgccggataacggggacgaaccggatatcgcgccagccgatgttctgattgcagttcgcgc

SEQ ID NO: 613287 - DNA, 290 bp, Homo sapiens
  misc_feature (204)..(204): n is a, c, g, or t
aggtcggctatgttgcccaaggcaggcagatcatgaggtcaggagttcaagaccaggctgaccaacgtggtgaaacctcctctttttctaaaattacaaaatttggctgggcgtggtggcgaaccgcctgttaatctaagctactgaggagattcgtttgaaacctggggaggtgggagtttccagtaagctgaggtcgcacgnttttcctccagcctgggcaaccagttaaaactcttgggggggaaaggaaaaaaaatgttttaaatccttggttttggggggttcaa

SEQ ID NO: 613288 - DNA, 342 bp, Homo sapiens
cacgaggcatactcctcgttctgccagtgacagaagctctccagggaccgctcaccatggtgcccaatggacaacttagcgggacgttgtcgtagcaggacaagcttggtcacttgaatgttaattttaatccccaggctctggtgctgaaacatattgtataccatgttcatgacggtcaggatgaacctctgggcggcctcggccccgtggtactgcaccatgtcggcgtcggccaccaccagggtctccaccgtgtgctcgctggtgagccggatagcgttcctccgctcccgccagtcccgcgaaggcctgccccacgtcggcttcttcttttctgtt

SEQ ID NO: 613289 - DNA, 192 bp, Homo sapiens
taaagctaaaaaaaaatttggggaaggttataataaaagttttttgtggggcccataaaaatgtcccccccccaacaagtaaacttgtgaaagtttaatttggaattaggggaagctgttcctttgaaagcccaaatattttttaagttgtaaagccagctaataaaatgccttagtttgggccttatccca

SEQ ID NO: 613290 - DNA, 207 bp, Homo sapiens
tcggcacaggggcacatggttcctggcggctgcacacttcggagatgcttgcaaggcccgcagcggcggtcttcacggctccctgcctatgaggactgggtcgcagtttggactggcaggctacttcgcgaggaacagagccgaggtgagctggaagctgctggcaacataagtatgtggcccggggctcctgccaaaccctgcctc

SEQ ID NO: 613291 - DNA, 101 bp, Homo sapiens
ttgtcagtgttgtgttaagtggttatctggatggtatatggatgagggtcttctggcccccattggcttttagggactggtctggcttcttcactgacaac

SEQ ID NO: 613292 - DNA, 752 bp, Homo sapiens
cttggaccgacttgaggagtttcccaacacctgtaaaatgacgcgcgcaggagctaggagaactatcacgaccagttttacaaactatgcagctacaacttggcttgaaactgtcggactatgtcctgtccctagcagcttgctacacattgatgacgtctcccccgcatagctcttccaagggcaagcttataccacgacatcttgacatcaactctactccgacaccacgcaacccacacgagcaaactccagcattctagcatgctgtgcaagcctacaggagcggctcacgatgactataccactgccttgtcagcacacactctgtcaacacggccctgaacactgctttcccccaccaccccagacaaacccaacgcccaccacgactgactcaccacggctcctacgccacactaccccccctattcgcgcacacatcaccacccattactcctcacctaccctcagcaagcagttacacacttccacaacctacccacctccaccgacatcccacattgcctactcccaacaaacaacacctactcacaacaccactctaccacatccccacactccaggccaccctacccccgcatcttgtctcacaaacacaatcaaccaatacctccaccacacattcgatacactcaacgcccgcaacatatccctctatcaaactctatctcgtacctcctactgtatacactccctcttctcactaacatatactatattgataaccc

SEQ ID NO: 613293 - DNA, 187 bp, Homo sapiens
agatcgagccggaccacatgattgctcaacgctcctcccaatgcctggcaccactagtctactttctgtctctatggatttgcctactctggacatttcatatacatggagttacataaaacatggcattttgtatctggcttctttcacttaatgttttcaaggttcattcaggctggagcggtgg

SEQ ID NO: 613294 - DNA, 1051 bp, Homo sapiens
ctggccggttctgagggacgtaatcctgtccgtcccctgtcttggtgaaaaatgccgctatgagcccgcatgcctcaagggctcgaagtgtacctaaccttcgagccactattcatcgtgaccgccgagtccactggggagcgcccatactcggctacatgccagctatctggtcggcctaattacgtgcaagcggagtaacctctgctaacggggtccgcctggcattctgcaccttgtctggggaaagcaacagccagtgcacggcgggccctcgttccgggcggcaggagaagatcacccggaccaaggacgaggccctggagctgatacaacggcgacatccagaagatcaagtcgggagacggaggacttctgagtctctggcctcacagtgtcagcgagctgcagctcagccataggtccaggggagatcctgggtgcctctctagtcagtaggtcagactgcagaagtccatttgaagtacgcctcagtttgcgttgcggacgggggagatgagcgggcccgtgttcacggattccggcatccacatcatcactccgcactgagatgaggcgtggaggagcccaggcctggcctcggggcagggtcagggcggctaggccaggcacagctcccccttgcccgccagccagaggcacgaacccccgcactccgtgccaccgtcacacagtatttattgttcccacaatggctgggagggggcccttccagattgggggaccatggggtccccactccacggggtccagtccccagttggggtctgcgatcacgccagagttctccctgtaatggaacttgacttcagcacgagggtgggacggctcccagactccagggcagtgtggtgggaggggtgttccaaagagaaggcctggtcagcagagccgcctccagtgtccaccaccacggtgactggaggcagactcgagggccgaattgtttctagcttaggcaacgctcccatctgttcagtcgcaaaggtgaacactcatgcggcataacaccgggcctctgagcaagctt

SEQ ID NO: 613295 - DNA, 395 bp, Homo sapiens
tccttcatatcactcctccagtgagacacacaacagaggcagtttttattattactaaatcttgcaaagtaaatctgtcgtgaaattaaataattatggccctacttcaggtaaagaaatcttctacgataaattcaactacatttatgaagattaaattcaaatactgcatcataaatttgaaaactccttattgtattgtgttttcttttcactggtaatctaaaccaagtaatctatattatctaaaacttcaataaataactgactttcttgctggttttaagagttaaaacatattattagctcaattcttgtcgtcaattgtcttattaatttttggcatatgtaaaattagtcatatgatcttaatacatctctagtacatatagaat

SEQ ID NO: 613296 - DNA, 371 bp, Homo sapiens
gagatttatctctttcacaaaacaaaaccaaagaagggcagagcatggtggctcacacctgtagtcccagcactttgggaggctgatgctgaaagatcgctgaaggccaggaatttgatacaagcctgggcaacacagcgagacccaatctctccaagaaactcttaaaaattagctgggcccattggcacacatctgtagtcccagctactcaggaagttgaggtaggaggattgcctaagcccaggagatcgagaccatcctggctaacacggtgaaaccccgtctctactaaaaatacaaaacgttagccgggcatggtggaggacgcctgtagtcccagctacccaagagccggggatgggtaccga

SEQ ID NO: 613297 - DNA, 151 bp, Homo sapiens
gaggaacatacctctaatctccgggaccctgctgagctactgccttgactagccctgacggtggaaaaacattatgatggtcaacatcggacacacattgctaccttgccctggccaaaggaggcttatctgatgaccatgtcctcatcct

SEQ ID NO: 613298 - DNA, 633 bp, Homo sapiens
agcacgtaggagggcaattgtgcccatcgggaagattctgcgggtgttcatctgaggctcagagcccaggtttctgtatgtcccatccaaggccgagtaatgctccacacattcccacgagggtagaaggatgcagatgtcatgatgctcatcaagaggttcaccctatctggcgctgtaggttggatctactggagtgaggaacagggtgtagaggattggggcgctgggacaggggcgctggcacattcctcagatgccggcatgtcatcctggaagtactcagcctgcgagtgctgccacagacgcaggttcccgtcccacgaactgctgacaatcttctcttcaaaggggtgccaactgacgtcgcgcacgcaggccatgtggttggtcagcttcttcacaatgtgcccccttagacggtcgcacacaacccctttgccagtggagcagcctctgtagatgaactgctggccagtcctatgaatgggggacaaccgccaccgcatgagggtgtgcagcactccgtggcccttgggcacttgctgcccccgatagtcccagttctgctgtgtggcagcctggcgtgaagcttccatgccctcccggctgcaagagcgtcgaatatcccag

SEQ ID NO: 613299 - DNA, 332 bp, Homo sapiens
tgcctcccgtaggagtaaggtccgtgtctcaggccccttgtggccgtttaccctctcaggccgtgtaccgatcatcgctttgttgagctgtaacccctccaactagctaatggctcgcaaagccctctcacagtgcttatagctttcataattctaagatgccttattatcatatatatcaggtattagcattcatttctaaatgttgtccctagctgtgaggcaagttctttacgcgttactcacccgttcgccacccaaatctaagttataaacccaaattcaagttgacttgcatgtgttaagcattctgtcagcgtttatcctgagcg

SEQ ID NO: 613300 - DNA, 156 bp, Homo sapiens
tgggactaccatcactactaacatgcttctgtacagcaaaggaaacaacataataaaatggcagcctatggattgggatacccagtttgccagccatatatctgataaggtattgatgtccaatagatataaagaacatatacacttaatagtaga

SEQ ID NO: 613301 - DNA, 886 bp, Homo sapiens
tcagtgttgtggatccgttgaccaattgcaccagttttatccataatgatggatttaacagcatgacaaaaattattttttttttggtccttgagggagattaagatgccttgaaatggtctagggtgtcctggtacttagaaagtaagagctctaagttacctttcctactttttcctttttttattaaccagatatcttcagttaaatggcaagagaacattttactggtggtcacaactcatgtcctgggggttggatggttcacaggatattccaaaataaagggaactctgggaagatttcatggaggataaatggccataatatgatgcaaacggtgcttctctatgataattacaatacaagggttccattcagtggcagcatatacaatagtgtaatttaagtctaacacagttgaccctattttttgacactcccatgtttaaaattactctgtggaaaaaaaaaaccctatatggtttacgggtgcacctaagagcctttttcataaccaggtcttttggtcggtggttgggtcctaacattttattttatgctattttagggcctctttagcccgatctcatagctgcgtccttcttgtatacttttctgatcttcccattttgtggctggaagttggatttggctcttcttgtgtggaccacacggacttctttatcctttaacctatggataccgggggaggctgtagacttttggccattgggcgtctggcaccggttcctatgtggctttataaagggatagctttggaggaagcctcgtcggcatagctctgttggtgagccacaccttggggaaaaaatgcggtctttgcgctgtgtggtgcgtcgtgtatcgtctctcgtcgctctca

SEQ ID NO: 613302 - DNA, 228 bp, Homo sapiens
tttttaaaaaacccccaaaaaaatgaacttaagatttaaaaactgttttccttggtcataaaaattttttttaaataaaagccttgggattataaaaatgtaatccaacccccaacataaattccttttccagtcccagttttttcaactggtgtttaaaaggagtcaaaaattgctaaaatttttttttcctgtgcaaacattcaattgttttttttttttcctcca

SEQ ID NO: 613303 - DNA, 208 bp, Homo sapiens
tgttgtatgcacatactcctaagataggttcagtcttactacctattaagttaggttgcagtttgtccacagggactcaaatctagaagtacagagtccttcccaggccatatttagattcacgtgtaacagttcctattatgacctcactgacagtgtctttttctctgaattctcccttcttctcaacagcttatccaattgtccg

SEQ ID NO: 613304 - DNA, 217 bp, Homo sapiens
gtgtcggcgacctagaggatcccccctacagagcacaggctcagcccacgcactcacagctgtttgtaaccatatctcctcggtacgtgctgtggctgtgtggggcattggcaccccaggtggccctcaggatcctcagccaggcctgactgcccatgtggtgtctgcggggaggcggcttggggtgctggggtccggagtaaccatgatgctgaag

SEQ ID NO: 613305 - DNA, 882 bp, Homo sapiens
  misc_feature (4)..(4): n is a, c, g, or t
  misc_feature (73)..(73): n is a, c, g, or t
  misc_feature (82)..(82): n is a, c, g, or t
  misc_feature (116)..(116): n is a, c, g, or t
  misc_feature (139)..(139): n is a, c, g, or t
  misc_feature (166)..(166): n is a, c, g, or t
  misc_feature (169)..(169): n is a, c, g, or t
  misc_feature (172)..(172): n is a, c, g, or t
  misc_feature (176)..(176): n is a, c, g, or t
  misc_feature (186)..(186): n is a, c, g, or t
  misc_feature (229)..(229): n is a, c, g, or t
  misc_feature (250)..(250): n is a, c, g, or t
  misc_feature (255)..(255): n is a, c, g, or t
  misc_feature (303)..(303): n is a, c, g, or t
  misc_feature (307)..(307): n is a, c, g, or t
  misc_feature (312)..(312): n is a, c, g, or t
  misc_feature (328)..(329): n is a, c, g, or t
  misc_feature (349)..(349): n is a, c, g, or t
  misc_feature (377)..(377): n is a, c, g, or t
  misc_feature (406)..(406): n is a, c, g, or t
  misc_feature (421)..(421): n is a, c, g, or t
  misc_feature (442)..(442): n is a, c, g, or t
  misc_feature (481)..(481): n is a, c, g, or t
  misc_feature (497)..(497): n is a, c, g, or t
  misc_feature (528)..(528): n is a, c, g, or t
  misc_feature (560)..(560): n is a, c, g, or t
  misc_feature (569)..(569): n is a, c, g, or t
  misc_feature (590)..(590): n is a, c, g, or t
  misc_feature (877)..(877): n is a, c, g, or t
gggncactatatcattccccttcagggttgcagccaacaatggaagctttaaaacctcttccacacaaatgcnacccctaanatgaaagactttaggggttaaataaaacaagtgngagaccatttacttacatcagtncggtttatagacatttggctcatatcngantgnctgncttgtttccnatgtgaaaaccaaattaaaaataacttgatcactgtgcttcanacacaactgttcacatatcanattcnagctccagccatgtgaaattcaacttttctgtgtcagagagaaaagcnattnaggtncgggggcgttgggtcnntcatggacagcatgggaatntgggtgggcggggatattccagggtgcnacaataagtggctttttgtcttacatatnagtgcactgaaacanaatactaaatttgtgtgaaanataggtatgagagtgttccgttttgtccaaacctattanataccttccaaaagtntcataattcagtcctagaaattcttggagcngtgaggatatcctgttcagggatgtggctgcnacgaaagcncccagggaatttcagagaagnatatatataatcttctaattcaaaagttgattgatttgccaaatgacgcagcaagatttgcttctctaaaagcttctgataaggtcggatgtgcatgacagactctagctatatcttcacaggatgctccatattccaaagcaagagcagcttcatttaccatttctccagcacctggtccaagaatatgtgctcccagtactctgtctgtcgatttctgcccaaggatcttcaccatgccatctgtgttagcatttgtcttagctctgctgttagcgcaaatgggnatttc

SEQ ID NO: 613306 - DNA, 977 bp, Homo sapiens
  misc_feature (14)..(14): n is a, c, g, or t
  misc_feature (259)..(259): n is a, c, g, or t
  misc_feature (375)..(375): n is a, c, g, or t
  misc_feature (787)..(787): n is a, c, g, or t
  misc_feature (793)..(793): n is a, c, g, or t
  misc_feature (974)..(974): n is a, c, g, or t
tggggggttgtttnggggggtcaccctgtagctcttctcatgatagccctgtgaggtgtgtggtggagttgatgatggagagaggagtggcgatacatgcattgcgagccatgacaaacaagcctatccgcccgcaacacaagtgcccctcagcatactcataacacaataaatcctgccactcacatacatacctactacaacgatcacgtctaaaaaacaatctagtgcttcactttgtcgtcgagcggcgaatcanatcaacaccactagaccgcccgaccaaacaccttacattttcttttattgtttgttgattttatcgtttttttggttttgttggtggtgtggtcgattggtttgggtcgggtggcnggtaacggtatctgattttggctgttaggaccgctctccgagcaagggcggagcacgaaacgagacgcgaggcggagcgagaggctctagcgcgcctcgccacgtcacgagtggacgcgtgatactgggtggaagtcgtcatgttgtcgtgttgtgacactcactcactactctaacagcctcattacactccaccaccgccgctatgacaacaaacagtgggacaacaagtaacaaatgagaactcatatattgtataaagaaatagggagaagatgcgcgacatacacaattgagcgttattgaccatccgctcatacactatctccgcgtagcatgatatttcttctaccagacaccgacaataagggagacgagtatgagaacaagtaaagcagtcacatgcgtgtgntgattncggagggaaccctatacgtgcgatagtacacatgtacagtcgatcgaggttacgttcaaagccagcagcccaccatctctttctctatactccctactgcggtagagtgaggtggcatgagtgtgaatgtttagtatatgagtcgaggagcagatccatgcttccacgtcctacaactacnaat

SEQ ID NO: 613307 - DNA, 501 bp, Homo sapiens
actattcagccataaaaaagaatgagatcctgtcatttgcaacattatagatggaactagagatcattaagtgaaataagccaggcacagcaagacagacatcacatgttctgacgtatttgttggagctaaagatgaaaacaactgaacttatagagggtagaaggatgtttaccagaggcgggaaaggcagtgagggcatggtgagggggaagtggggaatgttaacgggcacaaaatgtagaatgactaagacctagtatttgatagcacaaggttactacagtcaataataattgtgcattttaaaggtataattgaattgtaacacaaaggataaatgcttgaggttatggataccccatttaccctgatgtgattattagacattgcatgcctatatcaaaatatatcatgtaccccatagatatatacacctagtatgtacccacaaaaattaaaaataaagtaaaatttcaatgattaggaagaaaaaaaaaa

SEQ ID NO: 613308 - DNA, 447 bp, Homo sapiens
ggaatcgctgttatgtgatagctcagttcattctcactttgaccctgtgaacatggggttattatgaatcaggtgtcattgagatcaggatcaggagcctgtggtctgttgccaaataattaagagctctctgggctcagttgtctcatctgtagaatgggctaataatagtatccatcctttaggattgttgtgaggattaaagtatgtgaaacatgggaagtgttatacaacagtacttggcacgtgataaattgctaactaccaacaattgttatttatcactgaaatagatctactgtagagatcttgtgcaagagttgaaatgccatgatagtgatactactcaccataggctaccaccaaaccatctcccatgtggtatttctactccctgacatatgtgtgaagcggtgactgtggaccagacaaattgctagcccctca

SEQ ID NO: 613309 - DNA, 346 bp, Homo sapiens
  misc_feature (2)..(2): n is a, c, g, or t
  misc_feature (76)..(76): n is a, c, g, or t
  misc_feature (84)..(84): n is a, c, g, or t
  misc_feature (108)..(108): n is a, c, g, or t
  misc_feature (124)..(124): n is a, c, g, or t
  misc_feature (140)..(140): n is a, c, g, or t
  misc_feature (142)..(143): n is a, c, g, or t
  misc_feature (153)..(153): n is a, c, g, or t
  misc_feature (162)..(162): n is a, c, g, or t
  misc_feature (201)..(201): n is a, c, g, or t
  misc_feature (217)..(217): n is a, c, g, or t
  misc_feature (238)..(238): n is a, c, g, or t
  misc_feature (251)..(251): n is a, c, g, or t
  misc_feature (291)..(291): n is a, c, g, or t
  misc_feature (318)..(320): n is a, c, g, or t
  misc_feature (329)..(329): n is a, c, g, or t
cnttgatcgaaggtagttttggacagaaccgataagagcgagtcgaagcactgctttcactaattggtgatataancccatatnatttccacgtcagttaatcagcanccacagtccataatanctgaggaatggggtgnanncaaataacanataattaanagccattttattgtcaatactgactgtcatacgactggnacacttggaaggagantcgcaaggctccccacgaggncagattccgggangtgcagggggcggggtatctgccataggcactcgtttcgnggcattgtcttctttctgtccggctgnnnaagaggggncgcagggtccatatcta

SEQ ID NO: 613310 - DNA, 171 bp, Homo sapiens
gtacccagggatctagcttggcattatccccatctctataacactaatgagtcatagatttagtctctttacattagttccgatagtttctcagagtgttttatttatgtgttatcattcttgaaggttgatacttggtactgactggcttatttcagaaagcctgtcttc

SEQ ID NO: 613311 - DNA, 424 bp, Homo sapiens
  misc_feature (23)..(23): n is a, c, g, or t
  misc_feature (45)..(45): n is a, c, g, or t
  misc_feature (51)..(51): n is a, c, g, or t
  misc_feature (246)..(246): n is a, c, g, or t
  misc_feature (293)..(293): n is a, c, g, or t
  misc_feature (311)..(311): n is a, c, g, or t
  misc_feature (356)..(356): n is a, c, g, or t
  misc_feature (362)..(362): n is a, c, g, or t
  misc_feature (383)..(383): n is a, c, g, or t
  misc_feature (406)..(406): n is a, c, g, or t
aggcacaggactgggatgctctncacccaagcggccccgactacngggganaacaagatcggaggccgtagtaattgtggtgctggaaggggccagtctggagacagtcaaggtagggaagacatatgagctactcaactgtgacaagcacaagtctatattgttgaagaatggacgggaccctggggaagcgcggccagatatcacccaccagagttttgctgatgcttgatggatagtcccctngaaccgagcttggcttttcttacaaggtttattatcccttacacagnaaggaatgttcttgattngaagttgaatttcccaggaccccgaattttcccagaaaccttttntaaccnctttttttttgggcctccatngggtttcaaatttttttttcaanaaagtttcagtttttttt

SEQ ID NO: 613312 - DNA, 363 bp, Homo sapiens
  misc_feature (62)..(62): n is a, c, g, or t
  misc_feature (349)..(349): n is a, c, g, or t
  misc_feature (360)..(360): n is a, c, g, or t
tcatagggtcggtggggtgacacctgtagtccactgaggcaggagaatcccttgaaccaggngtggcagcctcagttttcccgtttccttgacgcaggcctagcttctctaaagatttgaaaaggctcctttattttttattttttgagacagggtctcactctgttacccagactagagtgcaagggcacgatcttggctcactgcaacctccacctcccaggctcaagtgattcttaatctgcttcagccttccgagtagctgggactacaggcgcccaccaccacgcctggctaatttttttttaaatatttttagtagagacggggtttcaccggtgttaaccanggatggtctcngat

SEQ ID NO: 613313 - DNA, 144 bp, Homo sapiens
  misc_feature (6)..(6): n is a, c, g, or t
  misc_feature (37)..(37): n is a, c, g, or t
gggggngttttagggtcttagtgtggtcttcaccagngtggtggcccagcagttgtgctgcgggaaggaatagaactgttgcaaatgtcaacccaccccctcacagagggctttattttctggtttgaaggaactgttccttca

SEQ ID NO: 613314 - DNA, 961 bp, Homo sapiens
atactagcatttaccatctcacttctaggaatactaggtatatcgcttcacacctcatatccttcccttactatgcctagaaagggaataactactatcgcctgttcattatagcgtactctcgataaccctcaacactccactccctcttagcgcgatattgtgcctattgccatactagtcgtttgccgccgtgcgaaagacggcggctgggacctagccctactagtctcaatctcgcaagcacatatgggcctagactagcgtacataacctataactctactccaatgctaaaagctaatcggtcccagacagattgatattactagccagctgtacatgactttccaaacaatgtcatcataagtgttgaatcgaatcacaatcctactccacagacctaattgattagtcatcgagtccctgctactattcttttaagccataagtcaactaaacaagcctatttagtctgtgtccccaacgctttttccatgcccgatgcaccacttagaataagactccctcttcgcttacattatctcagactgaaacctgggacttcgcataacccgcgcatcaaacaattctatagggtcaaatgctcatattgcacagctttagttcccagtgtggagaccatgtttacttcacgggaaaatcaacggttaggcaactccataaccaaaggattcaaagtggacacccatggtttttggtccgttccgtccacatgtggttggccacctggccggttaggtacacccagggttgatcagagtcacccacaatatacagggggcgagtggattggacagtggtcggccatatatgtaggggttgaccactttgaactaattgggacgcattgcggacgagtggttatccgggaaagagagaagaacgtcggtgaggtaaggagacatcgaaggaggagaggagaaggaattatttaacc

SEQ ID NO: 613315 - DNA, 506 bp, Homo sapiens
ggcttaaaaaaatttttttttattacacacctaacttttgacctacttaagaacaaaagaaaattaaacctcatacaatatttaatcaacgtcctaattttaaggttctttttgcacctcccccctttagggggcgtttttaaaaaatcccggtcggcccttttcctcccttctgtttttggtaaaccccgtgtttttcctgggcgatcgctttacggatatttggccttttcccccctatggggcgtcgaataaaaacccgcggcggggggtttttccaacctgtgtagggaaaaatctgtggaggcaacattgtatagcggtttgttttattaaaccttttgcgaaactggtgggttaactaaaaaattttttttccctaaaacttttcaaaattttgggccctttttattgcaaaaaagtaatcttcgacgttaattttttttaaacacgctgggaaatatttgcaaaaacaaaaaaatttttacccacattgccgaggccgg

SEQ ID NO: 613316 - DNA, 691 bp, Homo sapiens
gacacgcgactcccacaaggttgcatgcggagccgccatgtcacgagagcctagttccggccagggtcgccccggaaagccatgagcccagccaatcagcgccccggaatgcatccagtagcccatgtgtcggtaggaaagacgccactggatcgtacttggtctcactcagaagtaggacgtccttcaactagtgccatgaaaggaggctgctggcaccggcggcttttggacgcaacgccaccgctggccacagtgggggcaacaattcgagacccttttatgccaggtgaacacttcaaatccccatctatttcgcacgaaggggacactcacagtgtaacagttgagagggacaccgtgcagaaacctttgcagatatcctggccgagtcttgtcccggcgcgttataaacggaatgtgcattctgaggcccagactatttgtggcttgaaccacaacccgacggctgggaaacgccggaagaacctttggtgaatatttgcccagttcctcccgcttgagcgcggcgatgaggggagcgcccatggggccgacttctggaaacgtgctggcttggacgctgacgttggtccataggcgaagagttgggcttacaccttacagcttgccatggtattgacagatggtgaccttccaggagttaacacgggattggtttccatacaca

SEQ ID NO: 613317 - DNA, 201 bp, Homo sapiens
ttttgtaattttagtagaaccgggttttcaccatgttggccgggctggtctcgaactcctggcctcaggcgatccgcctgcctctgcctcccaaagtgttgggattacagacgtgaaccaccgcgcccggcctcaatatgttttcaacttaacggcattttcaaatacgatgggtttatcaggacataacctcctcctaag

SEQ ID NO: 613318 - DNA, 183 bp, Homo sapiens
gatagacgagtttctgatgttcataaagatggactgaattccactgactcacatgtggttgcccgacactgagaagttatgatgcagttgaaatcatccgcaaggttgcagtgcctcctcgccctgtctagaccacacacacgagtatatgacagcggccaatccgaacttgttcaaactggc

SEQ ID NO: 613319 - DNA, 507 bp, Homo sapiens
tatgatgcaccatgttagttatagaaatgcactgacttgagtgtgtactatacctgaaacttgttgaatttcactattctaccagtatttgtggaatttcaggatttttacacattacatcctgtgtctgtgaacaaaattttgtactttttcctttccaatttgcatgctttttattgctttctcttgcctaattattctaagtagaaattccagtgctctggtgaatagaagtggcaggaagagaagttgctatcttattcctgatcctagaggaaaagattttagttattcaccattcagtatgatgttagctgtgagcttttcatgtataatctttatttactgaggagtttccatatattactaattctttgagtgtttttattacaaaaggtgttcatctggctctggaaccagataaatgttgacctgatagaatggattggaatgtcctcttcttgtgttagaggatttttggaatattttgcagaggattggcattaa

SEQ ID NO: 613320 - DNA, 408 bp, Homo sapiens
  misc_feature (124)..(125): n is a, c, g, or t
  misc_feature (402)..(402): n is a, c, g, or t
aaaaaaacaaaaacaaaaaaaaaaaacctcttaaaacaagtacagcaagaactttgagggtctttgctaagacagcagctggcagcttcaatttggagtagggtatcaaaggcaactgtgtatnnggaatagttatataactggtatccaatttctgagatgattttgacttaaacattgtgtatttcccagcatactgttggtttttctaattatgtgggaaattatgttgcttttacttttttttttgctcattgcccagcctagcgtgcagtgctgcggtctcagctcactgcaacctccgcctcccaggagaatcgctggaacccaggagacagagattgcagtgagctgagattgcaccactgcagtctagcctgggtgacacagcaagactccatntcaaaa

SEQ ID NO: 613321 - DNA, 125 bp, Homo sapiens
gttccttccctagttccttccctagttccttccctccacaatccttctcccaactcacgaaagacaccatcatgttcaagaccaagcttcacgtctccggcaccgaaggcaccccctactacgtt

SEQ ID NO: 613322 - DNA, 333 bp, Homo sapiens
  misc_feature (124)..(125): n is a, c, g, or t
  misc_feature (327)..(327): n is a, c, g, or t
aaaaaaacaaaaacaaaaaaaaaaaacctcttaaaacaagtacagcaagaactttgagggtctttgctaagacagcagctggcagcttcaatttggagtagggtatcaaaggcaactgtgtatnnggaatagttatataactggtatccaatttctgagatgattttgacttaaacattgtgtatttcccagcatactgttggtttttctaattatgtgggaaattatgttgcttttacttttttttttgctcattgcccagcctagtgcagtgagctgagattgcaccactgcagtctagcctgggtgacacagcaagactccatntcaaaa

SEQ ID NO: 613323 - DNA, 166 bp, Homo sapiens
aactaattcagtacaggtacttgtatacagtttttcctttttccatttacaaaatgacgacatttctgttaaatgaaacctgtatcgtataatgtatttttattttacccacgcagaatgttgttattttgagcatatagaactcattgcagtgcattggttatta

SEQ ID NO: 613324 - DNA, 371 bp, Homo sapiens
gcatgctcgcatgctcatgcggctcacatttctggtacagctccgcgaatacagagtctcctgcacaggtcattcgctatgctacaggatgtcaacgacttttcctgtcctctgcacctaggttccttaacacctctacaacagttgtagttgcctcatcgtgtactttattggtgtactgacctaagagcgcattctgcaatgtgtcatccgctagctgctccaacagctcatccgttttgtctattcaaccctgaggctcagccacaggaggtttgcattcctcgcacgcatgggcacagcattcatcagtagccacagcggcccagcccttctcaacagtgctctcatatgtcttggccagtctcacc

SEQ ID NO: 613325 - DNA, 426 bp, Homo sapiens
ttatcacgtatcctagtgaacacacagctgggatgggtgtagagttgagagctggcctggaggaaaatcaggccaggcgaccatcctgtttggagcctctttctgctcctgaaggccacccatgcggggcccgttttggcctcagatcccttctttgcgaaaggaaggagctggcttcagtgtgaggagctccctcccacactctgacaggacaacggagcccgtagcctcagcacacagtgaaggggcaggccttccccatgtagagctaactcacacatctgcaaatgtttcccagaagaaaaatgccatttctcctccaattgttaaccaaaattactgtaggccgtggggctctggacatatgccctcatgccaagcttatctcggagggaggcagagaagaagaggggtgggataccaggg

SEQ ID NO: 613326 - DNA, 678 bp, Homo sapiens
cgcaggtcgcgcggcccgcctccttccccgcccagcgaagctctctgaccacccctcttggtctagagttctgcctcgcttcccggcgcggtcgcagccctcagcccacttaggataatggcgacagctgaggtactgaacattggtaaaaaattatatgagggtaaaacaaaagaagtctacgaattgttagacagtccaggaaaagtcctcctgcagtccaaggaccagattacagcaggaaatgcagctagaaaaaaccacctggaaggaaaagctgcaatctcaaataaaatcaccagttgtatttttcagttattacaggaagcaggtattaaaactgccttcaccagaaaatgtggggagacagctttcattggcaccgcagttgtgaacatgattccaattgacatgggtttgcagaaagaatagcaactggttcttttctcaaacagaacatcctggtgtcaaggcacggatataagtattaacccacctaaagtgcagtaggtactttcaaggatgatgccaataatgacccacagtggtctgaggaacagctgattgctgcaaaattcagctttagctgggacttcttataggccagactgaagtggatatcatgagtcatgctacaacaggctatatttgacaatactggagaaatcctggttgccc

SEQ ID NO: 613327 - DNA, 110 bp, Homo sapiens
cctgtgtctagaggatcttttgggtgctttccgactcctgttgagggcattgaattctacacgttcatcaacagggcgaggttcgaggagctgtgctccgacctgttcct

SEQ ID NO: 613328 - DNA, 508 bp, Homo sapiens
  misc_feature (480)..(480): n is a, c, g, or t
ccccggatccagataagcacggtgctatgtgagctcattaatgcactgtaccctttttggcaggccccagtaaagaagatccaggcctgcaccatttccttcaagcagatggagcagatctctcagttcctgcaagcagctgagcgctatggcattaacaccactgacatcttccaaactgtggacctctgggaaggaaagaacatggcctgtgtgcagcggacgctgatgaatctgggtgggctgacagtagcccgagatgatgggctcttctctggggatcccaactggttccctaagaaatccaaggagaatcctcggaacttctcggataaccagctgcaagagggcaagaacgtgatcgggttacagatgggcaccaaccgcggggcgtctcaggcaggcatgactggctacgggatgccacgccagatcctctgatcccaccccaggccttgcacctgccgctccacgaatggntaatatatatgtagatatatattttagc

SEQ ID NO: 613329 - DNA, 777 bp, Homo sapiens
agagctgcctggaaagctgtatttgctgcacgtggaaatctccgttattttccagcacccaacagtagcgtaatgggagtaacggacttaacctcatttctctttcagagcatttagccttcatatgcccttccctgcatgcttcccccaggccgtcaagacttgagttctgcctcgcttcccggcgcggtcgcagccctcagcccacttaggataatggcgacagctgaggtactgaacattggtaaaaaattatatgagggtaaaacaaaagaagtctacgaattgttagacagtccaggaaaagtcctcctgcagtccaaggaccagattacagcaggaaatgcagctagaaaaaaccacctggaaggaaaagctgcaatctcaaataaaatcaccagttgtatttttcagttattacaggaagcaggtattaaaactgccttcaccagaaaatgtggggagacagctttcattggcaccgcagttgtgaacatgattccaattgacatgggtttgcagaaagaatagcaactggttcttttctcaaacagaacatcctggtgtcaaggcacggatataagtattaacccacctaaagtgcagtaggtactttcaaggatgatgccaataatgacccacagtggtctgaggaacagctgattgctgcaaaattcagctttagctgggacttcttataggccagactgaagtggatatcatgagtcatgctacaacaggctatatttgacaatactggagaaatcctggttgccc

SEQ ID NO: 613330 - DNA, 862 bp, Homo sapiens
cgcgggcgcaggcggccggaatggcggggccggctgggtgtcccccgcgcctggacggcttcatcctcaccgagcgcctgggcagctggcactgtactgccacgtgtgtacaagtgcctacgccaagaaggacactcgtgaagtggtagccataaagtgtgtagccaagaaaatgtctgaacaaggcatcgtgtggatgaacctcctcacggagattgagatcctcaaggtgcattcgacatccccacattgtgcagctgaaagactttcatgtggtgacagtgacaatatctacctcatcattgtgagtttttgcagcagtgggtgcgaccctgtctcgcttcatccataccctgccagtgattcttgccttgatgacagtgttggctgcagtgtcttcatgcaggcaattacgctatgctgccctgcaattcctgcgattgaacggaatatctctcacctggatctgaatgccacagaacattctactgagctccttggagaaggccccacctaaaactggcagactatggatttcgaacaacaacatgtcccctgtggggcatgagaagcactgtgctccgatggaattcccccctctacattggccccccgaggatggtgtgccagctggcagtatgactgcccgatgtggacctctgtgtcaatggagggatcatcctgtattgaacgccactcatcagggacaatccccaccttatttgaccgttcacaagggttacgataccatccgggaaacatcgcacaagcaagaaacgactacgcgatagtccccacacctgggtatacaatcgaaagtataccaccattagtaagtacaccatgcgtctgtcccaggaac

SEQ ID NO: 613331 - DNA, 555 bp, Homo sapiens
tggaaacggagtcccgctctgtcacccaggatggagtgcaggggcgcaatctcggttcactgcaacctctgcctccgtgggttcaaagtgattctcctgcctcagcctcctgagtagctgggattggcaggtgcccaccaccacacccagctaattttggtatttgtagtaaagacaggttttcgccatgtgggccaggcgggtcttgaactcctgacctcaggtgatccacggccacctcggcctcccaaagtgctgagattacaggcatgagccaccaacctagactatgtggtggtaccttgatcactggttaagggggtgtgtgccaggtgtactccagcgtgtacaaactagggagtttcccctttcgaaagtggaacagagaatcttccacttgtgaagcttgtcgtgaactgtctcacttcttaaggatgtggccataggattcacattaccactcatcaaggagttcttgcttaatagcgggttattatgtgttatgcgtgcccagtggtgagtgagcttcatgatatacctgaatgataaggggac

SEQ ID NO: 613332 - DNA, 644 bp, Homo sapiens
  misc_feature (380)..(380): n is a, c, g, or t
  misc_feature (420)..(420): n is a, c, g, or t
  misc_feature (429)..(429): n is a, c, g, or t
  misc_feature (462)..(462): n is a, c, g, or t
  misc_feature (491)..(491): n is a, c, g, or t
  misc_feature (557)..(557): n is a, c, g, or t
  misc_feature (580)..(580): n is a, c, g, or t
atcgcaattgcgaagttgggaggcggggtgacaacgtttgggaagggccagggcgaccggcagtgtgcacagggactgtgtcgggcttggacctcacctgatcctctctcttagcgcgacccttcctctgctccctgtctcctctttctgccacttgtgcgctgcttccgcgcactcccggctccctaacggcaggaggaggaaggcgcacagcgggtggagagggtgcgccaaggagaggtaaccccttcgggagcccggggaatcccggccgccaccaggggccgtgccaccgccctcgcgggaccaaagcttccggcgtgtccccaactttttggcgccctcaagccgcggcgactgggttagagatgccttccaancggcagaacgcttctggactcgccgcttgacaagcggctnccttgcctncctggactctaatgtctttttcaacgaagggtnaaagggagccctttgcgctcggggactgntttacggtcaacgggggcgggaagcccgtttgtgcttttcgcaacaagcgcttgtcttgtttccgnaaaaccccctttgcaaagcttgnccgtgtggggggtttctaaccgccgcccggggcccttggccggcgggcccaggcctttggagct

SEQ ID NO: 613333 - DNA, 329 bp, Homo sapiens
cagttacatatgcacggaagacacacaccatgcacactggtttatagttttcaatatagagatctttcacttatatggttaattcttaggtatttaattttatttgtgtctgttgtaaatgaaattactggtggcatatagaaatagctactgatttatgtgtgttgacttagtatcctgcaactatactgaatttgttgatcagttctaatagtattcttgtggagtataaaagctattccaagtataagattatatatatatcatatacaaacaaggattatttgattcttcctttccagttaggatcccctctatattctttctct

SEQ ID NO: 613334 - DNA, 105 bp, Homo sapiens
acacacacagcgggctggtagtggttactcttcccagtggtgctatgagaactttgtacatgttcagatctgatgcgccgagccctgggatgatgcgggaacatg

SEQ ID NO: 613335 - DNA, 257 bp, Homo sapiens
aattcacaagaaaagccactggtgtaaagccccaagccctaatctcatggatattacatatgcccaggatgctattccatcaccacggtctttagtccatgcactaactgtactcctgtgtgttggctgctccactgtcctctgccagcctacaggaggaaaagcagggcttacagaaggatgttccttcatggagtaagcagcatctgcatgcactctcacgtcggtcttgggcatactggtgtccggttcaaggc

SEQ ID NO: 613336 - DNA, 1032 bp, Homo sapiens
tggtgggtaatatttttgctgcactgcagtgtgtgtgtctcgcaatttttatctcaaggtctcatcgtgaatgctgaagaaagtttcgtgtgatacaccgtgtccatctctagttttcaaccgctcttaatcagaaagttgtccttttgtgaaggtgggttatcaaccagaagggagtgaactccacaatttagtttctccctacaggttctcagggaaggaaacgtttgtggaagaaggcagagaaaatccgtgctcatccaacgcctttcacagcagttctccgtgttaggttggccaactcctcaagtgttcagagggcccatctttaacattagacgcaggtcctagggttattccacagacaggtagacagacgccatattctctcctatacataatatcctgagaatctacatactctgacatggcgcgccaataagtagtactagggtcaagttaagcagtctatcaagcggcaaaagtttctctctcacatttcaccgcattctggcgtaccacgggcactccatagggtctccttatagggcgcatcccatcttccacaggtgcagggatctgcactctgtctcccgcgtactccagtggacctccttgttttgccctgggcgccgggacatacatagatcccgtattggcaaccttcacgagcaggctcagcaaacctgtggatttatgtaccatatcctttcatattacgcgcaattgtgcatacccaaaaaaaacaacaaacaaaatataaaaaataaatacggtggtgtacatacataaatcaaccccccacgaggacgaccacaaaataaagtaacgatcacaccagcatttctttattcagaaagttgtcccccacattaaggcgcgccacatataaacaaaaagcaaatagaagcgcctgaatacacaagcttcactcacaaacagcaatagaagacaatctacaaacaggaccactatcatgcttgctcgtcacatcgtggaccaaaccacacacataacggcaaggcaaataat

SEQ ID NO: 613337 - DNA, 108 bp, Homo sapiens
gttgtgttgctgggtcttggtcttgagtgccaagttagggaacggcgctaagcagacatcccactaggaagagagagcgtacctccacatcaaggaatcgggacatag

SEQ ID NO: 613338 - DNA, 301 bp, Homo sapiens
tgatctagaggacccctgggctcagtgatcctcggcagaggacctctgaggcctcgcagtgttgtgtccctgggtacttgagattagggagtggtgatgactcttaaggagcatgctgccttcaagcatctgtttaacaaagcacatcttgcaccgcccttaatccatttaaccctgagtggacacagcacatgtttcagagagcacatggttggaggtaaggtcatagatcaacagcatcccaaggcagaagaatttttcttagtacagaacaaagtgatgtctacttctttctacacag

SEQ ID NO: 613339 - DNA, 299 bp, Homo sapiens
gtttttggagttgacggatgaggttttacaaccagtaaaatacaattcccttcttaaggtcccataccggtacctcacatgttcatacacccgtctaaaagtcgtgtgagaaaagggtgacaaattcctcaatcacctaatgacggtaagtgaagtattaggtcatcctaggtcactaggaatgttcaatcttttgtattagaagacggaagagtactaggttgattacggaatgagaagaactttaaaattggatactataaaagacacggacttataaacaatacatctattgttct

SEQ ID NO: 613340 - DNA, 201 bp, Homo sapiens
ctctggatcattacgaaagcccggaagatgaaggagatgactagaagaaagaaaatggaaggaaggaaaaaaggaggagagaaaaaggatggaagaaagaagcatgaagaacaaagacattcttcccacttcttggattttgaaaccacagtctggagtgatagctactgtagaaaggcttgagaaatgggcttaggggga

SEQ ID NO: 613341 - DNA, 158 bp, Homo sapiens
cattatcaccctataatcatccaccctcctctccctaggaggctgccccctctaaccggtattttgcccaaatgggagatatatctgaagagatacacaataataactataacctattctataatttcacactatttcatatatatcctacaactact

SEQ ID NO: 613342 - DNA, 315 bp, Homo sapiens
acggatacagggcgacggtacactgggcgcgtgttacactcgggatgacatgtactaccgtgggcgttcttacactgggtgaaccttctataatcggcaggcttgttacgactgggtgagcccttaatactgggcaatgtgttaaaacgtcgcggtcgagtactcttcgggctgccataacaacagcgcgccacaaaatacttcagacacctgtcatcactgccaccagtggttaagaatgaagcatcggcaccaagttgcgcagggatcttctgaattctctccttggtgatatctgatactctctgtctaatg

SEQ ID NO: 613343 - DNA, 675 bp, Homo sapiens
  misc_feature (85)..(85): n is a, c, g, or t
  misc_feature (518)..(518): n is a, c, g, or t
tcgcgaacgtgttcctgtgagaggaggagccagccagatggctccgatttatccatgtcggtgcagggctggagaacgagctcgngccagctgggacgctactgctgtgaggcttcccgtgcacctcagcccttgagagaccaagcctctcttttcacacctgagctcctgcaggaagcaagggctgcggtggctgggagatgcctgttgttcctcacattcagcaattagcgccatctccttaagggcagacctccacgtagctgtaatctgaaatgtcagttattacactctttgatgtaagtatagaagtgcctcggttatgatctcaggagtaagacagaaatagctagtcagtgtggtgagtaatctgctaaaagcattcacagggatcatcctcgccatggcattatgtgctgtttaaaatctgagtaaatgcttaggagtccgggattcagagatgcagggaggggcggtggaatctcttggaggaatcctgggttaagtctcctcactgnttctgttgcaggtgatggatcatgcctatgctattctttgagttctaatgtgtagttgattttatgggggatactgaagggcatgggagcagcccttgagtcttagcttaggtcccagttaggagggacaatacggcaaaggggtctgaagacaaga

SEQ ID NO: 613344 - DNA, 125 bp, Homo sapiens
accagaggatccaaaacaatacagctcttgggcctcctttctatttctttttaatgttctcaccattctgctgtctcacacaggctaaaagctagcttgtctatccatctaatcagcttatatct

SEQ ID NO: 613345 - DNA, 245 bp, Homo sapiens
ccttctcttgcctgtttcgacgtcgctagatagaatgactggctgcggccagaatgctggacacctgggcctgggtcagaccggcagctagccgcgcctcgggaacagcctcaatgagggcagcgtactcttttcgatggatggacttcgacacgagcgcgccttggttgagcggcctaaaaagctatatccagttctccgatatctaaaaaccagatattctgtcttcttcattgacaggggga

SEQ ID NO: 613346 - DNA, 366 bp, Homo sapiens
caggccctcaaaaaatatgtcaataaattaataggacttctgctggaagggaggagggcagccacaggcagggcagagagaacggggtctggtgcgctgatgagagaagatagaagatagaaggattcttggatgtgagggcgatctggctgcgacatctgtcaccccattgatcgccagagttgattcggctgatctggctggctaggcgggtgtccccttcctccctcaccgttccatgtgcgtccctcccgaagctgcgtgctcggtcgaagaggacgaccatccccgatagaggaggaccggtctttggtcaagggtatacgagtagctgcgctcccctgctagaacctccaaacaaactct

SEQ ID NO: 613347 - DNA, 452 bp, Homo sapiens
  misc_feature (55)..(55): n is a, c, g, or t
  misc_feature (164)..(164): n is a, c, g, or t
  misc_feature (183)..(184): n is a, c, g, or t
  misc_feature (260)..(260): n is a, c, g, or t
  misc_feature (279)..(279): n is a, c, g, or t
  misc_feature (296)..(297): n is a, c, g, or t
  misc_feature (323)..(323): n is a, c, g, or t
agaggatcccctggtgatgatgtgaacgtgctgaaaaaagaccaaggatacaatncacatgttagcagtggctatttctggatgatgggcttatgtcttctttttcccaaaatctctggcatggatatgtattctttttgtgtacacgagaaaaacaatgaagnaaaaaataatccctacagnnaacccaacctcttttggattcagagagcgcattttctgccagagtggtatttacgggagaaaaggcagagaactgntgcttccctttaaactaanacaggcagaatttattnnaaaacaaagcgcagaaggtagaatcncggccacaggcatttacctcgcccatctctgaggcagtggggggacaatggaagaacagggactggccaagggaaactgtctggattggattgtcgaggttttcgcttttgtaaagcttgacctggagg

SEQ ID NO: 613348 - DNA, 130 bp, Homo sapiens
aggatacgaaggcactgccctgagacttcagcgcatacgtatggcgcaagcgattcgcgcaagcgataccaatgaacagcatgcatgccggatccaacacgcctacaaaggcatagggcgtagatcaagt

SEQ ID NO: 613349 - DNA, 912 bp, Homo sapiens
  misc_feature (398)..(398): n is a, c, g, or t
agcgggggatggcgtagccatggcgtctcttgtgtcctttcagcctatgtcgagccggctgcccgcgggctttgcgccgcgtgccccgggtccggatgctgaccgggggccggtctctcagacacccgctctctgctcctgcgggggactcgcagacgagggtcgtgcgactttgctagcacggacttaagtgcatctgcagtcaggttacctggtatgagttaacatcagttgtgctcgccagtataacgacaggtgcctccattgacgttccgtagggctatcctagggaccgttgttactttacgtattgaaacatctatgacgagattgacccagtagaagcatttcatctaaagtactcaattgtgtatgaaagacctgggcgttagaccagntttggaccaagtggaagattatcatgggcatggaagatcagaactatgtgggttttgaaatttcctgatataagatgctgaaacagttgaattgtgtcacactaaggaatattgtatgattcacatgtgctaggatgaagaatggatgtgatattgcaatcaaagttattcagactcgcttgttggtctttgctgcagaagaggtactacaatatgatagtagacgaatagtactggacagtgaggacacatataggccattctatgattgaactactggtacaaagatggatttctgatgggacttgtcatgtaagagtcgtactgatggtcttcacgtcccttctggagtatacttaggatcatactatcaatcgccgaaagcacctttgacataactaaatttcccccgcaagtagatagagacactcgggccaaaaagggggcttagaaacttgtgccgggggggggccccggaatcacaaggaaagggcccctatagatggagggtcac

SEQ ID NO: 613350 - DNA, 540 bp, Homo sapiens
ttttgtgatgaacgtcctgcctccgatgtgggatgcgatggtgatgctgcaggcatcccgtaatatgtgccataaaggatgtgggcctggcaggccccggggtagttgaccgaatttttgggtcgtgggcattggggcgtggcacatctctaatgcttggacaacgcgtacggagcgtgtgcaagctccgagtactctcgagcgttgcaatccgcactggcatcgaggcgacgcaccaatagtgaagggcgatttagaaacctagatggaacgcagactcggcgaccgctggttgagtctgatgcatcaggaatgacgtagtagttaaccgaataaatgatcatctctacagcacaacccaaagatcacagactgaatggacccttcctgttgagcaaggacaattcccaaagtaaatttgaaaagaccatgcttaggcccatgagtggccacaggggaggtgtcgaacaatgggctcaatctagcttcctcgctctggagtccagacacaacgtgaggcagcattaacattaaaaacag

SEQ ID NO: 613351 - DNA, 408 bp, Homo sapiens
cgacaccacgccaagtattgatttttaaacgaactaatacaacgggaaaactgatgcaaaaaacaagcagcagcagtaaaaagaacgaggccccgcctttcccttccaaacccaaaccaagggaagaaactttttcttatgtgttgccttatatttgaaccaagccggccttattagggccgcaaaaatgagtctgtgcccccacttccttagaaaccaagccggggtcctcggaagtcccatgaacctgtgtcttttaatgtgcccccacttcctgagaacccaggccgggctcctcggacgtcccatgaccctgtgtctgtcactgtgcactcaggagcatgagggccaaaaacaacccccaaccaacttcttcgcaagggaagccttgaattcttccccaagccc

SEQ ID NO: 613352 - DNA, 1419 bp, Homo sapiens
ggttctatattggcctgcgtggcattcccgtgacgcatcgcgcgtgatgcccagggaagacaggcgacctggaattccaaccatacgttcttctaagatcatccaatcaattattggtatgtattattccgaagactgtttggatctgtcgaggcagactagtacgataactgtgagtgcatccgaaggcaatgcattgcaagcgaggaattctctgcgatgatgcacgttcagcagggaaagtgcatgtgggtgtctgattgggacaaggacatccgaccaatgatgctgcaaggtccgatcgcagatgagggactacctgagaaaagcgatagcccagtcttctggagaatagactgcatgtgctcattatctcggtggtgaactgtgggcctttgtgttctaccaaaggacggacctcatgtgatgatcaggtggtacagtgattgcgtggccacgtaatggatgctcgaagactcgtctcgtcccctgttggcctggggttactcgaattggcgcccccattggttggaaagaggtacgacttggttggccctaggaccctttaggaaacctacctgggggtgcttccgggcgtcacgcggaggaaagggaccctcttttttgtttcacacgggacttgtcagtgtgagttcgacccatctaaaagaacttcttctcatggggatgtccactcaaatttggagaaatatcctatgagggttgacgtggttgcaatcgctcttggcagtctgcaagggaccttgtgcgcaagcaacgagaacaggtcggggtgaatggccacgagacgaagatgctcgcacctagctgtggcgtttgaaaacgaattgacatgtcaagtacagttcatcccgcacccccttattcgtcccattatttggggggcaatgggattccaattccccatagccataggggttggtatccaggaaactaagagtgagtgccacaggcagattccttaatcggaaaatcacatttggaaaaatggttggcttattgcaaatcacatcaaccacaaggagagcgaacaatcttcttggcaattatccttccaggcttttcaccataggggaagagggggttggttcccggcaaaagctgggttttagtgcacaaggatgttcgttagtccattggaccaaggaatattgtgggggttaaaccacacacatacagttgttttcggcacagtcaacaggtaaccccccgaaatttatactaaattggaatttcaacacgcggggagcataaccaaaagaccggaatgttacccatgtgcacccatttgaattccttgaggtgagcaagacagcggtgacatttaaccaagccatgtacacaccacacatttggccttgagacaagcagggttcaaacggcgcgctatacctatga

SEQ ID NO: 613353 - DNA, 189 bp, Homo sapiens
gagaactagtctcgagttttttcttattttttttggaaatagagtctcaacttactctgtcgccagggctggagtccagtcacgtgatcacagttcactgcagcctcaaactcccaggctcaagcaatctcctacctcagccctcctgagtaattgggcctacaggcatgtatcaccaggctggctaat

SEQ ID NO: 613354 - DNA, 1028 bp, Homo sapiens
atatggctatggatcaggccgggtgtaatcggacgaggcagaccggaaaactggatacttctgcgctgaccagggctgagcgaatccagaccaggtcggcgtaccgtggtactgagtgaaggtgcagtgctggctgtcctctggtggacctggagaatgatgagcaggcagccagtgccatctctgagctggtcagcacagcctgcggtttccgtgctgcacctgcggcatgaatgtgcccttcaagcgcctgtctgtggtctttggatgaactacacactgctttgtgacggtgtcaggacagaggggtgtttgtggtgaattaggctgaaccgatggtcgggagcccattgatgtctgatcctgccggagggcgagggtcggagaagcggatttgggtcctgggcctctgtgatgaggcaggcagcacctgtcggtcttggagttgcgtgctagaacgtagggccttctgctctgcccagcttcctcagtccactacctgtacgggcccatggattggggactctgagctgtgttaagggagaacaagggcaatggagagctccctttgtggctccctcagtctcctagtaaacgatgagtcttgatgttctccaacagtaagagacggactcagtgtacacggagataagtatgtgcaagtaatacacggatcgaacggaggaaaccaaacaagggaagggaggtaacaaaacggtttcaattaggagagtaggcatgatgcatcgagaagagtgaatgttggggaggcacacttgaatgttcaagagaaggtggggtgataatgcggcgcgtggcatcgtagagatatgggggagggaatttgtttattatggcaggcaggggagaaccagttcgaattggaggtcgagagtaaaaacgacggggtggataagcggtgaacaagggagtgtgtatcattttggtgaaatttgtaatgaaataaggatgacgaggagaagtagggcgtagttgaggatgagaaaagagaatgagcacagaggaaa

SEQ ID NO: 613355 - DNA, 947 bp, Homo sapiens
ggcggggcgcgtggctcacgcctgtaatcccagctctcagggaggctaagaggcgggagggatagcttgagcccaggagttcgagacctgcctgggcaaatatagcgagaccccgttctccagaaaaggaacaaaaacaaacaaaagacaaaaaaaaaattaggggtaatttcccccaaaaaaaaaaaaaaaaaaaaaaaaaaaaacttttgggggcgcttctggcctccgagaaaaggtttttaagaacacatttgtgttggggcgggggggccccaagtaggtgtagcggcaccagtgtggcgaacagcgtggttccccaagggagaagccgcgggggccaagaacacagcagggcgctcgggacctccccacgacatataaaaaaaagcgcgcggcggggggagaaccggactgttttgcggaaccaccatcccgagaggaggggagctttcggagcgaccccaaaggggccttactacacacagagaggtcttccccgaggggggctccggatatacaaattaggaccccgtgatggggggggaaataccgacacgacagagcggagcgaaaggcacgacagacgcaaacgccgacggagcagacaaggccacgcacaaaacagggaagtagcagagcgggccacactgccacgccaatcagaccacagacccacagccacacccacagtggaccagaccacgagcccgactgcacaacacgaaaggagccgacgaagaagcaagcaaaggggaacaggtaaccgacaacacgcgaaagcgcaacacaggacaggcggagacgaccagaaacaacaatgagaacaccagccagagacaagaaaacagcgaccagcaaaaagaacaagaagccaaaaacaaggtaagcaagcggagagacagcgagaaaccaccaagacaaccaagaggaacacgagtacaaaa

SEQ ID NO: 613356 - DNA, 346 bp, Homo sapiens
  misc_feature (221)..(221): n is a, c, g, or t
gtcggttccatcaatataaacagagagggttgggacggaatcagggtgcagaaaagacggactcattttatcatctgcgggggggcgggagttatatggagaaccaagacatactacgtatcgctcaagatcagatcgggactatattaggtcccctttaccatttcagaataggtacccaggtactccagctgatttcaatccgggttcttaagcaggtnctcagcttcagaattacgatccggacagagccctatcagattatatcactcggctagaggcacggcaaagacgagtgggaactatacggtcgggttcaactactcaatttcaggctggcatgaga

SEQ ID NO: 613357 - DNA, 793 bp, Homo sapiens
  misc_feature (153)..(153): n is a, c, g, or t
  misc_feature (476)..(476): n is a, c, g, or t
gctacctcatctgaccctggtattaattgtgatagttttttggttgagtcttttggattttctaggcagacaattatattgtctgcaagtaattaccatgtatagcttgtcttattgcatgcttctttgtgggtacctcattttgtgaatatngtatcatcatttctcaggaagtctgaaccggtcagtttttgctttagtacagggacaccttgccatttctttattttaggagcacatggagcagttgtttaaggggccatgtagatggaaatccagtttagaaactcttctccctgcagctcccaacaccttattaaattcaataggatgaatgaacttatgttattccactgtactgagagttttgttttttatttccttattttttcccctctctattaattctgtgctcccattgctcaagtttataagtttctgattcttgagtgaatcagaaacctcaggcttccttntgtctagcctgggctaggctctcctatccttggttaggctgaccttgtacccttcgttaaaatagagaataatcatttcgtgtttctctgtaggcattctctggctgtaggaatgcactcctccacagaaaccctggtttgctgggccttatttgttggagttggagttgggggggcacggagcaagcagtaaagagctccagcctctggacactatccaggagctgacctagggacctacttgcaccattcctgccctgatgcacttgggttgagaaaagggtgcgtgtgtgtgtgtgtgttaaacgaatatgtgg

SEQ ID NO: 613358 - DNA, 467 bp, Homo sapiens
tttaggcatattttttttataacttgagtaaattgctttttttattgtgcactgtgtaaaccaaaggcactaaaaccatgaatttgactagtgtgatacaggtattccccctcaaaaggcgacaagtgagcatacagccgcctgttatggcactaactcatagatagactcgagaaggtgagagctgttacatagccacagtataactccacatgtgcattgaactggcaaactgaccgttaactcttcaaagaaaaagtgctcataaataacgtgttaccccaaaattgttgacaaataccttagaagattagctgaggcgattgaaagcaccacacattaaacagaatgcatgtggtaaaatggattcaactctacaggttcccattcaggaaatactttgttaagcatggcctgtctgtaaatcgtgctgaatcacggactctttagcaaaaaacttctcggta

SEQ ID NO: 613359 - DNA, 144 bp, Homo sapiens
cagggtctcactgtgttgcctaggccggtcttgaactcctgggctcaagtgattctcccaccttggacctcctaaattgttggggattacaggggttagacactgacacctggccggaatgactcagtttctttaaacgaatct

SEQ ID NO: 613360 - DNA, 171 bp, Homo sapiens
gcaggaagagaaaacatctctgaacccccaccattctgccatatgtatgtcaagagtagacacaaaagagtcattatggtatatgtaatttgaagtgcaaggtgatatattgccgagaagagtgccaaggtatttgccaaatcaccaaatgtaccgtaaacgcctcttaca

SEQ ID NO: 613361 - DNA, 188 bp, Homo sapiens
acccttcaccttagaagttgtggaaggatcataggaaatacttgcaataaaatgtataatcattaacattggcaactgccagtgggaagttgtatatgccacatactactgataaaaattgtagggacccattggtagttcccataaccaccattgatgtgttaattcccacaacttctaaggttaag

SEQ ID NO: 613362 - DNA, 293 bp, Homo sapiens
gagggtccgcggaagaggcgcactaaacaattagggaggatgaaggttgggcgcgacactcgagtgtctcgcctaatagaaattctagaaagaggaagtagagaatagagaggccaggtgcagtggctcacacctataatctcagcactttgggaggccaaggcaggaggattacttgacaccagagttcgagactagcctgggtaacacagcgagaccccccatctctatttaaaaaaaatgagctgggcatggtggcatgcacctgtagtcttagctattcgggagacact

SEQ ID NO: 613363 - DNA, 965 bp, Homo sapiens
ttatcttttttttcttctctcttgttttgctttgtcctcttttttgcttccttttttttcgttctttttctttcttcctttttttccctctgtctttttgttttcgttctctctcgtttctcttcttcctcttccgcgctctgtttcctgtctttcagttcctagtctctcttatttgattgttttgtcgtctttccttcttctctgtgtatttttcttctctctcttctctgtcccttcccatatttttccgtttctttccttttgctcagtatgtttttcagggagctttctcttctctctctcttgtcccctgttctctgtgacgtgtctcctatttatgtctctttttcctgccttcttggcttccattgtaatgcgccacacgtttctggtcgctctgactgtgtctttgtttctttcttttgccccttgccgtcgggtctcgcttcgctctttcttgtttccttcagcctcttcgagttcacttttttcttcattctgcctattctggcatcatgctcatcttcgcacggaggtccctcagccttcttgtagtttaaggcaatcgtctatagactccttgtggctcctaaagtaccctgtctgttgagatttcaagtctcttgtcaccattcctcacatctagtgacaactgaaccccataatgcataagtggcctttattgataccaaagacttgtgcaaacagtgatctctctctccctgtgaacggagttgagcacattagctaacaatgtacattaattttggattttcatgttctcatgttgtttatttttgtaaatattatctgatgtttggagcttgagtatacagatctgtaaatatagttcatcgtatttgtactcacttctggattcttttgactgtatagccctctacgatgtgcaatgcagacatctactctaaccttatactgtcccggaagccttgcagtctcga

SEQ ID NO: 613364 - DNA, 1042 bp, Homo sapiens
tcataacgctggtaggggagcgagatacattaatgaatggtataatatcatagtagaggtttgtagacaaagacatggcagctccagcaagagagcagtacctgcctgggatttgttggacatggtattaggaggcggtatttgagcagcagtagaagggcacgcatggccaggcatggctgtgtaaccatgccttcagaaactccctaagaagctagatgagaccttgagaagcagtccgttgagcatgactatcctcctgtcgtgtctatcatcgtatgtgaaggcccacttgatgaatttggattatcccagttgtagctggcattgctagaatagtctacttctgttcttgctcgcattctggctgacgagagagaagccttgtattactttgctctatttacatagtgaatgtatggactgcttgaagcttcaggttggacatgggaagcagtagaaggaagggaattcctttatgagcagccatcggtacacatcggtcacgctctctttcattccattgtcttctgtccgcaggaagagcttaattttgctctaaaggattcatcgatagaattctaggatacgcacacattcctcacgtgacaaaagagactcatgcaatagtccgcacgaggcccataaataaaacgtactcggtaagttggagtccagcctaatgtagaggtttgcaaactcgacacacgcgacctctatcaagctaacttttcttacaaatcccaccattatgccgaaaggaatcctagcaccttgaatctacagctaacctattgccaagttcctcctcccacgtgtgtggaatttctagcacacgtgtaagctggggctacacaacgctacgccacgcttgtcccattaatctaccacgcgccacggggatgactacctctaatttccctctacacctcctgcacggtcactcgcgcagcgagctaccaaagagttccgcaccccacatagacactaaacccctataaccttgcagtttggcccttcagttttacccccactcacctcc

SEQ ID NO: 613365 - DNA, 840 bp, Homo sapiens
cgacagccatcccagtgccaagcgcgtttttttcaccggcactcccctggtcctatgcctgcctaagggctttttacctctggaattgggagggcccacagaagggagacccctctttgccaccctcttgagaggactggggcccccctctccagggccggcctttgcatgggcctggcccggttcaccaatcgtccggggctcccacccctcctgcttgctgtacgttggggatgtaaacgacccccaccaggttccaggttggaagggttgggcctgggcaatccagcccagggattgcccggttaccagatctttttctcagagaagctaccaaaagatatctttccctgggtacataaatagtctgccacccccagccaccctcttcttctgccaccacacgggggcgcctgccatagtccagaatggccgtggtctataccagggggagactcttgtgccctagatggctcttggcaggacaactgagggcctgcctgtggtgtgcccggcgtctgcccaacatcccgggaggggaagggctgctctagctcaaggtgtcctgttcggtagagccagatgtcctctgaccagccgtgtcccccggaccagttctagacaaacccctgggagatggccaccatcccaaccaccacgacaagagaagcaagagggcccgggaaaccccgcgctcggttgccctttgtccacgggttttaaatcggcctttggggtttggtgagaaggccggttttgcgggtgttgaccgaagtattttttccttataagttattataataatgggtaatttgtccattaagcattcctttgggggga

SEQ ID NO: 613366 - DNA, 5713 bp, Homo sapiens
ggcgccggcacacctattggcccccgcggcgtcccgtcgccgcgtcgcgttgctggcccgtcggagcgacgccgctcgggtcagtcggcggccggactgggaagatggacgcagctactctgacctacgacactctccggtttgctgagtttgaagattttcctgagacctcagagcccgtttggatactgggtagaaaatacagcattttcacagaaaaggacgagatcttgtctgatgtggcatctagactttggtttacatacaggaaaaactttccagccattggggggacaggccccacctcggacacaggctggggctgcatgctgcggtgtggacagatgatctttgcccaagccctggtgtgccggcacctaggccgagattggaggtggacacaaaggaagaggcagccagacagctacttcagcgtcctcaacgcattcatcgacaggaaggacagttactactccattcaccagatagcgcaaatgggagttggcgaaggcaagtccataggccagtggtacgggcccaacactgtcgcccaggtcctgaagaagcttgctgtcttcgatacgtggagctccttggcggtccacattgcaatggacaacactgttgtgatggaggaaatcagaaggttgtgcaggaccagcgttccctgtgcaggcgccactgcgtttcctgcagattccgaccggcactgcaacggattccctgccggagctgaggtcaccaacaggccgtcgccatggagacccctggtacttctcattcccctgcgcctggggctcacggacatcaacgaggcctacgtggagacgctgaagcactgcttcatgatgccccagtccctgggcgtcatcggagggaagcccaacagcgcccactacttcatcggctacgttggtgaggagctcatctacctggacccccacaccacgcagccagccgtggagcccactgatggctgcttcatcccggacgagagcttccactgccagcacccgccgtgccgcatgagcatcgcggagcttgacccgtccatcgctgtggtacgtggcggccacctgagcacacaggcatttggtgctgaatgctgtttgggaatgacgaggaaaactttcggatttttgcgtttttttttcagcatgttgggataagtactgtgttcacgtggttgggaatctgaagggtataagagccggaactgtgtccttgcaccctcacgtccctcccccaggcaccacctcctgtgcagccttcatggccttcgagtggcccagagagcgtgtgtctggatgtgagcgtgtgtgggcgcgtgctgagtgtgcatggatgagtgtgagccatggtgagtgtgtccccctcacacctacatttaaacacacgggcggcccctccacccacccctgcaccaccttcgtcacacccacatttaaacacgggcggcccctccacccacccactcctgcaccaccttttgttttccggaggctctgacttgacctctctgggggatttcctaagaaggagcttccctgtttttccattttgattacctagttgtgatttttggtgtgtgatttatgcagacctgcctgccctcaaatatatttgatggggaaagaggccaaaaaacccccctagaaatcatgaatgacggtgacatgctcagggaagcagttaaccgaatcgggggctctgttgtggatgctccgccccatttaggaggaagaaggcagatctgggcctgaaatgggacggtctctgagctgtggcgcagccccagagtgcacaccacgctccatgcacctcctgggcagggtggcagtagtggggaacatgggctggagctctgtggctcacactttttgtttgtttgtttgtttttgagacggagtctcactctgtcgcccaggctggagtgcagtggcgcgatctcggctcactgcaagctccgcctcccaggttcacgccattctcctgcctcagcctctggattagctgggactacaggcacccgccaccacgcctggctaattttctgtatttttaatagagacgggttttcactgtgttagccaggatggtcttgatctcctgacctcatgatccacccacctcggcctcccaaagtgctgggattacaggcgtgagccactgcgcgcagcctggcgcacacttcttaccagaacctagtcacgaattcctcgtcgaactagaattaggtatgtttgttactgtaaacgcagcttggtggcttacagtgattggcactctaacagtcaggtcaggctagagagccagccaccgcagacagaggagtggacgcgtgaacgttgagttgagaccaaaggggccacctggtgggataactgtcctcacccgtgaggaggaggaatgtcccctgtccccgggggagagtgctcctacaccagcgccgaggcggcagaatggtgtcttcaggggaagagagtgcccagtttgagcttctccccccatttcgtttctttttgtgttaacatctgcgcatctggcagcgttgagaattcctagtgactgtcattacaggcggcagctttaaggatgtgattgccggtgacccttggccggtcccctgtctcctggctcctcagcaggaggctccctgtgtcacggtgtccttgggcagttctcggtggcctttgccgccaagcttccagggagctgctgggcgaaggctgagacccagcggccctgcctcacagtcacagagagaagagctccccacttggccctaactcataacctgccccaatcccggaacactcggtgaggtttgagagatgcacaccacgtaacatctcgtgggcgaatcaaggcacagcaacgcagtggagcctgaggggagccgggcactggtgcaggggaccatgcacagggcaccctcggagctccgttcctggccacaggagccaaggcaggctggaatgtccagcacctgcatgctgggggcctctgctgcgccactggcagtgggaatggaagcccccacctcttagccgactgcagatgggggtgtcgtgttctgctcatcgtcatttcgttttagtggggtttttctgtaagactgaagatgacttcaatgattggtgccagcaagtcaaaaagctgtctctgcttggaggtgccctgcccatgtttgagctggtggagcagcagccttcacatctggcctgccccgacgtcctgaacctgtccctaggtgagagctgccaagtccaggtggggtccctcggaggtacgatctgtgcccttgcttccccagtcctggcccccttggttttgaccattaaggtgtgtgtgagcctgagccgtgagcacttggcagtggttcgcctgtgagaccaggtatggagtggagcgtcccctcctccaagcttgcgcccagcagcccaggacccacctcgtcttccccaccagcgctgcctgccggggcgctgtggagctgggcgtgctaccatggagtcctcaggggtctggagcagacagaacatgcaggctctgtggtgacgcagtcctgggtgggggactggttcacttgggcaccactggccatgggtggcgtagacccctcggaccatggccagcgtgccgcaggagccggcctgggctcgtgcagtgaagtgagtggccgtgagcgcgtcctcctcatctctgtctccctgtggaaaactctacaaacaaggcaatggcaatggaaccactcctgatgaccacgagggtcagacgcgggacagaggcccctcaggcctgagattgtgccggccgccccctgccctcctcaccctgccctgctcctcttctctgctccctccccccatattcgcaggtctgcacaacccccggacctgttcacacccgcatggggacagctgtctgtgggctgcagagcaggcactgctcagtctgccccacgccaagggcccttgactcacacccaggtggcccacccaagatgcctgatgcgctatgtcctgttccttctagattcttctgatgtagagcgactggaaagattcttcgactcagaagatgaagactttgaaatcctgtccctttgaaaatcctggggtcgggggtggcacctgtgagagcctggggctcctggtgccgctgcgtttcatccatcccgcccgctcgcctgccgagggctgcgccccgtgctgcctccccccagagggccacccgctgtgctcgtggactgaggctgcgctgcccgggaggccttactgcttggtgtcagactgcccagctcagagtgcccgtcagggcctgtgcatccgcacgcggagccgtctgttaggagcttccagagcgttctctcgacactgccagccccgtgttagcacctgggcctcagtcccacttgctcccaggcgccggttctgtggttggtttggaattaaagtcctgtttgaagttgtcagacacagacatgaatttctggggcgctccctgagtcagagtctcagaagacctgtgcaggctggcgtgagaggagcggcagccacactgcggccccacgcccaaggactgggctgctctcgaggggggcgcgcccaccgctgtgtcctctctgcccagcctggcttaccaagggctacctcagtgggagatgaggttggaggaacgaaggcgaggttcctccttgctttggggagaaaagtattcaggaagtgggtgtgtgggaaacctgaagatggcgtgcacaggacacagcgtggtcggcctgggcagaagggcggctggctgtcctggagctgctgctggagcctgccctcagagtgtccctttccagtgctgtggcattctgtggcagcttccccaggtgtggtgacgggggggggcggggcctccacctgtgacagtcaggcttgagggtggacggcgtgcctctcccaggagccttccccatgtccttgccttgctgagaattgccctcccatgccgctgaggtgttaggtggtttagggccaaaaggggaaaaccacttgagtcttgtggtgtgtggtgggcagacaccacagggtggcatcacctggtggcatttccagaacctcagccccgattccagcacccaccaccgcctgaccctgtgtaacctgctgtcccgggtcccagagtgcactctgccccgctgctctgctgcctgtcctgggaaagtatctttgccccactaggaaatgtaaacaggagggcttggggagcgtgggcacttttctcatgagcagctactgcggcgttggcaggactcgctgctgctgctgctgcttgtgtaggtcggggagccggagatccccgaggacgcgcgccggacagtcggcactgaccggcccacctggtagcagaggacacccccagccccccaagcattgaagacatagtgtatttcctcgtatcctttctcccttgggtgtagttggggtggggaagcagggaaggctggtgcgatctccattccttgggctccacgtccgagttcatggtgcgccgctgtgctgggagctgcagtggtaatgtgtgggacaccttgaccaaaggggagctttgtctcgtgtgttttgaaaaaggcttaatgaagagaatgttgttcattcttagtagtatagtttgcaattcttaatggcaaataataagtttcagtagaaaacaaaaaaaaaaa

SEQ ID NO: 613367 - DNA, 278 bp, Homo sapiens
  misc_feature (86)..(86): n is a, c, g, or t
agcggcgcctttttttggaggtcgatcgatcggctgactatatagacaagatactgataggttacatgtcgaagaaaacatacaantacaaaatacagaaaaagtcggttccgtcccctcccactagcggccggccttttttttttttttttttttttttttttttttttttttttttttttttttttttttttttttttttttttttttttttttttttttttttcaaaagagcataggaggagaagggcgccaaggggggggacacaaacaggggg

SEQ ID NO: 613368 - DNA, 1653 bp, Homo sapiens
ggcgccggcacacctattggcccccgcggcgtcccgtcgccgcgtcgcgttgctggcccgtcggagcgacgccgctcgggtcagtcggcggccggactgggaagatggacgcagctactctgacctacgacactctccggtttgctgagtttgaagattttcctgagacctcagagcccgtttggatactgggtagaaaatacagcattttcacagaaaaggacgagatcttgtctgatgtggcatctagactttggtttacatacaggaaaaactttccagccattggggggacaggccccacctcggacacaggctggggctgcatgctgcggtgtggacagatgatctttgcccaagccctggtgtgccggcacctaggccgagattggaggtggacacaaaggaagaggcagccagacagctacttcagcgtcctcaacgcattcatcgacaggaaggacagttactactccattcaccagatagcgcaaatgggagttggcgaaggcaagtccataggccagtggtacgggcccaacactgtcgcccaggtcctgaagaagcttgctgtcttcgatacgtggagctccttggcggtccacattgcaatggacaacactgttgtgatggaggaaatcagaaggttgtgcaggaccagcgttccctgtgcaggcgccactgcgtttcctgcagattccgaccggcactgcaacggattccctgccggagctgaggtcaccaacaggccgtcgccatggagacccctggtacttctcattcccctgcgcctggggctcacggacatcaacgaggcctacgtggagacgctgaagcactgcttcatgatgccccagtccctgggcgtcatcggagggaagcccaacagcgcccactacttcatcggctacgttggtgaggagctcatctacctggacccccacaccacgcagccagccgtggagcccactgatggctgcttcatcccggacgagagcttccactgccagcacccgccgtgccgcatgagcatcgcggagcttgacccgtccatcgctgtggggtttttctgtaagactgaagatgacttcaatgattggtgccagcaagtcaaaaagctgtctctgcttggaggtgccctgcccatgtttgagctggtggagcagcagccttcacatctggcctgccccgacgtcctgaacctgtccctagattcttctgatgtagagcgactggaaagattcttcgactcagaagatgaagactttgaaatcctgtccctttgaaaatcctggggtcgggggtggcacctgtgagagcctggggctcctggtgccgctgcgtttcatccatcccgcccgctcgcctgccgagggctgcgccccgtgctgcctccccccagagggccacccgctgtgctcgtggactgaggctgcgctgcccgggaggccttactgcttggtgtcagactgcccagctcagagtgcccgtcagggcctgtgcatccgcacgcggagccgtctgttaggagcttccagagcgttctctcgacactgccagccccgtgttagcacctgggcctcagtcccacttgctcccaggcgccggttctgtggttggtttggaattaaagtcctgtttgaagttgtcaga

SEQ ID NO: 613369 - DNA, 87 bp, Homo sapiens
gcggccgcctactactactactgctcgaattcaagcttctaacgatgtacggggacatgatagacataaaattggtttatctcctcc

SEQ ID NO: 613370 - DNA, 2839 bp, Homo sapiens
aaaaaaaaaaaaaaagtcggcggccggactgggaagatggacgcagctactctgacctacgacactctccggtttgctgagtttgaagattttcctgagacctcagagcccgtttggatactgggtagaaaatacagcattttcacagaaaaggacgagatcttgtctgatgtggcatctagactttggtttacatacaggaaaaactttccagccattggggggacaggccccacctcggacacaggctggggctgcatgctgcggtgtggacagatgatctttgcccaagccctggtgtgccggcacctaggccgagattggaggtggacacaaaggaagaggcagccagacagctacttcagcgtcctcaacgcattcatcgacaggaaggacagttactactccattcaccagatagcgcaaatgggagttggcgaaggcaagtccataggccagtggtacgggcccaacactgtcgcccaggtcctgaagaagcttgctgtcttcgatacgtggagctccttggcggtccacattgcaatggacaacactgttgtgatggaggaaatcagaaggttgtgcaggaccagcgttccctgtgcaggcgccactgcgtttcctgcagattccgaccggcactgcaacggattccctgccggagctgaggtcaccaacaggccgtcgccatggagacccctggtacttctcattcccctgcgcctggggctcacggacatcaacgaggcctacgtggagacgctgaagcactgcttcatgatgccccagtccctgggcgtcatcggagggaagcccaacagcgcccactacttcatcggctacgttggtgaggagctcatctacctggacccccacaccacgcagccagccgtggagcccactgatggctgcttcatcccggacgagagcttccactgccagcacccgccgtgccgcatgagcatcgcggagcttgacccgtccatcgctgtggggtttttctgtaagactgaagatgacttcaatgattggtgccagcaagtcaaaaagctgtctctgcttggaggtgccctgcccatgtttgagctggtggagcagcagccttcacatctggcctgccccgacgtcctgaacctgtccctaggtgagagctgccaagtccagattcttctgatgtagagcgactggaaagattcttcgactcagaagatgaagactttgaaatcctgtccctttgaaaatcctggggtcgggggtggcacctgtgagagcctggggctcctggtgccgctgcgtttcatccatcccgcccgctcgcctgccgagggctgcgccccgtgctgcctccccccagagggccacccgctgtgctcgtggactgaggctgcgctgcccgggaggccttactgcttggtgtcagactgcccagctcagagtgcccgtcagggcctgtgcatccgcacgcggagccgtctgttaggagcttccagagcgttctctcgacactgccagccccgtgttagcacctgggcctcagtcccacttgctcccaggcgccggttctgtggttggtttggaattaaagtcctgtttgaagttgtcagacacagacatgaatttctggggcgctccctgagtcagagtctcagaagacctgtgcaggctggcgtgagaggagcggcagccacactgcggccccacgcccaaggactgggctgctctcgaggggggcgcgcccaccgctgtgtcctctctgcccagcctggcttaccaagggctacctcagtgggagatgaggttggaggaacgaaggcgaggttcctccttgctttggggagaaaagtattcaggaagtgggtgtgtgggaaacctgaagatggcgtgcacaggacacagcgtggtcggcctgggcagaagggcggctggctgtcctggagctgctgctggagcctgccctcagagtgtccctttccagtgctgtggcattctgtggcagcttccccaggtgtggtgacgggggggggcggggcctccacctgtgacagtcaggcttgagggtggacggcgtgcctctcccaggagccttccccatgtccttgccttgctgagaattgccctcccatgccgctgaggtgttaggtggtttagggccaaaaggggaaaaccacttgagtcttgtggtgtgtggtgggcagacaccacagggtggcatcacctggtggcatttccagaacctcagccccgattccagcacccaccaccgcctgaccctgtgtaacctgctgtcccgggtcccagagtgcactctgccccgctgctctgctgcctgtcctgggaaagtatctttgccccactaggaaatgtaaacaggagggcttggggagcgtgggcacttttctcatgagcagctactgcggcgttggcaggactcgctgctgctgctgctgcttgtgtaggtcggggagccggagatccccgaggacgcgcgccggacagtcggcactgaccggcccacctggtagcagaggacacccccagccccccaagcattgaagacatagtgtatttcctcgtatcctttctcccttgggtgtagttggggtggggaagcagggaaggctggtgcgatctccattccttgggctccacgtccgagttcatggtgcgccgctgtgctgggagctgcagtggtaatgtgtgggacaccttgaccaaaggggagctttgtctcgtgtgttttgaaaaaggcttaatgaagagaatgttgttcattcttagtagtatagtttgcaattcttaatggcaaataataagtttcagtagaaaacaaaaaaaaaaa

SEQ ID NO: 613371 - DNA, 102 bp, Homo sapiens
tgcagacgtctgtgatgtattattatacgaatggggcttcaatcgggagtactactcgattgtcaacgtcaaggagtcgtgcggtgccctcatgaggccacc

SEQ ID NO: 613372 - DNA, 499 bp, Homo sapiens
cggcacgaggccacttttggtaagcagaactggcgctgcgggatgaacctgtccctagattcttctgatgtagagcgactggaaagattcttcgactcagaagatgaagactttgaaatcctgtccctttgaaaatcctggggtcgggggtggcacctgtgagagcctggggctcctggtgccgctgcgtttcatccatcccgcccgctcgcctgccgagggctgcgccccgtgctgcctccccccagagggccacccgctgtgctcgtggactgaggctgcgctgcccgggaggccttactgcttggtgtcagactgcccagctcagagtgcccgtcagggcctgtgcatccgcacgcggagccgtctgttaggagcttccagagcgttctctcgacactgccagccccgtgttagcacctgggcctcagtcccacttgctcccaggcgccggttctgtggttggtttggaattaaagtcctgtttgaagttgtcaga

SEQ ID NO: 613373 - DNA, 389 bp, Homo sapiens
caaacaatatgcactaagcaataaacatcaaagtcggggcagagaacagagaagggtttgacatcagagaacggtacatcagagtatagcaactggaatggtttctactcttaccgctgtagctggttccacctcgacatattatcttatacacctgctttgcatggcatgaaaccagactcatccttttaaacatgcaatagggacgacatatgcagtttattgcatgtccaacttctactctgaaacgcaatttttatctatgcacctagtagagacacacgagaccgagaagacgaaagagccaggacgggagggacgggacgagaacggggaggaaccgggtacagggcctccagaccacaggcatcttctcactcatggcccac

SEQ ID NO: 613374 - DNA, 592 bp, Homo sapiens
agggagtcggtgcctgtggtgtgggactgaccggctgcctcctgccagtgggcttgtggcctgtggggccatctggccatgagcacttctctctctgtctgccacgacaggggggacaggccccacctcggacacaggctggggctgcatgctgcggtgtggacagatgatctttgcccaagccctggtgtgccggcacctaggccgaggtgagtcacagccctggggagggcgcatggccacggtgttctcaggaagcaaaggggactgtggggtcagggctctttagagcagaccacaggtaaaacagtaagtagaacttgggggtttcttgagtaatgagccacttgtttttcttgatttaaaaaactgactttaaagaatgctaataaatccgcatgggcaacatggcgagaccccgtctcacaaaaaatacaaaaattagccaggcgtggtggctcctgcctgtagtcccagctacttcggagactgatgtggagaattgctagaacccaggagatggaggctgcagtgagctgagatcgcaccactgcgctccagcctctgcaacagagttagaccctatctgaaa

SEQ ID NO: 613375 - DNA, 135 bp, Homo sapiens
agctatgcgtgtccggcggccggtccggtcggacaatcatagcctcctatctggccgttcctaacactcaccctagcattacttatatgatatgtctccatacccattacaatctccagcgatcgtccgagcgga

SEQ ID NO: 613376 - DNA, 421 bp, Homo sapiens
  misc_feature (366)..(366): n is a, c, g, or t
  misc_feature (368)..(373): n is a, c, g, or t
  misc_feature (377)..(377): n is a, c, g, or t
  misc_feature (381)..(381): n is a, c, g, or t
atctgtatctttagtgtgaaagtgaaaacttgttctacatatttatggtagagcggacctgtaatttttattcccaataagattggaggtggacacaaaggaagaggcagccagacagctacttcagcgtcctcaacgcattcatcgacaggaaggacagttactactccattcaccagataggtgggaggctgcagaatgtgccaggccccacccgggctgtctggagagggtggagtggtcggtttcccctcagagcttttctggtgtcgtgggatgtggagcaggaggctgtaaacctgtaaacactgacctctgaccatctgtgcgctgctgtcacatcacccccgtgtcatcccacatcancnnnnnncacnaggnccaaccctgggccttgcccttcctgctgtccatgcggctt

SEQ ID NO: 613377 - DNA, 323 bp, Homo sapiens
tttttgggggcccttttaaacaagttttttcaaaaaaaaagggggggggcgggtcgggattttcggggatttttttccccccggggtcccaaaaagagggggggaaggggggaattttttttttttttccttaggggatggggttttggcaaccccccaaagcgaggaaggcttttttttttcccggggtaattagttgggggggggggaaacccccccttcccggggtttttgggttgggggggggaggttggggggggccccgtttttatttttttccggggccccgggtgggaattaaggcccccccccttcccttggga

SEQ ID NO: 613378 - DNA, 2887 bp, Homo sapiens
ggcgccggcacacctattggcccccgcggcgtcccgtcgccgcgtcgcgttgctggcccgtcggagcgacgccgctcgggtcagtcggcggccggactgggaagatggacgcagctactctgacctacgacactctccggtttgctgagtttgaagattttcctgagacctcagagcccgtttggatactgggtagaaaatacagcattttcacagaaaaggacgagatcttgtctgatgtggcatctagactttggtttacatacaggaaaaactttccagccattggggggacaggccccacctcggacacaggctggggctgcatgctgcggtgtggacagatgatctttgcccaagccctggtgtgccggcacctaggccgagattggaggtggacacaaaggaagaggcagccagacagctacttcagcgtcctcaacgcattcatcgacaggaaggacagttactactccattcaccagatagcgcaaatgggagttggcgaaggcaagtccataggccagtggtacgggcccaacactgtcgcccaggtcctgaagaagcttgctgtcttcgatacgtggagctccttggcggtccacattgcaatggacaacactgttgtgatggaggaaatcagaaggttgtgcaggaccagcgttccctgtgcaggcgccactgcgtttcctgcagattccgaccggcactgcaacggattccctgccggagctgaggtcaccaacaggccgtcgccatggagacccctggtacttctcattcccctgcgcctggggctcacggacatcaacgaggcctacgtggagacgctgaagcactgcttcatgatgccccagtccctgggcgtcatcggagggaagcccaacagcgcccactacttcatcggctacgttggtgaggagctcatctacctggacccccacaccacgcagccagccgtggagcccactgatggctgcttcatcccggacgagagcttccactgccagcacccgccgtgccgcatgagcatcgcggagcttgacccgtccatcgctgtggggtttttctgtaagactgaagatgacttcaatgattggtgccagcaagtcaaaaagctgtctctgcttggaggtgccctgcccatgtttgagctggtggagcagcagccttcacatctggcctgccccgacgtcctgaacctgtccctagattcttctgatgtagagcgactggaaagattcttcgactcagaagatgaagactttgaaatcctgtccctttgaaaatcctggggtcgggggtggcacctgtgagagcctggggctcctggtgccgctgcgtttcatccatcccgcccgctcgcctgccgagggctgcgccccgtgctgcctccccccagagggccacccgctgtgctcgtggactgaggctgcgctgcccgggaggccttactgcttggtgtcagactgcccagctcagagtgcccgtcagggcctgtgcatccgcacgcggagccgtctgttaggagcttccagagcgttctctcgacactgccagccccgtgttagcacctgggcctcagtcccacttgctcccaggcgccggttctgtggttggtttggaattaaagtcctgtttgaagttgtcagacacagacatgaatttctggggcgctccctgagtcagagtctcagaagacctgtgcaggctggcgtgagaggagcggcagccacactgcggccccacgcccaaggactgggctgctctcgaggggggcgcgcccaccgctgtgtcctctctgcccagcctggcttaccaagggctacctcagtgggagatgaggttggaggaacgaaggcgaggttcctccttgctttggggagaaaagtattcaggaagtgggtgtgtgggaaacctgaagatggcgtgcacaggacacagcgtggtcggcctgggcagaagggcggctggctgtcctggagctgctgctggagcctgccctcagagtgtccctttccagtgctgtggcattctgtggcagcttccccaggtgtggtgacgggggggggcggggcctccacctgtgacagtcaggcttgagggtggacggcgtgcctctcccaggagccttccccatgtccttgccttgctgagaattgccctcccatgccgctgaggtgttaggtggtttagggccaaaaggggaaaaccacttgagtcttgtggtgtgtggtgggcagacaccacagggtggcatcacctggtggcatttccagaacctcagccccgattccagcacccaccaccgcctgaccctgtgtaacctgctgtcccgggtcccagagtgcactctgccccgctgctctgctgcctgtcctgggaaagtatctttgccccactaggaaatgtaaacaggagggcttggggagcgtgggcacttttctcatgagcagctactgcggcgttggcaggactcgctgctgctgctgctgcttgtgtaggtcggggagccggagatccccgaggacgcgcgccggacagtcggcactgaccggcccacctggtagcagaggacacccccagccccccaagcattgaagacatagtgtatttcctcgtatcctttctcccttgggtgtagttggggtggggaagcagggaaggctggtgcgatctccattccttgggctccacgtccgagttcatggtgcgccgctgtgctgggagctgcagtggtaatgtgtgggacaccttgaccaaaggggagctttgtctcgtgtgttttgaaaaaggcttaatgaagagaatgttgttcattcttagtagtatagtttgcaattcttaatggcaaataataagtttcagtagaaaacaaaaaaaaaaa

SEQ ID NO: 613379 - DNA, 1400 bp, Homo sapiens
  misc_feature (863)..(863): n is a, c, g, or t
gcccacgcgcggaggctcactagatctgctcgcagcgacattcacgatccctaccgaacatgccatagatgtacagatgccagtgtcatggtgcctggtatctccctaccaactgcattctagattcacagtggtcctcagggtatattgtcattgatgtctatggcggagataaggttgacgatgtggtcatggtggatgtatggttggtagagtctaagcgcgaaggcttattctagagcagattatagattagtgagtctagaacgggacagtaggatgcatgacatcagcatatgctggctatgttaacataggacagagtgtagtgcggaaagaggcgagtcaagacagagtagagcttagaatctgttgcaactcgaatgggattccttgtgatgagtgatacttcatgttcataatttgagggaacactttgtgagggtacttagatgcataaatccgtggagatgtgtgtacccatagggcattatatataaaacgtacctatctgacagaaaggcggtggcattcaaatgaatgaggttaaacgcacggagatgataggctcgaaaattgctgcgtaggtacaacattcgagcaacttttttacacacagtggtgtcccagtacgttcacaaccagacgttgaacagttgcgacgtagaacgcacccaggtgaacgctacttcggaacgagcaactaattatccattagggatctcttcgaactactcgatggtgagagccgttagcttcgagtaagccttgcgaaaaaattggcacggcggtaaaaacaggactacaggcccaccgtttttgtgtcgcctaaagaagctagccttgctcagtccctagaaganaaggatcggagctcaaaaggcccgaacaaaaccgattttcgcttgtccattgtggcatcgtgcgtcccattgacctagaagtccaacaaagctgtttacacgtgcaaattttggagggcacgcaccaaagaccacaagcgtacaactgtgcgagtacgatacgtccgtaaagagggctgtggtctaacagggaacgctagatttgagtcgctccacacgtttcgatttttggaccacgaggggggggtcatagtatcgagagatacacgtataattactctgatggtttctttagggactttaagaatgaagagagacagcgttgtagaagtggtaggtactcttgttcatgtgtcacggttggaacgttcattgtacctatataagccatcgaggaacaggtgatggacccagtgaaagattattaaaggctgggcgaaattcacaacaaccggttttaagcaatagaaggatgtgaaagaagaatgaagagacccaatgagtgtggggggccctgtttggacagagaggttgtgt

SEQ ID NO: 613380 - DNA, 1151 bp, Homo sapiens
tcttctctctgccttcgtcctctggcttttgtgcttgctctttccataactgttttactgccgcgtaccgattggtcgtcactgggccttatgctctcggttccgctcacccatatctttgcgtgcctcgtcgtgtcctcttgatgcggcatcccttttcttcttctcattggctttcctgcctcttcatgttgctccttcctcgagctactacgtcgacgttgacaggattttgcgcgcgcacgccgatcacacaggtccccttcctttcaagatctctgtccctcgtagacggatccaagccctggtgctattccatcaatgctgtacctcgaggttgtttaacacgttatggtctattctcggggggtgcactgtgtcgatgcgctcatccctaataacttcatcccatggaagtccggtcccagacttcgtaatgttctccgctgttgacaaattctacgccgctttcaccttcgatgctctcccacttcaagctaatcatcgttacttgtcgaatggctcatctgggctctccagatgcgaggagctgtttttaagatgcatgcaaagaccggggcttataccgtggtcgaagcacagtaccatcggggtgcattcaagtcggcgtctgtaaccctctctccgatgaagcacgtttgcgtgacatagttcaatggttactgcgtgcaccatgctcctgtaccagcaggggccacttgaaacgccaaggtacagggtgatgaactctgtggtactcagcatacagttatctccacttctttctcccactcacccccagcaaggtgcctggggagaattgagcagatgttatcaattcttaggccttaggcctagatggcgtgaaaggccagagcctcggccgaatggcaacgtgtgacactctggcattccccagctagctttcgcccagagaggcagaggggccttcacacagcccgggattgctcctgacagcgatcctgcacgtgctgcagcatgcaggcattctgaggggcaacgtggaggaagggccagggatgcaagggattataatatgtttcagtcacacctatccccgtggcaaagaaacagtcagtcctcttcaggtgtcttcatgatttaaagcgctgctggacagagaatgcttt

SEQ ID NO: 613381 - DNA, 2975 bp, Homo sapiens
ggaagatggacgcaggtgttattgaatgtgatgcaggatttttctcagccactctggcagccagagacctccggctggcgaggcccctgcccaggccttgcttgggtccaggctcgccgcaggagataccccatctacttggtccaccggtgtggcacctggtttgcactatggcacggataccatgggaagatggacgcagctactctgacctacgacactctccggtttgctgagtttgaagattttcctgagacctcagagcccgtttggatactgggtagaaaatacagcattttcacagaaaaggacgagatcttgtctgatgtggcatctagactttggtttacatacaggaaaaactttccagccattggggggacaggccccacctcggacacaggctggggctgcatgctgcggtgtggacagatgatctttgcccaagccctggtgtgccggcacctaggccgagattggaggtggacacaaaggaagaggcagccagacagctacttcagcgtcctcaacgcattcatcgacaggaaggacagttactactccattcaccagatagcgcaaatgggagttggcgaaggcaagtccataggccagtggtacgggcccaacactgtcgcccaggtcctgaagaagcttgctgtcttcgatacgtggagctccttggcggtccacattgcaatggacaacactgttgtgatggaggaaatcagaaggttgtgcaggaccagcgttccctgtgcaggcgccactgcgtttcctgcagattccgaccggcactgcaacggattccctgccggagctgaggtcaccaacaggccgtcgccatggagacccctggtacttctcattcccctgcgcctggggctcacggacatcaacgaggcctacgtggagacgctgaagcactgcttcatgatgccccagtccctgggcgtcatcggagggaagcccaacagcgcccactacttcatcggctacgttggtgaggagctcatctacctggacccccacaccacgcagccagccgtggagcccactgatggctgcttcatcccggacgagagcttccactgccagcacccgccgtgccgcatgagcatcgcggagcttgacccgtccatcgctgtggggtttttctgtaagactgaagatgacttcaatgattggtgccagcaagtcaaaaagctgtctctgcttggaggtgccctgcccatgtttgagctggtggagcagcagccttcacatctggcctgccccgacgtcctgaacctgtccctagattcttctgatgtagagcgactggaaagattcttcgactcagaagatgaagactttgaaatcctgtccctttgaaaatcctggggtcgggggtggcacctgtgagagcctggggctcctggtgccgctgcgtttcatccatcccgcccgctcgcctgccgagggctgcgccccgtgctgcctccccccagagggccacccgctgtgctcgtggactgaggctgcgctgcccgggaggccttactgcttggtgtcagactgcccagctcagagtgcccgtcagggcctgtgcatccgcacgcggagccgtctgttaggagcttccagagcgttctctcgacactgccagccccgtgttagcacctgggcctcagtcccacttgctcccaggcgccggttctgtggttggtttggaattaaagtcctgtttgaagttgtcagacacagacatgaatttctggggcgctccctgagtcagagtctcagaagacctgtgcaggctggcgtgagaggagcggcagccacactgcggccccacgcccaaggactgggctgctctcgaggggggcgcgcccaccgctgtgtcctctctgcccagcctggcttaccaagggctacctcagtgggagatgaggttggaggaacgaaggcgaggttcctccttgctttggggagaaaagtattcaggaagtgggtgtgtgggaaacctgaagatggcgtgcacaggacacagcgtggtcggcctgggcagaagggcggctggctgtcctggagctgctgctggagcctgccctcagagtgtccctttccagtgctgtggcattctgtggcagcttccccaggtgtggtgacgggggggggcggggcctccacctgtgacagtcaggcttgagggtggacggcgtgcctctcccaggagccttccccatgtccttgccttgctgagaattgccctcccatgccgctgaggtgttaggtggtttagggccaaaaggggaaaaccacttgagtcttgtggtgtgtggtgggcagacaccacagggtggcatcacctggtggcatttccagaacctcagccccgattccagcacccaccaccgcctgaccctgtgtaacctgctgtcccgggtcccagagtgcactctgccccgctgctctgctgcctgtcctgggaaagtatctttgccccactaggaaatgtaaacaggagggcttggggagcgtgggcacttttctcatgagcagctactgcggcgttggcaggactcgctgctgctgctgctgcttgtgtaggtcggggagccggagatccccgaggacgcgcgccggacagtcggcactgaccggcccacctggtagcagaggacacccccagccccccaagcattgaagacatagtgtatttcctcgtatcctttctcccttgggtgtagttggggtggggaagcagggaaggctggtgcgatctccattccttgggctccacgtccgagttcatggtgcgccgctgtgctgggagctgcagtggtaatgtgtgggacaccttgaccaaaggggagctttgtctcgtgtgttttgaaaaaggcttaatgaagagaatgttgttcattcttagtagtatagtttgcaattcttaatggcaaataataagtttcagtagaaaacaaaaaaaaaaa

SEQ ID NO: 613382 - DNA, 81 bp, Homo sapiens
tgtgttctatctagcctaggggaggacattgcctagagggggagggattgtctgggttcaggggcatggctggaggctgcg

SEQ ID NO: 613383 - DNA, 2825 bp, Homo sapiens
  misc_feature (12)..(12): n is a, c, g, or t
  misc_feature (18)..(18): n is a, c, g, or t
  misc_feature (21)..(23): n is a, c, g, or t
  misc_feature (25)..(28): n is a, c, g, or t
  misc_feature (31)..(32): n is a, c, g, or t
  misc_feature (35)..(35): n is a, c, g, or t
tggctaggtacnaggctngtnnnannnnggnnggntgggaagatggacgcagctactctgacctacgacactctccggtttgctgagtttgaagattttcctgagacctcagagcccgtttggatactgggtagaaaatacagcattttcacagaaaaggacgagatcttgtctgatgtggcatctagactttggtttacatacaggaaaaactttccagccattggggggacaggccccacctcggacacaggctggggctgcatgctgcggtgtggacagatgatctttgcccaagccctggtgtgccggcacctaggccgagattggaggtggacacaaaggaagaggcagccagacagctacttcagcgtcctcaacgcattcatcgacaggaaggacagttactactccattcaccagatagcgcaaatgggagttggcgaaggcaagtccataggccagtggtacgggcccaacactgtcgcccaggtcctgaagaagcttgctgtcttcgatacgtggagctccttggcggtccacattgcaatggacaacactgttgtgatggaggaaatcagaaggttgtgcaggaccagcgttccctgtgcaggcgccactgcgtttcctgcagattccgaccggcactgcaacggattccctgccggagctgaggtcaccaacaggccgtcgccatggagacccctggtacttctcattcccctgcgcctggggctcacggacatcaacgaggcctacgtggagacgctgaagcactgcttcatgatgccccagtccctgggcgtcatcggagggaagcccaacagcgcccactacttcatcggctacgttggtgaggagctcatctacctggacccccacaccacgcagccagccgtggagcccactgatggctgcttcatcccggacgagagcttccactgccagcacccgccgtgccgcatgagcatcgcggagcttgacccgtccatcgctgtggggtttttctgtaagactgaagatgacttcaatgattggtgccagcaagtcaaaaagctgtctctgcttggaggtgccctgcccatgtttgagctggtggagcagcagccttcacatctggcctgccccgacgtcctgaacctgtccctagattcttctgatgtagagcgactggaaagattcttcgactcagaagatgaagactttgaaatcctgtccctttgaaaatcctggggtcgggggtggcacctgtgagagcctggggctcctggtgccgctgcgtttcatccatcccgcccgctcgcctgccgagggctgcgccccgtgctgcctccccccagagggccacccgctgtgctcgtggactgaggctgcgctgcccgggaggccttactgcttggtgtcagactgcccagctcagagtgcccgtcagggcctgtgcatccgcacgcggagccgtctgttaggagcttccagagcgttctctcgacactgccagccccgtgttagcacctgggcctcagtcccacttgctcccaggcgccggttctgtggttggtttggaattaaagtcctgtttgaagttgtcagacacagacatgaatttctggggcgctccctgagtcagagtctcagaagacctgtgcaggctggcgtgagaggagcggcagccacactgcggccccacgcccaaggactgggctgctctcgaggggggcgcgcccaccgctgtgtcctctctgcccagcctggcttaccaagggctacctcagtgggagatgaggttggaggaacgaaggcgaggttcctccttgctttggggagaaaagtattcaggaagtgggtgtgtgggaaacctgaagatggcgtgcacaggacacagcgtggtcggcctgggcagaagggcggctggctgtcctggagctgctgctggagcctgccctcagagtgtccctttccagtgctgtggcattctgtggcagcttccccaggtgtggtgacgggggggggcggggcctccacctgtgacagtcaggcttgagggtggacggcgtgcctctcccaggagccttccccatgtccttgccttgctgagaattgccctcccatgccgctgaggtgttaggtggtttagggccaaaaggggaaaaccacttgagtcttgtggtgtgtggtgggcagacaccacagggtggcatcacctggtggcatttccagaacctcagccccgattccagcacccaccaccgcctgaccctgtgtaacctgctgtcccgggtcccagagtgcactctgccccgctgctctgctgcctgtcctgggaaagtatctttgccccactaggaaatgtaaacaggagggcttggggagcgtgggcacttttctcatgagcagctactgcggcgttggcaggactcgctgctgctgctgctgcttgtgtaggtcggggagccggagatccccgaggacgcgcgccggacagtcggcactgaccggcccacctggtagcagaggacacccccagccccccaagcattgaagacatagtgtatttcctcgtatcctttctcccttgggtgtagttggggtggggaagcagggaaggctggtgcgatctccattccttgggctccacgtccgagttcatggtgcgccgctgtgctgggagctgcagtggtaatgtgtgggacaccttgaccaaaggggagctttgtctcgtgtgttttgaaaaaggcttaatgaagagaatgttgttcattcttagtagtatagtttgcaattcttaatggcaaataataagtttcagtagaaaacaaaaaaaaaaa

SEQ ID NO: 613384 - DNA, 195 bp, Homo sapiens
  misc_feature (195)..(195): n is a, c, g, or t
ccgtgtagtcacagcttaggagctgagcaagagatcgcttagctgggagctgaattgtgccactgcactctagcctgggcaacagagtgagacctgctccctcacacccccaccaaaaggaataggaactgttttccaataaatacagttcttatttatgtcttcctatcagtggttaaaagacaattgctatan

SEQ ID NO: 613385 - DNA, 159 bp, Homo sapiens
  misc_feature (53)..(53): n is a, c, g, or t
  misc_feature (73)..(73): n is a, c, g, or t
  misc_feature (114)..(114): n is a, c, g, or t
  misc_feature (119)..(119): n is a, c, g, or t
tcggcacagccagaatgtttcttttctcaccaggttactgagatccggctcanatattttgatactgtacccngttgctgctgccatgtgtgtgcttaaaacagggttcctttntgtancatcagaatttgggaaaccagtgagtaatcctcctgtacc

SEQ ID NO: 613386 - DNA, 128 bp, Homo sapiens
tcacgtttgtcagcagacacatcctgcatgtgctgacacggcgggcaccatgtgcgggatgatgcagtggccaacctgacccagctgattgagggggcccaggagctacatgcctactctatgcgccg

SEQ ID NO: 613387 - DNA, 573 bp, Homo sapiens
tgaccttagaggaccccggaacgcatcagagtcaaatctgagggtatgattagagatgactagcaatgttaaagctgagaaggttatggcatgtgtatcaaaatattggtttgtaaaagtagaataagaaaacatataaatatattaaagacaataggagcaagacttctcactattgaagaagaaagctacacatttaagaagtttgaggctaggtcgagccatgtgactggaattgaaggtactgctgtgaactcatggttttaatatacataaatcagttgagatgtacctatatacatagattcaaacatcatttcctagatctgtccactaagagaatgtagaagcaatgacattcaaaaaccaagaagcacacctcacatccagatcttggtttctaaaaaccatatccaccaagcaaaccagggcttcttggaaaaatggctaatttcagggctgggataaggaaagtgtaagaaaagtcaaaaacatcttgtttcagaaagtaagaaagtattataaacttatgggcatttgtcccataatccatgtgaatggtcgtcgaagttg

SEQ ID NO: 613388 - DNA, 3416 bp, Homo sapiens
  misc_feature (1268)..(1268): n is a, c, g, or t
  misc_feature (1300)..(1300): n is a, c, g, or t
  misc_feature (1423)..(1423): n is a, c, g, or t
  misc_feature (1435)..(1435): n is a, c, g, or t
  misc_feature (1447)..(1447): n is a, c, g, or t
ggcgccggcacacctattggcccccgcggcgtcccgtcgccgcgtcgcgttgctggcccgtcggagcgacgccgctcgggtcagtcggcggccggactgggaagatggacgcagctactctgacctacgacactctccggtttgctgagtttgaagattttcctgagacctcagagcccgtttggatactgggtagaaaatacagcattttcacagaaaaggacgagatcttgtctgatgtggcatctagactttggtttacatacaggaaaaactttccagccattggggggacaggccccacctcggacacaggctggggctgcatgctgcggtgtggacagatgatctttgcccaagccctggtgtgccggcacctaggccgagattggaggtggacacaaaggaagaggcagccagacagctacttcagcgtcctcaacgcattcatcgacaggaaggacagttactactccattcaccagatagcgcaaatgggagttggcgaaggcaagtccataggccagtggtacgggcccaacactgtcgcccaggtcctgaagaagcttgctgtcttcgatacgtggagctccttggcggtccacattgcaatggacaacactgttgtgatggaggaaatcagaaggttgtgcaggaccagcgttccctgtgcaggcgccactgcgtttcctgcagattccgaccggcactgcaacggattccctgccggagctgaggtcaccaacaggccgtcgccatggagacccctggtacttctcattcccctgcgcctggggctcacggacatcaacgaggcctacgtggagacgctgaagcactgcttcatgatgccccagtccctgggcgtcatcggagggaagcccaacagcgcccactacttcatcggctacgttggtgaggagctcatctacctggacccccacaccacgcagccagccgtggagcccactgatggctgcttcatcccggacgagagcttccactgccagcacccgccgtgccgcatgagcatcgcggagcttgacccgtccatcgctgtggggtttttctgtaagactgaagatgacttcaatgattggtgccagcaagtcaaaaaggtttgtagccgccccacacccacagccgagctgagccacccagggagacaggcagtggggcgtgcaggggtcgaaggcctgcgtccaggtctcaggcagcctcactgggccgtggggagctttgtcccgcctggcacagctatgtagctnagcagggtggggcgtcctggattgcccatctngcaacacagttaacaaccctggggacggatgttgcgtgttgactttagaatgggatttccagtgtcctcatccgtctcctgttgagatgggggtggtgatggggtgctgagctacgccggccnagtgcgtgtggnccacccccctcngccgtggtggtcagactgtgctgtgtgttgatcaccacactgggttctcgtgtagcctttagtgtggagctgcctctgttttctcatcagtgagatgggatgacaggtttgtccgctggctgtggccggctggcccctttctcttggccgcagcaagcactggggtgaggctgcacctaacggccatgtctcactaacagctgtctctgcttggaggtgccctgcccatgtttgagctggtggagcagcagccttcacatctggcctgccccgacgtcctgaacctgtccctagattcttctgatgtagagcgactggaaagattcttcgactcagaagatgaagactttgaaatcctgtccctttgaaaatcctggggtcgggggtggcacctgtgagagcctggggctcctggtgccgctgcgtttcatccatcccgcccgctcgcctgccgagggctgcgccccgtgctgcctccccccagagggccacccgctgtgctcgtggactgaggctgcgctgcccgggaggccttactgcttggtgtcagactgcccagctcagagtgcccgtcagggcctgtgcatccgcacgcggagccgtctgttaggagcttccagagcgttctctcgacactgccagccccgtgttagcacctgggcctcagtcccacttgctcccaggcgccggttctgtggttggtttggaattaaagtcctgtttgaagttgtcagacacagacatgaatttctggggcgctccctgagtcagagtctcagaagacctgtgcaggctggcgtgagaggagcggcagccacactgcggccccacgcccaaggactgggctgctctcgaggggggcgcgcccaccgctgtgtcctctctgcccagcctggcttaccaagggctacctcagtgggagatgaggttggaggaacgaaggcgaggttcctccttgctttggggagaaaagtattcaggaagtgggtgtgtgggaaacctgaagatggcgtgcacaggacacagcgtggtcggcctgggcagaagggcggctggctgtcctggagctgctgctggagcctgccctcagagtgtccctttccagtgctgtggcattctgtggcagcttccccaggtgtggtgacgggggggggcggggcctccacctgtgacagtcaggcttgagggtggacggcgtgcctctcccaggagccttccccatgtccttgccttgctgagaattgccctcccatgccgctgaggtgttaggtggtttagggccaaaaggggaaaaccacttgagtcttgtggtgtgtggtgggcagacaccacagggtggcatcacctggtggcatttccagaacctcagccccgattccagcacccaccaccgcctgaccctgtgtaacctgctgtcccgggtcccagagtgcactctgccccgctgctctgctgcctgtcctgggaaagtatctttgccccactaggaaatgtaaacaggagggcttggggagcgtgggcacttttctcatgagcagctactgcggcgttggcaggactcgctgctgctgctgctgcttgtgtaggtcggggagccggagatccccgaggacgcgcgccggacagtcggcactgaccggcccacctggtagcagaggacacccccagccccccaagcattgaagacatagtgtatttcctcgtatcctttctcccttgggtgtagttggggtggggaagcagggaaggctggtgcgatctccattccttgggctccacgtccgagttcatggtgcgccgctgtgctgggagctgcagtggtaatgtgtgggacaccttgaccaaaggggagctttgtctcgtgtgttttgaaaaaggcttaatgaagagaatgttgttcattcttagtagtatagtttgcaattcttaatggcaaataataagtttcagtagaaaacaaaaaaaaaaa

SEQ ID NO: 613389 - DNA, 315 bp, Homo sapiens
cagggatggtgtcgaacttgggagctcaggtcgaccgcggggagagctcagacttggaggttcaaacgatggtgctgcctcagcctcccaagtagctggaattacaggggcctgccaccacactcagctaattttagtgttttgggtagagatggggtttcaccatgttgtccaggctggtctccaactcctgaccttaagcgatctgcccaccttgggctcccaaagtgctgggtttacaggcttgagccactgcacctggccagcttaatatattcttagactatggaaggcaggtaggatacagtagggaga

SEQ ID NO: 613390 - DNA, 118 bp, Homo sapiens
cgagtggtccctgctctgcagtatagtgtgctatgttttgttttcccacttgagccagaagccgaaatattatactaccacgttaccaccatctaccacctccagcaggacccactcg

SEQ ID NO: 613391 - DNA, 494 bp, Homo sapiens
tccccttcgacgggtactgaaccaagtacaaattcccaactgtgaccttctggagctggatataacaggacaagtctgaggtgaacatgaaagacaagccaaagaaggtgtcctgttctggtcacagggggtaggaggtccccagaggcagtgacagagtcagacatctcagaggaggaaggtgtgacaagggagtggagagaagcttcgagtaaaagagggttttacctcatgcaaatttggagctcgttttgcagaatggcccagtagcctctttgggcagagggatgtctggagttgaggaatttcactttgtagagctgatcttggttcctgctgttttgggagacctcagcgctctacattctctgagaggggtatgtggaagtggctgactcaaaacccagcggtgctaccatgaagcaagcataagccagataggagctaggagaccctgcagctgaggctgtggagtggacagcactggtcaggag

SEQ ID NO: 613392 - DNA, 298 bp, Homo sapiens
cttgacatctccgccttactttgtagccttcatcagagattcgctgaagattgcggtatataggctgagcaagaggtggtgaggttgctcggggtttatcgattacagaacaggctcctctagagggatctgaagcaccgccaggtcctttgagttaaaagctgtggctcgtagtgtactggacgagcagtaatgtagattaaactgttgaggtttagggctaagcatagaggggtatctaatcccggatagggtccttagcaattgagtgtacagatatgttaaaaccacttgcgaa

SEQ ID NO: 613393 - DNA, 902 bp, Homo sapiens
gtggtttaaaagaaagtgtctactttagaagctttggtcgtttgctgaaatagccaccctttcagtgctagcccttgggctggaatttaagtccagggtctgatcgagccagaaagtaggtgtcagcgtggcttccggaagtccgttgtcacttggatttgacaagggacaagccgacctgctggtttctgggctcctgctcgctgtgcgctctgcgctgtctgcagggattggtgcccgcggagtgcgctttgtctggagaaactcagtgctcgaagagtgaggagaccgggaggaaaccttccccctgcaaagcttatctcccttccctctcatcagaggcggggccccgcaagacacaagggatttccccgcagaatgaaccaaggcctccccaggacatggggtcagttctgctgtgcaaagcctgaattcacgtttctttcctaaagtggctcccagtctctctgcagccttggcctctctttgaatcccaaccctgacttccctggtgtctgttggccactcccttctgggagccggcaggtgaaaccctgacctgtgagcccggcctgggctctccaggctctgggccccctaccctcccgatctgtggccctcactcctcctgggcgaggctgttgtgacgcggtgtgtcccaattgcacacaagccgaaacccaactttaaaaaaagcgtagaggacacattctctttctcctaacctttaaaaatacacccagggtatctggaaaggcaggtccacgtttagaattcctcaagctaaggcggcccagggttcacgcctgtatccaaattccaagtgaatggagatgttgagccggacttgagacagcgggttttagggactgtctcaagtaaattcccggctgtgatcttcc

SEQ ID NO: 613394 - DNA, 103 bp, Homo sapiens
catgtgtgcttctgtcgagagtgccttcccgccgcctcccgtcccccgactcgaggacatcatttccccctgcgccgtctggagggaggtagcatcttcccct

SEQ ID NO: 613395 - DNA, 331 bp, Homo sapiens
gcgacatgcgggtgtggctgtaggatgtgggtcctctctgctgccttctttcccacacaatctcgtgccctcactcatctgctccagctgcaccagcctccttagaacatggccgggagctgtggcccacgtctgtaatcccggtactttgggaggtcaaggagggcagatcacctgaggtcaggagtttgagaccagcctggccaacatggtgaaactccatctctactaaaaatacaaaaattagctgggcatggtaacgcacacctgtaatcccagctactcaggaggctgaggcaagaggatcagttgagccatggagtaaatggca

SEQ ID NO: 613396 - DNA, 910 bp, Homo sapiens
cacgtctctgcctgctcgactctccgcccgggccgctcggccggtccagccgcggccggcgcctggctgtgaggtggattcccggcccagtctgaccatctccctccagtttttccacttgcgttcggaccttctcgataacatatgtcgaccctcgtacgtcgtccccttcacccgagaatgccgttccgcctagcctcacgagcccgtcaatagtccgctcgcgtatggcggaggctggcgtgagggtcccgtgatggggcaggagccgcacgagcgggatcttgatgcatgcgcaggcgtgagccgtacagggagttatagcgaaagcacgtacaactcatgatcgcatagcacgaggtatttactgcgtccatgaggaagctcgattgtgtcgagcagtgtgcttcctgtgggtggatgtagaacgtgtgcttcgacctgcgctggcctgcaagtgccgaaaggacacgatcgccctacggagaccatcgagatgcgcgcaactgaagttgccgcaacgtgcgtctagttgcctcgcacgcacccatagcgtccgtcatgttgcagagttaccccaggccaacaacagcacctacttggcctggttgccccccttacgcaaacagctctttgattccaaggaaacgcggacgcaatacacccctgtacccaccttaagcgttggccaccgtctctcgcgctacaatcttccaccaccgctcggtaccctggcccacttccacaccacacgcgggtcgctccaggatggaccccaccccttccacccaaacttggcggcctcacctagcaaacctccgtagcaagggggttggtcgcaacgactttccccttccccgcgactccaactcaacagcagctcgccaaacgctccttggcaaccttgggg

SEQ ID NO: 613397 - DNA, 394 bp, Homo sapiens
gatgacatttcttaccaattttggctgaatgaccatcacctacattgcagaattggtgtgtatagtatatgcgttgctacttttgtaaacttttcctgaatttgagcggctaccttgatactgcagtttcatgtctgaactgaattagctcttattcatatagccactcagcagccataaaaccccctaggatggttagtccactcatttccgcttgggaaacttctgtgagagtatatttttcttgcgcaccatgtacggtatttcccactaaatcaatgctacgtgtcactaaggtatgtgtgtattatgatcatagtagtagcatagtttccacctgtatcacgtactttataatagtgatagatctgtttcattgtggacctgggcgtga

SEQ ID NO: 613398 - DNA, 933 bp, Homo sapiens
tgcctccgctaaccataatcatcgctatccccaccggcgtcgaagtatatagctgatctcgtccacactccacgtgaagcacatatgaaatgatctgctgcaggatgctctgagccctaggattcatctttctttttgtcaccgtgactgtggcctgacatggcattgtttcaggcaaactcatcactagaaccactcgttactaacatcggagcagcagtactatcgtttgctaagcattcgagctatcgcatctgatgctcactagtcacattaagcgagcatgtatgtgtgctcgatcatagtgaggctatcattcactagattatcgccctatactcaggctacatcgccctagaccagacctacgcctaaagccattttcaccatatgatatccatcggggtatactcgtaatgtttcttcccaaaacaactttgctctggcctatccggaatgcccccgacgtcacgcggactaccccgatgctacatgcagcatgaaacagtcctagtcatctgtagggctcatgcatttctctgatcaaggcagtgaatgttactaattttcatgatttgagaagccttcgctatcgatagcgaaaagtccctaatacgtaataagaaacctccatgatcctgggagtgactatgtgggatgccaccccaccgtacgaaagatcgaagacatccgtatacttatactctagacactactggcgggatctgaacccccaaaggaggttacaaggcagccatggctgcatgacttttcgacactgctcctacagtgccaacactgttgggggcctgcccttaaaaattaaacgcactgtggccggggaccccaagaaacagcgcccttctcagaccccggtacatcggggttcccaaaacccggccgcgttgaaacaggggtgccggataaagaacg

SEQ ID NO: 613399 - DNA, 283 bp, Homo sapiens
tatagtcacgtggtgtctatatctcccaatgtcagagtattactcctgcatagaactgactgcccgagtgcccatgtctttgatcttggactcagcggtgagcttttatggtgtgtgtgtgtgcatttgtgccccggtttttggaccatctttgttggtgcacgtgtggggtatgtgcatggggtgtgtgcaggtgtgtgtgtgcatgtgtgcccaggtgtttgagcatgtgcatcggtgcacgtgtggggtatgtgcattgggtgtgtgcacgtgtgtgtgt

SEQ ID NO: 613400 - DNA, 618 bp, Homo sapiens
cgcagtggctcatgcctgtaatcccagcactttgggaggccaaggagggcagatcaccaggtcaggagatcgagaccatcctggccaacatggtgaaaccccgtctctattaaaaatacaaaatttagctgggtgtggtggtgtgtgcctgtagtccgagctactcgggaggctgaggcaggagaatctcttgggcccaggaggcagaggttgtagtgagcggagatcaggccattgcactccagcctgggcaacgagcaaaattccatctcaaaagaaaaaaatgttcattttctaaatatataatttcttctacagtgtattaactagcatgctttggtaaagattttctattactttactattactataagctcatggatttttttaaagaatcaatatgtggtaatcaattatagctactgttcttggcttaggcattctgatgctcaatttgtctcaaatgtgactacatgggagctccttcaagatgactcttgtccctattgacatgatcccattaatctttatgttaaatcgtggtaaacaacaatacatctaacataaaattaccatcttaaccatttttaagtggacaattcagtaatgttacctatc

SEQ ID NO: 613401 - DNA, 276 bp, Homo sapiens
aaatataaacataaaatcagcccacactggtggcacctgcttgtatgtagtctcagctactcagaggctaagggaggaagatcgcttaagcccaggtcttcaaggctcagcaagctataatcacaccactgcactccagcctggggtacagagcaagaccctgtctctaaaataaatttttaaaacacacacacacacacacacacacacacacacacacacacatcccagtgcgtgcactctgctatagacccttcagcagttgcttgttccgct

SEQ ID NO: 613402 - DNA, 865 bp, Homo sapiens
gtggcctgtgccacgtgcgggcgcttcaggtgtgggtttggtcgaggcctctcatgtccctgtctcggggagctatgcgcgcctttgctggcctttcttgtggaataggacgccgttgcgcctccgtgcatggtgtgtgcggatctctgcctcgcttatgttggccccttcgtctacggcggcctgtaggtgtgccaatgtggccagccgttggaggtggggtttatatccccggccccgctgtgtcccgatttttgtcgaccgccgcccggccgtggcctccgcctgggagggggtttgagacgaggtgttggcgcgggggccacctttagtgaggccgcgctgtttttggagatgttttgagattgggccgcctagtttctccccactgctgagagcatcgcagggtcttggattcctcccgcccgccgctgccctttggtaatcgtcttgccccccgagaacctggtaggcgggggtgtcccccccggtgttgtcgcgcccccgcccccctcggcccctccttgggtggctgccgctccccccctggctccggtgcgtggtttccccccacagggggccctgtggagtatattgctcccagagcatagctcttagtctaggcccccccatcaggtcccccgcgcgccccatacaccgttgcttcttctagagcctctgattgtttccccccccttgctccagaacttggccccaattgttcaccacggttttaaatctaaggcccccactctgggtcaaaccaacaaccccgcccctagctcctcccgacagacgtgtgcccccctctcacacctatccttcctttctcccccttttataaattaaatttccccaacatgac

SEQ ID NO: 613403 - DNA, 182 bp, Homo sapiens
  misc_feature (46)..(46): n is a, c, g, or t
cggcacgagcatggcgcagtctattaacatcacggagctgaatctnccgcagctagaaatgctcaagaaccagctggaccaggaagtggagttcttgtccacgtccattgctcagctcaaagtggtacagaccaagtatgtggtaagtcaaggtatgttcgatacgagtcgtaacagggcta

SEQ ID NO: 613404 - DNA, 119 bp, Homo sapiens
aatcgagtggtaccgaatacggctctctgggggacagtcccagctgctatgtcgctgttgctgctactgacccgtgtcagcctgggacagacgtggtgccccagagcacatcagctatg

SEQ ID NO: 613405 - DNA, 872 bp, Homo sapiens
  misc_feature (6)..(6): n is a, c, g, or t
  misc_feature (124)..(124): n is a, c, g, or t
  misc_feature (163)..(163): n is a, c, g, or t
  misc_feature (184)..(184): n is a, c, g, or t
  misc_feature (186)..(186): n is a, c, g, or t
  misc_feature (190)..(190): n is a, c, g, or t
  misc_feature (195)..(195): n is a, c, g, or t
  misc_feature (228)..(228): n is a, c, g, or t
  misc_feature (248)..(248): n is a, c, g, or t
  misc_feature (251)..(251): n is a, c, g, or t
  misc_feature (276)..(276): n is a, c, g, or t
  misc_feature (280)..(280): n is a, c, g, or t
  misc_feature (289)..(289): n is a, c, g, or t
  misc_feature (295)..(295): n is a, c, g, or t
  misc_feature (302)..(302): n is a, c, g, or t
  misc_feature (305)..(306): n is a, c, g, or t
  misc_feature (313)..(313): n is a, c, g, or t
  misc_feature (337)..(337): n is a, c, g, or t
  misc_feature (355)..(355): n is a, c, g, or t
  misc_feature (357)..(357): n is a, c, g, or t
  misc_feature (438)..(438): n is a, c, g, or t
  misc_feature (450)..(450): n is a, c, g, or t
  misc_feature (465)..(465): n is a, c, g, or t
  misc_feature (503)..(503): n is a, c, g, or t
  misc_feature (549)..(549): n is a, c, g, or t
  misc_feature (553)..(553): n is a, c, g, or t
  misc_feature (574)..(574): n is a, c, g, or t
  misc_feature (605)..(605): n is a, c, g, or t
  misc_feature (612)..(612): n is a, c, g, or t
  misc_feature (681)..(681): n is a, c, g, or t
  misc_feature (761)..(761): n is a, c, g, or t
  misc_feature (784)..(784): n is a, c, g, or t
  misc_feature (811)..(811): n is a, c, g, or t
  misc_feature (840)..(840): n is a, c, g, or t
gctgcntatggaatactgttatgttaaacttcacttacaggatgttaaatccttagaactaaggtattccccccagaaaaagattaatggaaacatcaattgcttttcagacttgatagttgcngcttcaaaaggtggttttacacaaatactaaattaaaanaaaaaaaaaaaaccttttgtncncaangaatngcttttatttcggtatgcatccacatttcagcntttaggggtcctgaccagcnagnggcatgccgcagcaatttgccaggnggtnaagcccacnaatttngggggtntgnngtgcacnccgggttccttcttaatccctgcngaggatcttgggaagcancngcggccccaaaaccaaggcatgccccggattcaaggttctttttgttccagttgtcagattccaaactagaccccaatggnttgcaagggtgnccaaatgaaagcccngtttaaaacttcttcaatttttaaaagcaaaagcagtnacaggaaagtaaaacaattcagagggatcatgtgtgcttacaagtntctncatgcggtctttctccaagtncaaccaccaaggactccgagagctggcaggnctgagtnaccctggtgactattcttttcaccttatcaaaacctgagctaaaaacaatgcatcagctgatgacagcngagggtggcagggctgaggacccaatattcatttcccaggctggtggagagttagtcagtatggttccaaaactaaacangggaggtcagaggctctttccanccttcctgatggcttctggcaaagcangaagtgtcaaggaaggtgttgggtggtgnggtgcaaaaggacttgagggggggggaaaagc

SEQ ID NO: 613406 - DNA, 352 bp, Homo sapiens
aaaaaaaaagggccccctttttttctttttaattttttttccccctttgggaagcccccaaccggggccacccgggttttaaaaaaaaaaaaaaaaatggagggggtttttttccccctttaacctcgccagggggggtgggggaatccgggagacccaggttgttctcccccccaaagaggagggggaatggggatttgttttccccccccccaaagaattccccctttttttttttttttccttttgaaccccccccggttccccgggggccccggaaattttttttccccaaatgggaaagggcgggttgatatttttaaagggtaaaaaatttgggatttttgctgga

SEQ ID NO: 613407 - DNA, 87 bp, Homo sapiens
  misc_feature (63)..(63): n is a, c, g, or t
  misc_feature (78)..(78): n is a, c, g, or t
tgaggaaggacaaatgacttgtgaaccatgcccaagaacagggaaagtcttgggccctgaagnacccagaaggttggnataagtctg

SEQ ID NO: 613408 - DNA, 737 bp, Homo sapiens
ggatactgtatttccccatggcttcctcctcgcgttgtgatgcaggtgaagacattcagtgaagcttgcctgatggtaaggaaatcagtcctagaacttctgtattacgtgaaaaaaagctaggtttgcgttatccaggcgtatacagatatcttctgtatgggagagaagggaatcgtggaagaatatccggtaagtctttgccatgtttattcaatttctgtggaaaacaggatctgggttgatagtacaattatgtccagatgcctcaatctttgggtgagaaattgtcgggatctctctgcagtgcaactagcagtagtacagagctttgatcaaacttatagaaggttcaaactggttgaatggaagtattcaaaactacaagatgatgcagcgtgtccctgaagccagaataaaagtgtcacagagaagtagtgtctggaagtaagagagaaagcaactgagaaagggagtcctctgggaaaagtggtatgaacagggtaataacacggatgaggaaagccaatgagatgcagttggaagttgtgcgtgaacagagctaaagaggcaaagtgcattgtgggtatgtccaggcttcgtagtgggcgtgtgatgggaatcaattgctccgttggggaagaaacaattctgtgaatggagaagataaaagcgcgattggtgccacgaggaattagcacgttgttaaaacttgaggaaagtgatgaaaatgattg

SEQ ID NO: 613409 - DNA, 320 bp, Homo sapiens
tagaagcagtaacaccaaaaacaacaggttcatgtcataggcgttttgcagtcatcaactatcaccatccatttcccacatccagtctttgccctccatgcaagcacatccctcagcaggcaagcatccaggcaaacatcaagtcattttcccagttattgcttgcacagtttctcaaacacaaccaaacataacactccacatgcacacaggcccagcatgtttcttttacagctagcagcatgcacagcattgcttctctggtattcaacatcagtttcatgctggtggaggcatcctctcagcagtctgcacctgcc

SEQ ID NO: 613410 - DNA, 704 bp, Homo sapiens
  misc_feature (9)..(9): n is a, c, g, or t
  misc_feature (103)..(103): n is a, c, g, or t
  misc_feature (161)..(161): n is a, c, g, or t
tccgctgcntcaccatgtgtcactctcgcagctgccacccgaccatgaccatcctgcaggccccgaccccggccccctccaccatcccgggaccccggcgggnctccggtcctgagatcttcaccttcgaccctctcccggagcccgcagcggcccctgcnggcgccccagctcgttcgcgggcaccgaaagcgcagcgcaggttctctaccctcgagtggtccggcgccagtgccagtcgaggaaccgaacccagccaaaaggcttctctttctgcgtgctcaccatcgtcttcgtgccagatcctgatggctgaagagggtgtgccggcgccctttgcctccagaggaagcgcccctaagcgccggcatcccctgggtgcacccaccccgtgtggtccccgcgtccttcgaagcccttaaaagtctggacttacggagccctcggagtacgctcgtggacctcagcactttcctccagcaacacccgggccgcctttctaacgtgtgactccccgcgaatctccccaaaaaagaatccgaaaaaccacaaagaaacaccaggcgtacctggtgcgcgagagcgtatccccaagtgggacttccgaggcaattgaactcagaacactacagccggagacgccacccggtgcttgaggcgggaccgaggcgcacagagaccgaggcgcatagagaccgaggcac

SEQ ID NO: 613411 - DNA, 595 bp, Homo sapiens
taggatacataaggtttattgaaatgcttgtggagacagttcttactctgttgaccagtctggagtgcagaagaggaattattttccactgaaaatgaaaagaagtggggcaaggccattctcctgttgaaaaaacagaatagctgtgagtacagatgagggccgccacaccaggatattttttatttaacggagagataggggtattgattctgtgcgcatgctgggatgagatgtcggggttcaagaaaaattgccaccttgttttacgaaagtgttgggatagcgggcatgaccaatggagaccgcccggggtgacaagttatctgacatatgggttggtaatcagcactacgaaaaaaagctggtgaattacataactctcagtttagtacgaaagatgtgaccatccgtgtggcacttggttatttcacaaacttatgcacttagactaactctgttgactttaggcttatcagagttaatgagggacatactgagcttgttgtcggtttagtatgaggggaacgagtatacaggaacaatggcaaaggtgaggcgtagaagagatttctttggtcataccagaaaagaa

SEQ ID NO: 613412 - DNA, 534 bp, Homo sapiens
actggagtaaggctggctttgtcagtccggctcccccaggttgagagccacggctgagcaagagggtgcagtggcgcagccctttcaaccagtgccaccacctccagcctggcaatctgggctcccgagctccctgatgggcaggtggcggcgactgtcagacccacatctccatctgcttccgccctttacttttcactagtggtggcgactgtcagacccacatctccatctgcttctgccctttacttttcactggtggcggcgactctgtcagagccatatctccatctgcttccgccctttacttttcagtggtggcggcgaatctgtcagacccatatctccatctgcttccgccctttactttacactcgtggcggcgactctgtgagacccatatgtccatctgcttccgccctttacttcacactggtggcggcgactatcagacccatatctccatctgctcgcgccctttacttttcactggtggcggcgagtgtcagaaccacatctccatctgctcccgcc

SEQ ID NO: 613413 - DNA, 313 bp, Homo sapiens
gggaaccccggggggggagggcgggttttttaaattttttttaggggaatttttcccctttgatctcccggggggttcccccgggcccgggggtggggggggcccccggtttgggaattttttttgttttaaaaacccccttttttgaattaaagggacccttggggttttttaaggggggggggggggcccccccccccctccccctgggggtgggggcggggtttttttttcttttttcccccccccctttggggggggggggggcccgttgggaaacccccctttttttttttaaggggggtttccccca

SEQ ID NO: 613414 - DNA, 231 bp, Homo sapiens
tacgtctcgatcgttagaatctgaaataccaaaaataaataaagaggctggcttgtatatatagtcgaagacttttctaaactagaaaaatcttttatgtgtctcaactaccttatatcttctgaagaatgacaacatgcattctactatgggagaggttgtgggagaggtcgttacctttgaaatcccgtcctgcatctcatttcttggatcaaatgttccgtcatcata

SEQ ID NO: 613415 - DNA, 917 bp, Homo sapiens
  misc_feature (27)..(27): n is a, c, g, or t
  misc_feature (79)..(79): n is a, c, g, or t
ccccaagccgcctcaaaagcaaaaaanaaaaacctcgttgggttacgcgcaccggacttttgacggtgtacctatctgngtatctgcccttctccttgggatactatggaataaaaaaagtgatcattgtctacgttgaaagcctcctgccgtgttcaaacgttatccatgcccggaaagattctcgtccatccctcagactacttcattagtcacaggccggatctgaaggactcctataccacatagacgcacattgagcgattttttttgcaaatgggaactgactcattaagaatattgcagacaccgacggatcgcctctcattgcaggtaacaaaccctcctagttatttgaaaggcccctcgccgtacagcaattatcacacgctaggaccaaaaggtcccccacacgtcctggcaatcagatgcttcactcacacacccccactgccgaccacgcacctcacccctcccatcaccaataacacccgcaccctcacgcacaccccttgtcccccgacctgaactatccacgcacatatatacatccgcgccgcccaactcgacactccgcgctccgaaacccaaccttaagccaagaccgattttgcgtcccagcgactagcactgcacctcccatacaacatcctcatcactgaccaatccgctacgcggcgcccccaaccatggatgactcactccccggtctcacctcgctactccgcccccccccatattacacatacccgcacaccgtcctgacgcaccccccgctcccgccgctccgtcaccccacccacccaccaccgctcccattagactcatactctcattatccccgcctcatatccttcccactgacatctccctcgcccacacgccatctcctgctattttatacctcggtgccgatg

SEQ ID NO: 613416 - DNA, 216 bp, Homo sapiens
gttgagagctacaccttcttcatagacatcctgctcgagaaaatcagtgctgagatctcggggtgcctcgagaatgcctacgagaaaatccttttcagtgaggccacccggatcctcttcttcaacacacccgaaaaggtgacagactacgccaagaagcgagggtgggtcctgggccccaacaactactacagtattagctcagcgctggaacca

SEQ ID NO: 613417 - DNA, 250 bp, Homo sapiens
ctatggggacgggctgttcatctacttcaggaatcagaaaggtgaggagccttaggtcagtggctctctccatacgcttattctggaggaggaactatggcttagctgaggttagttctcagtatatgaatggccctggataaagcttttctattcccaaactgacctccaatgttctgcacttccagacaatcatcagggcactggttgctctgtcaaacgcataactagcttgtggccatacagagac

SEQ ID NO: 613418 - DNA, 183 bp, Homo sapiens
  misc_feature (49)..(49): n is a, c, g, or t
  misc_feature (154)..(154): n is a, c, g, or t
ggcttttttcctcccctttccgtggagagactatcaactccatctgtcncaaaaattaaggctaaatctcctatcaaaaaaaaatggtccgtggggctttgacgcgctcagcgtcgggctgtctgcctctccctagcggccaagtgaatttganatggcccccgtcacagccggaggcccagc

SEQ ID NO: 613419 - DNA, 125 bp, Homo sapiens
gaaagccatattatctggagaaaatcattttaaataccatcattcaacaaattatgttcagaaagtggtcagaacttcaagcaagatgaagtaacagaaagaatgcagaattgtggatgcaatgc

SEQ ID NO: 613420 - DNA, 476 bp, Homo sapiens
cagggttttatagcctcttgctgagtatttctcatctcttgctaagtatttctactgtggtgcaaaagcaatcttattatgtgttgctgtatttttatagtcaattgaaatgactattaaaatataacattgctcatcaggctcagagcagcactgctggagaggcctgcccttgcagatgaggcagctgagtcctggaaagagaggccttcttgggaatcacagccgatgcaggggcctgaggcctgggctgctatgtaggaccctccacaacctcagaacagtcctgggctctgctgtcacatcttgaaatgtttttttctattttctttattgtggcaagatatatataacctaaaatttcccatttgaaccatttttaggtgtacagttcagtggcgttaaacacactgacgttgttgggcaaccatcaccaccatccattgccagaactcttttcttcttcctgaagacag

SEQ ID NO: 613421 - DNA, 133 bp, Homo sapiens
gacagccagaggagggtgacagctgacagcacagaggagatgacagcacagaggaggtggaaggcccgcttcggcatgagtcgcagcctaatcgagaggagccattaggtggctatctgctccacactcacat

SEQ ID NO: 613422 - DNA, 935 bp, Homo sapiens
ggcacgcaccgcctcttccgcttctgtggtctgatcttcctgcgtgtgaaccgcccggctgagccgactttgccggcgtctgtgggattcgggcccagagaagctccgaattcggctacacgcatgggtggcctacttggagacaaggctgggacctcagctacaatccggatactcccaagatctggtgcaaaaagcagtgacgagatgcacgtgaagaacagaatttcaaaggcaaattggctgagaagaatttctgggacagcaagcgtacaaaattggtgacaaggtaaaagcaacggaaataagtctaaccgctgaactaaaggtctgggaacaatggctaacattttcccaaagggttgaacagattgctgtggggccaccattgctacatggggcagaactgggaccaacagagaattcttcaattatccaatgggcgcacacaaacaacacaaaaatctcctctgctcatctgggtcccaacatcacaacctgtgtggcacaaagtgaggccaaacaccaacaaacgttcggacacaaatcaggggggtacacactgtggcccaaaacatacaacacacaaacacaaccacgcacaacataacaaaacaccacaccaacagtgatattcacacaccccacacactatcgacccacacacacaaaacaaaaagtataactaagaaaacaaaacccacaattccgcagtagttgcgagaaacacagccgagagaccacaccacaacaacgagcaaacaagagaagaacacacctggcgacacaaacaaacaagaccgcggcattcaccaccaaaaaggagagaaaacaactcacgggagcaacaagcacacaaacaagcgcggcacagcagggaacaaacacaccacaacacaaaacataaaacaaacaacacagcaccgccagaggag

SEQ ID NO: 613423 - DNA, 551 bp, Homo sapiens
gtatgctgctgcctgctgacgcctgtacctgctgctgtgccgtggtgtgattgtgtgccgtgggtctccagcgtctgacctgatgggtgagctgggctccgctcgggcctgctttttgctgacctgtgcctgtcatgccccagcgtctgcctggcctggaggggcgaagaggacgaggtgggccaatggcttcctccggggacattggctccctggattatcaatgagtttgtagtttgacatttgaatccatggctgacggactggaaaggtgttggaacttagaagcaacgcaatggcaagatgaagattttaccgatacctttaccagaagatgatagtattgaagcagatatactagctataactggaccagaggaccagcctggctcactagaagttaatggaacataacagtgagaaagaagcctaatggctccagacattagcctgacactggatcctagtgatggctctgtattgtcacgatgatctggatgacatgtggggagattgaccttagatggcttagacacaccgtccgagaactc

SEQ ID NO: 613424 - DNA, 276 bp, Homo sapiens
  misc_feature (87)..(87): n is a, c, g, or t
tatattcatgggagattggaaagatgtgtgaggagaaggtctagtctaagtgattatccttcctcgtacggattcaggtattgaggnggcactcttctgtaattcatgtttttctctcctaacctcactcctgttggctgcatcttcttgctgagcaaaatattcaaggtcttcaactcctcacaccctggttgtccctccctggatgtgtttggttgttttagtgttccatttcaattttgatacacagaattagaatagcatccagatgtggat

SEQ ID NO: 613425 - DNA, 177 bp, Homo sapiens
gagctagataaggcgtgtctacatgcctgtctatttttttattttagagacaggtccgctctattgcctggtggaatgcagtggtgtgatcacagctcactgcagcctcgaactactggactcaaaggatcctactgcctcagcctcctgagtagctaggaccataggcatgctccg

SEQ ID NO: 613426 - DNA, 395 bp, Homo sapiens
ccggctcgttcgggtagagctgttgtgactaccccatggcctaagaactggtatttcaggcccttcgatctgccctgttatacctatcttctgtctgcctgctcctgggaggtgtctgtggccggatggacaataaaaaaaatggagagatgcccctcaggagcttggaaatcagtggggaacatcacctcctttcgtggtatactgatttatctgacatatccaaacaggtattgatcctgagaccccaggcaggcccttcttagcagcagtgctgtcggccagcgtcaagcttcgccatcatgctccttcacaacaagactcaatacctccaaagtaaccttactaacaacaaatcaatacttcctccaagacgaactcagacttgcttattt

SEQ ID NO: 613427 - DNA, 390 bp, Homo sapiens
ctgccctagcctcctgagtagctgggaccacaggtgtgtgcaaccatgcccggctaaatttttaaaatgtttagtagagttgggggggggggggtccccctgtgttgcctagcgtggtcttgagctcctggcctgaagccaccattccaccccagtctcccaaagttgtgggtttacgggtataagcccctgtgcgcggcctcagttgtgaccttccatctatggtctaaacctctcaagatatccagatgtgtcgttctttggccaatacccttttccctggagtcatctgatctgcccctctcttaggtgctggtctacattcccggaatccactttccctttttggattcacttcatcctgaatggttcctccaagaattcccttga

SEQ ID NO: 613428 - DNA, 197 bp, Homo sapiens
tccctggaatctgggcagggatcagagggctgctggacacaacaaatgaagcagctttaaggatcggacactcacacgctgtgctggttgcaaaatgccagggacaacaaccactggacagatctggtgctgctgaacacgggcttcctctgtggatgtgacttgggtttcctcacagtgcatacaggggctcaatg

SEQ ID NO: 613429 - DNA, 167 bp, Homo sapiens
acgatcaccgccctcattaacgtgttaatttctctttttttattttttcacacggaaaaaaactttatccccccattcgtgaggttgcccgaaaaagtgtttaaaaaattccccggctcccccccccgcatatacactcttctccatctcacagtttttgagacaac

SEQ ID NO: 613430 - DNA, 345 bp, Homo sapiens
gcatgcacctgtagtcctagctaatcgggaggcacaagaattgcttgaacccgggaagcagaggctgcagtgagctgaaatcgtgccactgcactccagcctgggtgacaaagtaagactgcatttcaaaaaaaaaaaaaactagccaggggtggtggcacacacctgtaatcccagctacttgggaggctgaggcaggagaatagcttgaacccgggacgcagaggttgcagtgagccgagatcgcaccactgcactccagcctgggcaacagagcaagactctgtctccccgccaaaaaaaaagaattattgctggaataacataaaaaaaaaaaagtcgacg

SEQ ID NO: 613431 - DNA, 121 bp, Homo sapiens
gagtatagtctctgaggctcctatcacagctctgcctgcaaccacgatgctttgacagtaacaccttctctctacaacctatgaagctggacaacggatgctataacaactgatgtagttc

SEQ ID NO: 613432 - DNA, 282 bp, Homo sapiens
  misc_feature (186)..(186): n is a, c, g, or t
gatacccatgcggggtaggcagaaaatcgcaatcgtcggtgcaggtctgggtggggcagccgccgccacgttgctgcagcaggccgggttcgatgtcgaggtgttcgagcaggcgccagagttcacccgcctgggggcgggcattcatatcggccctaacgtgatgaagatcttccgccgcatggngccttgagcagaaactggaactgatgggctcgcacccggacttcttggtcagccgcgatggccacagcggcgattatctgtcgcgcatcccgttgg

SEQ ID NO: 613433 - DNA, 399 bp, Homo sapiens
acgacgtgttaatgtctacgcatagcatgtatccccctggcagtgcgagtctgtagttgtcgagaatgtgagtggcatacaagccagtattgtcacacagctggcgtgcgataatctccaagggcttggcgtatgcgccaatcaacaggtgctgttttcctggaatagtccttgagtaatcccgcaggtacttggagagttccatctcaattggcccgtgattagccacccagtgagtcattcttgatggccctcctgtaggatcatgatcgggatcatgccaggaaccgctctgtgtcctccataaagtggtcggggccgccaaggagaaatgaaggtgcattgtcttggctttaggggaggcacgtaacaaaattgtaccttttggcgccccaattt

SEQ ID NO: 613434 - DNA, 140 bp, Homo sapiens
tggaaagggagttttgcttttgttcccaagtcgggagggcaagggcacgatttcagcttacaaaaacttcggcttccaaggttaaggggattctcctgcctaagcctccaaagtatttgttggggaagccggtacccggc

SEQ ID NO: 613435 - DNA, 374 bp, Homo sapiens
  misc_feature (24)..(24): n is a, c, g, or t
tgggtggaggcaggccccgagctnggggaaggggttttcccttcctttttgacccagatttgggggcggcctagcccgggcctcattttttatccccgccaagggtttcctttcagtcatttgtttaccagaaacatgaaaactgcctgtttggccgggccgcacttgtggcccccgggaccccacctttggccccacctccctcaagtttgggccccgtccccagccagacccacttgctgccgggaccctttcactgccccggtggagtgaataaaggatgaggggccctgaccctgtgtttccaactggtgcaccccatcccgaccctgtttccgcccccttgcagccccattaaagggctttcatttgga

SEQ ID NO: 613436 - DNA, 165 bp, Homo sapiens
  misc_feature (32)..(32): n is a, c, g, or t
  misc_feature (53)..(53): n is a, c, g, or t
gtcccgcgactcaatagaagaatgctaatgcntcaggatacaaatattatttngtaattttcttaagtatggtacctaaggaaattttcttcttccaggggaaaaaaagagtatgtttaaaaagtagctttaaaacataactgaaaacttactgaagtgtcaacg

SEQ ID NO: 613437 - DNA, 286 bp, Homo sapiens
aaagaagagcgccaaaaacacctcaataaccagtatatgcagagaatggcagtgttcgagctggaccaaaccctgtaatcaaaccctacaagccagcacctcctacaggttacttcatggcagctatccaacagactcagaaccgtgctgcattatatcctcctagccaaatatgtaaaataagaccaagtcctcgctggacaggtcagggtgccagacctcatccattccaaaatatagccggtactatccgaccagttggtcctagaccaccctactcttacga

SEQ ID NO: 613438 - DNA, 316 bp, Homo sapiens
acgtgtgcagtgtgtctgctgacaacgagtggtgtgccctgagtgcatcttttgaacgattctgtgatctcacactcaggagaccattgcatcattgggcgcacattggtggttcatgacaaatgcagactacttgggcaaaggtggcaatgaagacagtacaaagacaggaaacgctggaagtcgttgggctcgtggtgtacttgggatcgcccaataaacattcccttggatgtagtctgaggccccttaactcatctgtgatcctgctagctgtagaaatgtatcctgataaacattgcaacacggtctctca

SEQ ID NO: 613439 - DNA, 177 bp, Homo sapiens
ccccccttccaatgggccggtggggttcttgttttcattgcattggttaaaccaaccggcaagcttcggtgccccaccccaccaagcaggcattcattaagtccattcctttaacccaagcttaatggggtggttttttcccaaaataacgaattaaagtgtttttctgggccctaa

SEQ ID NO: 613440 - DNA, 1787 bp, Homo sapiens
  misc_feature (444)..(444): n is a, c, g, or t
  misc_feature (1385)..(1385): n is a, c, g, or t
tgaaaccaaatccccagacttttttttatgcccaaataacccttcccacccaaaaacagaagtgaatttaaaaactccaccacaacttctcctgtggaggccacgctagtgtgtctccggtgttactctcggacacgaggaagagggtggaacaaggtgggtgtagaggggcgtgggctccacgaggaattagaggccacaagaagagcttccaccacacaagagggacgcctagaggatagagacagagagaacacagacgagagagaaagaagagagggtcttatacaacagagagagacaagaagacagaggcgttagagacacaccactttagagagagggacacacacacgcagagagagagacgccactccctcgcagggcgacagagaggtgtagcctgtgtgactactctcgagatatctccatgtgtgctgcgcngcgcgtgtagttgtgttcccacgatgatgctcccaacgagatgatgtctccccccgcgaagggcgctctctcctccaatgtgtgtagtgtcttcacgagctgtggggcgccccgtgtgcctcacgagaagaaggggcacagaaatgttctgtgacccccccgaggtgcagagtgtagagcgtagtgttctcccgtgtgcgagagagaggacacccccgccgtggtgcctctgtgttgtgcccacccactatgtgtgtgatgacacagcgcgagtgcgtgccccccagaagtgtgtggcgcgtctccccgtgagcacctctctttctctcacgcgaggtaaaaccccggcctatattcaaacacaccagattgttggcgtcgccatctcccccatgtggtgatgcgcccccccccacaaaaaaagtagaagagtagagggtaggtgttcgctggccacgcaaaaagtaggtgcggccccccccccgacgtcaccaagcaggcccacacaaaaaagtacatgtatttctcccacaagcagaactgcatgaggagaagcgctcagagagaaaacagcatcctccacccatatatttcatatatacaacaaaatactattagtaaggaggagggtcacatcatcgctgataagaagacaacgtactttcccatatgatgtgagcgccccattgtaggtaccgcccccatcttatttattccgaacacgacccaccacacttgttgtttggtggcgcgccccgcaacgtgttgggccccctactattaccatcctactactgcctgtatgggagaaagatctccattacaagcagagaaagcgagcaaccacatataggaaaaggaggaaggcgcagccactacccaatacatcccaaacagtgatgagggagaataaagaccgacaattaaaaggagagccagancgcctcccctcactaaaaattgtgtgcttccccaacgtgatgaaagacgaatagaggcctctttagtgcgaccggaggaaaaaacacacagtgccactaaaggaaagcgacgagaaacagagagcgtgaactatagacaaaaagacggaatataacagccccactcctatcaaccaacgagggggatgattaaacctaccaagtgagagccccccgatcctgcttgtagataatataaaaaacgccccacaacaacgcaacgacttgagacacacagttggaggagcccacatcgaataaggccccccgtggatgtaaatatagaatgaccaccaacacccctatagtagggagcggcgaccaatagagagagaatatatacgacggcgacaaacactactt

SEQ ID NO: 613441 - DNA, 401 bp, Homo sapiens
  misc_feature (101)..(101): n is a, c, g, or t
gccgcatgtgtaccccacaaatgtcgcacccgaacatagcatcagaggtgtcaacgtcttctccactccatctgcaacaagaagcaatgacaaatttcatntgacatgttgagattcaagagtgagtttaccgtagcatttcaaccagcacgcagagttgggccctcttgaatctttcaagaaaaaacaaaatgaaaagagagaatatttgagtgagacattttcaaatctgagcccaaagcagttattctgcatttactttttgttgagttgtaaaatataagaggatattaaatagttctatgtctaaattacccttttattactttttatcattcttccttagaagcaaggtatatattacacattgacaattttattaaaatgcagattttaatata

SEQ ID NO: 613442 - DNA, 699 bp, Homo sapiens
  misc_feature (70)..(70): n is a, c, g, or t
  misc_feature (185)..(185): n is a, c, g, or t
  misc_feature (637)..(637): n is a, c, g, or t
ggcttctgggagccccattcaaatccaacagggtgaaagctggcattaggatgcacgcaaattttttccnagtggaggccgcctcccagcgggccaagcaggacatgcccgggcaaattgcgtgagtacagaaattttatgacgcaaggttgggcctggacatgagatcgcccccctacagaaantcttttgaagggcgagaaaaagcgggctggagtttgggatgcagaacatgagtatttatacgaagacccccagcgggctatgcaggtggtttgagctcggcctatgggggcctcacaagcccgggcctcaattacagcttgggttccaactttggttttgggggggggtcaagttccttaaaccgcaccagttcctccagggccgtggttgtaaaaaaaatcaaaacacgtgatgggaaggtggtgtttgagtcctttcacgtcctgcccaagtgaacaattgggggagccccttcaaagcctacccctcctggggttgccccaaagcttggaaaggaggcccttattcagggtagccttgggaacaggaaaccccctttggggtcagccctagccctcagcccccttggggggttttttacttggggaccccccttgcccatgcccccagntacaaaaaaattcaattgttttttttttttgggccaaaataaaaccccagctagttttgcca

SEQ ID NO: 613443 - DNA, 714 bp, Homo sapiens
cgagaggagagaaaaaaatacacaaacggtggggtgagcatacagtggggagagacaaccgcggttgcgatgagaccacacacagaagagtgcactccgcgcagcagagagagccgcccagcacagaagaataaaagagagcagcaaatagagcagagaaaagagaacagtagtgagagaccatacaatagcgtacagcagagagtgcaaaatatacaacactacatcatcgtcctctctcatgatagaagagaagagacaaaagcagcgataacagggctataacacaccccccacataagagagagggggagacccacagacaagagagatgacatacaggaggagccccccactgccctgtgagaagcgcatcacctcacaagaagtctcatcacgaggcgcgcacacacattgggacgccccccacactgggcagagagagagacaatatgtgagagagagaatgagaggagccaaacacgagatatgtgaaaagatatgatagaatagttgatctcccagcaggagtctttttaccaaaaagaaggtaaagaggagcatcaccactcgccggatggctccactcccatatgtcgtgcgcggcgctgatcatatagcagaggcaaggacaagaaaaacacactcatctagacgccgccccagacttgcggaagaacattaaccgcccccatcagttgatacaggaagaag

SEQ ID NO: 613444 - DNA, 324 bp, Homo sapiens
atatcacaggtcagagccagcatcttggctgtcttgccaaaacctgcatacgtttttctactgtgatttgtatgaaaggtcacatcaaatcaacggaatagattcagtaaagtcagtcgtgttcagtaagatgatgtatttcaatttgtactagggaaggttgatgagaacaaagtgggaaaacttgtgaacattgcccagattgtggacatagggtttttaccacaattgtaggtcttaccttatgcttgagcttttagtgatgttcttgtgtccatgtgttttactgggtgattttttctatagtagggatattcttggtgt

SEQ ID NO: 613445 - DNA, 306 bp, Homo sapiens
  misc_feature (98)..(98): n is a, c, g, or t
catcttccaagacaattctatattgaataacacatacctgtaccactgattaaaagctggggttaccaatgcgcgtggcacagttagaagcttatgtncaaaaatgagcacatcctggaagggcccgggaaaaggtctcctgggcagcgcggagagggagctctgaggctgtgcggcagcggtcttgccgccgtccccctggtcgctcccggaattaacgcgcgcacgcgtcggagcatggccccgtcccgaccccgtttggcggctcaccctcgcagcgcggcacagcacgcgtgctcgcggcag

SEQ ID NO: 613446 - DNA, 187 bp, Homo sapiens
tcatgagagtaatgggaatgaggcagaactgtcaatgcaaatgaacttgcctaaatgctgataagaatggcatgttatccagtcatttccatggagtaaagtggcctcttgggacacatggaagctgccaactgagagacatgcatgctggttgtagacacacatgtgccatgatgtggaacgccat

SEQ ID NO: 613447 - DNA, 894 bp, Homo sapiens
  misc_feature (289)..(289): n is a, c, g, or t
  misc_feature (296)..(296): n is a, c, g, or t
  misc_feature (340)..(340): n is a, c, g, or t
  misc_feature (349)..(349): n is a, c, g, or t
  misc_feature (501)..(501): n is a, c, g, or t
  misc_feature (504)..(504): n is a, c, g, or t
  misc_feature (514)..(514): n is a, c, g, or t
  misc_feature (517)..(517): n is a, c, g, or t
  misc_feature (549)..(549): n is a, c, g, or t
  misc_feature (553)..(553): n is a, c, g, or t
  misc_feature (586)..(586): n is a, c, g, or t
  misc_feature (732)..(732): n is a, c, g, or t
  misc_feature (865)..(865): n is a, c, g, or t
ggctgggtcctgcaggtcttggggctcgggactcttcctggagacagcgcatggcgggctatcccgcgggtcgcgcgcgcactgtcgccgcctgctggcgtcgacgctgttggcgctgctcgtgtcgcccgcgcggggtcgcggcggcgggaccacggggactgggacgaggcctcccggctgccggcgctaccaccccgcgaggacgcggcgcgcgtggcccgcttcgtgacgcacgtctccgactggggcgctctggccaccatctccacgctggaggcggtgcgcnggccggnccttcgccgacgtcctctcgctcagcgacgggcccccgggcgcnggcagcggngtgccctatttctacctgagcccgctgcagctctccgtgagcaacctgcaggagaatccatatgctacacttgaccatgactttggcacagaccaactttctgcaagaaacatggacttgaaccacaaagtcccctttgtggtccacaaaangcngtcaggaacngtnaccaaggtgaatgaaacagaaatggatattgnaaancatcgttatcattcgacaccctgagatgaaaanctggccttccagccataattggttctttgctaagttgaatataaccaatatctgggtcctggactactttggtggaccaaaaatcgtgacaccagaagaatattataatgtcacagttcagtgaagcagactgtggtgaatttagnaacacttatgaagtttcttaaagtggctcatacacacttaaaaggcttaatgtttctctggaaagcgtcccagaatattagccagttttctgtcacatgctggtttgtttgcttgcttgtttacttgcttgtntaccaatagagttgacgtgttattggatt

SEQ ID NO: 613448 - DNA, 382 bp, Homo sapiens
tatataggtcgcaggagagaccaaatgagatttatccgtggttgctggaaactattatattctgtctaatgtaacgatggtctgttccagtgaggtagggatataaagtgattaagctaagtattaatcggcaaaaatagtccttcgttaacttagatatgacatagctggatagaggaagatctggtatgctaggaattactaaagaagaataatacaacgtagaatgtctgctttcactaattcatgtaccggaaggaggagaataatgaagatatactcagtagagtactaggtgggcggatatggaactttgctcagaaaatctcttataaaacgtgcatataacaaaatgacacccagtaggcctgcgaacctatga

SEQ ID NO: 613449 - DNA, 424 bp, Homo sapiens
  misc_feature (12)..(12): n is a, c, g, or t
  misc_feature (33)..(33): n is a, c, g, or t
  misc_feature (182)..(182): n is a, c, g, or t
  misc_feature (271)..(271): n is a, c, g, or t
  misc_feature (274)..(274): n is a, c, g, or t
  misc_feature (300)..(300): n is a, c, g, or t
  misc_feature (306)..(306): n is a, c, g, or t
  misc_feature (350)..(350): n is a, c, g, or t
  misc_feature (411)..(411): n is a, c, g, or t
ggggggttaaantccggaaatttaaaaagcccnttttggaaattaaaattccgggaaaaattttcccgggccggggggcccccggcgggtttcccggaaacccaaaccggggggccctttggcccggaaagggaaaaaaggaaaccgggaacccaagggaaaaagggggggggggggaaagnccttttcccccgggccgggccgggggttgggggcccttttccaaaccttcccttcccccttgggtttaaaaaaaaaaccgggcccttanagnaaagccccgggggccggaaagttttngttttnaaccccttgggccgggttcccctttccttggaaaccccttgaangaaagcccgaaaaagggggggagccgggccgaagattggaaccttgaacccgctcacccantcccatagcccgc

SEQ ID NO: 613450 - DNA, 134 bp, Homo sapiens
atacagcaacagcactgaacctgggaagagattaaactctgaatttatctttgataacaggtattgattttaaaatgtacatgtattaaattacatatgtaatataaggtctgtttgctgctactgtgtgatgg

SEQ ID NO: 613451 - DNA, 678 bp, Homo sapiens
gatgggttttgtggcattttaacatttacctttccataggaaacaaattgagattattaggggggcttggattaaacacatttgaatgtcagaacaagaatttcccccgagggcctctctctattttttgtgaaaaacccgccgccaggggtagaggggaaggcgccccttttttgttgtctggtccgccaaaagaacagcgcgtggtaaatttgcacacccatgatattgtcgacaagttagtggacaatgtagacaacaggtctacaggttttgctttaccaagaatgtcccccaagggtacctatggtctaaagagcaaacttgatcatctgggcatccctaaggtctgcatcgatgtggccgacctatccaaggtcaaaaatgaggcccacatgaatatcgtccagtctgtgcatatgagtgtgctgaacaactcagagaaagtgatttaagctgttggggccatgtgttttagaggccaaacacatgtcaatccccggcgaggtggagttgaacaaacgctgtgttgttttaatcattgaagcacatttcgagtgtcccattgtcatggggcaagtggtgaatgcctcctatatgataattgcttcttgctccaaaaggcgtcacctccatccctgaggcctccgtggatgccattaaacaaaggttgagctg

SEQ ID NO: 613452 - DNA, 350 bp, Homo sapiens
  misc_feature (1)..(2): n is a, c, g, or t
  misc_feature (5)..(5): n is a, c, g, or t
nntanacgatccccttcgcggtatcataaatagatatggtaaactaaaggattcttcatatctatccctgaatggtgcatgatggcccaggatggcatcactattcgtaccagactgcaatttaaatcttatcaatgatttctggaattttccatatagtatgtcaggactgtagtagactgtgggtaactgaaatagctgaatgtatatccttgtgtcccggaaaaccgctgtacttgtctgtgaattctaacagcttactgatctgaatacagccatcatctcctttgatatgagaaaattttctcctacaaacacatgtatcattctatatcctgatgtctgtttgt

SEQ ID NO: 613453 - DNA, 316 bp, Homo sapiens
  misc_feature (82)..(82): n is a, c, g, or t
  misc_feature (117)..(117): n is a, c, g, or t
  misc_feature (127)..(127): n is a, c, g, or t
  misc_feature (238)..(238): n is a, c, g, or t
  misc_feature (249)..(249): n is a, c, g, or t
  misc_feature (266)..(266): n is a, c, g, or t
  misc_feature (276)..(276): n is a, c, g, or t
  misc_feature (313)..(313): n is a, c, g, or t
ctgaccaggccctggctccaagcgaccacccctccccctcctgcctggacccagggagcaggtgcagggggctccgagcctngggtgactgtcaccgtgcagtgcgccttcacagtngccctgaggnacgaagaggagccgacctgtccagcctgcgggcactgctgggccaagccttccctcaccagggcccagcttgggaaacttcaggtggggccagaaagcccccggttggttncggttggagtngggcaccgcccgaattnagggcagttncttggaagagggggttggcagaggttcattttccttncct

SEQ ID NO: 613454 - DNA, 586 bp, Homo sapiens
ttttgcctggggtgtcaaaaggcccaccgccaaggcctgggtgcccaggtaatcaaaaagaagctaaggtgaagtttcgcaccaggctttgaggtccggggaaagctagaaactaatttggccctgaacatgccacagcagaaaaaggaggaaaaagcccggctcctcattggtttaagtgtgggcgccaaaaaccctggcaaaaagtccatttttggcgggggcaaattatttggcgattcgagtggctccagcacaggattttactttggctcaggctccagggacttttggggtgggaggggcttcccgttatccccaaggatttgtgggggtcagagcccataggcatcccttttcagcccctggtttgtttcctccagggaaggggggccaaaaaaatttaagtttttttttccccctgatcagggtcggggccagaggggcaccaaaagagcaagcccccgggaatgggcccagggcgggccccttttcccttggggtcaagtgaaaggggggggggaaagtcctgatcaagggggataaatttttatagccaaaaataaaaatatatattttttatata

SEQ ID NO: 613455 - DNA, 129 bp, Homo sapiens
ccccgactagctcgacagtaggtcccgcctggatctggcccacagcaccctgggggaccctgcagcactacatgaatgtcccatgtgggcatgactggtgtgccacagtgcccatgatctccacatgcc

SEQ ID NO: 613456 - DNA, 376 bp, Homo sapiens
agcaggatgcttaagactgcgagaaggagaactgggaggaggagaggtgggcgtctcgccctccagcaggcggggtagggtggcgatctcctgttccagccgcgtctttacgtccagcaggatcttgtactcctggttctgctgctccatctcgcagcggagttggcccaagctgctcctccacgctgccaatcatctcctggatctgggccagctgcatgcaagtagcgaacctttggtcctccttccagggctgttctccaggggctgctttcatgctgagctggggaacttgcagctcaattctccaagggttcctggcatggtggcggccgggacctcccggagaatctcggcttctttgccggcttctgca

SEQ ID NO: 613457 - DNA, 167 bp, Homo sapiens
ccgcactcgtgccaggacgcacagcttctcggcgccagcgttctcaagtaagctgggattgcaggcacctgccaccacgcgcgggtaggtttttgtatttataggtatcagactggggcttttgccgtggcgtggccagcgctgtgctctcgaaacatccgtgagtc

SEQ ID NO: 613458 - DNA, 397 bp, Homo sapiens
ggcggggtgtgctggtcccatttttgggtcggaaaatttaaatcaatcagtatagatgaggataaaaatagcttatgctggccaggcacggtggcttacccctgtaactggccttctttttcttgttttagagacgaggtctcgctctgtcacccaggctggagttcagtggtacaatctcggcccagcctggttggtgccccctcaggtgccctccctgatcccccagggtggaggtgtgtttgggagagcaggctgcaggggctcagaacacaagacaagcttggcattggttggttagtctccccatctgaaaaatgggcgatttggtgggtaccctctggggcctttctgctctgacagctccttggttttcccgcagcgggggaatatactg

SEQ ID NO: 613459 - DNA, 357 bp, Homo sapiens
gcgtcgacggcaaccccagagacactcacacacttccagattcatacacaggtgcatgctcacaggttgacacacacatgctcaaagactcatacacacacgttcacacatagctcacatgcacatacacacacacattgagactctcagacacacacagactgatacacgtacattcacacacagctcatacgaacatttacactctcaaattcacacacaggcacatgctcacaggctgacacacactcaaagactcatatacacacattcacacacagttcacatgcacactcacactcgcagattcacacacaggcgcatgctcacagatcgatacacacacactcaaagact

SEQ ID NO: 613460 - DNA, 242 bp, Homo sapiens
  misc_feature (15)..(15): n is a, c, g, or t
  misc_feature (176)..(177): n is a, c, g, or t
  misc_feature (209)..(210): n is a, c, g, or t
  misc_feature (242)..(242): n is a, c, g, or t
ctagaggatcctgantactggcattactcatcttccacaagtcacagagtggggcatctgattgtgcaacaaaacacaaggtttaaaaagcttccagggagggcagacaggcaaaccacgctgtagacactcttctatttgtcaaaatcagaccagagaaaacctactccacacanngatataataggtattggatattcactcttttnntctttttctgtgtgcgcggaacactttttccn

SEQ ID NO: 613461 - DNA, 699 bp, Homo sapiens
  misc_feature (11)..(11): n is a, c, g, or t
  misc_feature (77)..(78): n is a, c, g, or t
  misc_feature (84)..(84): n is a, c, g, or t
  misc_feature (107)..(107): n is a, c, g, or t
  misc_feature (302)..(303): n is a, c, g, or t
  misc_feature (305)..(305): n is a, c, g, or t
  misc_feature (309)..(309): n is a, c, g, or t
  misc_feature (332)..(333): n is a, c, g, or t
  misc_feature (335)..(335): n is a, c, g, or t
  misc_feature (338)..(339): n is a, c, g, or t
  misc_feature (341)..(342): n is a, c, g, or t
  misc_feature (345)..(346): n is a, c, g, or t
  misc_feature (464)..(464): n is a, c, g, or t
  misc_feature (473)..(473): n is a, c, g, or t
  misc_feature (476)..(476): n is a, c, g, or t
  misc_feature (626)..(626): n is a, c, g, or t
  misc_feature (665)..(665): n is a, c, g, or t
caattccttanaagactacaaaggaataaaatatgacacaggtacagtattagatggatggaagtttgacagaggcnnagaaanctccattttacactctgtacaantttggtattgaccaggaggcagtttttcacttaagatctttgaaaccaagcagttgggtgaaaaattctaagataacatttcgaatgctttaatcaacagacatatacaaatgaattttaaaataaaaccaaggcatcaatgaagaagatctaacatgaaagtcaccacatctcacaatgagaatccgatcaganngnaganggcaaaagtctaaatcatagagnngnggnngnnggnnggggggagagggagggctctgggactaaatccatccagggcatggccacctgatgtcttccgactttcagggtcccagggccctaggtggaggtttgggacaaatatggtatttggtnacaaggagnaanagtacgatctgctgtatctggaatgggaaaggcggcacagaatcctggaaggactgaagaccatccagatgctatgataacaagatggagagtacgagggccaagagctgtaaggaggctctgtgcctcttccggtgacaggcatgaatnagccccacccgccaagatgtcattaaaaagttactactnttagtgagaagatctgggagtagctacaggaaaa

SEQ ID NO: 613462 - DNA, 275 bp, Homo sapiens
aacgaatgcgatacatagacaccatcttgttagaactaccacagtaaggacgaggaagactccagcattggacataaccttctgcctccctaatgagcacactctttgctgtttacttcctcctctataaaagtgagggctgtgtccttaaaagttctcgtattccaggacatgcagcagcaagcaacaagaaaagcatttcagcaggctaatttcaaacacacaaagtcaagccacctcaccggcacggactttgtatttaacatgtaccttca

SEQ ID NO: 613463 - DNA, 193 bp, Homo sapiens
tttcattagcataatctcttccttttctgtttgctagaatcaccagtaaggcaatctgaatcaggagtatctttgtggaaaggaaaaaatatcggtaattcaatgtctttactaattatgaggccattcagatttttctttttctttttgttccagctttggtaatttgtgtctttcaagaagcaggaactgg

SEQ ID NO: 613464 - DNA, 364 bp, Homo sapiens
ctgctccgcccctctcctgctccgcccctctctggtagctgggattataggcgcacgccaccacgctcagctaatttttgtatttttagcagagagggggtttcaccatgttggccaggctggtctcgaactcctgacttcaagtggtccacccgcctcgacctcccaaagtgctaggattacaggcgtgagccaccacacccagcctgaaatctttagttatcaaagttgtattacatgggtgctatgcggtagtttctgtccttgaggtttacagtctaacaatgtccttggcctgctagggcgtacatgggaaaagttaggtaacagtaccagacatcccagtgggatatcgccagatgct

SEQ ID NO: 613465 - DNA, 342 bp, Homo sapiens
ggaaggtgacagtactaccttcttctagaaaacaaagattgttcaaccaccaccatgagaacaggtggaaaatatctctatagacccaacctggcaatgaagtataaacatcgcaccccgcaggcttctcttggtgccctagttgggttcatttttgtttgtgactatgaatgggaagaagtcacaccctgtaaccactccaactccctaaggagtcacctcttctttaaggaatagctttcccttgtatctaaaaaacttggaactgacatgaatgaacgttggccactcttacccctccaggggtcacaatctataacgcctaggccccaggattatcag

SEQ ID NO: 613466 - DNA, 222 bp, Homo sapiens
ttaacatacgggtgggtagcatataaagcgtggatatgcttgactaagggatgattcacattccaggcagaatgaagtgggatggcgcaaggatttcatcacgctactcagaacagcagcaagttgaaatgtatgaattgtttatttcctggaaatttccatttctgttttttttttctctttttttttgggacggagttttactttgggtcacccagtgct

SEQ ID NO: 613467 - DNA, 439 bp, Homo sapiens
ggacacctttgggcatgcctgagacccttgtgcagtcagaggctcatgggctgcagaagaactacagaaggaccgcagcaaagccatgatatttccctgtggaatgttagagacgccccgaggggctttttgggacatcttccagttgtgggggtgtgcaatgctctgttgtgatttcctgggacatcctgggaacgactggtggagttatcattatttcttgaaaaaaccatgaaatgtgggaaggaagtacccggggtttaaaccggggagcgcctttgagggatctctcattacatatctccatacatcaacaagctacattgacggagactctgttctaataatcaagagaatcaatgccggaagaatggccgaaaatacaactgagagtgggatgaggatgaaaatcttcaaggactactgaggcaatgagatc

SEQ ID NO: 613468 - DNA, 763 bp, Homo sapiens
  misc_feature (189)..(189): n is a, c, g, or t
gtctctaccggcgggatttgattggctgtgtatgtctcacagacaatacgtttctccgctcccagacatggtgtccctcgagacttcctgtccttcgtgcaaggcgcagtgcagctaggacatcgtgggtaaggtgaagagcttccctaaggtatgtaccccgttccaagtccggtccacactcacagnctcttcctgggatagcaaggctgggcatgactctcacattcgtgcgggcagtcgacaggccggggatccataagggtgatacataagatacgtgcaggtcgtgtcgggacggcttgttgagccatatgtcatacgcatcacctaaccatgagtgctagtcggagcatcgtcgggctacgtcggacaacccctcgagtggtcatcctggacccctgtccagtaactgttctcttgcatgagaccacattctcgtgactgacactgccaagacgagcgctatcgtacttaagaactttgggcattaaatcctcatcaacgaaggggccttaagccaacgttacctgcaaaggacaccctgagtccatacggacttgaaggcgcattgcggccccggtaatagtccacgtccctgggaacgcaaacgtgtaaatttacaagacccagcgcaagttgacaacgaaaaggttacttgtcccacgtggatgaattccctgatgcatccaattttggcaccatcaaatccgcaagaatttgcgcccgtggcatttccaatctatggccggccaagaacaga

SEQ ID NO: 613469 - DNA, 307 bp, Homo sapiens
  misc_feature (255)..(255): n is a, c, g, or t
gtgctcatctcgaggagtctctggtgtgtgttccatgcactgtcctagggcacccataaaaatagagaaaacaccactttacaagactgccaggtatacatagagctccacatatggacttacagatctataaagaagcacgagctccgatgcccggcattgagagagctggagagagccaagactggcaagtgaaagtgagcagaagatcatgtagaaactgacttcctcgagtccagcatccacagtcactgnggccctgtcgtgacaattacgtgtgcatgttctccgcgccgtcccctccctg

SEQ ID NO: 613470 - DNA, 226 bp, Homo sapiens
gttcccccaaacaccgcattcttcatgttgttctcgggtgttttttgttgttgttatttgttgttgcttgagacagagtttcactcttgttgcgcgaggctgttgtgagttgttttgatctctgcttactgcaacctctaccttccgcgttcaaacaattctcctgcctcagccccctgagtagctggaatgacagacgtgtgccaccacgtcccgctattttttt

SEQ ID NO: 613471 - DNA, 488 bp, Homo sapiens
ttctttaagaaagcatatattaccaggccattctaattcagattaccatttgaggcatcaggatgaagcaaatccatcacatcgtcaatgaacgcgagtatcatctaaagtgaactcgtctccctacacccatactggccgccgtcaaaaaacagcaaggatccctaactcctgttaaagatgtcaccttgcctcctggacacacccatcgctgtaaccacttggcaggaggaaccacaaagtaagtatcacagatcaccgccctcattaggtgtatttttttttttttttttttttttcaaaaaaaaaaaatgacccccgtgtaggagggtgacgggaaattgcattaaaaaatcccgggcccccccccggaatacaccctcccaacaaagtctaggacaaacaaacttcaccaaaacgaagggctcgtcaaaacgaccgggggggggaaggagggaaccgagcacaacatcgaactctgggccaat

SEQ ID NO: 613472 - DNA, 994 bp, Homo sapiens
aacatagacagcgggagagaacagctccttactctgctactcggtagtgatctaggtctcacaatgcgaagtagcgccctaggtgtggtttgagcatcgctgtcgggagccgccttgtgacgcccgggtaatatgtggctgctgggcgggttgtgtttcgcccgccggcgccgtgttttttttggcggctccttgtgtgccccgtgttctctcagggggtgttatggggtctcttgatacctccgggggttcccgcgcggggggtctccccccccttgaaaagtgcggggtgggcgccccccggtgtgtggggtgaggggtgacgcccccggatgttggtttgttcgccgggacttttttgtggtggcctttttttcgggggccgccctttataagggggggcataagaccccaattgttgcccccgtgggcagcttagttcccaagggtagaacatgccggtttcgcgccccaatgtgaaaaggtgcccctgcgaaaagcgtttttttctccccgctattattgcggttaaacatggcgagtctctattctgggagcttctgtgggaaattacctataaaggtgtctttgtgagaaacatctgcgttttaatttttgtgggcctctcctggggaccctcccctcttgacctttaagagcactccgggggttctagccttcataggtcgtcactctctttatattaagaaaaatcgcccatccttcctcccggttatttgtaaataattctgtgaatttctccccctgtaatatacgaaatttatatctatgaacgcccccccaacaaacttcttccccccccctctaaaagaggagaataatcccctctttatggtccccaaaagttctgttgtttgttttaagcttggggagaatttttgtgttgtgggatatattctcttttgtgtgggggtggaacaaaatcttctttttctgcttgtgagagcggtagtgagacaaaagaacagaaaaa

SEQ ID NO: 613473 - DNA, 251 bp, Homo sapiens
caaaagcgggagacatcaatgttccatcgacctgaagaaaaacgtgctggtgatcggcacgactggcacacagacttactttcttcctgagggagagttacctccgtgcgctaagttggtaagtggaactggacaagacgagtcttcagacaaggaagtagcagatactattaaacattcagtcatgaattcgggacgaaaaaagcattgaaacagcttagaactatgtcatcaccttgccgcttttgtgt

SEQ ID NO: 613474 - DNA, 155 bp, Homo sapiens
cttatgacggaggcattcacatttactgtctattatctcgtgtgccttatagagatggctttactcgactgtatctcaattagtctttctttctatgcaggtttataatcagtacaagctacggttttctagaaatactactatcgtcaaggctc

SEQ ID NO: 613475 - DNA, 840 bp, Homo sapiens
  misc_feature (245)..(245): n is a, c, g, or t
  misc_feature (424)..(425): n is a, c, g, or t
ctcctgccccttcggaggcctgtgccagtggcagctgggcccggagacaccaggccggcactgctctccttcgaggcacccgtgtttgtgccgacgctgactcccggttgtctgcagcagccacgtggccgaaatggagcctctccacgggggctccttccccagccctggatggcacagcagcctctcctgtctgtcaccacgtgtgacctgctcccttactcttcagccgctcatccacgtcngcaggggcatctaactctgtcccagggtatcccagaccctggctcacgccccaggctctccattcaggctccatcgtccacctcagaccatctcaggtttgctggtcttctggactagcgcagcagaaagaacccaggaaggaagcctcacgtctgacacaagaaccttcggtgctaanncgagggcggtatgtgcatcctcagcacctgcccatccggcaccatcctctgatccagggactgtgagcaacagggccccgtggccaggacatctctcaccctccagttaaaatctcgccagttgagtctgcccatgaaagtaggcgctgaactgcccaataaatccacaagtaagagttgcaagaaggagccaaaaagggctgagctgaatgactcatatatgaaataatttgataattaatataaataggaaatttaaagtctccagctgagtgacagaaaacaccttaaaaagctcaagagagaggaaaggaagaaaataaacctataattgcaaaataaaagcattgaaagaagccgtgctcaaggtaagatgctacagatgcaataaattcatgttttaacattaaaaaaa

SEQ ID NO: 613476 - DNA, 620 bp, Homo sapiens
tgtatcaaaaacacctaagtctatcttgctgtactgagcaatggttcatataatgcggaacacgaaacattgactaatacaagtgcttaaaatatcaaacatacttatttttttaaaaacagcaacatcattaaagaatatataccatagggacctggaatctgtaagctgattccaaaaacgaaataagtagaacatccatggtgaaacctgaacattctacctctgctttggagaagggctatcatacaacattcagtcagctgaagatggattggtagaggtgtgtctatacataaacttcagtcatttttgcttgtgcagaatcatcccaatcttcccaagactgaatgggcagtcctgtggctttcttccttttccatattcccaacaaggctacgtgaagttcaactcttgatgagccgcttacaacagcagttccttaggagccaacatgacaggtgggtcagatttccctatgagaaacaaaactggccacctacagcaaaatatcaaaatgggtaagtccttccttcctcttcctcctgattatatacaacatatctcctttcaagactattatctccatcatgcttattccttcacaaatctaaagctta

SEQ ID NO: 613477 - DNA, 167 bp, Homo sapiens
ggcgaggacttgggaatcacatgggtgcagaagagctcaggctgggccagtgtctgcccagaaaggcttcatgggaccggggtagcaggcttatttcgtttaatgtggaaaaggaacgttctctctccctttctcgttttctgcaaatgacagtcttttttggacct

SEQ ID NO: 613478 - DNA, 90 bp, Homo sapiens
  misc_feature (22)..(22): n is a, c, g, or t
gggaaaagagattaattacgtntgaggctggaagctgggaaacccaataaatgaactcctttagtttattacaacaagaaaaaaaaaaaa

SEQ ID NO: 613479 - DNA, 835 bp, Homo sapiens
tggaaatggagtctcactctgttgcccagaactggagtgcagtggcatgatcccggttcaccgaaacctccaccccccaggtccaagcgattctcctgcctcagcatcccaagtacccgggagtacaggtgcccgccaccatgccgggctaatttttggtattttaagtagagatggggtttcaccatgttaggccagactggtctccaactcctgacctcaggtgagctgcctgcctcggcctcccaaagtgctggattacttacaggtgtgagccacagcacctggtcttccctagtgccatttttcgaaaagactgttctctctccgtgggatagatttggatcccgttgtcaaaaagcaatagactgtaaatgtatgagttcgggactctcagttctgtcccatggatctatatgtctatccttatgtgtgtctgcataacggtatcttggtagaaacatttaggactttgaaccgtgtaagtcctccagcttggtaatccttttggaccgattttggtgactgtcgggatcatttacctttccctgtataagttctaaggattacctggtccaatttctacaacaagcggctttgacaggtggtctcatttctgtcggagaggacgtttggtccgggtcccccggtgagtcagtgtgaccgaccctcagttcggtgcacttgcctcggggcccagtattctcgcctacgccccccatagtgggattacggcttgccgtggcgcgcccactgatttggtatgcagcgagggggcttccacttttcacggggggttgacctcgctggtgtgccccgtggcccagtcgattcg

SEQ ID NO: 613480 - DNA, 188 bp, Homo sapiens
tcgacgcgtgcatgcacttacacagaacggcaatggaaagtatgtagacgaagcgatatgggctgccctggaacctacataaccgaagaaaagccgcaggtgtgtgctgccatgaacatctctcaacagctcgtactgcacagctggtgtcggcatcatactgaaaagcaatgtctaggtgcaaatca

SEQ ID NO: 613481 - DNA, 809 bp, Homo sapiens
tgaatatacatgagctatctggtctgctaaaggactcatagcttagacaaccatagcccattcaaggctttctacatggctgctaggcgggccccattaggtaccaaaagaagaagaaccccattgtcagtgaactgtaccagcacagcccaaccacctatcctacactacaggacaccatctgtgagaccaccctccctcgctcgacaccatagcaagacatgcacagacacaaaaggcgccatacgcacaggacaccacgagaagccgccaacaacacacacacaaactcccgccgacactgcacaccacctaaacaaccagcgcatcccacacgcagcgcaggacacatagacgccaatcgcagccacgccaccgccacaagaccaccacccccgcacacccacaccctccccaccacacgcaacaacccgccacaagacgcaacgccgcccctccgcaacgcaacgcacctaccgcacaaacagcccccgcaccgcaagaccgaccgtgaagaacaggggcggaggaacgcaacaagacgaagcgacgactcacaccaagaagagacactcgccgggacaacggcagacgccacgaaaaggcgcgagaagcgaaaccgcaagagacagcacaaaacaatagcgaccaaacaagacgccacccggacaggcgaacccccgagcggaaacccgcgaaccaaagaaagaaaaccccacgccaagcagagacaaagcgagcaccgacgcgagacacagccacaccacaacacacagccaccagagggaccgccggccgcagcccgacgc

SEQ ID NO: 613482 - DNA, 126 bp, Homo sapiens
gcctcgcagtgtcctagcctcgccatgtgggtctatgcctcgccagtgggtcctagcctcgcgagtgggtcctagcgtcgcgagtgggtcctagcctcgcaatgagggtcctagcctcggcagtga

SEQ ID NO: 613483 - DNA, 542 bp, Homo sapiens
  misc_feature (277)..(277): n is a, c, g, or t
  misc_feature (468)..(468): n is a, c, g, or t
gcatacagtccagcgtaggtgacagagtagtccaatcgaacaaagacataaaaaaaaaatcaaaaaacaaaaatgaacaaagcctccaaaaaatttgagattacgctaaacagccaaacctaagaataagtggtgttcttgaggaagaagagaaatctaaaagtctggaaaacatatttgagaaaataattgaggaaaacttcccgggcctcactagagatctagaaatccaaatacaaaaagctcaaagacctgggaaattcattgcaaaaagatngtcacccaggcacacagtaatcagattatctaaagtgaagacaaagggaagaatcttaagagctgagaggcaaaagcatcaggtaaccaacaaaggaaaacttaacagattaacagcagatttctctccagaaaccctacaagccagaagagatgggggtcctatctttagcttcctcaaacaaaataatngccggtcaagagttctgtacccagtaaaactaaccttcatgaatgaagaagagagagtctttttcagacaaaca

SEQ ID NO: 613484 - DNA, 408 bp, Homo sapiens
ctgattgagactgctgagctaatgagttaaaattgctttatgtatcaaggccaggcatggtggttcacacctgtaattccagcactttgggacgctgaggcgggtggatcattttaggtcaggagttcaagcagcctggccaacatggcgaaaccccgtctccactaaagatacaaaaatcagctgggtgtggtggcacacacctgtaatcccagctactggggcggctgagaagggagaatcgtttgaacccaggagaagaaggttgcagtgactcaagattataccactgcactccagcctgggcgaagactctgtctcaaacaaaacgaaccaaaaaaccaacacacttttcggtcgggtgcagtgacttacacctgtactcctagcactttgggaggccaaggc

SEQ ID NO: 613485 - DNA, 114 bp, Homo sapiens
ttcttcttatagtccagtgtcctttcacgccaatctgcaggactctctatggtatatcttacaggataagtctggtggtaacaaactccctcagctttgtttacctgagaatgt

SEQ ID NO: 613486 - DNA, 131 bp, Homo sapiens
cacgaggtcaacaccggactcatcgagaagaatatcaaattcttcttttctggttcagcaataccaatcataaacgagtacccgtctcttgacagtggtgttactgtcaaaactcttggccccatgaatga

SEQ ID NO: 613487 - DNA, 536 bp, Homo sapiens
gctgtcccgctccggctcctggggctccccgcagacgctgcttttcttagctccactggtggtgtgcctacttacctgggctgccctgccgcctgcatcctgctcgccctgtctgggaatggggcctgccccgggcttgggcctggccctggctggggccccctgaggctgcttcctgccccgatagtgacctgccttggtgcctgcccccccaccagagatgaagtggctgagcagacagggcgagactcgctgtgagcaagaacgacaacgtggccccccaccggaccatagcaagaacaccccattggacaggggggcgccagaccgaacgggcccgcgtggacaaggggactacgagagaccaagctgttaaacactgtgtgaagatataccgttgacaacacgacagagactaacccatggaaccctcaatggtgtgtgcccagtacacgcacatcgacttgcagaggctgactacagactggacgccagcactctcacctacagaccggtgccaagcttcaaagcttcca

SEQ ID NO: 613488 - DNA, 1376 bp, Homo sapiens
  misc_feature (201)..(201): n is a, c, g, or t
  misc_feature (425)..(425): n is a, c, g, or t
aaaaaaaaaatttacccaggtatggtgggcacacacttgtggccccgtctacttaggaggttgggggcaggagaatttgctttgagccccaggagtttggagggcttgcagtgtgagcttatgtgactcattgcccactgtgcacttcttagccctgtgggttgattagaaacaaggaccctgtgttcttctttaaaaaanaaaaaattgtgtttttattgcccccagggtaaccacagtgtgtgtgcaaagggacaccggtggggaggagagagatctcttataaaaaaaagtgtgtgttcttatatcacaccacagggtagtcacacagtgtgtgtgccaagagcgagtgctgtgtggagagagagagatctccgggagaaaacagagcgcagagagacacacacaactattctctgtgtctncctctctagtagtggggcagcctgtgtggggtgggcctctctaaagagagggagagggacaacacagagagcgccacatctacaaacacacacattttaacaacagagaggagagagagatttacacacaagagtggtctgtgtgttgggtcgtagacggggagtgtagagagtctcacacacacagagagagcgagacacactctcacagagccagagaggagaagaggatatagtagacacactctctgtgtggagacagaagaagagtgtaggaggggccccagagtgtgtcgtccaaatatgagagagagtggcgcccagagggggaaagtgtgcccccacacactgtgtgagaagaggaggtgtgacacacaccccaagagagcccaaaagagacaccctctcacagagggggagcgggtgacaagagtgggtgtgttgagacgccccattctccagggaggtgctccacttaagagaggggagggggcgtttgtgtctccccagagggagaagagaggggggggcaccggaacatagtgtgctccaaagagtgggccaagtacagagggtggacaccacacaaagcccctgtggtgtgtgttttctgttggcgcgcaaaacgcgctgtttgttggggggcacccccaatggggccgcgccataaaggcgggtggggccacccccttgtgtgttatccacagcaggaaatatataaacccgcggggataaaagtatgcaagaggcgtcttctgttgttaggaaacaacaacacaaccatcgggtgcggctgggcgggagaaaacacgggtgtgctctcttaaaaaaccctccggtgggggggcgggggggtgcattaccaccaatttatttcaacagggggagcaacatctagctcgagagagagacccgggaggggggacgaaaatctatcacacatggcgacac

SEQ ID NO: 613489 - DNA, 233 bp, Homo sapiens
  misc_feature (56)..(56): n is a, c, g, or t
ggtttgggggggggccccgggaaaaaaaggggggggggcaaaaaaaaaggcccccnccccccccccttttaaaaaataaccaggggattttgggggggattttttcccgggaaaatttttaaaaagggggggggattttttaaaggggggggggttggggaaaaaaaaattcggggccaaaaaagggggggggtttggggtttaaaaaaaaaaaaaaatttttccccctttta

SEQ ID NO: 613490 - DNA, 831 bp, Homo sapiens
agggaaacccggggaggccctccccacccaagagtggtgcccctaataggggaattccacaaggttcaggcccaggttttcgagtaaagaaaacgggaccagttttccccaaagacccgaaagggtgaatctcccccaattgatatgacccacccgcggcaaaatccatagagtttccggcagaggaacgtgtttggaaatttgggaggccaacattttttccacaactgggaagcccgtatgttctattgcaatgccatgtgggtaaacacggccccaaaagtgggccaaaaaacaaaacctgcgccaaaggggctgccccagggtagaacaattggaccacaaaccatttcagaagtattctcaaaagtacttttcatgccacgctaccctggtgggggcggacggttctcttgtagatacatacgaggtccatacgatgccccaaagagtaagaatcgcacatggacttggcgagcgtgcgaccgggtgcccaaataactaaaggaatattcgagcaagctctcatggtaacagaacccttcgcagattatggagagaagtggtggaagccaaaaaaaaagcatggtgcccttcacggtaagtagctggggcaatatgtcatttattgatcagccttagggttatcattgcgcattttgagggcctgtcagcggtctatgcgaaggaccttacaaaccctaagtgcggacaggtagggccctgagtgtccaggaggtgggctggaaccaagaagggggtgtcagaagggagggtatcttgtctaagtatgaagagtgcagtgtttctccaatcattgatgtcgggtag

SEQ ID NO: 613491 - DNA, 989 bp, Homo sapiens
agtccgagtggcgagaagcgagctggaagtggttgtggtggtcgcgtctcggcataccggtgagcgcttggcgcatggctgactcatctgcatctgaagagcatgattgcagaattctaaagaaaagcttgttcactatttgcaccataagatcgtggtggatggaaccttataacagacgaaggggctagtgggtggaactgtaaatgtatgatctctctgcgtgcagcaatccccactagtagagctaaagttgctgcgctcatgatctgcatgaagctagatgctgaactggtgagtgcgcactgttgcatttccctgaatttctgaccatctgtatggccaggagaaagatgaaagaatgagacagtgtaaccacacagtttcgagatgcctgccgtgtgttggactaaggttggctagtggctatacttaggtgctgcatgaagttctgggcatgtgatgatctaaaccttggccgagagagttgaacacgatgatcgaacgttgctcgagcatgactcgcgggcaagcggatattgaatggtgacgggtcagggtcacactatgaagagttggtgcagaacatgatgacctgttgagtgaaagagcttgtccatggagtgtgttatgtgcttgttcaaatcttgtttcattcgtcctctcactttggggtgtatactgatctgttcaaagtttctccctacttgtccgaacacatattgttgttagaagtgacgaattaaggcctccatggtgcttacctttttttactgcattgctgaaacttttttggaaatggtcggtacgcgggttgtgggtgacttggggactaaaacgctcggcattgagttaacgcgtgggcacgcgacctcgtgtgtgcgctcaaagagcaggaccggacattgtgggggaggaggagagggcgaagcaactaacggaggggcgacggccacttgtggcgaggcttggggaaagacgagggtaca

SEQ ID NO: 613492 - DNA, 124 bp, Homo sapiens
ttttttagcctttaaaaaaacggacatctacaaatgtgtgctcacaaatgctcaccgacttgatgatgccagtgtttgagattagagaggcttactgaatttcaaatgaagtgattagaatgaa

SEQ ID NO: 613493 - DNA, 632 bp, Homo sapiens
tccagtcagtttacacaatcattacatataatataaaaacagattatgttcactaacaagaccttataatcagtatttctctctctgattaagggcagatccatatgcttggcagttaaccaagaaggaagttgatgttccttggtggaaaaattagaagcctaattggggcatatgcctgaatagacagatgtgcattcagccttccaaggagatggaccaaagtctgcctgtaggtaggaccaagatttttatcactaagtttttgaattgctctatcaggaaaaaagaggagtgttcaagtgcccaaattctgcgccaggagcacatttagatctgtcagttgtccagtatagctcttttaaaaaaaaagaacgcatctaattggtttatcatagaatgttggtaaatactccctaggttataaaattagtgatctgcttaatagatgatggtcagctaaagaccaattatatctgtcaaaaatctttatttggtttttaggataaagactgtcttttggaaaataaactgtaagaccagttgcctcttaacaggcaatgatatatcataatgtttaaatgaatatggatctgaataaatagtcatgctttcttcttaaccacaagaaa

SEQ ID NO: 613494 - DNA, 369 bp, Homo sapiens
  misc_feature (3)..(3): n is a, c, g, or t
  misc_feature (20)..(20): n is a, c, g, or t
  misc_feature (26)..(26): n is a, c, g, or t
  misc_feature (206)..(207): n is a, c, g, or t
  misc_feature (251)..(251): n is a, c, g, or t
  misc_feature (355)..(355): n is a, c, g, or t
  misc_feature (367)..(367): n is a, c, g, or t
agngcacaaatccatggctnggcatngctttaagaaagtcttatctgagattcctcctgtggaacaaagttaattggttccagagattcaaagccagagttgctgtcagttcattggtagagatgccatcactgggcaagtgttctgaaaacatcttatctgaataacagcagtcctgggagaacatctagggatctagcaaagcnngagatacatgaaggacataaaaacgtttttagaaagtccttggnaacagttctcatttcagacatgtaagcctgagctagggttgaaaagtgattttcatcctgggtatctgccaatttttcacctttcatttagggtttccaacctnttaaacttttcngg

SEQ ID NO: 613495 - DNA, 113 bp, Homo sapiens
tcatctctgtatactattatcgtcactgtctgctctgagatcctgagctatggttacctttagaaaagcatggggagggtatcatcatttcataagatctctttccagttgtc

SEQ ID NO: 613496 - DNA, 135 bp, Homo sapiens
tatatcgtctggctcttgcattctgggaagcaagttgtgattgcacgtactcccctgcctcaacaagatgtttgccaactggccaagactgccctgtgcagctgtgggttgattccacacccccgcctgggaccg

SEQ ID NO: 613497 - DNA, 205 bp, Homo sapiens
ctctgctgaggtggagatgacatctatgtgctctcgcttattcacggccatgcagcccaaacctcggaggacctgacctctgcaacaaacatcgtgaagtggatcacgaagcagcagaaatgccagcgcgggttctcctccacccaggacacagtggtggctctccatgctctgtccaaataatggagcaggcaacatttaccag

SEQ ID NO: 613498 - DNA, 602 bp, Homo sapiens
gttggttcgtaacactaatacttcagttgtgtctgctcgtttgcaaatttgggattcgtctccttgccagtattatcttcggtgtagcttttaccagtattgtgttattttgggttatttttgcagctgtacaaacttcggtgaaggttattgataactgaacattgttcactgaagattccaggtaaagagtctggaagatggttaaatgatgagaacttgtctaggctacaccacaagcggatcgtatgtgtgtgatgaccgacaggatagtcagtgatcaggaaagaatggggttctttgatggtgtacattttgtacgattttgcaggtataagtggtatctgctcagagtgaactaaagaatcttttcctcgtgatattttcagcggtttatcatgatcttgaccgtgcacctagtacgatgcgatatactgatgggaccagtgtattacaccatggtataagaactgtatagataaggctgcagcagatcttccttacagcatcaccatataatccagcagtacaatggtgaacccggagaaccatctcttcactgctgtattagaccctcatatcttggccgtgtccacatcata

SEQ ID NO: 613499 - DNA, 206 bp, Homo sapiens
ctgattcataatgactctcagatcttagcaggcggggtacacaaatataggcaagaggaactgctggccacagtacggatgtggcagtaatcctgtggatgcatccttttggaggtggcaaacaagcatgcacatctgggaagccctcgcaccatccgcagagatgcccctagtggacgcaaagtgcgtctcattgctgcccgccc

SEQ ID NO: 613500 - DNA, 854 bp, Homo sapiens
  misc_feature (211)..(211): n is a, c, g, or t
  misc_feature (303)..(303): n is a, c, g, or t
  misc_feature (306)..(307): n is a, c, g, or t
  misc_feature (320)..(320): n is a, c, g, or t
  misc_feature (326)..(326): n is a, c, g, or t
  misc_feature (331)..(332): n is a, c, g, or t
  misc_feature (334)..(334): n is a, c, g, or t
  misc_feature (345)..(345): n is a, c, g, or t
  misc_feature (351)..(351): n is a, c, g, or t
  misc_feature (354)..(354): n is a, c, g, or t
  misc_feature (379)..(379): n is a, c, g, or t
  misc_feature (383)..(383): n is a, c, g, or t
  misc_feature (414)..(414): n is a, c, g, or t
  misc_feature (425)..(425): n is a, c, g, or t
  misc_feature (433)..(433): n is a, c, g, or t
  misc_feature (435)..(435): n is a, c, g, or t
  misc_feature (441)..(441): n is a, c, g, or t
  misc_feature (454)..(454): n is a, c, g, or t
  misc_feature (521)..(521): n is a, c, g, or t
  misc_feature (531)..(531): n is a, c, g, or t
  misc_feature (551)..(551): n is a, c, g, or t
  misc_feature (590)..(590): n is a, c, g, or t
  misc_feature (597)..(597): n is a, c, g, or t
ccctaccctcccctcaatatcccggtggggaggggaatagtaaaggggatcccatttttcagtccaattattttactccgagagtcggtgaattgtaacaaaggaataactgtcccacgacaaaacgaggattttctaggtccagtccagggttacaaacgccaaacgcatttattggcgaacagtgttgagtgggggcagcctttacatnaatatcccgggcggggcgttgcccaaggggagcaaggacacctttccagtttttctggagttcgctgaggagcagctgcgagccgccatgtnttnntttgtttcccaanaaccgngaggnnanagcccccttgntccganccntcagctttttgggctttgaaattgngagnccggggcatccccttgtccccaaaaaacccnacgcttgtttnatggcctncncgtttnaaaaaaagttttngggaaaggaggaggagtagggcccccttggggttgggcatccggcccctggggcccccccttgtcanccgggggggnaggaaccgtaaattcgctcntttcgcctgggtttgtccgcatgttgtaattgggcaaanaaacgcnccctccgaattagggggggattttttgaagtttaaaattgggtttgggaaactgaaggatttgctttaattttaaaaaaaaatttatattttccttttttatgggggggtttaaaaagattcaaattacccttggcctttggggggaagttttttttttggggttttttgggaaccgttttagtttttttacttggaaaaatgggggtttaatccccccccttgttttccaaaagccaataaagggttttcccccca

SEQ ID NO: 613501 - DNA, 294 bp, Homo sapiens
  misc_feature (88)..(88): n is a, c, g, or t
gcggccgcctactactactaaattcgcggccgcgtcgactcccattcctgatgcacatgaagctctgatgcaatctacagtctacaancctgttccatagttaagatgacagagacactcaatcaggcctgaaatgtattgagtattctacaactctaattacgcagtatgtttcttaacagttgttgaattttaagattatgcaaatattctgagaaaaagccatctaggaatcacaaatttctttataatgttttaataatgagctttgtgttgtattagggtgatagctat

SEQ ID NO: 613502 - DNA, 320 bp, Homo sapiens
tgcgtgcatgtggggcaatctcggtcatggtaactcgcccgttctcaggttccgtgattctcctgcctcaggtgatccagcgtgctcggcctcccaatgtgctgggattacaggcatgagccactgcgcctggccagtccatctcacttttagttctcttatctcattaggctcttcttggctatgacagattctcagatttccctagtttttgatgatcttgacagttttgaggagtgccggtcaggtattttggtaagagtgtccctcttttggaatttatctggagtttttctcataagatacacgtttttggcaat

SEQ ID NO: 613503 - DNA, 197 bp, Homo sapiens
gctggtatgactgagacagcttttggctccgcatataaaaccagacgggcatgtttcgtaccgttgggcaactctacaaggattctctcaccaggctgatggcacctctccgaaacaccaccctaactttgttcgttgtatcattccaaatcacgagaggagggctggaaaattggatccacacctagtcctagatc

SEQ ID NO: 613504 - DNA, 258 bp, Homo sapiens
gtctaatctaatagtcctcttattatgcctttagttgtatgagtctctgtctatgaactgaacacaaaactcaggagcttggtggctttaattgtagatcagtgcttgtactaggcttagttatatgagtctgtataacacataattactaactcttgtagccatatatgtaattgactttgagtgtgatgtacctgaggtaatcttccgtcacacatggaccgtaacgggtcccagttgtctgagagcctcatgagg

SEQ ID NO: 613505 - DNA, 187 bp, Homo sapiens
gctggtggtcgatctagaggtcccccaggaagaagaagcaaatctagtgaattcagccaccaagacttggggggtggttttctacaccacatacatttttgttctgtttctttctggctttctttctttcttttttttttttttaaggaaacagagtctggctcggccccccaagcagcggggcggg

SEQ ID NO: 613506 - DNA, 763 bp, Homo sapiens
cggtttcaagccaacatcagccaggcccagaatgcgcaaccagtgagtgggcgctatagcgagctgatgaggcccaggcgcaggagttagcgaaccagttgcaggtccaggctgagcttcttaagagaaagctggagatgacagctgagaacttacgcacctctatggaggtcggtgtggatgagctgcccagcctcttcgccccctactcccagaagatctgcgagcagctgcaggaagtcatggacaagatcaaggaggccacagcagctcttcccactcaggcttaagagctccacacttacctagtgttaacaccaaacagaaagaagaagggaggctttgtgttactgaaatgtgcttttttcattctgtgagaggttgataaagtggttaacaactggactcaattggactagcactgtcctttactggacaaaagaaatgccatgtactcaccacgtttactttctcagtattaacccatgtttgagattatatttctgttagcgtacagtagagcgaatttaagatcaatcaacttgcctgttttggaggctaatttttctagttagtggggccaaacgtggcgtcattcaaaataaatagtaatcaaaaggtgccttcagctgctgaaatgaatcagaacacatgaaagatgagctttgttagtcaacagtccacatataaatgcttgtttactttacatgtttgtgcactgatgtttttgaatttatttgcaataaatgtgcgttctactaca

SEQ ID NO: 613507 - DNA, 787 bp, Homo sapiens
  misc_feature (95)..(96): n is a, c, g, or t
  misc_feature (154)..(154): n is a, c, g, or t
  misc_feature (559)..(559): n is a, c, g, or t
  misc_feature (759)..(759): n is a, c, g, or t
  misc_feature (766)..(766): n is a, c, g, or t
acctcgtgatcaccctgcctcggctcttcttttgctggaattacaggcgtgagccaccgcgcccggacaaccactgagatttagaaggcatcgannccactatacaactcacctggtttcttcctctgttggggcccctcgtggccactgttcngttactttttggtcctatttatttaaatggatggtgagctgtttgtcctccaggatccaacacttccaccttcagcttgtattacaacaataccagcctttcaagctactccgggtgaccccagaactcatctgaactcagaagcccaagagtttcattcctctcactttaggggactaagtgcccctggtcagcatgaagtcgatacagaagcatgacctccatccctaatccctcaagaatgaggagtggaaggtgttggcaggagggtgggacgcggtttgtaaatctgtaactgcatcagaccaaatctagttcaactttttttttttttgatggagtttcactccagcctgggcgacagagtgagaagactccgtctaaaaaaaaaagttaaaattagcnccaaacgctttacaagtaaaaaaagtttttagctgcatatgtttaagtaactttttagattataagaaatacgcatgcaaaatggaaaggcacaaagaagagagcaaaaagtgcatgagatctcacatccaaggataaccgctgagaacatggaagtgctgactcttcagtctttatactatacacatttaggcctgttntgtttcnataaaactgtaatcatataaa

SEQ ID NO: 613508 - DNA, 304 bp, Homo sapiens
  misc_feature (201)..(201): n is a, c, g, or t
  misc_feature (233)..(233): n is a, c, g, or t
  misc_feature (244)..(244): n is a, c, g, or t
  misc_feature (289)..(289): n is a, c, g, or t
  misc_feature (298)..(298): n is a, c, g, or t
taaaattacaccaagaccttgggggaaaaaaagaaaagaaatgtaaaaaaaagaaaaaaaaagtgctgtatcaacgacataaacctgttggcccggcacagtggctcaagcctgaaatctcaacacttgggaggccaaggcggttggttcacctgaggtcaggagttctagaccagcctgaccaatacggtgaaacctgtntttactagaactacaaaaattagccgggcttngtggtgtgcanctgtaatcccagctactcgggaggctgagacaggagaatcgcttnaacccaggnggcgga

SEQ ID NO: 613509 - DNA, 258 bp, Homo sapiens
ctggactcccaaactgctgggcttacaggtgtaaccacccacctggctcccaaactcctgggattacaggtgtgacccacccactgtgtctggcctatatttcttatagtaatatagttattggtggggtctagaaacagaaataaataaatagcagcaaatatctaatgtactttcaacaatatggctcatgctacagcatcagtttctagcacggcagagcacccaagttatgttcctggcaggttattggcgagt

SEQ ID NO: 613510 - DNA, 542 bp, Homo sapiens
  misc_feature (95)..(96): n is a, c, g, or t
  misc_feature (154)..(154): n is a, c, g, or t
acctcgtgatcaccctgcctcggctcttcttttgctggaattacaggcgtgagccaccgcgcccggacaaccactgagatttagaaggcatcgannccactatacaactcacctggtttcttcctctgttggggcccctcgtggccactgttcngttactttttggtcctatttatttaaatggatggtgagctgtttgtcctccaggatccaacacttccaccttcagcttgtattacaacaataccagcctttcaagctactccgggtgaccccagaactcatctgaactcagaagcccaagagtttcattcctctcactttaggggactaagtgcccctggtcagcatgaagtcgatacagaagcatgacctccatccctaatccctcaagaatgaggagtggaaggtgttggcaggagggtgggacgcggtttgtaaatctgtaactgcatcagaccaaatctagttcaacttttttttttctttttttttttggaggggttggaggagacacgacctcttcagggatctcttgaacg

SEQ ID NO: 613511 - DNA, 366 bp, Homo sapiens
  misc_feature (95)..(96): n is a, c, g, or t
  misc_feature (154)..(154): n is a, c, g, or t
acctcgtgatcaccctgcctcggctcttcttttgctggaattacaggcgtgagccaccgcgcccggacaaccactgagatttagaaggcatcgannccactatacaactcacctggtttcttcctctgttggggcccctcgtggccactgttcngttactttttggtcctatttatttaaatggatggtgagctgtttgtcctccaggatccaacacttccaccttcagcttgtattacaacaataccagcctttcaagctactccgggtgaccccagaactcatctgaactcagaagcccaagagtttcattcctctcactttaggggactaagtgccctaaagtgagaagaaacgcaactggga

SEQ ID NO: 613512 - DNA, 135 bp, Homo sapiens
tcaggtcaccactgacactggcagtggggacacggaaggcatgccagtgagcttcccgttcagctcagggatgaccttgcccacagcttgtgctgcgccagtaaggcgggatgatgttctggagagccccgcggg

SEQ ID NO: 613513 - DNA, 454 bp, Homo sapiens
aaggcagaccagactctccaaatcccttttttttattttcttcttaaatttttatttattttttatttttttgggacagagttatgctcttgttggccaggccgaaatgcaatagcgtgatcttggttcactgcaacctctgcctccagggttcaagcaactctgtctcagcctcccgagtagctgggactacaggcatgtgccactaccacgcccggctaattttgtatttttagtagaggaggggtttcaccatgttgtccagggtggtctcaaactcctgacctcaggtgatccacccaacttggcctcccaaagtgctgagagtacaggcgtgacccgctctgcctggtgccagcataaaaatctttgctacaggtactgagacctttttcagcctaataataataacaaccgtaacaataataattagaatataaacctttgttactgg

SEQ ID NO: 613514 - DNA, 203 bp, Homo sapiens
tatggtttagaacccctgttcagctccatagaggaaagaatgttaacctttgtattttaaaacctcattctctgcggttaaacttggttttccaatgctatctttacttgtatcctgcctttggtcccgcccgaaaccgagcttgctctctcacagttcctgatatcttcagaaacatcaaaataaatttgttccctaaaaaa

SEQ ID NO: 613515 - DNA, 130 bp, Homo sapiens
acgtacattaattgcggtgagcatctgtgctgacactgtcaagaacaacccaggatacgggacaagcaggacaaaagaagggttaaaaacctggggccgggtgcggtggctcatgcctgtaatcccagca

SEQ ID NO: 613516 - DNA, 1032 bp, Homo sapiens
  misc_feature (468)..(468): n is a, c, g, or t
ggcctgttcctctttctccccgactccaccccagctccctgtgaagagagagttaatatatttgttttatttatttgcttttggcgttgggatgggttcgtgtccagtcccgggggtctgatatggccatcacaggctgggtgttcccagcagccctggcttgggggcttgacgcccttccccttgccccaggccgtcatctccccacctcgtccgtcccctctcctcagttttgccgacgtgcttttcagtctgagtcgaccatttactccaagcatgtattccgagacttgtcgacgtgactttccgttctggagcaggtggctagaaataagaggctgtgggcaggaaagaaaggctccgtgtttctcatttgtgaggccagcctctggcttttctgccgtggattctccccctgtctatctcccctcagcaattcctgcgaaagggttaagaaagtttaactgngtttttactactgagtgacttgatttaaaagaagagatacaagagatgctggatgctaacttgatacctaaccagtcagatggtacagtatggttgtcgctgtaaatatggtagcggtgagtggtagtggtattgtgcatgccccatactactgaataaactagttctgtgcgggtcaatgaacctgaggcaaaaagagtaacacaaaagccagaggaatggcaaagagtgataactcggagctggattaggatgagacaaaagcgcgcgggtgacaccaaaaggaacccccgagagggaacaacaagacgaagcctgtgatccagaaggctgaacacaaggaccagaaaaaacacccagacgaacacagaaaaaaacgacagagacgcggaagcaacagcccagagagtccaatgggaacgggacaaacccaacagagggggggaacgaacacagtcggcaaacccacagaacaaagtaccagcgcgggaaaaaccacaagacgagagcgacatgaacaaaaaacaactcggagaaaaaacagaacagaacagacacacaacc

SEQ ID NO: 613517 - DNA, 714 bp, Homo sapiens
  misc_feature (37)..(38): n is a, c, g, or t
  misc_feature (176)..(176): n is a, c, g, or t
  misc_feature (274)..(274): n is a, c, g, or t
  misc_feature (554)..(554): n is a, c, g, or t
  misc_feature (579)..(579): n is a, c, g, or t
  misc_feature (586)..(586): n is a, c, g, or t
  misc_feature (593)..(594): n is a, c, g, or t
  misc_feature (602)..(602): n is a, c, g, or t
  misc_feature (609)..(609): n is a, c, g, or t
  misc_feature (613)..(613): n is a, c, g, or t
  misc_feature (616)..(616): n is a, c, g, or t
  misc_feature (618)..(618): n is a, c, g, or t
  misc_feature (620)..(620): n is a, c, g, or t
  misc_feature (627)..(627): n is a, c, g, or t
  misc_feature (632)..(633): n is a, c, g, or t
  misc_feature (647)..(648): n is a, c, g, or t
  misc_feature (666)..(666): n is a, c, g, or t
attttttttattatacccatgtattatcatctaaaanntatttgcaaagttgataagcgaacgatcgtataatgggattgtcaaaacatattttcacaatgcggttagtgctacaaacatgggtgaagaaataaaattatataagctgtagaaaacaagatgcacgatattgatantttaagaatgcgctaattagagaaaacccatgtgttgttgtgtgttttcgttgtatacacaataattagagccacttactgttggcagctgtttggtntttctgttttaacacatgaaggagtgaaagtatttcctatatttatgaatttactactaaaatcttggcaaaaaaagaaaaaaattgtctaacatgtgtgggtgaaaactgttaatcaagtgtttctactcccccccgaaaatcccctgaaagttggacaccaactgtataccctaggttgcttaaagggatttcactattatataaagtcaataaaaatgaagtagttgtatatatgcaacattgtgtacagaggggaaataatgaatagtataaaaanacattctcgtctcccttaccttaanccctaanacctagnntacttttnaaatttncagnctncncngcttttngaatnnataattctaatttnnacatattgttaaggaaantcatatctaataaaggttttagttattcccatgcacagtaaaaaaaaa

SEQ ID NO: 613518 - DNA, 134 bp, Homo sapiens
  misc_feature (3)..(3): n is a, c, g, or t
ggntgattgttgggtcccaatagaggaagtggtgccctctcattgattgagataaccggtgccaattcttttcttgggttttcgagtccttgtcattcattgctttgccatattcgttcagtgtctggcaaatt

SEQ ID NO: 613519 - DNA, 100 bp, Homo sapiens
cagtacaagcatgtgtaagtgatcactttcatatttgaaaaaatgatatgcttcacatcaatacaattactttagttttaggaggaggaggaattcgccc

SEQ ID NO: 613520 - DNA, 567 bp, Homo sapiens
  misc_feature (23)..(23): n is a, c, g, or t
  misc_feature (62)..(62): n is a, c, g, or t
  misc_feature (72)..(72): n is a, c, g, or t
  misc_feature (80)..(81): n is a, c, g, or t
  misc_feature (83)..(83): n is a, c, g, or t
  misc_feature (105)..(105): n is a, c, g, or t
  misc_feature (107)..(107): n is a, c, g, or t
  misc_feature (115)..(115): n is a, c, g, or t
  misc_feature (140)..(140): n is a, c, g, or t
  misc_feature (185)..(185): n is a, c, g, or t
  misc_feature (193)..(193): n is a, c, g, or t
  misc_feature (244)..(244): n is a, c, g, or t
  misc_feature (268)..(268): n is a, c, g, or t
  misc_feature (272)..(272): n is a, c, g, or t
  misc_feature (294)..(294): n is a, c, g, or t
  misc_feature (301)..(301): n is a, c, g, or t
  misc_feature (325)..(325): n is a, c, g, or t
  misc_feature (352)..(352): n is a, c, g, or t
  misc_feature (367)..(367): n is a, c, g, or t
  misc_feature (376)..(376): n is a, c, g, or t
  misc_feature (381)..(381): n is a, c, g, or t
  misc_feature (383)..(383): n is a, c, g, or t
  misc_feature (404)..(404): n is a, c, g, or t
  misc_feature (418)..(418): n is a, c, g, or t
  misc_feature (439)..(439): n is a, c, g, or t
  misc_feature (474)..(474): n is a, c, g, or t
  misc_feature (493)..(493): n is a, c, g, or t
  misc_feature (504)..(504): n is a, c, g, or t
  misc_feature (543)..(543): n is a, c, g, or t
catggagattacatactggtganaggaatagaataatatctagcaatagcttggaataatcngctctaaaanatacccannanctttttaaccgcatttttcaanancagcaccnctggtttccttaattttttgcagtnttcttccagtaatgataaagctcggtcagtatctgtcttcttgantggcattnttgggtctttccactgccacaggagttaatatctcttttcaggtctcagtntgatccagcgggattgaggccaanagcnaggaaactgtagcaaaccactncagtgtncagttttgaaatccaggctgagtnttcccctcagtaactcagaatccagcntgctgtacctatcanttttttctnctgtncnctccaagcccccaggcttganccttaatgcccctntgattctgatcctcccatgtnttaaccgagaggattgaaaaaaaaggaaagcaatnccttggcatggagacattnaagtgacagtnctactcaatgggcacttgaagcaggaagagtaggcgaanagaattcttcacactggagttatt

SEQ ID NO: 613521 - DNA, 334 bp, Homo sapiens
aaaatgaggtatttggctaagtgtcccaaccagtagaggtttggccaaactgcagaaatggtatagtaagtaagaaaatgaaagtgaatacattgaacctataacacagaaccaggatttcacaatatgcatctctaaaagcaaaacccagcatgatttcttcatagggcatacatttctattcagaaaagaccacagatataaagaggtaagttaatatgagaaaggtaaagactctaagatcattctttttgcccctttccacaccacatataaaaaaatactcattaaggggccactatttcccgcgctctcatattatcatagaatatat

SEQ ID NO: 613522 - DNA, 504 bp, Homo sapiens
agcggggaacaatcacttgacattatttggcctcagtatccctgaggcatgaaaactccatcctctttttcccggttggctggtgtggttggatgctgttaaaggaactaaatcttctggtctgggtagtctcccacatgtgggcttgggttaagggcattccaataataacagggtttagtacgtttccctttctccggtgtttcctgggcatgggtacttagagcgggaggtggtgcagacttagttggcattctttggtactataatcaggaggtgcataaggtcgggtggtgtctctcttgggatgttatcagctatggatgatgatggcttaggtcataacaagcaccttggatgtgactgtcccatgccaaagctaccaaaaaaaaaatacattaaaaataatgaatctgagaggtggggtatgttaccggttcagtttaaggtccttatgattacaagggagagcaattccgtggggttgggccaaaggagggcagg

SEQ ID NO: 613523 - DNA, 1984 bp, Homo sapiens
gaagagaccatatttgttcgcagaggaagccgttgctttctgggatctggctacggcagaaaagacatcggctccaacaggggtgttccacagggtagctgggagttggaagagccaagaacgcctccgagctctggatttgagcttctctgcccatgggtgaagcgcccatgctcagcttgtgagcttcttcccgggagagcagccatggcactgaggaatgtgccctttcgctcagaggtcctgggctgggaccccgacagccttgctgactatttcaagaagctcaactataaggactgtgagaaggcagtgaagaagtaccacatcgatggggctcgcttcttgaacctgacagaaaatgacatccagaagttccccaagctccgggtgccgattctcagtaagttaagtcaggaaatcaacaagaacgaagagaggaggagcatcttcacacgcaaaccccaagtcccgcggtttcctgaagagacagaaagccacgaagaggacaatgggggttggtcgtcctttgaagaagacgattatgaaagtcccaatgatgaccaggatggggaggatgatggagactatgagtcccccaatgaggaggaagaggcacccgtggaagatgacgcggattatgagccgccaccctccaatgacgaggaagctctgcagaactccatcctgcctgccaagcctttccccaactccaactccatgtacatcgaccggcccccctctgggaaaaccccccagcagcctcctgtgcccccccagagaccgatggccgccctcccgcccccaccagccggccggaatcactcgccactgcccccaccccagaccaaccacgaagaacccagcagaagcagaaaccacaaaacggcaaagctccctgctccttcaatagacagaagcacgaaacctcccctagatcgttcattagctccgtttgatagagaacccttcacactaggaaagaaaccaccattttctgacaagccctcgattccagcgggaaggtcactcggggagcatttacccaagattcaaaagcctcctttaccaccgaccacggaaagacatgaaaggagcagccccctgccagggaagaagccacctgtgccaaagcatggatggggaccagacagaagagagaatgatgaagatgatgtgcatcagagacctttgccccagccagcactacttcctatgagctccaacactttcccttcaagatctactaagccaagtcccatgaaccctctcccatcctctcacatgcctggagcattctcagaaagtaacagcagttttccacagagtgcctccctgccaccatacttctctcaaggccctagcaacagaccacctatcagagccgaaggcagaaacttccccttgccacttccaaacaaacctcggcccccatcccccgcggaggaagagaattcattaaatgaagagtggtacgtttcttatattacccgaccagaggcagaagctgctcttagaaagataaaccaggatggcacatttctggtcagagacagctctaaaaaaacaacaaccaatccatatgtcctcatggtgttgtacaaagataaagtttacaacatccagatccgttatcagaaggaaagtcaagtttacttgttgggaactggactccgagggaaagaggactttctgtctgtgtcagatattattgactacttcaggaaaatgccacttctgctcattgatgggaaaaaccgaggttccagataccagtgcacattaacgcatgctgcagggtacccatagcaagttatagccgagcaaatgaaccgtcctcctgcctctgttgccaacacgagatcaatcagccttggtcaatggacaaacacttaggactgaactgaacccctccccatgaacacaagggttttatcctttcctttaaaaacagtgtttgaaatgaagactgtcaactatcccc

SEQ ID NO: 613524 - DNA, 458 bp, Homo sapiens
  misc_feature (433)..(433): n is a, c, g, or t
gactcttgtatgctcaggtcttgtcatgccagggcagaaaaataaacctatccattagggcaccaactaaagatatgaaaaagttataatcttataatctgatactctctagagattactgtagccaagatataattcatgattcaatctgcactcaaaaaaacaaaagttaggggtgaaatctagtataaagcattacatttttcctttgaaacaatttctctctagccctccttttctattaaagagaaattgtagtaagaccaatttgtgtgcaaaataagttctaagcttattatactttgcctgatgatttacataaagtgcagcaagaattcattgactatataggctcttaagttggctttgttggaactttacctaaaaatatgctattctagtgaaagtcttggtaaaataaccagtgtctccnactgttttgttctaaaagactctta

SEQ ID NO: 613525 - DNA, 184 bp, Homo sapiens
ttttttagcccatgcccttccccgggggggggggggggcggggggccctcactctccaagccccttgcttgcatttttttttagtttgggcggcaagtaacccttttcctccccccccccccaccccccctcaatgttggggccttgggtatcctttttttttataaagacaattcaccccgca

SEQ ID NO: 613526 - DNA, 177 bp, Homo sapiens
atcccggcgagtctaatgcggggagcgccgcctgtgatcgcggcaggtcatattgaacattccagatacctatcattactcgatgctgttgataacagcaagatggctttgaactcaggatcaccaccagctatttggaccttactattgaaaaccattggttacaagccgggaaaa

SEQ ID NO: 613527 - DNA, 559 bp, Homo sapiens
  misc_feature (198)..(198): n is a, c, g, or t
  misc_feature (231)..(231): n is a, c, g, or t
  misc_feature (242)..(244): n is a, c, g, or t
  misc_feature (246)..(246): n is a, c, g, or t
  misc_feature (322)..(322): n is a, c, g, or t
  misc_feature (332)..(332): n is a, c, g, or t
  misc_feature (415)..(415): n is a, c, g, or t
  misc_feature (521)..(521): n is a, c, g, or t
  misc_feature (539)..(539): n is a, c, g, or t
aacatgaggcaaggccgggacaagtacaagaccctgcggcagatccggcagggcaacaccaagcagcgcatcgacgagttcgaggccctgtaacagacaggcaaggaccaagcgcagaggggtgctcatacagggcgctgccagccccgcaacgcttgtggtctttagtgctccaagtctaggaactccctcagatcncagttcctttagaaagcagttcccaacagaaanattctgggctnnnanccagggaggcgccctggtttgttttccccagttgtaatagtgccaagcagggcctggatttctcggcggattattncttcggaatncaccttcctgtgttgtggctggggagcagggactggattggaatttacgggtgcctgttaaagttctggagttaagaaacttncatggctgggcctgtgtgattacaagagttcagcatcatttaaagggaaacgtgggcaggactttccatctgtgccatacttgttctgttattcgaaatggagctncaaattgatttttttttnctatggggattcctctttgt

SEQ ID NO: 613528 - DNA, 760 bp, Homo sapiens
acactgcagcctggatcgagaggagccggtatctggagaaggagaaggacctggcagagaacagggcctgagtctactggaggagatgtgaccatgagtttggtgtcagcactctggctggaggaggagtgtcgggacagaggcggcaggacctgattcagtgcccgggacctgtgaggggcctcgagccgctggagacatgccagtgggattccttccgactaaggggagagcaatgattcttaccctcatggactaatggcgtgcttgcagggaggaggagggacgtgcttggtgaagcgtgaacctgggggatgacggagcgggaaggatgagcatagtgtggagctagtgggaagacagaagccatgaactatgcgtgtgcttatgccgatggagcggagagctgtggaccgaaacctgagacgcgagacaaatagaccatcttgtctaatgccgtgtccagagttactgaactacatgaaggcgttgactgggaaggcctggccatgtttcccttcccggctttggacccgaggggcggggaacggcttgaatggcccgtgcggggaacgggcaagctgggccagggagcatcccggggggccagagcgcttggcgggcctggcaggtctcaaagacccctggaagcaccggtgcgggcgccccgggcgtggacatcccgacatacgtggacgccaggcgggagattgggcaacctccaaagaacaagccgaatggggaaggggcgaacgaagaa

SEQ ID NO: 613529 - DNA, 283 bp, Homo sapiens
  misc_feature (2)..(2): n is a, c, g, or t
  misc_feature (16)..(16): n is a, c, g, or t
  misc_feature (89)..(89): n is a, c, g, or t
  misc_feature (137)..(137): n is a, c, g, or t
tntcaaaatgtacctntgcactggaagtttttaccccaattttgagggatttttccagatttcagaaattatagttaatgtcatatcantcgtttaagttacatttttacctccagtcattttggctctcttttagntcgtttttatagggatttgtaaaattaaaaatgctttgcatgttttactttataccttaacagggtttattaagggaactccagcaatgttaaatagacatgttagatccactaccccaagtgcacttaaagtgtgatataaatgg

SEQ ID NO: 613530 - DNA, 887 bp, Homo sapiens
ggggcagaaccagtctccgcaaaactgacccctacccatcccagtgtcaaaggagagaaggaggaaaacatgcttgagccatccatttctctttctgaacctctaatgttagaagaactcagagaaagaagacatagaagacttccctacccatagctattagcccctgaacctcaagattctaaatttagtagaagaagagatcgtagaacttgattacccagaaagcccatggtttccgagaagaccttcccagcacgatatgtcccctgaagtggcgcacagaagaagaagagcttattctagacattatggggagcatcatctcctgaacatgtgcttgtctgaggaacgagagagaggaaattgatctgtttctactggttctgcttcttgtatcagagtattcagtaccacaggatttgaacccatgaattacaggagcaagaaggtgagccagttcccccatccaatgtagaagctatagctgaacatgcagtttgtcagcagaagagaagtgaggaattgaggctaattccccagctatggccctacatctgagagctctctctcaccatccgaccaagtgagaagacttctagagaacgcagtctccactgtttcaaacaagttaccccagaatacatggtcctatcaggagacgatggctcagaaagtggggtgttacaaaccaggaattcacatcgtggttctgactcattcagttcctccatggcacaactgagtccctgtagacaagatgccccgaagtccccgtccatattggaacggggtccgagtacggattcatcaaaagacacgagactgttctaaccaggggaccggttgagactttttaaccaacgaaatgatgcgacaggtatctg

SEQ ID NO: 613531 - DNA, 337 bp, Homo sapiens
atctattttgacgctgaagcgcgggcccagagccctggacaaaattttccttgttccgggatggggtagaggacaggttagcaatgttgctagagtaatggacagtacatgacacagtggttagagctggaagcttgggtcttatagtgccagggccctggttgtaaacatgccaagatcaaagagagtgacttcttcaaggtgaagcagaggcacagcccagatcagaacttggacttcctggcctacatgtggccacggatagaactatgaagttgcatcctccattccctcatccacgcaaaaattttcctttgcaatttggccactggaggtg

SEQ ID NO: 613532 - DNA, 243 bp, Homo sapiens
  misc_feature (29)..(29): n is a, c, g, or t
  misc_feature (34)..(34): n is a, c, g, or t
  misc_feature (44)..(44): n is a, c, g, or t
  misc_feature (60)..(60): n is a, c, g, or t
  misc_feature (62)..(62): n is a, c, g, or t
  misc_feature (228)..(228): n is a, c, g, or t
  misc_feature (241)..(241): n is a, c, g, or t
gactttgaggatgatcctcgggccctggnctggngcacctgtcngttctgtcagcagagngnctaccagctgcagggcagatgaaccgtgccgtctatgaggacaggccccctgcagcgtggtgccacgtcagcagcagaggcaagtcgggcatgcggggacacgtcactgagcgagaactatgcctttgcggcatgtatcatgtttttgaccagcacgtggatgagncagtccaagggtncg

SEQ ID NO: 613533 - DNA, 463 bp, Homo sapiens
  misc_feature (281)..(281): n is a, c, g, or t
  misc_feature (283)..(284): n is a, c, g, or t
  misc_feature (365)..(365): n is a, c, g, or t
  misc_feature (380)..(380): n is a, c, g, or t
  misc_feature (406)..(406): n is a, c, g, or t
  misc_feature (417)..(420): n is a, c, g, or t
aggtaaatggacattaaacttttttaaagtaaaggagatggtagataccgttagattatagtcttgaggttcatgtgaagccagtggtgttaacttactttgatttccttgttcaggtcagggcctggaacgcctgtgcggggaggtcactcaattcaaaattttctgtatgaaagcatttttcaccaaaatgagcctcatccccttacgcaacacataaccctactgagggagggccaccggcagccacctttttatttctcttcagggtggacaagttnanngggtgtcttgaacactgtcccaaacaccgcgcggtttggtggggacagggggttgtctgcataacaagctccccattcggnagaggaggaggggangggtagcaaaaagaaaaaaataaatnttccctgtgtnnnntattatgatttcgctcgcaccatcccactccccaaaactctcc

SEQ ID NO: 613534 - DNA, 381 bp, Homo sapiens
cttgtagtcatccggataatcacgttttcccaggtgaatcgctgctttccaggaagtgatgggcgtaccgagcatttcgtaccagccggggttgcggtagacgaaaccggtgttggcgttccagtcccagatcccgtcgctgaccagctccatgatggcgtgcagcatgtcggcgttgaggtcggtaaagtcgctccttgagggttcttggccggatgtatcgtccattgcgtgctccttgcgtgggctggctctcatggccagttactgttgacgccgatactccgtggctggcggtactgtacaacggcgctttggcgctaagaaaggggtgctttggtctagctggggttgtggcctagggcataacaccacacaatt

SEQ ID NO: 613535 - DNA, 219 bp, Homo sapiens
  misc_feature (104)..(104): n is a, c, g, or t
gtggagagccagcggcgtgtgacacataggagacatcaaaagcggttgagactattatcaggcagcgaaccgtcatcgccttctatgagacacgtgcattgtgncaaggtcaacgctgagggctccgtggacagtgtcttctcccaggtctgccccacctggagccctaaagtaggaacgctggagccgcttcccaggtcagaactcggcccaccccgt

SEQ ID NO: 613536 - DNA, 487 bp, Homo sapiens
tcgaagctggcggttggcccacggtgtctgtcatctcaaggctggactcagttgagtgtctttcggacgtgtcgtttcctcagtgtttcaagcgtcaggtcccttgagttgttcctgttaacatgtggggaggactctggtttctcttctgcgtgggccttgtttccctagtgcgattggctgggccccttctgcaggcccggcctctctagtggtccctgtgctttcgcctcagtcctaggattggctgggctccctccacaggctccgcctcctacgtggctgctgcacttcgccccagtcctaggattggctgggctccctccacagggtccgcctcctacgtggccgctgcaattcggcccagtccttaggattgtgtgggctccctccacaggctccgcctcctacgtgtgcgctgcacttcgccccagtcctaggattgggtgggctccctccgcagaaacccccaaccgggcatcttcag

SEQ ID NO: 613537 - DNA, 368 bp, Homo sapiens
  misc_feature (61)..(61): n is a, c, g, or t
gcagagtgtccctgagacagttgtgcacgaacacaccaatataaagctctagaatagcagnccagacgtttcgcgggtatgtcctcacagtcccattccctagatggactgcctccagttctgttctctgcctggcccatctctctttcccttcaggcaagagagagatggatggatcagactgaaaggacaggcatgctgatctccagcaagcaggggccaggagaaagtctcgtttgccaacacttgttactgaagcgcagaaaaagcagcaagtgacagtcacaaagtcttcctgggtattcttcataacgtacagtctatatgcgcaggaacgaagaagctcctgggggaggatgatggccact

SEQ ID NO: 613538 - DNA, 1089 bp, Homo sapiens
acgtactcgtgaatttctttggcaggaagggcacagtgcttattgctaccatggcaagaggcggcggaagaggtcttgcagatacttgacttcatatgctccaggtcatctgcacgcaactcctggacaaattcctgcttgtctcacaaggcaagcaaagcacggcacaaaggcaacaaattctgcaggcaggagcactatcacacactacacatagcaagcacttctatcatctcgctagctggcaagagctactccacgggcaggcaaccactccacatcacttccagagcgcagcacattcccttccaacaactgtcctgccacatcgtctctcatgcaagatccaacagatacccaggagcagacgcactttgcactatcacaaactcctggcggcctgacaaactcgaacctatatggtgtatatgaccatggattcatgcgcggacaacacaatgggcgtacaccgtcattaaccatccaccgatagtacacaatgtagtacacggctgatagacttataaccattagtcggccattcagcaaactgcaactaccctgaacgaacgaccacagaaacgcacattcacatttggcaaccattggcacacgactatacttcgccaaccgcgactttacatccaacctgatttcaccattcccgccggtaaaaacgcttgaatctacgaagcattcatcattcactcccaggaaagagaaaatacaaactccacctgcgggaaggcctcaacccggccagtatccccacacgaacaccacctggcaagcgaaggggcgccagagctcaagcacatgcaaacgagcatcggtccgggacatcgagtaaacccccatccggacaaccacaagcacaacgggccacgtcaaaagcagcccagacgcgcggaaggctccgacagcaacgcccgcgcacccagaaacctcagacaattatcacacagacatctttagggaacgaccccatacaccggagaaccacaccctttgagcaccgaacgggcctgccacggaacggcacaccaacagctccctcctagagtcactgagtcatcatccaaacgcgaa

SEQ ID NO: 613539 - DNA, 374 bp, Homo sapiens
  misc_feature (55)..(55): n is a, c, g, or t
  misc_feature (213)..(213): n is a, c, g, or t
  misc_feature (290)..(290): n is a, c, g, or t
  misc_feature (360)..(360): n is a, c, g, or t
  misc_feature (362)..(362): n is a, c, g, or t
gccagaaatatttaatttcaaaggcccaaaagcagtgcctttgtgcctttacctncccatctccctagtaatggcctcagaaagacaaggaaggccggcgtaagttgtcccgcctgtaatcccagcacttctggaggccgaggcaggtggatcacctgaggtcaggagttcaagaccagtcctgcccaacatggcgaaaccctgtctctactnaaaatacaaaaaattagccgggtatagtggtgcatgcctataatcccatctactcaggaggctgaggcaggagaatngcctgaaccaggaggcagaggttgcagtgagctgagattgagccactgcactccagtctgggcaacaagngnaaaactttgact

SEQ ID NO: 613540 - DNA, 411 bp, Homo sapiens
  misc_feature (49)..(49): n is a, c, g, or t
  misc_feature (213)..(213): n is a, c, g, or t
  misc_feature (355)..(355): n is a, c, g, or t
  misc_feature (368)..(368): n is a, c, g, or t
gaagaaagcaaccccaggaagcctggccccgaagactgtgaggtatggnggggccttgctgtgctctggactggacaagaggcaccctgggctctggacacagccagatcttcagccaattgcatctccggcccagggcaggccctttatcttatagcccagtggtgcctctctcctcacctaggaaacaaagccaacaggatctgcaccacntctgcctcccggacattggaaggactaaataagatcagagacctcattcctagatggaacgaggaatggtagcgaccacgatcctcccctcccaggatctgcgccacaagggaagatcagaaccttcagctgccagaagcantgtggcggaaatntaggtccccatccagggttgattttgagtttgggttttttggg

SEQ ID NO: 613541 - DNA, 548 bp, Homo sapiens
  misc_feature (19)..(20): n is a, c, g, or t
  misc_feature (60)..(60): n is a, c, g, or t
  misc_feature (68)..(68): n is a, c, g, or t
  misc_feature (75)..(75): n is a, c, g, or t
  misc_feature (180)..(180): n is a, c, g, or t
  misc_feature (212)..(212): n is a, c, g, or t
  misc_feature (340)..(340): n is a, c, g, or t
  misc_feature (345)..(345): n is a, c, g, or t
  misc_feature (356)..(356): n is a, c, g, or t
  misc_feature (367)..(367): n is a, c, g, or t
  misc_feature (495)..(495): n is a, c, g, or t
  misc_feature (542)..(542): n is a, c, g, or t
taaaaaattccaggcgggnnaccagttaccatttaagtccaataaccccaaggattttcngatggggnggccaanatgtaggaacaattgttcaaacagccccggtgaaattcaacagccagcattagcatgggaatggccttttcaggcatcagcccagtggattgttaaccacaaccntgccaacttttgatagtatccgcatgtgagantcaaagcaagaactgccagggggagcatttcctgatcctgacccacaaaatcctgagtgatgtacaatggttgcttgaagctgccaagttttagggtaacttattatacaacatagtaaccagagtgnttacnttccccttccntcccttgccantggccggaacacagatgaggccatggtgggctgttttcagtcctgtaaatgacatagatgagggcatggggaagccacaaacgaggagcctgggtttttggatgccctcatggagcacaactgccaantccccacgtgccactcacatttcatgcaagagaaataaatttccatnttgttt

SEQ ID NO: 613542 - DNA, 107 bp, Homo sapiens
gttacctcatgtcgtgcgttgctgctatagaaagtttgcctatctggggcgcctggtcactgaggttggctggaagtaccatgtgcagtgacatgccaccctggagg

SEQ ID NO: 613543 - DNA, 188 bp, Homo sapiens
  misc_feature (46)..(46): n is a, c, g, or t
  misc_feature (135)..(135): n is a, c, g, or t
  misc_feature (150)..(150): n is a, c, g, or t
  misc_feature (153)..(153): n is a, c, g, or t
  misc_feature (158)..(158): n is a, c, g, or t
  misc_feature (165)..(165): n is a, c, g, or t
  misc_feature (167)..(168): n is a, c, g, or t
gttttggccattcgttctccgttccggccagttcttccggtgtcgnggtgaaagatataggtttgctgacaagcccggatgctcgcttttttgctctgtcggcccgtttcgagcctttctgcatcaaaggcctgncgctggtggtgccgntcncggtnaacttgngnngaacatcgctgtgggcggct

SEQ ID NO: 613544 - DNA, 785 bp, Homo sapiens
  misc_feature (426)..(426): n is a, c, g, or t
  misc_feature (454)..(454): n is a, c, g, or t
acgggaaaacaccgctggggggtttattgagggagaaacgccacacacagggagagacaaagcactactcggtcgtcctctttgagacacaccgctcaggagtcgcgacacccaacacagtgaggagtgagagaaaaagagagatattaagaagaccttttttttgtcacactctgacactctctcttgtagagataaaaccggtgctctctctctctgcgtgttgagatcgcccccgggtagtcttcttaagagaagtgtgagaatagtgtgacacacaaaaaggagggtgttgggctccccccatatgagaccctttggttttggcgcacccagcgcgcacgtttttatatattaaagaaatatatgtaggggtttataagatatttagaagaggctccccaaacagattagatttgttgccanaatatttgcgagagagatatttgttcanagagcattaatattagagggtaacctttagcgtttagtgatctccacataataacagcgccattgtttggtgttctttttcaccaccaaatgaagtggtctatgtgtctttgcgtgataaatccaagtgccattcgccattgtggtgtctgtaaatcaaccagtgatgttgtgatttgagatgttgcgttagaatgttgtgactcgcccggccctttttattggggtttgaatattggagaaggggcccaattgtcaccccttttaattgcttttaaaaacaaaggtaaaattttgccccattaaaaaatcaggattaatttaacccttta

SEQ ID NO: 613545 - DNA, 138 bp, Homo sapiens
ccgtggatatttggggggccagtatggctgcgatgaggcatttcttaggacaccttggattataatgaaaacaactactctctgagcagctgttcgaatcatctgcatatttatactgaatgagttactgtaagtacg

SEQ ID NO: 613546 - DNA, 920 bp, Homo sapiens
  misc_feature (1)..(1): n is a, c, g, or t
ngacgaccctgtgcctcgcatcgtgttcatgggtgcgtcgcactggtgttgcagaacacagttccgccgtatgccatgttcaccgtgagcacattgattgccatggcgccccgttacaatcctcgcattgtctgggcgggagtttcgccggcacccttctgtgtccctcgatgttgtgtcggcagcagatatttggcgtggcgactggttggtaccccacccccgcgaatttgcggcgtcctcacatgtctcgtgtccacccgtggcgcccgttgactccactgcaagtagagtggttgtaggcgccgctgtcgtggtttttcccaccacagggctgtgagccttcgtgtgttggctggagtattcaacagcttccaatcaccttccggccaatcactcactatcagggacgagttagttcactcccacagtcgctcatgtatccttctcaatcacagctattatcttcgctacatgggattaagaaaaatctgcgcacttattttgtgccccctgtgagtagcaccccccgcggtgcattattcccactagatgtcaccccccctttcttgcgacaaaactaccaccctttcggaccacaacactcccccactttggagaaaagcacaaaccaccaccccccttggaggaaccccacacgctatgaaacacatttcacaagccccttccacaaggacatactcggtatcttaaatagcccttattctgcaacaaaaatgaaaaataacttactactccttctgcaccactatgagccatgcgcagaacactcacagtctcatattaagtaacacgaagaccccccctttgaaacacccgacccaactcattatctcagagagcatttatttccccgcacccttccaaaaaccccttgtttcccaagaacccacaaaaca

SEQ ID NO: 613547 - DNA, 926 bp, Homo sapiens
  misc_feature (633)..(633): n is a, c, g, or t
agcgggggactaggagcgcggcggggccggcggcaatctgtccgtgctgcgcggtgtgcccggggggcccgggcggcagggcaagcaccgctgcctcggcctatgctgaccggtggcgccggcgcggcttctgcctggacgaggattcacaggatgaccaaccgaagaacctcttcccaagaacggttcgatctgaagttgaatacagaccttcgataacgtgtatggcaatgacgactgaggttaagtctctaaggaattggacagacaattactgacacgctatatgctacagaaggcttctgtgcacgggcacacgtagctacatgtatactttaatctgcataactgcatagtaacctggacctgaagcacgagatctgactgaacaagatctaatagctaactaacaagtcaggagtcttgcacgccagggaagaacatccttgtaattgcgacttagtcaatccaaggtaacaagaagatgtcaaggagtgtactactcatgatcctgtacctcaagcaagtccagcagtccgagcgttgtccaagctgtagatcagcaatgttagacccaggcgatcaaagctttgatttgttactctaagaacacacttgaagaggttgagactngggaagcagacttacagatcgaactggaacaagccctgactgaacctgagttgcctgggaagtttacgccttgatagcgtaacacaaatcatactccccagtcaaggatcttccctgacaggcgcactacgagaaagctgtggtgggacaggcacagtactcgtttccacaccaagactcagactttttgaagccaaaaccaagcccacattcttacacttgtccagcttgtaatggtcaatgtaaaacttacccagatgaacccttgtgtttcaagccttttttcttttccc

SEQ ID NO: 613548 - DNA, 130 bp, Homo sapiens
tggcgaccttgctcagaggtggggctgggatcaggtctgagcgtggagtcctgggcctgggcatgcagagcccccagacaggtctaggcccagccacaggagacctaggggcatagatttcagggccgag

SEQ ID NO: 613549 - DNA, 541 bp, Homo sapiens
atggctgctgcaaatacttattgcatgaagaatagatttaagataaaatagacttcccagagaacagcttccgctgcactacactgaatacatacacgcataccaaggtatcaaagtagctgattacttcttgaggtcacagtaaaaattaagatcaccgataaagtaagattggaaattgttgatttgaggttgaggaaataggggtgctttgctttattaaggggaggctccccttgggaattgctgcaggggttttggtgatagcactctccaaataaaacctaggggaagagtttggagaagaaactgcctgtgtgagaagttacagcttgataatatcttattgttgtgtccaggaaaaacagcactggaggcaatgtttctataaatcaaagaagagacagtgtgagaatgtcagccctcaactggaagccgtttgtgtacggggggctggcctccatcactgctgagtgcggtaaggacctgagggtggtggatcacgtagcctgctgtatgtgatggctcaccgcagggtacc

SEQ ID NO: 613550 - DNA, 673 bp, Homo sapiens
ggtattaaatgattaacaaacatgaaatgtttatgacagtacctgatatgtactaataactaaatatttcctgttatcattttcattacacgtacatcattagtgcagctttataaaggaaatgaacgtgtgacccaagaaaactgtgttttcttcttactattacggctgtacatagatatgctgaaacactgaaaattactatggattctactttaaagaaaaaagagtgggcgatactgctgattgttgaaaccaaggaacagggtgattcaaagtaatagaatcagtagctactaaccaaccttgtgatcatgtgacttgacgtatacatgactaaacaataagaaaccaaaactagaaggtggggcaacgatgacaggatgcatggtaacttattctcttcggatgtacggtaggaaaacactccgttaactctgcacaaattgaaaccgcttcagtactctcgtcttccaactgaaatgcaacacctcttaatgatctcgtatatactcaaagaacatctatctgatgtatggagggtctcaacatctccacaggtactaattccatcccttaaactccaaatgtaagatcatagtcccattctaagggatacatttggctgttctctgagtatctgtcaagtggttacagaaatgtcacgctcacg

SEQ ID NO: 613551 - DNA, 140 bp, Homo sapiens
gcgggcgccagagaccagtccttctctaatcactctataattatgctgtatgagctgataaatactcagcactgtgtatgtgtctgcatagtctgggtcttgcactgtaaagcattaatcatcacagcaggctcttaagg

SEQ ID NO: 613552 - DNA, 796 bp, Homo sapiens
tggaggttccaacttaaacatttatggcacaactcatttcaggccactgttgaccatcccaaaacacagcctagtaacacacaacttcaccttcaaggactgcacgagatagaccacctatatataaataatcgtcgtgggaaacgtaattggggtcgagaaaaatatgcaacgctagagaacttggcgacgaatatttaggcctaagttcagaagcttgaaaatacagtgggcctacaatctcaaatttcacccaataaccgtggcccttagtcaccacgactttccataatcttttaacctctgcctgtacttgcccttaacagtgcagctctctcaactcccttgcctctagtagacttcctcttcccatagtcctacaactttgtgcacgggagcattttagcaacagcctattgcaaaggcgtccaaagtccaactgacccaatgcattactccagaaatttataccaccagggatgctttcactatttcaaactcacttgacgctgatatagcatacaactttaaacaccaaatgccttacacaatagcggtagctggataccttcaacactacggtccacattaaaataacccattaaaccttggtttccaagaccttttcactaaccaggtacgtccactatgctacctaacaggcatttatgccccggcgcaaaccaaaccccgtgtcacgagtaaagaccgcttagttgtttacctcagcaatcctaaacccatctccacactggctctacgagtcggtccccttcaaaggaatcttgacatctcc

SEQ ID NO: 613553 - DNA, 360 bp, Homo sapiens
atccccttgggtactctctaattggatgtcctgggtcctcccagttcttagtcctttaatacctgtttttctccttttcttatttggacttgtgtcttctgtttagtttctcaattcgtacaaaactgcatccaggccatcaccaatcattctatatgacaaatgctccaacaaccccacaatatcaccccttaccccaaaatctttcttcagtttaatctttcccactctaggttcccacactgccccaatcttcacttcaaagcaaccctgaggaaacattgccattatcttctccatattcaccccccaaaatttttcggccggccccaacactttcaccaccattttgtttttgtt

SEQ ID NO: 613554 - DNA, 150 bp, Homo sapiens
tgcttgacgcgcgcggttagacggaaaaacaatgtggtgttgtgaaaatctagaagggagtcatgactctgacctctgctgccacagggcttgggtctgctcctcagccggcacctcctcccctcctggggcctggtcctctggctcatt

SEQ ID NO: 613555 - DNA, 1134 bp, Homo sapiens
ttaatcggccgagggatggcagtgatgtatcacagaaagtctccgcaccagacatggagtaccatcggacttcctgcctcggaagcgcagcagcaggcatcgtgtggaagtgtgaatgagcttccctaatggatgacccatccaagccggtccacctcacagcctatcctgtgtgatacaatggctggcatgactcacatctgtgctgggacagtcgacagtgcctggtgatccaatggtgaaacaaagaatggaggtggtggagtgcttgtgaccatttgtatgatgacaccacccatgtgtggatatgtggagcattatgttggtgctactgtggaaatccctctgatggcctccgtgaccttcaatgactgtcattttgcttgagcacatcatgtgatgaatgcaagagtgcgtttctataagaattggccatacactctaacgcacgaacggccgtattaccaagttactgcacacgccacatggcaggatgaggcatggccaagaccgcagctggagcaaggcacttcagcacgcccatgaagaatgtactgccaagtcataccgtgtcattgcccacacccaggatgcgcctgcttcctcatggcgcaagaatcaacgtgcccacctgatggagatccagtgtgaacggatgcacttgtggccgcacgcagcctggcctgggccgcggctgaggcagtgcttgcagcactcaggtccctgtgacccacgtgttctggcgccggctgcgctgcttcggcgtcctcgcggtgccccgggcccagggctacacacggtgtacaccggtcgactggcacaccaagactgctgaccacgcaagacgccacgaatgcctgcgcacggtgcctgtacttggggcatgcaaccagcagatagtagcctcatgtgcaacccatggccccaagggctacctgtccccgccttgtgactcccacgacacttatacggattgcacagtggaagcaaaccacggcacggatgtaccgaaaacttgaccacagacatatgtaataatcggcaaagcgccaacccctggctgtatgacccaagtgtcagacccaagaatctatactcagacgttttcggtcagaacgtgtaccacaacacttg

SEQ ID NO: 613556 - DNA, 932 bp, Homo sapiens
gctgtcgtggtcgggtcgcggactgcgctgttgtggtcgccgacgttccctgggaagtatgaatttccctaacccaacccagtcctggtcgccgtccatccgctgaacgtgacgatgagcatctcagatgaggtgtcctggatttcctggttctgtggagctccgtggcaaatgaattgcttcttgtgaagttggatgaagactatgtccaggtcaaatgttagtctttgctggactcagatgagcgaaggtccctcaactatcagagatagctcatagacatgatccgttggacctggagcttgatgaagaactggaagcagaacccatgcagagggacctgatggagcagcgtggcgagatgctttatggatgatcgaggccgcgtacattcttaccaaccgtggatcgtccagatgtgggaaaagtaccagcaaggagacttggttactgtcctcgtgtgtactgtgagaagcaggcaaatgctttccatgggtgctttcagacatcccaggtgaaggcatgggtgaaggctctaatgcccaagtgatggatgtgtacacagcccaagtcatcaagaagcaacacaggggatggggcctacttcggcactggttttcctcacatgtcttcatggtgcttccgagtacggccagaagactgcaagcaattgtgccagtctagttccagatcatcgatggctacaggtgggtcagcgggagagaattagaacccagttaaaaattggtgattcctcccacttcggaattggattctttttgcccttaggaccgttggttagttatacggccgtgtgggggacagctgaaagcgaaggggaaaaaaaaacagggcttgggtgcaaagttatgagtctgtccccttatggatgtgcttgttatggttatatatatttggtaaagactatttat

SEQ ID NO: 613557 - DNA, 320 bp, Homo sapiens
ttaccaactctttcgttttacttaattctgtaatacttattattattattagtttgatctattacggaagacaaaggaagggaatgatctttactcaagaatttcagcaagtcagcactgaagtcctgacctatcagtagacacatttgtccctttcagatattttaggatattctagcaaagcaggccatttctcccagactgaaagtacataacttctatcacttgccaaataattgcaagaactcacattaagcggttactcagacagtaaatcatagcaaagattcttagcttcatcagttcatagaaaatatctg

SEQ ID NO: 613558 - DNA, 404 bp, Homo sapiens
aaacatcagctggggtcaaccgcgggcctcgagcccgagtgggtgagggctgttaccttcaaacctttgaatcccacgttttccccttgacttcctgtccccgttaaaaaaaagtggacagcgtttcggtcccaaagttggagaaaatagtgcagggccttttcagggagagcgttttcctcatcaaagcaaactgcaaaatcgcttttgccggggtggacctaataaaagtcggtcgtcgtaagggaccccctttgttccctaacgtccccccctgcttttttttaaacgctcggttggcgggaacccctgtgccagctgaaactccttcagtttggccccctaggaaaccccaaaagtcccctacatgggctgggtgggcaataaaaacgggaaaaaatgta

SEQ ID NO: 613559 - DNA, 292 bp, Homo sapiens
  misc_feature (36)..(36): n is a, c, g, or t
  misc_feature (60)..(60): n is a, c, g, or t
  misc_feature (69)..(69): n is a, c, g, or t
  misc_feature (105)..(105): n is a, c, g, or t
  misc_feature (142)..(142): n is a, c, g, or t
  misc_feature (145)..(145): n is a, c, g, or t
  misc_feature (159)..(159): n is a, c, g, or t
  misc_feature (165)..(165): n is a, c, g, or t
  misc_feature (173)..(173): n is a, c, g, or t
  misc_feature (230)..(230): n is a, c, g, or t
  misc_feature (233)..(233): n is a, c, g, or t
  misc_feature (261)..(261): n is a, c, g, or t
  misc_feature (273)..(273): n is a, c, g, or t
  misc_feature (281)..(281): n is a, c, g, or t
tgccctcccttttgccccctggggagttggggaaangaaccaaccctggctggagggganaggagggcntttaatttatttctttttttgttgaggcttcccccnctttgagccagttttcattttttcctgggggcattanccnctccctgcctctcnctccanacctgttnccccaactggggaggtaggctgggagcaaaaagaaagggtgggacccagttttgggnggntggtttttattaattatttggataacanccaaaaaactgnaaataaanagagagagaga

SEQ ID NO: 613560 - DNA, 289 bp, Homo sapiens
cagagatgatgccactgcactccagcctgggcgacagagcaagactccatctcaaaaaaaaaaaaaaaagctgctgaattcgggcagcgcttttaaaatcccgggcccaggtgatttcgtaactccgtgggcacccggggttagtggcccttcataggccctgcaataacccttcttcctcaatttaagcacttgggcccattgtctctcacattctcctttacccatttttttacggggccggtggtaagagcctttcacctagggaaacagtacaaccggggggggg

SEQ ID NO: 613561 - DNA, 166 bp, Homo sapiens
  misc_feature (6)..(6): n is a, c, g, or t
gactcngtaggatcccggaaatacctggattcaggcagaagtgtgctacaggggcagagcctcatggagaacctctgctagggcagtcgcagacgagaaactgtggggttggaaccctcccacagagtccctagtggggcactgcatagtggagctatgagaagag

SEQ ID NO: 613562 - DNA, 260 bp, Homo sapiens
tcacaaggacaggcacggaggtcaggctgtaatcccagcacttgggaggccagagctgcggatcacctgaggtcaggagatcgagatcagccatggccaacatggtgaaaccccttctctactgaaaatacaaaaattagccagacgtgatggcacatacctgtaatccaagctgaccaggagctgaggacggagaatcgcttgaaccctgggatttggcggttgcagctgcgccgagactcactgccactgcaacctcc

SEQ ID NO: 613563 - DNA, 824 bp, Homo sapiens
agcgggtggtgctgctggcgctaacgggcgtccgatgcatccagcgctgcgtcctcgagtccctgcgccccgtgcgtccgtctgcggacccgcagcgaccctccgctgctgcgtggattctgctgcgagccggacagcatggtgcatagactcgatcgcaaggtgccaagctaccggggctccatgccgctggacttcgccaggcgtttgagcccatgccatgatgccgaggcgtctgtcacactcgccactgaagcggctttggcagtgagctagagaagtgccatactggacataatcacctcacggacggcaacaggcacgaggcaggatgtctgccagagctactagtccctctacggtctaggacctcattggtgatttaagatgtatgaatttgtaggggcaagatttgaatcggctatgaattgtgggcctgtgatgaggccacctgccatatttgtagatgccgaatacacctctttgagattgccaatctcgggcattgagcacgtgactgaagagtgtagcctcgcttgatgcactccttgcgtctctcacctgcgactcgaattgagaccacggagtgtccacccaggcttggcttgcggaagacgattaccaaaacgcattgtcatatcggatccgtgcgaagcatgcgatggggctgaacattcattcgggtcggactactcctacttgcgacacaagctttcacagccatagattgctttgggtggatcccttggctcccagtggtacaaccaaagggagggaagggaatgaacagttatgtgaatcggaaggagccattgggtgataac

SEQ ID NO: 613564 - DNA, 439 bp, Homo sapiens
gctacgacctcaatctcctgacctcgtgatctgcccacctaggcctcccagagtgctgggattacgggcgtgcaccacgcctggccaaaaaaaggattttttaaaggagagagaggtgcaaacctctttagttagtaaaaactaactagagaattctcactaacaaaaggccttgttaccaggatagatggtcaatttgtgactgagttgtagccaaatcataggtgtgggataatcacactatatcaaaatttaaatgtaaaaatctgcctatctttattcattgaccatgaaccaagagctccagtcctcctggtcatatttaatagggaaaaatatgtttggatggattgatggatggagggccaaacagatggatgtatggagagacttatctaatgaggcagcttggtattttgagagagcacaggttttgtgt

SEQ ID NO: 613565 - DNA, 233 bp, Homo sapiens
tatatcagtgactggaagtattcggacgtgatggtaagttggagtgtgactatgtatgttgagtcctgtaagtaggagagtgatataagatcaggagaaagtggttactagcacagagagttctcccagtaaggttcaatacgtggcggggtacaggcgaggtatagccgacggcttgctcagcaatgtcatctacaaaagctatatagtaggtgaagatagagttagcacag

SEQ ID NO: 613566 - DNA, 446 bp, Homo sapiens
  misc_feature (169)..(169): n is a, c, g, or t
  misc_feature (439)..(439): n is a, c, g, or t
  misc_feature (442)..(442): n is a, c, g, or t
gacccagcagcatcagcgtccccctgagggccttaatagagatgcagattcctcaggcctcagcccagacttagctgagttacaaactctgggggtggggtccagcaatctgtgctgtcacgagtcaccctgatgattctgatgcacactcaagtttgagaataactgncctatattcaagaccacctgattaataaatgcacttatgtgaatgccataaatcctaaaagagggcttttctgggagatgagacctatacttctgtgggcctaactatcatttgacttattatttcagcacaatcacaaaattcccagcaccatgtaagaaaccctatcataactaaggatatgtatgtctgatcattttggtagtagttatatagaaagggctttttctctgtttttccacaaaaacttggagagagcttaaatttganttnttaa

SEQ ID NO: 613567 - DNA, 127 bp, Homo sapiens
  misc_feature (117)..(117): n is a, c, g, or t
gtgtgcctgtagtctaggtaccccagaggctgaggcaggaagatcacttgagcccagaggaggttgaggctacagtgagctgtgattgctccagtgctggatgacagagcaaaaaanaccctgtctc

SEQ ID NO: 613568 - DNA, 911 bp, Homo sapiens
  misc_feature (397)..(397): n is a, c, g, or t
tggaacgattcctaaactttatggaaaaagccaatgacaatcaattacccaaaaaccgaaacgccaaatcccatctcactccagcgccagtgccctctttctcaaacgctcgcgggctctaggacctctccaccagcacagtttctcaggagtctccgtgctgggtcctcccagtgtgctgtcctaggggctccacattgaaggcaggctcaggcgggacctccccgggacaagcacttctgtacgcggaaagcacagaggccgcaggacgccatgggaagacgccggccctatgggacgacagggaactacttaaagaggattggcgcaaaccgggagaaaccgctgggagaagatggtgcccccgcactgctggtgggataaggcaagagtctcnagtatcacctccgggcattgtcgaggtatgggggcccacaagggtctagaacgcatctttcccatcaagttagaagcgggactcgcgcttggctctacattctccgcaatgggcagaagtagttagaagaaggtcgaagtgggcccttgtaggacgcagtacgagtcgcggtgtgggttcaccagccactcccattgtggtggtgtcggcgtggcccgtgccgatgtcactgggactgcaggtgccacagcgggctatggatggtgtacgggcagtcatctcgcggtttccccttgcgatctcgaggtcagaggacgcaggtaacagccgaaaattacccccctataaaagttaatgaaaccactcatacatggaacctccccgagccaatccaaaatctccggatgatgaaaatctcgggtcactccttggagcctggcagaatcttcaaattagccaggggatatcccagcctgggatatcacaaaaggctaaccgcttttaaagcggccaa

SEQ ID NO: 613569 - DNA, 239 bp, Homo sapiens
ctgtctaaagcaaccgatagaacatttccctaagacagcttcggatattccaaccaagaaaggttaggtgtaatagcgggaacactgatttccatgcatgggggattcacattttcttgtagctcatctttcaaaaggaagaacagaacaacacatacagcaacagccctagtaatcgtggtaacatctgcctcagtgactcatgtgataatcccccaccctgagccggccgcgaccct

SEQ ID NO: 613570 - DNA, 373 bp, Homo sapiens
gcacgagctgaattgattgtttaggtttcagagttcttccagtttttgctggaaccacaggacagaaggaatcaagaaagtggtggggatgggccgtgtgcagtggctcacacctgtaatcccagcactttgggaagctgaggcgggtggatcacgaggtcaggagttccagaccagcctgaccaacttggtgaaacttcatctctactaaaaataaaaaaattagccaggtgtgtggtggtgtgtgcctgtaatcctagctactcaggaggctgaggcaggagaattgcttgaagctgggaggcggggtttgcagtgagctgagatcgtgtcactgcattccagtctcggtgacagagcaagactccatctc

SEQ ID NO: 613571 - DNA, 446 bp, Homo sapiens
tgctccgaggattcaccgtatatgtaccatctcaagggtgacataacagtgagcatagcttttttatttgatcaggcatacacaataagtgcagtccttaaatgccagtgaaaatttaccacataatcaattgtatagccccattaactgataatagagctgaaatttagcagtaccaagttattagtctaaggggtgggtatagagggaagtataggacagtgctgcaggaaggaaaatgagaaacagtttccttctctttttctagctgtacatacaaatagacctcatgctaaacaaacttgaactgtatcaggtatattataggcatcctgctaagtctctatctggtttctcttctgctgccacctctagtctctctgtctaggatgtatagcatccctaatacactgagtgtcccttacattgagttacatatacaggtg

SEQ ID NO: 613572 - DNA, 313 bp, Homo sapiens
  misc_feature (36)..(37): n is a, c, g, or t
  misc_feature (106)..(106): n is a, c, g, or t
  misc_feature (181)..(181): n is a, c, g, or t
  misc_feature (230)..(230): n is a, c, g, or t
  misc_feature (236)..(236): n is a, c, g, or t
  misc_feature (284)..(284): n is a, c, g, or t
gccaacatcatcgtagcggaatcgggggtatgctgnntcgaatcataagaacagggaggttagaagtagggtcttggtgacaaaatatgtggtgtagagttcaggngagagtgctggagatggtaatgggcatggagacatatcatataagtaatgctacggtgagtggtaggaagtctgngcataggaggtgcatgagtaggtcgtagcggaatcgggggtatgctgtncgaatncataagaacagggaggtaagaagtagggtcttggtgacaaaatatgtngtgtagagttcaggggagagtgcgtctac

SEQ ID NO: 613573 - DNA, 212 bp, Homo sapiens
ggccccccgttgggctctcaatggggcgctcagaacaaggtaagtcatttccattttaacgttatgaaaaagctatcaggcacaggagccaagatggccgaataggaacagctccggtctacagctcccagcgtgagcgacgcagaagatgcttccccgagttgagacctgtagatgacgtgtagacccatgttgacaccattgattgcagc

SEQ ID NO: 613574 - DNA, 383 bp, Homo sapiens
  misc_feature (371)..(371): n is a, c, g, or t
taggttcaagggtacatgtgcaggttgttatataggtaaactcatgtcaagtggttttgttgtacagattattttgtcacccaggtgctaagcctagtacccagtagttattttccctgctcttctccctcctcccaccctccaccctcaagtaggccccagtgtctgttgttcctttctttgtgtccttgagttctcatcatttagctcctacttctaaatgagaacatgtatttggttttctgttctgtgttagtttgctaaggataatggcctccagctcagatgggaatatctctatcatataggacctgttgttacaggggcagggatcgggatggatgggacactggaagtccttcaggcttggntaagtttcagtt

SEQ ID NO: 613575 - DNA, 211 bp, Homo sapiens
  misc_feature (173)..(173): n is a, c, g, or t
  misc_feature (211)..(211): n is a, c, g, or t
gccaaattcctggtagagacgtggagcaacaggcactctcagctttgctgatcggtgcaaaatggttcagccaccttttgcagacagtttagcagttttttataagactaaaatgtactttcaccctatgattcagcaattgcacgctttggtatttgaccaaatcggctgancagattatgtcagctaaagccctgcacacagatgtttn

SEQ ID NO: 613576 - DNA, 176 bp, Homo sapiens
tgcctctggtggaccccttccaaacccagtttctgatctctgacaggggccaaagctgtgaggggtgaaggcccccgccctagttgtggccacccttatattttgttacattattggcatcatagatgctggccttccttctgcaaataatgatctgggaaaatccaacccatgca

SEQ ID NO: 613577 - DNA, 1051 bp, Homo sapiens
gggtgtgtgcggtggtgacggggttgtgtgtgctgcggacgggtgtgtgcggtggggacggggtgtgtgcggtggggacggggtgtgtgcggtggggacggggtgtgtgcggtggggacggggtgtgtgtggggggatggggtgtgtgggggggacggggtcgtggtggggacgggtgtgtggtgggtgaggtgtctctgtggtggatgacaagggatgggcgcgtgtgatggggcactggaagcgctgttggatagcagatggatgcgccaggttgggggtaaggcagactgggagggttcctcgacatttggggcacgctcgatgatggtgtcgggggcaacccgtagatgctgagggaagcgtgcattctgtgggcaagacacggctcttgatgggggtggacaccgtgccctctgggctcaaccagaatgtgagaccagggttgttgtgcttgaagttggtggttatcctggaaacatcacataacgtgacaatacggaggcctgggcttggcacagactgtctttgcctgctaaatagaaatatgaaaagtttcattgcactgactgacacataggtgaggtcattgcccacccctaaattacccgactaacagctaagtccttaaatacacgcaagcactataagagagtgcttgagagtagggaagggaaacaaataaagcctaggagagtaaagaactggagttgcctgtaggagaggccgcgccaacttggcttacaagaggcctgggcaactacatgggagccctgtcgtcaaaaacgaaggggtatcgttgtcgttcgcctaagaagttgtaggaaatcactcgaggtgatccttttcctcgtgcccagaatacctacgggggttcttggaccccgggagtcgcacgcattgcataatgcatcgatgcgtataggtcgccttagatagacccggagaacgtgtgcctaaggctgtcagggggttcgatacgaaggtgccttctagttgcaagtaatcggcgtggctactcgtggaagctgacaaagcaacgtgcattaaa

SEQ ID NO: 613578 - DNA, 289 bp, Homo sapiens
  misc_feature (108)..(108): n is a, c, g, or t
  misc_feature (179)..(180): n is a, c, g, or t
ccagtgccgtgtagtggcaaagtcagccccatcaaaatctctctgtggacacaaattcttctggtatctccctcactcctgtctactcacaatatccttgctcttatntttttttattatactttaagttttagggtacattgtgcacagacatgcagtgtttgttacatattgtatanncatgtgccatgttggtgtgctgcacccattaaccccatcatttacatttaggtattatctcctaaatgctatcaaccccctcccccccatccacttgacaactgggcct

SEQ ID NO: 613579 - DNA, 107 bp, Homo sapiens
  misc_feature (6)..(6): n is a, c, g, or t
ggctgntcttgaactcctggctgtgatcgctgtcgtgtgtcaggcgtgagcatcgtgccgagccagatgtatgggttcattacagacttcagttatatccacgtgtc

SEQ ID NO: 613580 - DNA, 195 bp, Homo sapiens
ggtgtcctacgcattacggacgctggctcagattatctgtccaccatgtcgtccctccgcagctctacctgcgatggtgctgccaggtgcaatgacttcgggctgatgcagctcctggccctggggagtttgcgcctcctgtctctggcaggctgcccgctgctcaccaccaccgtgctgtcgggctagtcgggg

SEQ ID NO: 613581 - DNA, 674 bp, Homo sapiens
  misc_feature (12)..(13): n is a, c, g, or t
  misc_feature (20)..(20): n is a, c, g, or t
  misc_feature (23)..(23): n is a, c, g, or t
gcaagatggcgnntgtggtnctngcggcgacgcggttgctgcggggctcgggttcttggggctgttcgcggctgaggtttggacctcctgcgtaccgacggtttagtagtggtggtgcctatcccacatccccctctcttctcccttacctggagtacccgaatgcctagtgtattcgctcacaggttgcagtggcacgaggcaatagagtttcgaaagcctaaagtgagccacattggagtaatgggtcttcgcgtggtcatctcagaataacgttttggacagttttgtacagtaggaattcttatcaattcaggatcgagaatatgaagcgacaataccttagtggaattgctcactttctggaacattcggcatcttacgctctacatgctcgcatgttgacgagctaaacgcatgaacattctgcttcacgtcggcatacaagcatggggcgtatctgtgactgccagaccactcaatgatgacaacaccatgtatgctgtgtcttgctgatagccaaaggcttggacacggtggttgcctaagctggactgagtgtggttctgcagccccgggctaacagatgaacgaagtcgagatgacgcaggatggcggatccaggtttgagctggaggacctgtaacctgcggcctgagccagagccacttctc

SEQ ID NO: 613582 - DNA, 273 bp, Homo sapiens
  misc_feature (12)..(13): n is a, c, g, or t
  misc_feature (20)..(20): n is a, c, g, or t
  misc_feature (23)..(23): n is a, c, g, or t
gcaagatggcgnntgtggtnctngcggcgacgcggttgctgcggggctcgggttcttggggctgttcgcggctgaggtttggacctcctgcgtaccgacggtttagtagtccgaggtatagaaataggtaatgcgacctcgggaatccggaatcattttgacgtgatcaggcgcaccgtacatggccagccgagtattaaaactgccgatattgtcggggtcgtagggtgtgctcaggctggaaggctggttctgtagccgggccagtgtacc

SEQ ID NO: 613583 - DNA, 537 bp, Homo sapiens
  misc_feature (49)..(49): n is a, c, g, or t
  misc_feature (64)..(65): n is a, c, g, or t
  misc_feature (76)..(77): n is a, c, g, or t
  misc_feature (82)..(82): n is a, c, g, or t
  misc_feature (88)..(90): n is a, c, g, or t
  misc_feature (92)..(92): n is a, c, g, or t
  misc_feature (94)..(95): n is a, c, g, or t
  misc_feature (97)..(97): n is a, c, g, or t
  misc_feature (146)..(146): n is a, c, g, or t
  misc_feature (149)..(149): n is a, c, g, or t
  misc_feature (161)..(161): n is a, c, g, or t
  misc_feature (185)..(185): n is a, c, g, or t
  misc_feature (207)..(207): n is a, c, g, or t
  misc_feature (209)..(209): n is a, c, g, or t
  misc_feature (211)..(212): n is a, c, g, or t
  misc_feature (218)..(218): n is a, c, g, or t
  misc_feature (222)..(223): n is a, c, g, or t
  misc_feature (233)..(234): n is a, c, g, or t
  misc_feature (262)..(262): n is a, c, g, or t
  misc_feature (265)..(265): n is a, c, g, or t
  misc_feature (270)..(270): n is a, c, g, or t
  misc_feature (275)..(275): n is a, c, g, or t
  misc_feature (278)..(278): n is a, c, g, or t
  misc_feature (288)..(288): n is a, c, g, or t
  misc_feature (292)..(293): n is a, c, g, or t
  misc_feature (296)..(297): n is a, c, g, or t
  misc_feature (306)..(306): n is a, c, g, or t
  misc_feature (308)..(308): n is a, c, g, or t
  misc_feature (318)..(318): n is a, c, g, or t
  misc_feature (332)..(332): n is a, c, g, or t
  misc_feature (335)..(335): n is a, c, g, or t
  misc_feature (337)..(337): n is a, c, g, or t
  misc_feature (340)..(340): n is a, c, g, or t
  misc_feature (343)..(343): n is a, c, g, or t
  misc_feature (347)..(347): n is a, c, g, or t
  misc_feature (362)..(362): n is a, c, g, or t
  misc_feature (367)..(367): n is a, c, g, or t
  misc_feature (421)..(421): n is a, c, g, or t
  misc_feature (432)..(432): n is a, c, g, or t
  misc_feature (436)..(436): n is a, c, g, or t
  misc_feature (439)..(441): n is a, c, g, or t
  misc_feature (445)..(445): n is a, c, g, or t
  misc_feature (447)..(447): n is a, c, g, or t
  misc_feature (449)..(450): n is a, c, g, or t
  misc_feature (453)..(453): n is a, c, g, or t
  misc_feature (486)..(486): n is a, c, g, or t
ggggggggcgcggggcgtgcgctgcaacctccgcctcgtgggtccaagngattcttgtgcctgnncctccaaagtnnctggnattacnnncncnngncaccacaccaagccattttctgtatctttcgtcgagacgggtttttgcnatnttggccacactngtctcaatctcctggcctcaagtnatccacctgcctcagccacccnangnnctgggntttnnggcgtgggtnnccgcccccagcctagaccctttataaanatnttaantgcanggntggggggggngggnnagnnggggaatcncngcactccggngggccaaggcaggnggntngcntgnggtnagttcaagaagagcntgggnaatgtggtggaaactccatccctactcaaaatacaaaaatcagccaggtatggngggcgggtgcntggnttnnnagtnantnnggnggctgaggcaggagaatcgctcgaacctaagangtggaggctgaagcgggccaagactggtacactgcactccagcctgggtaa

SEQ ID NO: 613584 - DNA, 638 bp, Homo sapiens
gtcctgtgtggtgggtgccctcgggctggtggggtgtgtgttgcctatctgtgggccgcctgtcgctcccgctctttccatgtctctctgatgcgcttcttctctctcttcgccgttctaccctggcgatggttacctacttccctcgcgtcaggtcgccctgtcttccttgccccttgcattcttcctggctactgccccgggccctgccctgccccggccctggcgggcgtttgccctttggctcccccttccttgtcttgggccttcccctctatttcctaggatccgcattcgggtggactctgccccaggagcttgacagggttcagggcctcttctggcctctctcctctgctgtccatccactgtgccccttgggccatcgccgacgcgctcggtgccacgtgccgtgtggtgtctgtgcccgcagaccgggccatgctgcccgctcacttgtggactatgcagctcccggttgtgcgcgccctgtggtccacgagacagcagccccaccgtccacctccatcgcgccccgcttctcttacgcaccccgacccccgggcggtgactccatcgcgccctcggcctactacatgtcctgctcttttgtaagtagcgggccagggtcagtgaac

SEQ ID NO: 613585 - DNA, 350 bp, Homo sapiens
  misc_feature (165)..(165): n is a, c, g, or t
tttacctagtagggattgtagttgtcactggtctagagttccaatacattttatatcaggaacctcagtgagctacccagaattggaacttaacatggcccagcaactaggagaagaaggcaaaccttgagaaagctgagccctcaggatagcacagtctcaccnttgtttaaaatcaagtcaggctagcctttcagtcactctggttttgtaatgatttgccttttaggcctcaggccatttgatttctgcaatagttttctgttcttctcctacaggaatacatccctgtcctttcggttgtaactattactaaaactagggctatgcaaatgacctggttaccatgt

SEQ ID NO: 613586 - DNA, 568 bp, Homo sapiens
  misc_feature (295)..(295): n is a, c, g, or t
  misc_feature (497)..(497): n is a, c, g, or t
  misc_feature (527)..(527): n is a, c, g, or t
gtggcttgtgttcaccaggaggactactgagatcagggacatgttgctggcaataaggtgccagtgtgccgtgctgtgcattgcccatgtgaagtcactgtgcagccagaacactggtctggcccgagaagacctcttttcaggctagtatcaccactaaattaggccatgaatctgggagcagtgatcaagactgaacaagggagcacgaagcacctgtgaacatgctaacatctcccttctctttggctggcatcacaggtgtcgacaatggcagattacaaccctgagtgtngattacagggaaactctgattctgttctggagtgccgaatgtgcagtgctgctgagatggtccaactgtgatagacccattatataacgtcaacagctgctgctggagacgtcacctcactgtgaaggcaggctctgctgtcattgcttgtgtgtgcctgtgtgtgcacacagtgtctgtgtgtgagccagtaggtgagcangagatcgagatcgacagatatgatggcttngctatacgcacactagcagtattgcacaggatggctctctt

SEQ ID NO: 613587 - DNA, 109 bp, Homo sapiens
ggtttgctgaaccgttgcaatgaacctgcggtctggagtcaactttgcaaaagcccagtttgcagaaaggaatggtgaaagaggccattgattttttttatcaaggcgg

SEQ ID NO: 613588 - DNA, 412 bp, Homo sapiens
tgcttctttgctctctcggtgtccaactgagtctcatcgctctcccttctaatactccttctgtcatctattttgtcttttcttcttcagactgaaaatccctggtagtacctgtagtttccttccaggacacgatttttagtctgttccttcaattgccctgtaattccagcactttgggaggccaaggcaggcggatcacgaggtcaggagttcaaaaccagcctgtccaatatagtgaaaccccgtccctactaaaaaatacaaaaattagctgggtatgtggcatgtgccagctactcaggagactgaggcaggagaatcatgtgaacctgggaggcggaggctgcagtgagcccagattgcatcactgcactccagcctgggtgacagagtgagactctgtctcaga

SEQ ID NO: 613589 - DNA, 201 bp, Homo sapiens
cccctggcccccccccccccccaagggcccaggggggggggggagcccctcttttttggggggttcttcccccccttgttccccccccccattggttttcccctcctcccggttgccttgttgccccctttaagggggggggggctttggggcccccccctttttttgtccccccctttagggcccctgggttccccccca

SEQ ID NO: 613590 - DNA, 596 bp, Homo sapiens
agtttctgagctgaaggaaaagattggtccccccttctggtcaaaagctggaagatggcccttaattcttgaagtctggtgaaccggcccattgttgatatggttccctggcacagccccaagtgtgtctgagagcttttccagacgtatcccacccttgggtcgctttgctgttctgtgatatgagcaccagaccaattgcggtgggtgtcatccaagccgtggaccagaaggctgctggagctggcacaggtccacccagtctgccccgaaagctcaggaggcttaatgatattatcccttatacctgcccccccactcgttaatcagtggtggagagaacggtctcacgaatctgtttgctttccacttggccaatttaagtttagtagtaaaagactggttaatgagtaaccatgcatcgtcaaaccctcacgaaggaaaggagaatgttttgtggaccacctttggcttttcttttttgcgtgtggcacgttttaagttaattagtttttaaatcaggactttttaatggaaaccacttgacccaaaatttgtcacaggattttgagacccctttaaaaagtttaatgaga

SEQ ID NO: 613591 - DNA, 401 bp, Homo sapiens
atagccgttctagagtatacccgtcgcatcttctgaattccaggtgcttgaagatacctatatagctccatgatctcaagcactgtatgttggatacattgatttactcattcattattcataaagtatcaggcatcctctgagtgtcaggtccaaggcctaggctggaagtacggagataaatgattcacaatcactgtctccaatatcctcccagtctatgggcccaaggagaagcttcatcttgtcaaccatcttggcgttctggctgcatttgtatttgggcttcctcactcgttgttgacttacggaatcaatcttttccagtggattaggaccattaatatcttataagttgaatagaaaccaatgtaacctgcataaacaagagaacttagctt

SEQ ID NO: 613592 - DNA, 908 bp, Homo sapiens
gtgctgcatgatcacgtatgacctattcatgcctcgtgtagactactcccttataaggatccaccgagggttgctaccatggaacttcagaagactgagatagaagcattgtgctcgggaaagctcactagtcatagatactgttgcacacttccacccatggcattgtcgtggaacctatgggtggaagagatccttgtacaggatacgatatagagggagatacaggataacgcgagagtactggttcttacaccggtgactaaaggggcatagcattgcgtgtctttcgaggaaccttcgacctggacaatagcgggtgaaagaagacacagccaggttcatctgcaggttcgtggttagaaagtcaggtgccagggtccacatggagcttcgttatttttgcccccatgaagtcccccttctgtcatccctgatgattagatgacttaagccttgttgggttacgagccacgtacccagaagttatccgtaatgctaaattggggccagacaattgcattgacgctatttgctcttgcacccaagatccaattagaaagtactcgctaggctatccttatcttcttggctcacaggggctgagctcacaggtgggaatgcaaaacaacttcgcagcacggtgcgtgacccctgctgacagtgcttgatagaggtactaatacggaccgcagtggtgtcagcttgcacttgtacctcctgggactgagtgctcacagtgcatttcgggagcgctccgggggaagcctgattattaccttgatgaactctaattgaaatggcccttgactgtggcttgtctcaaacgccgatttctagcgcaagggactgtttttccccagagacttcaatcgctccaacgacccggcttgaaatgcggtctaaag

SEQ ID NO: 613593 - DNA, 126 bp, Homo sapiens
cgtcatcatatcgctaccctagctttactcaagggagggaagctgggagaagacagaatatgtctctggttggcctaaatgaaaaagtacggtcaggcatggtggcttacacctgtaattccagca

SEQ ID NO: 613594 - DNA, 413 bp, Homo sapiens
ctgagtgaacagctggcaagagatctttctaatagtgatgacttccagtgccggacaccgtggctcatgcctgtcatcccagcactttggaaagctcaaggcaggtggatcacgacatcaagaaatccagacccatcctggctagcacggtgaaatcctgtctccactaaaaatacacaattagctgggcgtggtggcatgtgcctgtggtcgcacctactcaggaggctgaggcaggaagatcgcttgaacccaggagttcaagcatgcagtgcgccatgattgtgccactgtactccagcttcggtgacagagtgagaccctgtcttccaaaaaaaaaagaacggaatgtactgcagatgtatttgataaccaaggtttgaggtaaatttccaccagtattagttctattt

SEQ ID NO: 613595 - DNA, 349 bp, Homo sapiens
tgcaggccatagatcgagagtacttcgcttgttattcttacattgttggccggcttgtgttgtcattctcagaccggccgcccggaactcacttatctccagcagcagtacctgtgccaggtagctgaggccacttgggagcaggaagccatcccggactcagcagcaagagagctcaatccatctgtcgctgtccagttcactttcctccagctgatccccaacccggtgcagcatgtagtcaccaaacagtccatcctcctcctccttgctcaaatctgtctggctgggccagccggaacaggcagtcatacacagggtcccctctgaccatcatgggcgtgttgta

SEQ ID NO: 613596 - DNA, 313 bp, Homo sapiens
  misc_feature (23)..(23): n is a, c, g, or t
  misc_feature (25)..(26): n is a, c, g, or t
  misc_feature (30)..(30): n is a, c, g, or t
  misc_feature (312)..(312): n is a, c, g, or t
cagtatagatgccggcattaggnannatgncgtcccttagtaaagatgccggcatctttactaatgagcggcatctttactaatgagcggcatctttactaatgagcggcatctttactaatgccggcatctttactaatgagcggcatctttactaatgagcggcatctttactaatgagcggcatctttactaatgaccggcatctttactaatgaccggcatctttactaatgaccggcatctttactaatgaccggcatctttactaatgagcggcatctttactaatgacggcatctttactaatgnc

SEQ ID NO: 613597 - DNA, 219 bp, Homo sapiens
  misc_feature (18)..(18): n is a, c, g, or t
  misc_feature (88)..(90): n is a, c, g, or t
  misc_feature (101)..(101): n is a, c, g, or t
  misc_feature (108)..(108): n is a, c, g, or t
  misc_feature (114)..(114): n is a, c, g, or t
  misc_feature (127)..(128): n is a, c, g, or t
  misc_feature (146)..(146): n is a, c, g, or t
  misc_feature (156)..(156): n is a, c, g, or t
  misc_feature (166)..(166): n is a, c, g, or t
  misc_feature (174)..(174): n is a, c, g, or t
  misc_feature (181)..(181): n is a, c, g, or t
  misc_feature (186)..(186): n is a, c, g, or t
  misc_feature (196)..(196): n is a, c, g, or t
  misc_feature (200)..(200): n is a, c, g, or t
ctcgtgcgcaagaatganactctgtctcaaaaaaaaaaaaaaaaaaaaaaaaactcgttgactcattaaaaaccttttttttttaaannnaaaaaaaaggnaaatctnattagngaacttatctttnnagctgagaactaaaattntttttaaaangatacccttnggattgancaaattntttgncccagtatgncttntagaaaggttagttataat

SEQ ID NO: 613598 - DNA, 280 bp, Homo sapiens
  misc_feature (27)..(27): n is a, c, g, or t
  misc_feature (279)..(279): n is a, c, g, or t
caggacttagtaagatgcgctcattgnaaagatgccggcatctttactaatgagcggcatctttactaatgagcggcatctttactaatgccggcatctttactaatgagcggcatctttactaatgagcggcatctttactaatgagcggcatctttactaatgaccggcatctttactaatgaccggcatctttactaatgaccggcatctttactaatgaccggcatctttactaatgagcggcatctttactaatgacggcatctttactaatgnc

SEQ ID NO: 613599 - DNA, 935 bp, Homo sapiens
cccagacatgacgcatgtcatccacaatgctctccgtttgggtgacacgctacagagtccagaacatccacggagcttgcaatgctctcggtgggagcagacagatctcacctccaatccccctggacctcccacgactacatcctgaagattgtgcccacggttttatgatggacaagaagtggcaacgctaggcgggtactctcataccagctacatcggttggccaacaatggtaatactgctcgcctactagctcatcactgggccgtatcatccctgctatctggttccgctactacctcagccccatcacggtcaagtacacagagagacggcagccgctgtacatgatttcatcagccacgatctgtgccactcattggacgggaccttcagccgtcgccgtgcatcctggaactcactgcatcttcacaggcctctgatggcctggaatgaacgatccagctgggcacagatgctatttgactgcctactacccagcctaatggccgatggaccctgggcatcgccagcacttgccatccagtgcccatgtctcctttggccctcaatctggtcccgaaatctggctagtgtcccaaagggtgtgtgggaagtggggggaacagtagcaggatggctcgatgtattgcagctacctcttttccccgtgtttctttttagacaaattacactgcctgaagttgcagttcccctttccctggggagccccaagaacagagtcaggcaaggggtggggagtccagggatcttggggacccctcctaggagaggctgcagtctcttccctcaggggaacatcccaggaatgcataatcgatcagctctcagccaggcttcgacaatctcgcagccccactaggtggacacattaatgatttgggtttctcccccggggcagcgaactgccc

SEQ ID NO: 613600 - DNA, 299 bp, Homo sapiens
  misc_feature (54)..(54): n is a, c, g, or t
  misc_feature (298)..(298): n is a, c, g, or t
cgaggattccctacgggcggcattttactaatgggcggcatctttactaatggncggcatctttactaatgagcggcatctttactaatgagcggcatctttactaatgccggcatctttactaatgagcggcatctttactaatgagcggcatctttactaatgagcggcatctttactaatgaccggcatctttactaatgaccggcatctttactaatgaccggcatctttactaatgaccggcatctttactaatgagcggcatctttactaatgacggcatctttactaatgnc

SEQ ID NO: 613601 - DNA, 307 bp, Homo sapiens
  misc_feature (7)..(7): n is a, c, g, or t
  misc_feature (306)..(306): n is a, c, g, or t
ggtcgtnagaggatcccgtaaagatgcggatctttactaatgaacggatctttactaatgaccggcatctttactaatgagcggcatctttactaatgagcggcatctttactaatgccggcatctttactaatgagcggcatctttactaatgagcggcatctttactaatgagcggcatctttactaatgaccggcatctttactaatgaccggcatctttactaatgaccggcatctttactaatgaccggcatctttactaatgagcggcatctttactaatgacggcatctttactaatgnc

SEQ ID NO: 613602 - DNA, 964 bp, Homo sapiens
gcaagatcatgtacattgggcgggggctacgacacagcaggcggactgtgtttgtccaatgacattcacaagctaggaatacgcagtcgaccatgacatggcactcttatctgtgacaaagggccagccctggcacgctggagggacttccactcagccagcaatgctgggaaagtctacatgtatgtctgtaggggagcacgtgtccgtagcgtgtattggggcgcactgttccgagtattccaagcaaatgaggattgtactgcgaacccgcaattcgagtcgtgttgacacccaagagaagcctgaggtcttggctggactcgtgtgcccccggatgtccagtggactagcgctgagggggcgcacgtgagcccacctcggaggcttggggctacaatggggagctgtacagtcttgggtgggttataagtgcaagggcctgaaggcggtagcttccatgaactcgtggaatgtttactcctgtgtccttgaccggtggaagccagattgaaccgaaggggaagggggccatgtcccctgccggctgcccagtgcgtgctgtattgttggtgacaagatcgtcgctctcttgggggtaccagtccatctccgtgaggaaggctggcgagatgaatttgaccttatagatcattctgaccttacagcattttggactctagcccctagtcttgaagactctgtgcaagactggcgtgacccagtaataactaagaccagccctggttggcgtcctgctatcaggggggagttgaatggcatgagcacaacaagagatccagtggcccaccgtgtccttcccagggtagaagaagtctgagcacccgtacgaggtgcggactcctgcccgccaatgaaacacggccataaccgaatgatacccgggcagggcacactccggcgcacacggaggagggccatgaacaggcagggcaccactagc

SEQ ID NO: 613603 - DNA, 896 bp, Homo sapiens
  misc_feature (46)..(46): n is a, c, g, or t
  misc_feature (64)..(64): n is a, c, g, or t
  misc_feature (98)..(98): n is a, c, g, or t
  misc_feature (100)..(100): n is a, c, g, or t
  misc_feature (127)..(127): n is a, c, g, or t
  misc_feature (146)..(146): n is a, c, g, or t
  misc_feature (206)..(206): n is a, c, g, or t
  misc_feature (217)..(217): n is a, c, g, or t
  misc_feature (297)..(297): n is a, c, g, or t
  misc_feature (309)..(309): n is a, c, g, or t
  misc_feature (318)..(318): n is a, c, g, or t
  misc_feature (324)..(326): n is a, c, g, or t
  misc_feature (333)..(333): n is a, c, g, or t
  misc_feature (337)..(337): n is a, c, g, or t
  misc_feature (346)..(346): n is a, c, g, or t
  misc_feature (384)..(384): n is a, c, g, or t
  misc_feature (405)..(406): n is a, c, g, or t
  misc_feature (414)..(414): n is a, c, g, or t
  misc_feature (416)..(416): n is a, c, g, or t
  misc_feature (418)..(418): n is a, c, g, or t
  misc_feature (423)..(423): n is a, c, g, or t
  misc_feature (431)..(431): n is a, c, g, or t
  misc_feature (433)..(433): n is a, c, g, or t
  misc_feature (464)..(464): n is a, c, g, or t
  misc_feature (470)..(470): n is a, c, g, or t
  misc_feature (478)..(478): n is a, c, g, or t
  misc_feature (507)..(507): n is a, c, g, or t
  misc_feature (524)..(524): n is a, c, g, or t
  misc_feature (555)..(555): n is a, c, g, or t
  misc_feature (557)..(557): n is a, c, g, or t
  misc_feature (591)..(591): n is a, c, g, or t
  misc_feature (595)..(595): n is a, c, g, or t
  misc_feature (602)..(602): n is a, c, g, or t
  misc_feature (625)..(625): n is a, c, g, or t
  misc_feature (670)..(670): n is a, c, g, or t
  misc_feature (714)..(714): n is a, c, g, or t
  misc_feature (762)..(762): n is a, c, g, or t
  misc_feature (774)..(774): n is a, c, g, or t
  misc_feature (777)..(777): n is a, c, g, or t
  misc_feature (782)..(782): n is a, c, g, or t
  misc_feature (798)..(798): n is a, c, g, or t
  misc_feature (810)..(810): n is a, c, g, or t
  misc_feature (835)..(835): n is a, c, g, or t
  misc_feature (863)..(863): n is a, c, g, or t
gccccccccccccccccccccccccccccccccccccccctccccnctcccacctttgccacanccttggctaaatcttgaactagtgcagaattcancngtggtagagtgctgatcttagcatgcntcgatgtggcatacttgtncttgacagtcatgtgctttgtaagtccttgatttaccatgactacattcttagccaggtnctgcataactngaagaagagattcttcagtatatgacaggtaatgttgtagagttggtgtccattcaccattatccaggtttttcagtgcnaagcaaaaagcncctgccgcnattttnnntggaggnaagngcaccacgncacagtccaacatagtcagtcccaccaggcatttggcnaaagtatgtcgcccgacaccnncccccccnancncagangccccccnangaagtgcaaaggtagaggccgacccagaccnaagtcnaaagcccncagaatccccattcccatccgtctgattnggtgcctagtataagtnttgtcagtcacaaaagccaagtcaccaatcncncgagggtacatttcttcatattttcttgcaatanacanggcagtnacaccaaccagctgcagcatctncttgggcacacaattattctgcatgaaccgatcaataatggaganagtcatgtacatggtctcctgcaacaacctgaatctcatttgancctgtactagcgagtcaatgaggatggctctcatgtgtccagtgactncccgacccagtnggnatttnggtctgactgcgtgcnctccctcaagtngtctcaagacaagcataaatatctntcacatattcactacaaaggtttgggtnagctccatctcctgcatccacatcattcactgc

SEQ ID NO: 613604 - DNA, 279 bp, Homo sapiens
gcatacacaacagcccagcagaactttcatcctagtgtagcccctgccatgtgcctggcttctggaaattcttccagtttgggtcggggtggaaggtctcagtgacgtgctgtggtttagcccgcccagggtcgctctgatccagcagggcgaaggtgccacggcgggcaaagggccactcaaggcgcttgtccaaggcaccaggcaacacacgaatgtacagtgagaggtgtgtgccctcaccactgccatagacattgaggaatgcagacacctgca

SEQ ID NO: 613605 - DNA, 934 bp, Homo sapiens
  misc_feature (94)..(94): n is a, c, g, or t
  misc_feature (109)..(109): n is a, c, g, or t
  misc_feature (169)..(169): n is a, c, g, or t
ccgggcccccatagtgagagtcccttctttttaaaataataggttattgcccgagtttggggcatttgggaagaagtgcattggagataaagcnaaagtaaaaaaaaanaaaaacaaaaaaaaacaagggggaagggttggttaggcaataattaattctagggcaggnagaagtacaggataggaagtaagagcatcatacgctgtttttctcaacaatgggcaatatgtacatagtcataatgatgtggtgactgactgcttagcccctaaatctggtaactactttgggacataatggggggaaaagtgaagatagtgatggtgtaagagctaaatcctcatctgtcatatcaagaaatcactatataatgtataacataatcaagaaatgactaagtagttatgtgaagaaaagaatggaacattgctagaagagttagaagtcattgctccagagaattaggagggatggggcaggggactgttaggatgcattataaactgaagaggcttttaaagattacatgtattaatatatgtattcacttgaaaaactaaaaaaatagtaattttttaaaacccatggaggtaactaccagaaggaaaaactaagagaatgaaaagtgctttcctctggaaagaacaagtcgcaggactgttttcattgtaagacttttggagccatttgattttacttaaccattttcatatatttctttaataaaaataattctatcttaataaaaagttacactcattcattaaaaaaagaattttaagactgtaataagaatcatagtttatttctgttagagaaaggcaatgtgttatacttggaaagaggtcatattaattttatcacatttttgggactcagcatctttatattttctgattttaaataaacaactttgcttatgaaaaaaaaaaa

SEQ ID NO: 613606 - DNA, 638 bp, Homo sapiens
cgccgcccgccagctccctgcgtccgtcccgcgtcccgcgttcccgcgttctgcgatccgccgccatggccagtgatggagctggcgtgcaagctggagcgccggctgcggcgcgaggaggccgaggagatgtggcccccagctggctcccctcggctgccccatgcccctggatgccctaagcccgatgccctgagctctccctgccctgtgctgcccactggccatgcgcctgacgctggagctgcagcgcccaggctgagcctggcgtgcttggacatcaacgatgggcgctgctgctggccccggctgctgcaggtggtcttcaagccacctacactggagttccctgatgttcaggcctgccgcctcatcaagtgacctggatgagcatgttcaaactgtatagaacagctgggcgggagtggcttcagtcggacctgatggagctgaagctgatgatggagaagctgggtggccccccagacccaccttgggcctgaaggagcatgatcaacggaggtggatgaggacttcgatggcaagctcatctttccgtgagttcctgctcatttccacaaggccgcggcagtgtgagctgcagagaggacagtgggctgaatgcggctggcaaaact

SEQ ID NO: 613607 - DNA, 854 bp, Homo sapiens
tcatgaggacatctgcagatgcttggtggagataccctcttggcataccgggccccatcaggcaccagtccgtggcaggtgcccatcgccagaggtgcgtcaagtgggcagaagaagtaccagattcacctgaagagggtgagtggtcccatgaggttctgtggtgaacaaggaggcatggagctcagcctctgtggtgtgcctgtgcaccactgaagatttgctccagagcccatctgctgtttctacacctccacctctgcccgaagcctgtcctagcccagtcccaggaagcctcacgtccaaatagtcctcagctcactcccactggtgtccctggcagtgcggaagtccaggaatggctggccagcaggtggagatcacagggagtggggccctgggactgatagcaaggccagggtgagctcagttcacgtcccacgtgggcccaaggaacgactggacacccggcactgcagtcttctgcctgtggacaagaagcagcagcagcagcgggagcagagaggagaagcaccagtaacaagcagcagttcggtccgggaccaaccttactagctcctttgaggccatcagggagaccccacaggtgtttgtggaactccccatggagctgtcagaaatctttgatcccccacgagagtggctgagctcggagcctgctggagcgttggtgtctcagaagtgtttgccctctgtgggttttccacccggggaccgggtattttcaactgggggaatgacgggtttgggcccattgtgggcctctcaagtcgggagggagggggggccgtttggtgggccaaggtgtcgggtgtggggctctcccactatat

SEQ ID NO: 613608 - DNA, 210 bp, Homo sapiens
  misc_feature (185)..(186): n is a, c, g, or t
gtctctctgattgaggccgggtgagcgcacactggaacactatgatgaggccggtgagcgcacactgggacactatgatgaggctaggtgagtggacactgggacactatgatgaggctaggtgagtgcacactgcggccactaatgatgagaggtgggtgagcgcacagtcttggacactatgnnatgaggctaggtgagtgcaccctg

SEQ ID NO: 613609 - DNA, 399 bp, Homo sapiens
  misc_feature (11)..(11): n is a, c, g, or t
  misc_feature (18)..(18): n is a, c, g, or t
  misc_feature (38)..(38): n is a, c, g, or t
  misc_feature (58)..(58): n is a, c, g, or t
  misc_feature (121)..(121): n is a, c, g, or t
  misc_feature (323)..(323): n is a, c, g, or t
  misc_feature (359)..(359): n is a, c, g, or t
cctaccaaggngggtaanagcccccttgtcccaagtgnggaatttttttttccacaangcaaacacattccctcccctaccttgtacttctgccctcaactgaatcattttaagaatttangccggacacagtggttcacatctgtaatcacagcactttgagaggctgaggcgggcagatcacccgaggtcaggagttcaagaccagcctggccaacatggtgaaaccccgtctctactaaaaatacaaattagctggggtgtggtggcacgcacctgtaatcccagttactccggaagctgaggtaggagaatcgtttgancctgggagatggaggttgcagtgagctgatattgcnccattgcacttcagcctgggtgacagagtgatactctgtc

SEQ ID NO: 613610 - DNA, 1008 bp, Homo sapiens
gcgctgtcccggtcggggcctaccggtgtgcgccgcctgatccggtgttcgacatgactgcgccagtcgcctctgctgtgcctgtggcgtggccggcctggtgcgcgccgacgcccccgcaggaggaggagctagcgttccgtggtgcctgccgtgaaaagacacatcttcgtctgggtaggccgcttggcggtccacaagtacctgctgggatggagattctactgccccatgtggtggtgagccattgacaaggcggcgtggcccccatgtagtatgccaaatccgactggggaacgctgaatacggcgagaaggttcctgcaaatcaagtttggacagaggatggacgctcaacgggaaagagtgcttgatccgtggctccagacgagttgacggaggtgcagcagagctattccccaccagtcaagatttcttcacggacatgagatgacacggcattccccctaacgggacactgatacttggcatggtcagagacgtgctgatgacatcgtgaaactggactgaaagaatgcgcacgggggcccggatagcagccaccctgtctgaacggcgcagttgccgagagtccttgggtggagtccaccgaggtgtggttgtcatcggggttcttcaaggacgtggagtcgagactctgccaaatcagttttttggaaggcagcagaggccatcgatgaccgtaccattttggggatcacttccaacagggaagttgtctccaagtatcaggctcgacacagatggggttgtcctctttaagaagttggtgaagggcggaaccagcttgaaggggacggtcccctgagaacccgtggacttatgaaaccacaggtgccgtgtcatgagttcgcggccaacgccgaagatttgggggcatccgagtctctggtttgccaagttttggatgggaaggcttcaacaccccagatggaacgctacttcggcccacgacagccgttggaaggaaggggcctcggggacccag

SEQ ID NO: 613611 - DNA, 254 bp, Homo sapiens
atcgagtcggtaccgactgatccgagttcatggccaactatcgcaccgtatcgccctgccgcaggtgccgggctatgaaggcgcaggcgtcatcgtcgatccgcagagggggcgctcgaccggccgacgcgcgctggcggtagcgggtgacggcagctggcaaaccttcgtcacgctgcctgaggatcgggtggtgtgggtgccggacgacatcgacgacaacgacgcggcacagatttacatcaacccgctca

SEQ ID NO: 613612 - DNA, 151 bp, Homo sapiens
gcgactacccaggctggagcgcatggatagacaccgcgcactgcatacctgagcgcgggaatacggaccgaggcgcgggaccggagagtttgtcacaacatcttcctcctctgccaccgccggtggccgcagggccggggactcgcggccg

SEQ ID NO: 613613 - DNA, 218 bp, Homo sapiens
aaaagtggtatgatcttgcaagttctcaggaacttgtattcaagagtccttaacatagtcttttccataaatctcctgaacagtcttcctagaaatacaaaaatgacatcacggctgctacgttggattattgaaagcacacgttcctaatcctgcgagtgagcaatgacatctgatagtcacaggatgtggagctctcctctgccactggcgaggct

SEQ ID NO: 613614 - DNA, 680 bp, Homo sapiens
gtcacgctgaccggcggcttccgcacgtaataaggcccgacgtgcccctctggcttggcttcagacccctccccagtgaagggacctgagtcggggaccctgaagcgggcccactcgttggaagggatgtggcctggggctggagtgagcaggccgtgtacctcgtgggagggggaggggccccctgggggaaagtggcggggccatgacgggacgtcctggtaccccacgcgaagggggtcaggaggcggggctgttgctaggatgatgtcccgctgcagaagcagggctgatcggggcgacgaggccgggcaggatggggagggcggtgcggaggggcgggggggggcatgacgctttggagaaggttggcagtgccggcgacgggagctcaaggcgtggtggggggggatcagaggggcgtgcaatgctgggggccgggagagtgggttggagtgtgacccgcgaccgaggccgtttgcctggttgggtggctgggtccaggcttgtgagggggaggttgcccgtgtaggccgaggggagggcctgggcttgaacagcggggctgggtaggccgagcggaagcagttgtcaggggggggaggggaggacggttgggaccgtgggtgggagagcggccgtcggggggggcgcctggcggggcgggtggcccggtgcgg

SEQ ID NO: 613615 - DNA, 297 bp, Homo sapiens
ggaggccgtggtgtgcggatcacttgagctcaggatttcgagaccagcctgtccaacatggtgaaaccctgtcctacaaaaattagccgggtgtggtgtcatgcctcgggaggctgaggcaggagaatggcgtgaacccgggagcctgtaatcccagggaggctgaagcaggagaattgcttgaacccagaagttgaggttgcagctgagattgcaccattgcactccaccctaggggacagagtgagtaagactccatctcaaaaaaatggaggaagggaaaaaaaaagtcgacgc

SEQ ID NO: 613616 - DNA, 329 bp, Homo sapiens
  misc_feature (204)..(204): n is a, c, g, or t
aagatcccttgaatcgacggttctctctgatagtctatctctcccctcaaaattaagtaattctttaacaaataactttaaccggtacagtcctacctcaggggtttagaaatagcccacatttattcagacaagttctagtgaaaatctaactgagcaaactcttgagcgggggataacttctgcagtaggtagataaccccncttatctgctccccctccgcaggaactcgcatagcaacatgtggtacaaaccgttaactttctaaaagaaggaaaatgacttttgtctaattcaaaggttataaaggtacagcggccatcctggt

SEQ ID NO: 613617 - DNA, 161 bp, Homo sapiens
gctccattaaccctcactaaactcgatgagcggctgacgtatatggtgcgtgctgtcgtatgtgcaaactgtcactatatgttgacgctgacagatatggggagtagcgtgattgaggtgtagtagattagacctagttcgaagtagagattaaggaggca

SEQ ID NO: 613618 - DNA, 411 bp, Homo sapiens
  misc_feature (1)..(1): n is a, c, g, or t
ntgtactcgcctgcaaggttcaacatagcgacgtcgtgctgctcctcaggagctatcggttatagttcacgggtatataaaaggtcgtgtgtgttcatctaatgttgaactcacctcagtgctgtccatgtcagcatcattcacgccatgtagatacgtgtcactgctaccagtgagctcgagcgcttgcgccggtgggagctgtgcctccacatccatcgagaagtctagtcctggcacaaccggcgcggagtttggcatagctcgagctataaaaccctcagacatactggatcatcctttgcgatcaagcttccatcataagcatcaggtagcaatttctctcgttctatagcctcctctgttgatagtcaggctaacagtgtctggagttaacttgcagcgagctcg

SEQ ID NO: 613619 - DNA, 317 bp, Homo sapiens
tagcaaaagcagcttggaataatgacagctgtttatttggctgtggtcagttactataataagatctttgagtgtgtaacagtaactcctttgtgcgtttcagtaagttactatgttcacttagcaaaatacgaatgttgaggtgccctaaagttttgtttcagcagtggttcaaaaaatttcagaacatacttttgtgatttgttgcaagtaaatgttcttatagtctgtcaattgtttaagcctgtgatctttcttttcccagttaagagttcttcattaaatttaagaaatacctggtaaaaacaattcaaata

SEQ ID NO: 613620 - DNA, 165 bp, Homo sapiens
cacgaggtataccgggatccttctaaatcatgcgggcctgatctaaatccctttatagaggtttagtttaatcatgaaactgttctacaggaaaaagctgcgaaactgagaaaacaattgcatgacatatgtcaccccttgtagcacaagcgacattaacacaat

SEQ ID NO: 613621 - DNA, 165 bp, Homo sapiens
gtggactgtctttcaactatgtctcatggtcttatatgattaacttatcattgctgtgtactctatgtattctcttctacaatacaacacattgagactgtatttactcgtcaatgttgtaatatatcgctgctgacgtatagggctacttatattactgcagga

SEQ ID NO: 613622 - DNA, 376 bp, Homo sapiens
tcttccgtgtaggtcccccgtgtaaattaggtgtattaagagtttgatatctcccttccaggatttgtgtaggatttaatataccttatcgcatatggtcccctcagaccggtccttgccattattaagtgcccttccatattttccgtgaattcccccatccagagtccccgtgtttaagtgtcctctccacttcgatttcccctttgagtcttctcttctctccacaaatttttgtgttaacccattctcttaatttctcacacatgttctctttctcacactatatgattctcatatatttaatatttctctcgacgcgtgcgcagtgttaaaaatctcgcgtaaagttttcgtacagcccggggtccacacg

SEQ ID NO: 613623 - DNA, 152 bp, Homo sapiens
  misc_feature (3)..(3): n is a, c, g, or t
  misc_feature (6)..(6): n is a, c, g, or t
  misc_feature (46)..(46): n is a, c, g, or t
  misc_feature (52)..(52): n is a, c, g, or t
  misc_feature (69)..(69): n is a, c, g, or t
  misc_feature (88)..(88): n is a, c, g, or t
  misc_feature (108)..(108): n is a, c, g, or t
  misc_feature (126)..(126): n is a, c, g, or t
ccncancatcacacacacgctctcaccctcacacacacacacgcangcacantcacaccatcgcaaaanaccgcccccagggtttcanctctcgcaaatcgtcttctntcatcaagatcaggaatnatatgtccttccaccatggggggggt

SEQ ID NO: 613624 - DNA, 111 bp, Homo sapiens
  misc_feature (46)..(46): n is a, c, g, or t
ccaaattccgggtccattagttaatagcccataaaaggagtttccncgtttaaaaaccctccgggtaaaaggctccgccgtgcttggccggcccaacgaaccccgggcaca

SEQ ID NO: 613625 - DNA, 294 bp, Homo sapiens
gctctagagatcccgtccacttctacaccgacctaattatattctaaatggatcccagccactgatgcatgtacttcagctacttctgctaaatcagcatataatttttccacatcagaccatcagatctgtgagaaccaatcagttatctagaattccgtgtctactagatgtttcacctagcatgcgaggcttcattgaatttcgtagcaaacatatagaagcgatcatatatgtatgcttctggtattgaaaaaaattttgtgtgtgatagttgcttatgtaaacgtgcag

SEQ ID NO: 613626 - DNA, 1412 bp, Homo sapiens
  misc_feature (1412)..(1412): n is a, c, g, or t
tcgtgcgtgtacgcagcaatgagcgaacggcgaacagcgagcaagaagtcctgtggcctctaccgcagacgattttcaggcttggtcgaaggaatactgagcatggcgatcattcatcgggcagatggatagaccctctatctagagagaaaaatcgagtacgagtactatgagtgaaggccaagaactgcgtgtgtctctggataagaaccaaagaagtctcactggacacaggactctaattcaaacagtgtaatagactgagatgcaacatgcccacgtgtattcgcaaactttggagctagtcattaccgagaggattgcgctatagctcgcaagggcgcatttctacatcatgtcgcgacccaaatgggcgccctttagccaccaactcgcgtgaggtgcctcgggagaaccttcccgaaaggtccagaggagaaagacgtgacgcgagacatctttgcgcaagatccgacgtagtactcgtccagtgatcgtcactgagtgcagagttttccgctaagtcctaggaagggaagacgctgtgtacctttctttgctaaactctgattgacgccgataactacgtttgacttggacaactgtagaaagcgcaggattcggcagagaagcgacctttcgtgtagaccttagtgggccaaagatagttccaacatcgttcatgtgcgttaaacaaccttccatccaaatgtgaattctccctccctgtatgagtgtcaacacgtttagactactccccttaggaagtattctccacgcaatcttttctctccctgagggtgggactgcgcatttatccccctaaagaagggtccatgggaccctttatcattacctccccttggcgaggccaccctcttgggacaaaccataacccgaggccctgttcacatcggagaagccgcggaagctatgcttaacaagaccgtcgccccacgcggcactctcgcgtatccccccgcaccttgtccagcgttatttcacaccgaaattttgcccacgtcccctgcgaaaagtaaaccgccgggggctctacaataaacctaattgttccaccccctctccacaaatttgtacaggcccttctctctcacgacaccaataccatcggcgtccaacacagactacccaaggagggtcggcctcatcggccatcccagcgccaccgcacacctccctaccactcctccatcgcacagcctactgaccgcctgaccgtctcatccacgagaagactgaccccaccagaatcctcctctaccatgctcatgacaaccacggggacagccagcgcagctgctcacacaacgcgacttaagcgtacaataaccaccggttgttgtagcatcttattttgtgattttcgtgcactcccacccgccaccgccaan

SEQ ID NO: 613627 - DNA, 786 bp, Homo sapiens
cccattggagaggggccccccctttgctgtcccccctaggagtgtgggtgggccccggccctgcccgaggcgcccatcggggccccttgctgccagatcttacctctgcctcagcgcacggcctcccgtgccctggaggcactctggcaaagggctcccggatagggctgactcaccgggcgctgactgcgtctaccaccgaacatggggatgccacctttagtttgctggggcccaagccaggttgtagggtggcctccttgtgtgacccgttgggcgcctccttgcctggtggcgctgtatagggtataggaccccaatggagcctgacccccgggaggggcccgtctccccctgtgccgcgtttgtgcggggcactcctcggcctggcttcctccccaggccccgggtttggggcccccgagcgtttcccctgcctcgcggccgggcgtcccctgctttgggtttcttggtttgggttttttaatagcccagttttccagtaccattaagggccttttgcaaagaggttcccagctatctaacttgtcaacccatatatatatcaccatatatattcgtatctcaccgaagtgtttatttgcgagatgtttcaacggtgcaattcgggccccgccccccttgtgaccctctgtccccggtcctcgtccccgccccgcgcctggtcccgaatggcctggggacgggccctccctgtatgtattaaaatgacctgtatccaaataaaaggtttattgatttttttcccaaaaaaagaaaaaataa

SEQ ID NO: 613628 - DNA, 89 bp, Homo sapiens
ggatttgctggtgcagtacaactaggcttaatagggactcgaattcgagcctcgaattcgaggctcgaattcaggcttctaacgttaga

SEQ ID NO: 613629 - DNA, 499 bp, Homo sapiens
gggtgtagggtgctagcagtatgggagtgaggacacggtgaaggctagcttcctttgctcctgtcattatgctccttcagcaggcagggacaggcctggcgacctcctttctgccttcgtgaggctgctgccaaggacagtgtgctcccctgaaccttgattaggggctcataagagtccctgacaaaagaccctgtcatgtatgagaggaaaacccatgtgttggaatggacagaggggctgcgtatcagattcaaagcctggattcataccctttgcccggctgagcagtcttatgtaagcctcagtggaacagatagccaatattgataccctccagcccagtctgttatttatttatttatttattttttgagacagagtcttgctctgtcgcccaggctagagtgcaatggcatgatcaaattgaggtccgggtggacctgttggatcatcggatgaccgaagtccaccgtagtgcctgtggagctctgagaaa

SEQ ID NO: 613630 - DNA, 826 bp, Homo sapiens
gcccagctggacagtgcctagaagccagggagttgagaatctccttatccacatcctatccttacttcaccaccaggcctcttgtgtccaggcaacgagcttacgaggatgtcaggcagaggtgggggtaacgaatctgtcaggcaaatactgtcactctgaagtagagccacgcagttacgggtctgagtaatagatagcagtcacctgaactaaacgtaaagcccaaggctggtgagcgaaaactggatggctcattcttcccaatgagcatgacatctcccaccattggtccagttggtggaaggggccaaggtatgtgaccgagccattgagaaggtgatgtaggtgagcattgaacgatctttattccttattcttatagtgcagcaaagtggaaacaagatctttcaggagaggaatggagcagggctgtgaggctcttacagcttgtcttgcaaaccatatagctagcctatgtctaagccgcaaagcctctctgtgcccctggtgtcttacatcgcttaccgttctggcccgaaataccgtgagatggacaaggaagactagcaccaggccatcctagacacgcactcactatttccttggttggacaggaacggaactggagacgtgaagaacgagagtaccgttcctccgaaggtcagaactgcctcgtgatcttggcagagtagggattgggccaataagcatcaggtatcttccctctacaagattcctaaagagctggggcattaccatatgggggacgacgtaggaatgaccagcctccctttgattaccagcaaatacagcacttggtgtg

SEQ ID NO: 613631 - DNA, 167 bp, Homo sapiens
  misc_feature (153)..(153): n is a, c, g, or t
ggaacaccagaggctgggagaggcagggcatcatcctcagcaggtttcagagagagccacagtcttcgcctgatccacagtcttcgccatcgaggcgctcgggatacggttccggtgtccattccatatgaccgatcccacagtcttcgcctngctgggtaccgagc

SEQ ID NO: 613632 - DNA, 758 bp, Homo sapiens
cgcagtggctcacgcctgtaatgccaggactttgggaggctgaggcaggtggatcacaaggtcaggagatccagaccatcctggctaacgcggtgaaaccccatctctactaaaaatacaaaaacaaaattagccaggcgtggtggctggcacctgtagtcccagctactcaggaggctgaggcgggagaatggcatgaaccagggaggcagagcctgcagtgagccgagatcaggccactgcactgcagcctgggcgacagtgagactccatcaaaaaaaaaaaagaaattttaattaacaaaaggtgcttctacatatctaatccttccagaaattcctaccagacacgggactataatatttcctgaggaagcattttttttggcagctagtaataaaaggtcactagtatttaacattaatcaagtacttactacacacgggggactatccttagacctttacttgttttaacttctgggagctacacaaccacccttggaatcaaatatggctatgattgctatactatgaaatgagcaattgaggcccaaggttaaagtacctacctgaggtccccaaggtacacacgtggccgaggaaggagttaccacaggaagtcggggctccttgggcctagtgtcttcccttaacttaaaaaaaaagaaagaaaaataaggcatagcctgtataccccaggaacttgggaacaggttaaggaagccaatacacttgagggcccgggaagctgaaaac

SEQ ID NO: 613633 - DNA, 223 bp, Homo sapiens
tgtcaccaggtcacagactgactgaggtgatggtaggatgaggaggaacaaatgcccttctttaattggttttcagttaacttttcagaggctttggagaacgggacagtggctttttagcctttgaatgttccaaataaaaatttttggttttggcccctgtactgttttacctttaaattttggcatttttttttccctgcaattaaagtgctgtacttta

SEQ ID NO: 613634 - DNA, 551 bp, Homo sapiens
atccctggaatccaaaattctccgtgccacctgcatcacaccccatcctatcaaaaaaaaacaaaaaaaaagaacaaaacaacacacacgtgtgtggggcggggcctgtcgagccccggggagagaagaggcctttcgtgagaaaccacatatgcgggtgagagggcgcgcgcgcgggcgcacccagagagagagagatatacgagcgatgaaacacgagggcacccatagcgcgcgtgatgtcccccaaagagagagagacacgcggcggggcccagagagcaaaaagaagaggcgcggaggaaatcttctctccacgcccaaatagacaacaaaaaaaaagcgcgcacgcgggagggaggcaaaaacaccacgaaaagcgcgctctctggcagaaacacaaaatatcgcccgcaaagagagagacgcgatatcacggggagagccacacaaatcaacgggggacatcatctatacacaaagagcggggggagaccaccaaagacgcaggaagaacccccgcgaaacatatcacccacacatctcgaccc

SEQ ID NO: 613635 - DNA, 408 bp, Homo sapiens
  misc_feature (144)..(144): n is a, c, g, or t
  misc_feature (298)..(298): n is a, c, g, or t
  misc_feature (400)..(400): n is a, c, g, or t
aggtgggctggataaagaaaaagtggtacgtatacactatagaatactatacagccataaaaagaacaaaatccatgtcctctgtagcaacatgaatggagctgaaggtcaatatcctaagcgaaataatgcaggagcagaaanccaaatattgcatgttctcacttatgagaaggtgctaaacatagagtacacatagacatgaagaagggaacaatatacacaagggcctatctgaggatggagagtaagaggagggtgaggattgaaaactacctattgtgtactatgctcattncctgggcaatgaaataatctgtacaccacatccccacaaaacacagtttacccatgtagcaaactggcatgtctaccactaaatctaaaataaaagttgatnagaaataa

SEQ ID NO: 613636 - DNA, 244 bp, Homo sapiens
gtcaggatactactcacagcagtgtactgagtactttatttttttcaggtttaaggttgtgtgtgttgtttttaactcaaatgacccaaagcaaaagttaaattacaaagaaagaacaaagtacattatgatataacacactaggagttacaggaaagcctcatctaaatgaatcagtgcaggaagttccctggtgatctagtggttaggacttggcactttcccttctgcagcccaggttcag

SEQ ID NO: 613637 - DNA, 1255 bp, Homo sapiens
  misc_feature (623)..(623): n is a, c, g, or t
cacgaatatctccctgtccttctgggcctaggactgggaacctgttggagcaaatcttcttaggggcgcaatccaaatgaaggccggccagaaatgtttttccctgtgaggggggctgccctaggggtgtatagaaccttcgcctgcctcgcgtagacaacgaactttctatgccgcagagggttgcattgtttcgcgagcgtatcttacactgggggggcccgcatgttagctcaaaggtgtgcctctccaaacgatggctactttgccaagttcgcaacgcgggccaacttcgaagtgtaaattgcttattcacgcgagggtcggtgccccttatctgtattctggggcacgatggataacctgatataagccgagtcccaaaaccgcggaggcaattagcttttcccccccgagaacgacctccctattatgtaaacttaaccgggcaagcctaacattcttgttctgggtgggaaatgcgatacgcgaatttggaaatcgggctcgctatagtacccatagctggcaccgcgggccacgagtagcagcacttgggacagattgggattggttctcgctgaccaccctcatctcttgaacaacaggggttcgatgcgcanggggctggctactcgattgaataatgcgtaagctccctgcggcaggtcaaaggaacgactgacgatgcattgctatgtactggggactacccgctcagaagctgattgtgacggaaacgaattcttgtttaggaagatgatacggcgaggtgacagaggccacgttctatacaagagagttcgacgctggctaactaaccggttccgtagctaggtgtcactagaggggggacgccttgtacgtagcctgtgctccgtgtacgagtgagcctccaaggaaggcgagtctaaaggcgacggacatcgtccaggacacaccacacaccactcaggaggaacgcaagaacgaacttcatcgctatgcaatcctgcagacacgtgcgagacctactctaacccttcgaagaaactatgccagattgtctctttccgcagccgacatgcactgcctgatagatggaccgggaaaggctgctagaaaatggggcgcactagcgatccaacaatcggcagcagattccgtgtcattgatcacggggtgggagggaaccgtggcgtccatgcgtggggcccatgggtgatacactccagtacctgagacatagagtaacagacgagggtacgagccccag

SEQ ID NO: 613638 - DNA, 101 bp, Homo sapiens
cgggtcaaataattctcctgcctcagcgtcccaagtagctagagactacatggtgcgcgccagcacgcgcatgtaatttatggtatttgttttatactttt

SEQ ID NO: 613639 - DNA, 131 bp, Homo sapiens
  misc_feature (83)..(83): n is a, c, g, or t
aggaaaaaaatcaatatgcatttatttgatacagtcattttaatacatacagtgatggcccgtccccacgccactcgtgatcnttgcgcggtgcggggacgaggaccggggacagatggtcacatggcggg

SEQ ID NO: 613640 - DNA, 216 bp, Homo sapiens
aacagcccatggtcttgccactggtgaaggctttcaagcccacaatgcccaagtaactgctgtatgtggcacctgcccctgtggatgcccttgttcacatggtctgccattgctgtccttgttctctacatggacccttttgttactttcacaatacacacatttttttacgtacctatatgcttaggccctatgaggctggcggtgtgttgtgag

SEQ ID NO: 613641 - DNA, 181 bp, Homo sapiens
aacattgaggaaatgtaaggaagtcagcacttacattaagagaataggctacaaccccgacacagtagcataagtgccaatttctggttgcaagtggtgacaacctgctggagccaagatgctaacatgccattggttcacagggatggaacagtcaccgcgtattggactggcaactgcc

SEQ ID NO: 613642 - DNA, 115 bp, Homo sapiens
cccgcgcccgcgaacaaaagagcggaaccaaagcgatgctttgaatttttaaaacggaattttttcacccaaatggaggactggggacttaaggggcttcgaagttttatttacc

SEQ ID NO: 613643 - DNA, 671 bp, Homo sapiens
cctaaaggccatgtcgaagcccccatcgttgggtcaatagtacctgccgcagtactctaaaactaggcgggtatggtataatacgcctcccattcattctcaaccccctgacaaaacacatagcctaccccttccttggactatccctatgaggcataattataacaagctccatctgcctacgacaaacagacctaaaatcggtcattggatacttttcaatcagccacatagcccttgtagtaacagccattttcatcccaaccccctgaaggttcaccggggcagtcattttcataatcggccacggggttacatcctcattactattttgcctagcaaactcaaactacggacgcactcacagttgcatcataatcctctttcaagggcttcaaactctcttcccccctaaaagctttttgatggcttttagcaagcctcgctaacctcgccttacccccccctattaacctactgggagaactctttggggtagtaaccccgttttcctgatcaaaaatccctttcctacttacaggactcaacaaactagtcccagccctatactccctttacatattttccccaacacaatgggggtcactcaccccccccattaacaacataaaaccctcattcccccgagaaaaccccctcatgaaaaaaaa

SEQ ID NO: 613644 - DNA, 347 bp, Homo sapiens
gatcgaccgccacggtgtacagtcggcgcaggtgccctaagttacgggtcccgttctccttcacttggtcgtgaatcttgcccatgtacaccgggttgacgtctcggcttggcggatacggacctccagctcccacagcttacccacgttcgtacagaggtcctgcacatgcacatgcgtctcggggctggagcacaggcggatgcactctcggatggcgatcaacgctgcaacgtcgaggggcagggcgcgtaaccatgagcggtacttcccaccgatgcctcgggtgcgggtctccaccacaaccttcaattcatcttggtacacgggcgcacatgctaccgatc

SEQ ID NO: 613645 - DNA, 181 bp, Homo sapiens
gggtcccctcctatctgaatccagatagagatcagaaagtgctgataagcagagaatggaacaaatgaaagtgaacattcttaggcaacagttctatcaagttatggcaaactgcccttctgtagcaatggttctgtctaaaagataagtgtctagcttggtctaagaattagagcactct

SEQ ID NO: 613646 - DNA, 228 bp, Homo sapiens
gtgaagagaagcagatgtcacctcagtatctggctctttacaggccccccgtattctaggaaactagataccacacctgcccccttgtggcctgttagagggctatcacctggttccaacctggccgagccatcttagtaacaggttgggagttaagcctctaggtactgctatgtaaggatccctgggtgcgctttggccagacatcctgtactggttatgtgagtc

SEQ ID NO: 613647 - DNA, 112 bp, Homo sapiens
gtaacacgattctccgacccttgcgttccagccgatttgttgaagacgaggaaacttagacagtttaaacgacccttggtgttacacaatgcgttgcgttaagctgttgacc

SEQ ID NO: 613648 - DNA, 484 bp, Homo sapiens
atggcacatgcagcgcaagtaggtctacaagatgctacttcccctatcatagaagagcttatcaccgtttgcatgatcacgccctgcataatgcagttttccttatctgcttcctagtcctgtatgcccttttcctaacagctcagcaagaaagctaactaatactaacatctcagacgctcaggggaatagagaccggtcggtgaacatgatccgtgcgcgcgccaattctaatccatagatcgctcgaatcgtccacgtctccaatcacggcgtatcgggcaattcactttttacaagtttaactatgaacggaagggttgcaaaggcggaatttcaccatcgcgcttaacgcattgcagatactccaattgttggccagccaagagtggctacctggaaatccttatcgatgtacgaccgagctacgggcgtgactaatcttcaaggtcctatcatacttcccccattattcctagaacca

SEQ ID NO: 613649 - DNA, 730 bp, Homo sapiens
  misc_feature (510)..(510): n is a, c, g, or t
  misc_feature (617)..(617): n is a, c, g, or t
gatacttaatcagcgcgctggcaagtgaagtgtctgtaatgttgggtgagtctgtgagggccccaaagatgttgaagctcctcgtactgatcaggttgagtctcattcgcttgatgcgaatatcactcatggatgatgccgagtgctcctcgtcactaatggttacttacgtacagccgaaggggaccaggataactctaatggggttaggtgcagaaagaaagatccgtcagagctggtgtcattgatgtaatccactatccatctaagcacaccattaatccactattgagtcaacgtcggggggaatctggtgaaggggttctgaaatagtctctgctcttcatgcaccttcgcgaacatctggaagtacttattctagttgagactagtctacagcacagtcttttaagcaaccttcctcgtgtcagtgtatctaagaaacacagaagagtagatattacaagtttgagaggcaagatagccttaattgttgaagacttagatggncaccaggtttgcaagacctttgtgcaatagacactatacaagcgttgtgacgcctttaaattagatcagtctaaatgtttcacggatgcatcttactttgtggcgtnggcatttgtaaccggctaatcgtgggtaaactctgcgatgaaatcccatctttgtgaccttgtgttaaagtgaaacataattataggacctgtgtacctttgttttgggcccg

SEQ ID NO: 613650 - DNA, 200 bp, Homo sapiens
agctgaagatgtttattacaatcactctctgtgggggttggccctgctgctctaagaatcctggtgcttaagttctctgtgaatctgtcatctcctatggcctggcagagctaagatggaaggggtttggtaggacgtaactgtcttttctgactggtttcagcctaaactgcaggaagcaagctaactgtgtgcctagt

SEQ ID NO: 613651 - DNA, 338 bp, Homo sapiens
ggacttacaatgtgtggtgttatgggctcggatctcccatttctttggcggacgaaatcctgaccgacctaccggatatcgtatcacggtagtaggatgccgtggtataacccggaccagtatctgaaatctgatatctgtaatctatgtatcatagaaaagtaagaacagcgaagtcccacataaagatgtgtgggaagaatgcaaccagtataaaatacggatgcagaatgcatgaatgcatgtatatgcaacctattcggagaagtgagccttccatttttgttcattaatcaacttatagttttaatcacaaaaacggtgttattattgagaat

SEQ ID NO: 613652 - DNA, 309 bp, Homo sapiens
ttgttttcacgaataagcctattgcttagtgcctgctcagagttcatgcagttcaggcaggtggtggtcggagcccttccatctccctgtgtgacattgtcctcaaatactctgcatacgtccgcgtcagcctagggggttccaaatccagcagagtggtaggattccctaagtccctgccaccacaccagaacacacctcgtgtgctactaggaggaccaaacatatccagtgctctgggacctgttggacaagagatggtcatctaccacccagccttggctcgctcaaagggtcaccatgtggccc

SEQ ID NO: 613653 - DNA, 862 bp, Homo sapiens
gtgggctgggctccatcctgagctccatggagaagccacccagcctcggtgagcaggagactcggcgcaatggtccgatgaactaggccgcccgtcctgagatgaaactacaagagcatgagaaagaacagaaagtggagtttcgtaaaaggatggagaaggaggtgtcagatttcattcaagacagtgggcagatcaagaaaaagtttcagccaatgagcaagatcgagaggagcatacatacaatgatgtggtggaagtggcctggggctgacagtccttcgtcctttggggaagagtgatgactgtcgctatgtcatgatcttcacaaccaaggagtttgctccctcagatgaagagctagactcttaccgtcgtggagaggaatgggacccccagaaggctgaggagaagcggaaaagttgaagggagcgtggcccagaggcaagaggaggaggctgcccagcaggggcctgtggtggtgatgccctgccagcgagtacaaggactagtacagccacctcatcggcaatggagcaggcgaaagacgcagccacatgctacaggcccaataagatctacggtgtgtgccgtggccaataaagagggacacacgctccatttgaacgaggctatgaattgaagatcagagccaagaaagcgtctgcggcagagggggaacgagttggcgccaagctcctaatggccccgccagtcctttgaccctggggcaggcaggggccaggaagacagggtggtggtttttaaagccatcccggaggcccatttgaaaccagtctaacaagtgtcccagtgggggaacacgggttgttgcccgggagtgaatttggggcagttgtgc

SEQ ID NO: 613654 - DNA, 883 bp, Homo sapiens
tgcagtgactcatgcctataatcccagcacttgggaggctgaggcgggtgaatcacctgaggtcaggagttttaagaccagctgggccaacatggtgaaaccccatctctactaaaaatacaaaaattagctggacatggtggcacgtgcctgcagtcccagctactcagaggctgaggcaggagaatcacttaacctgggaggcggacgttgcagtgagctgacatcgtatcgctgcactccagtgtgggagtcagagtgagactccgtctttaaaaaaaaaaaaagaatcataagattttcacttgaggggcgtattcaagaccagcccaggcaacagtggtctcttggtaacaggacacctgtctttacacaaatttaaaaaattagctgggaacacacctacagtaaactcattttggtaaaaggtggccaagaacatacactgggggaaaagatagtctcttggtcaggcacggaagctcaacgccgtgttattcccagcacttgggaggccaaaggtgggacggatccctttgaagtcaggagtccaagaaaagccgggctaaacatggtgaaatcccgtctctactaaacaacacaaaaaacattaagccgccgtggtgggccggaatcagtaacccccactaatcaaggagggcggcggacgggagaactcattgaacccacgggggccgaggttgaacggatcacatactgcaccaggaaccaggctcaggggccggagcagatccggggagacaaaaaacaaatgtcccacagggggggaaaacggctccctaacgaagaggatagccattggtcgcagttaacacagggagcacatcaaccatgaccaaacgggaccacgcgcgaattggac

SEQ ID NO: 613655 - DNA, 117 bp, Homo sapiens
tctacgatcctatagcagaggccacaactgtatctccatgttagctggggctctcagccgcccaagtgtaggacaacagaggtcagctgcagaggaaggctggcaccagcgcccaat

SEQ ID NO: 613656 - DNA, 143 bp, Homo sapiens
ggacgattctttgcatcacagggggttacctggtgatttaaacaattgaggacataactggtttcttatccctcactcattataaaaagatcaatttgcatctcaacattaatggaatacttaaaattattcttatctcttca

SEQ ID NO: 613657 - DNA, 118 bp, Homo sapiens
tctatgaggatccctgcacacgcgagtatcacactgcacacgccgaaggaccagactgcacacgccgaagatccaaaccgaaatcgccgatcttcacgcgtgaagatcggcgtgtgca

SEQ ID NO: 613658 - DNA, 882 bp, Homo sapiens
ggcgccagcgccccagcctgcctgggctcgctcagcctctggggggctcctccgggcgcgcagagcagctccccgcccgcccgccgtgctcgccagggcctcgacaggcccaggcgcgctccagcctgggcgggcattggaaggtgggcgcggatgccggccgccggaaggttgcccgcacttgccccgggaagcccgtgcccccggccggggccgggaaagggggcccacggggagggcctccctggggccacgggggggcgccggacaacaatttggaacggggcttacgggtgggggggcagagaaatggcgtccgggacctggggggaggtaggggggagcgccggcgtaagggggggacctggggtggttccccggcgcctggcgggcgaaggaggccaccagcgggacaacctccggggcaccccgaagggggcggtgggaacacgctggtgaagctccctcgggcattcataagaacccaaggcgcagcgcggcaccttggcggcaaacagaagaaattccttgggggggacatccgcctcaggggcgaaagagggggggtaaccttctgtggaacccggtgcgagaggggcacaacgggggatagttccattccaggagggcccccaaaggggagcgggggcactccacccacgggtagccatcccccagtgggacgccccctggggggtggccgcgcaaggacgacggcgaccccgaatgtttcccccttggtgcatgtggggcgaacaaccaagagggggccccaaaggggacaggggaaaggaaggacgacatagaaggggcgggagtgcagacacataacctggggtgaccacagaggggagaacgcggcggactccaggagacacaggg

SEQ ID NO: 613659 - DNA, 827 bp, Homo sapiens
cgaggctgcagttgcttgcggaggctggcaaagcctctctccataggaggagatagaggtggcacccccaagaggctcatggaagtgcgagagtcaagcatcattgccactgcggtcttgccacaccgatgcctataccctgagtggacgcctcggatcctgaaggcgttgttttccatgtgatccttggtgaccatgaatggatgcctcggacactttgtgcgaaatgtcgttgggtcgacgcggacgttagctaaagcatgcaaggcaggcgtgacacttgtcagtcccactcttaccaatccacacagctcgtgggaggcagattgactaacacttctctgtacttacaaatcctgagagacagcttagacccgtttgcccaaggataaggagttacaggtaggctacatcctccacatgggcagatacgtggacttcacaatcgcccaggaattgagtagccagggcgaagaatctatactgtcgcaagaagggaaacgcacaaatgtgttgtgccatctatccatcgtgggacacccatgctagccatgttatcgtctgcacactaacatcaacgtttcgattgggcttggattatactacattggtatgcctgaaaatataaccgactcccgtctctacaccagcctcttggcgactaaatgtccttgccttgtctacggtctggctggcatttttgcaaccccggggtgtatcggtgcctggccttcgtgaaaccaccttggccagaagttcggacggccctgggccttcctgatatcgtcgccggtctttggtctggggagcgagtccgggattggcag

SEQ ID NO: 613660 - DNA, 749 bp, Homo sapiens
gtttcgcttttcatgtttatagtacttcttgtggtatcttttgtttctatccttgtgccgtgttttcttttctctcgttagtccttatgggggtgtggatgttcatctagttgtgttacactttcaggttgttcattgtatttctgtctccctttttgttgttttgtgtttggggggttgggtcttcttttttgtgtgttctatgtttgtggtctctcatttttatcccgtgttcttttgtcttgcggttgcgggtatttgtctcccgggtgtgtgttcgttctgtgtcctattgtgtgtcttctcggtagccttctttgttggctcttctttgtgtcgagctccttttgtgtcggtttactcttatgttctttcaaggtgcttcctgtgtgtaattgtggtcgttttctagtgatgtcctgaagcaatttttacgccccaaggcctctgtcaaggaagcataaatatttttgttttgcctctcttatattagtgccagtttggtgcataatattacttaaaaaaaccaactggaaatcaccactcctcttaaaagttgaaataactgattttatagaatctgtctgttctttgtttaacacacggttctctgtaagccagcttgcaagtgtattttgtgtaacacttttattctgaggtggaaatgaaaatttctaaagagaaaatattttaaaagatattgtatttatgttgcttgtgttgtagaataaagattccaaatgccatta

SEQ ID NO: 613661 - DNA, 268 bp, Homo sapiens
tgataggcacggagacaccgtgtgtgacatcgacccccagaacgatctcaccttccttcgaagtcgggtccacgaaaaatgacattatggttgcaccagataaagactatctcacagatagtgattcagaatccacccgaataagccactctcttggctccctgtgtcattccttaatttaatgccccccaagaatgttaatgacaatcatgtcagtggactagaacatggcagacgcttggaacccactcacaccaatccagtgatc

SEQ ID NO: 613662 - DNA, 530 bp, Homo sapiens
  misc_feature (521)..(521): n is a, c, g, or t
cgctataaagatacctgaaaatgtggaagcaactttcaactgggtaatgggcggaggttggaagagtttagagggctcagaagacaggaagataagggaaagtttggaacttctcagagactggttcaatggttgtgaccaaaatactggtacccaggactgggtaatttgtaaaaaaaagaggtttaattgactcaccattcagcatggctggggaggcctccgaaacttacaatcatggtggaaggggaagcaaacacgtccttcatcacatggtggcaggaaggagaatgagaattcagcaaagcgggaagctccttatgcaaccatgagaccttgtgagcactaactcactattatgagaacaggatggggaaaactgcccccatgattcaattatctccaggttcctcccgtgacacgtggggactaaaattcaagatgagagttaggtgaggacatagccaaactgtatcattccacccctcacccctcctaggtctcatgtcctcacatttcanaaccgaatc

SEQ ID NO: 613663 - DNA, 308 bp, Homo sapiens
gactgtcgatcagtgttggattacactggcacgatctcggctcaccgcaacctccgtctccctagttcaacgcggttctcctgcctcagcctctagagtagctaagattacaggcatgcgccaccacgtcccagctaattttgtattttttggtagagacagggtttcaccatagtatggccaggctggtctcgaactctgaccttaggtgatctgcccgcctgggtctcccaaagtgctgggattactggcgtgagccaccaaagccagccccaacctttacaatttctaagagcagtcttgcccta

SEQ ID NO: 613664 - DNA, 362 bp, Homo sapiens
aaccccaggtgtcaccccagctgaatgaaatcaggagcccagggttttgaaatttttttactttgaagaaagcctgtgggcccaggcgcggtgtctcacacctataatcccagcactttgggaggctgaggcgggcagatcacttgaggtcaggagttcgagaccagcctggccaacgtggtgaaaccccatctctactaaaaatacaaaaaattagccaggcatggtggcgggtgcctgtggtcccagctactcgggaggctgaggcaggagaatggcgtgaacccaggaggcggagcttgcagtgagccgagatagcaccactgcactccagcctaggtgacagagcgaaactccgtctc

SEQ ID NO: 613665 - DNA, 1163 bp, Homo sapiens
  misc_feature (535)..(535): n is a, c, g, or t
tccaaagtgggtggttactggcaatcgtggttgttacttaattaggttgcctccatgttaaaactctaattctataattttaatttaaagcagcaaagtgaacacaaaatgtggccagtttaaagaatgggtgtggccgtgtaacacaaaagtgttcacgagaggtgtaggaaaagccttcttggattttgggttggggccctggcatataggcctgggtcaacgtcaaagggaaccgagtcacatctgggagctaaggaaaccaaagcaagtcttggtggaactctgggcacagtggtatagagaatggctggtgggaagaagtctataagagcaagagggaaggggtctcctttgaaggcctgtgcacgaggggtggtgttaagaggggtgttccaaattaagagggcgggttcctcacgagcgttacacatttcaaatgtggtgaacctcaaacaattctccgagaagctcttaacagaggggtccatagtggtgctactccaggtggtaaaatatgtgggtttttacccanccagattgggcctattccttgggtccctctaagttcgctggtgcaccaatattatttcgggactgcgaataggaggggtttacatacaacacttgcgggttaaaatccccagagaccaattaaatttaatcagcggtaaaggggtcctaatggtgaatctcaacattttataacatttttggagtgtaccctcttggttaagtgggtcaaggggaatccacatgcggcagtggggtttcaatttcgggagacccccagagaacaaaaaaacatgtgttggcccaattaaggacaagaacccccaaattaaaccctgggtgtaaacaggtcgagaaggcggactaaatctcctgggggaaccccctttttctcattataagaagggagcaataatttggggggggcatactttgggggcccctaccacgtttctgataatttacaacccttaagggggcaacgttgccgcacctgtgggggacaaattcttcaaaaccctcgtgggtataatcggcccttcggctgttctatatcaacaccccttgtggagtttctacacgttttaagacggacctttctataataacagggcataacggcttttaaagatatatacccacaggcaaaa

SEQ ID NO: 613666 - DNA, 457 bp, Homo sapiens
cgtcgatctgagggattgtcacagtggtgtgatatcaaactaagacctgcacagtgatccagctttattatttaggctaggtataatgttagtatgttagaatcattccaaacactgtacaagaatatttcaagctatgcaataaagtagaatgagtatttacctgagtattttgtatgaatcattatatgaggcaaggtgaacagcatgaagccgtcatgctttgcagtttgtattaattaaaccttagaacgtggggtagttaggttgagcctcccaaagtgctgggattacaagcgtgagccactgtgcctggcccttttttttttttttttttttaaaagaagatggcttctggctatgtcgtccaggcgggtcttgaactccgtgagttcaagcagtcctcctgtttcaacatacagctacaggtaccccccacgatacattttaaataagg

SEQ ID NO: 613667 - DNA, 412 bp, Homo sapiens
tctgcccctgctcccctggtttgaagtggtgtggtgaaatgtggctggaagtcagtctgctagcctgtggagggaccttcatccagggcatgctcagactcagctagaagcaagcacagcttcctcgcatgctgaggccaaggggctgaaggatgcagaatgcttcttgtactggaatgctgtgctcaccagtatgggtgccacatgggagggggggcaaatatagggtcctgggcctgaggacgaaatgacacctctgtattaaacctctcttttgcatatgtacaaattagattcttgcaagatgagctaacattaggaaaggtcctattatattgtgacttggggtgtggttttaaatagaaccagttttgcttggcctcggatgtatcagttctggataacttgaaag

SEQ ID NO: 613668 - DNA, 238 bp, Homo sapiens
ggctgctgagcagatatcaacgttctggctataaaagggctgaggagcagtaggcaggagatagaggtgggcagtgcattgtcccaccccaggaccctcctggaggggcttggacactgggaactaatgaacggctgtcatgggagctggcacggggtgtctgtatgtcagatgctgtctcatggaggtgactgacagcagctgatgaacatgccctagctcatctcttcctccgcgc

SEQ ID NO: 613669 - DNA, 207 bp, Homo sapiens
taattggtattccggaacgcaaaatacgagaggagagagaggcgtgccaactccctcccctctatccccaagcccttccctgagctctgcagtcctccctcacagagcccaatttctcggggagcccctccagtgaaagggggctgctcccccgagaatgcagccgcccccatgtactaaaggtgtacagtgaggatgggcctgcag

SEQ ID NO: 613670 - DNA, 502 bp, Homo sapiens
gttctttaatctggaaacatcatttttggtgtcaagaatgttcttttgtaggatcccagtgagagtggagagcggagagtggagagtggaaggcatcccttgttcatgccttcatacttggcaaccctagccccgcccagggactctgcagccatctggggggaggggcgtcctcctgacaggcccaggacagaagaccctaccccaacagtcccagagtccgccccccaggatgtcctaaccccacccaccctgtacgcagcagttttagggcagggtccttgagcctgtggccatgggatccagggcctcaactttcccctctgactcctgttgggtctcaggcgatgtaaagaactaaagtgcaagctgtgcctgcactgtggatcccagctacgtgggaggccgaggtgggaggatcactggagcccaggagttcgaatccagcctgggccacagagcaagcaagacccccaccccccaaccccccgccgctctctaa

SEQ ID NO: 613671 - DNA, 546 bp, Homo sapiens
caccgttccgatctctctctcctctccatctcgttcctcccccacctgcgcagccaagaagttcaaaccctagtccagcctgcgagcgccgacacgccgcgccgtgcggcttcccgcaagcaggtgctccggcggaccgcgggggatgagcggagcggcctacagggaccggggattcggcggcgccgcggagatggaccggaagcgcatcaaggaggcgctcgagaagcacacggagaggccgtccccgtccacctccaggggggcgtccagggagaaggagctgctcgccgccggcaagataaccactcagatcggcaaggtccccaaggtctccgacgtcgaggaattcgaaactgacagtgaagattctgatgttagtggttctgaaggagaggatacatcttggatttcatggttctgtagcttgcgaggcaatgaattcttctgtgagattgatgatgattatatacaggatgatttcaatctctgtggcctaagcagtcaggtgccatattatgattatgcacttgatctcatcctaga

SEQ ID NO: 613672 - DNA, 298 bp, Homo sapiens
  misc_feature (291)..(291): n is a, c, g, or t
ccattagattttcatgaagaacccaggagtgatggtctgtggtgggagcttcacccgggaggagtagagagggactgggagagaggtgatgtctaggtacctttgggccacctctcctataaaagatgtagaaaaaacttagagttatatgactgacatagcatatacagaatgatatgcatattcagtgctggacttccattattttgagatatcaattgtgtattaatgttactttctattctctcgtgattttgaaaaataaagttaaatattaaaacattttaaaanaaaaaaa

SEQ ID NO: 613673 - DNA, 1054 bp, Homo sapiens
ggcctgcccacagagccatgcccttcagatgtgcctcagaggtggatgaagatcgctcttagatttggagagtggtgtgccctcagaccatgtgtctatgcctcagagactgggtggacccagtgaagtggtgcgtgtcaggaccctgggtgaggcagtgcatgccgcatgaccgtcaacccctgtgttgagcctagtggtggacagtacaaaggtgaggtaagcggaggaaggtggatgaatgtggtgcgtaggggacgagatgcgtgctgtgttggcctagtgtggtggtgcccagaccatttgtgctcccatttgccgggtccccttgtcctcgcattcgaggagtcgaccccatatggctgaggaacaacagttgagaaagctgggtgctttgagggacgggaccaactataacacggtgtcccgacatcagggttggcgcccatagagaaggggtatcccacattgtgagaggacccctttcgagtaagaacacccaagggtgccaacggaccattcagagatcttgcagagagtggaagcagatagacactctctgatgtatgccccctacatcggaaggagtcgcgcatgtgctctccaatgtaacccggggagtggaccccttgcgaagggggggatttgataccacattgcacctgatggaaggccccaaattcgcgtttgaatgccctttgggccctctgggtcactgtggtccgtgaatggcgttcccaattagggcgagagtcgtattggccccataaggcacaagttgtgagtgccagcctataatctttggtacgaagatagacccatgtggggtcccaacccattgtcgctccatatactcgaggcagtacgcacattttatacagtagagtagagctcttcaaaaggctattcggcttaagatcagtatggacccgtacagtcaagggaaggggagcccagcacgtatgtcgaacctcacgagaaagcctacggtgcaaggttaattctttaaccatatggtgggaaaaccagaaggggctatggagcccagaatttg

SEQ ID NO: 613674 - DNA, 171 bp, Homo sapiens
taccctatccatatagtatatgaactcagctatcatcacatagctgcgagctacgtactatggcactatctgctaatgaggccctagatatcacatacttcctctaatatatctccattattatgaatcaaatgtgtgctatcagctgtagctggtaagtggacggctcga

SEQ ID NO: 613675 - DNA, 309 bp, Homo sapiens
tcacatgtggtacccacgtttgtggtgggaggacagacacacctcaccactctaatagcattctggttcgctgtctctaactggagccaaagctgtttgtgtagcctgtggcacaagttgactctttggggtggtgagttgtttaccagctacactgacccactcttgtctgcagacactggcaaaacttgcagagtgtgtctctactgtgcccagggctcagacgcaggtcgctgccagtgtgatgcacccaccaaaacctccagtgcacaaccaccatctctactctgatgcgtcctcccaccacaa

SEQ ID NO: 613676 - DNA, 1041 bp, Homo sapiens
  misc_feature (14)..(14): n is a, c, g, or t
  misc_feature (122)..(123): n is a, c, g, or t
  misc_feature (126)..(126): n is a, c, g, or t
  misc_feature (128)..(128): n is a, c, g, or t
  misc_feature (130)..(130): n is a, c, g, or t
  misc_feature (132)..(132): n is a, c, g, or t
  misc_feature (135)..(135): n is a, c, g, or t
  misc_feature (769)..(769): n is a, c, g, or t
atccaaacagcccngtagcactggtcaggctcctcgtgcttatgtgtgagcagaaattccaaatgcagccataagcatctcaaattcctttgggtttcaggagcccgtgtaatggccggtanngcngntncnccntcgcgtggactgcaaatcctgactggtgtcaccctgttgaatgtgggctgatgtcaacagagttacctaccagggctattctccctaccagctcactgggggccgcccaagcacccggatacagcagcagctgggccagctgacactagaaaaccttcagatgctgccagagagtgaggatgaggagagctatgacacagagtcagagttcacggagttcacagaggacgaggtgagtctgtgaactccttcggcgctctaactaatgaggtgccattcccttcaccctcccaggcccctagagctgctccttatcagaggggtatctacataatgagtctctcaaatttctgtgcataaccagtatcccaagaatgtacctgccccccccctttttttaatagcttactctttttttaaagagaagcattaaaggcaaactccctcagcctgtaaagttcattatatttgggctatggagaatggagtccaagagttatttccagtagtggcctccccatcccggtagcttggcagagctccgctccggaagcttaacgtgtcttttttccccttgttttcagctgccctatgatgactgtgtgtttggaggccagcgtctgacgttatgagngcaaaggggctgaaagaacatggacttgtatatttgtacaaaaaaaaagttttatttttctaaaaaaaaaaacaattcacgaaaaaattacatggaaggaccacattatatatttattgtgcttcgagtgactgacccctgtggtttcctgtgacatgtaacagccaggagtgtaaagcgttcagtgatgtggggtgaaaagttactacctgtcaaggtttgtgttaccctcctgtaaatggtgtacatcatgtatggtaggtaattattaa

SEQ ID NO: 613677 - DNA, 689 bp, Homo sapiens
  misc_feature (14)..(14): n is a, c, g, or t
  misc_feature (122)..(123): n is a, c, g, or t
  misc_feature (126)..(126): n is a, c, g, or t
  misc_feature (128)..(128): n is a, c, g, or t
  misc_feature (130)..(130): n is a, c, g, or t
  misc_feature (132)..(132): n is a, c, g, or t
  misc_feature (135)..(135): n is a, c, g, or t
  misc_feature (417)..(417): n is a, c, g, or t
atccaaacagcccngtagcactggtcaggctcctcgtgcttatgtgtgagcagaaattccaaatgcagccataagcatctcaaattcctttgggtttcaggagcccgtgtaatggccggtanngcngntncnccntcgcgtggactgcaaatcctgactggtgtcaccctgttgaatgtgggctgatgtcaacagagttacctaccagggctattctccctaccagctcactgggggccgcccaagcacccggatacagcagcagctgggccagctgacactagaaaaccttcagatgctgccagagagtgaggatgaggagagctatgacacagagtcagagttcacggagttcacagaggacgagctgccctatgatgactgtgtgtttggaggccagcgtctgacgttatgagngcaaaggggctgaaagaacatggacttgtatatttgtacaaaaaaaaagttttatttttctaaaaaaaaaaacaattcacgaaaaaattacatggaaggaccacattatatatttattgtgcttcgagtgactgacccctgtggtttcctgtgacatgtaacagccaggagtgtaaagcgttcagtgatgtggggtgaaaagttactacctgtcaaggtttgtgttaccctcctgtaaatggtgtacatcatgtatggtaggtaattattaa

SEQ ID NO: 613678 - DNA, 128 bp, Homo sapiens
gcgagagaacgtgagtattcatccatgtctggactagtgacagaatctttaccccaaaattagagctgactcagatctcaggtcttcatcttattgggaatattcttcagaggttggacttatggcgg

SEQ ID NO: 613679 - DNA, 415 bp, Homo sapiens
gaattgacgccctcgaccctgatctacagatgtactacaatgaaggcaccaaatttcgtacgtggacccagagcacaggctgtgacagtttgctttggaacatggcaaggggccatggccttcctacacacactagagcccctacatcccacgacatgcactcaatagccgtagtgtaaatgattgatgagcgacatgacatgcccgaacttagcatggctgatgtcaagttctctttccaatgtcctggtcgcatgtatgcacctgcctgggtagcccccgaagctctggagaagaagcctgaaaacacaaacaggacgctcagcagacatgtgcacggttgcagtgcttctgtgggaactggtgacacgggaggataccttgctgacctctccaatatgggagattgaaatga

SEQ ID NO: 613680 - DNA, 101 bp, Homo sapiens
gtgatctagaggatccctcataacgtatcagaaccatggaaatggggacccagtcattagggcttttttttttttaactttaagttctgatacggttttga

SEQ ID NO: 613681 - DNA, 723 bp, Homo sapiens
catcaccggcagaacacagcagtgtcggagtgaaagtgcagcgtttcctatgttattcgagatgaacggtggcagaacgtacaaccgaaatgtgagtcaatgctctgcagcctggcatccagcactaaatagacttttcacagccggtcgagaccctactcataagaactactggagctgtcaactcagcacaacgcaagcatccactactatacgcactcctactggacacaccactactgacttggcgtaaacgaacacttgtactcctgctccgctacacctgcgcgacacccacactctacctactctgcctctctctctgcaccaccgacccagcctcacccccgcctatggacactgccaccaccacacggcgcactcctccgcactgctcacccactcaagcgcaccccccctcccaggacctctacgcctcccagccgccccttaccccccctactgccaccggcactaccgcacactacctacgccactccgccctggcctctgcgaccgcacccaactcattccctctgcggactgtgcactccctcctaacagccacttgacctgcccctccacacttaacccctgctccaccacaccttcttcctttccccctggcaacaccaccccacttccactttactacgccttggcccatgcccctcaacctgcgcacccctcactcgcttctcccggctccacctgaccccgcgt

SEQ ID NO: 613682 - DNA, 353 bp, Homo sapiens
tgtggtggtaaccatcgctgtaaacggttcatcataggcgcctacacggtatgcacctgatagacgcgcatgtcatctccagcggtgtcgaggactcctaaggttcttgaccatcagctttgaaaggtgatgccattctgactaagtgccattctgctcgatatcgtcgctcggtctctgggccttaatcggtgtgcagtgagctaccagtgaagacttttgagtgtcccatgttgcaaccgtcgtacagagaccgacccgccagcttctggccctacggctgtatcaggccatagtcggtgcgcacttatagctggctgcgcatctgcaaaacggtgcgcaggaggttagcg

SEQ ID NO: 613683 - DNA, 451 bp, Homo sapiens
  misc_feature (66)..(66): n is a, c, g, or t
  misc_feature (151)..(151): n is a, c, g, or t
  misc_feature (169)..(169): n is a, c, g, or t
  misc_feature (195)..(196): n is a, c, g, or t
  misc_feature (237)..(237): n is a, c, g, or t
  misc_feature (240)..(240): n is a, c, g, or t
  misc_feature (247)..(247): n is a, c, g, or t
  misc_feature (374)..(374): n is a, c, g, or t
  misc_feature (442)..(442): n is a, c, g, or t
  misc_feature (447)..(447): n is a, c, g, or t
ggcagcggcaacctctgacctggcctcttctggggtggtgtccttagatgaggatgaggcagacangacggaacagtgacccacatcatgcctggcagtggcatgcatcccccggctgctgcagggcagagcctctgtgcccaagtgtggntcaaggctcccagcagantccacagcctagagggctcctggganngctcgcttctccgttgtgtgttttgcatgaaagtgtttggngangaggcangggctgggctgggggcgcatgtcctgcccccactcccggggcttgccggggggtttgcccggggcctctggggaatggctacaagcttgtggcagacaagtgaatgttcatgttcttaaaaattgcnacacacacattttcctcctccggataaatggtgaaccactaaagggggttgtgactgggctgtgtgangtccnccct

SEQ ID NO: 613684 - DNA, 548 bp, Homo sapiens
  misc_feature (394)..(394): n is a, c, g, or t
  misc_feature (429)..(429): n is a, c, g, or t
  misc_feature (456)..(456): n is a, c, g, or t
  misc_feature (523)..(523): n is a, c, g, or t
gaaggccagaagtgcatgtgtgaggggggaaagggagaaattgaggaataaagtcatttactatggaggtacatgagaggtagagaagaggaggtggtgttgggagaacgcactttgctcgacactgggcttctggtgattcttagtattggtccatgaaagttatattcaaattctagctatgatggctctttcctgggattaaatgagctgacatacctctgtgaactgtagcagaagacaggggctcagcccatgccagcccagcccctcagggctctgtgctcttctagggatggatggttttggtaaagaacagacgcccagcagcccccggtcactcagcaccagtgtgacagtccctcctctctctgggggtgtgtaagaaaacggnccctatttttaggacaggaagagtagagggagggnctgcagcaagattccatgactggctgncttatctgggaaggagaataagctgagtgaaaacaggctgttcttgctgtcctcccttcaatcacantctccaaatcaggtctctaggggat

SEQ ID NO: 613685 - DNA, 461 bp, Homo sapiens
tgtaacaggtgccatcgaagagaaacggaaaacaatcaactggatgaagatattctctttgctatgtctacttcatgctttgacagttatgtggaacctctgaatttataccttcataaattctgataggctatgaaaggagaaaagcggcaattggctgtgagcagttctcagtctctgtattgctgtaattaaagagcttacagaggaggcatttactaaccagttaccagctggcttaataaccacagacggtcaacaacaaaatgttatggtttacacaacatcatatcaacagatttctggtgttcagcaaattcagttttcatgatctgaagaaatgatggaatggggagtgtagagaaatgagagtctgtatgattctggaacagagacatcagaaggaaagactggtgaaaagatgtatctttgtatattaatagctgtaatgtagcttcctg

SEQ ID NO: 613686 - DNA, 179 bp, Homo sapiens
acctcctaccccacggggaattatagagtccctcgtattcatcacttgtgtatgtcttgagtgaaacatatgtgttatgccttattctaaaattgagtctcaagactggaatgccttggaagacagatgcttctatagaggttcttggacctaaatagttcagcatttgtatttttatt

SEQ ID NO: 613687 - DNA, 1334 bp, Homo sapiens
gtattaagcgcgtgtggggaaaatttgttctacaactctcgcgggtggagggaataatttgtgagtgaggctctccaatggggcgaccacctcttgtggtacagagatttttgcgttcgccctcttgtagaaaaaaggggttaaacgtagcgtcacaatttttcaacgtgtgtttgaccccctatttttggcccgcagtctatattcgaaggtcctttgggggtgttttggacaagggctttcaaacggggggccgctgggtacccctggaaatgtgggctacaacgaataatttggatattttggattttgcttgcggcgcagaaaaacgtgggaaatttgtgttaatgaccgtattttgtgggggagatctgttgtcaggacctttccttgtgtcccaaccaaatgacaccgatgggggcacagtgtaagagcccccgagaggagacacaagaaacgttgtggggaaaagttattcccgggatgttccacccacaaatttggggggaaaacttcttgccataaagtgctgtgggttgtttacgtggagcctttgtggtctcaattcccgagattgttgttccttggaggggtaagccccccctggagaagggttgttatgaaaaccattcatatagccacggtgggcccacgaacccccctggtaaaattataggaaaagaatttagaaagtgtggataaagagagcgtgtataatagaaaggaaatggtgtcccccacagatgaagaattgagcattttgggaatgagagttggaaaaggctatattctcacaaattaaagggcgcccggcctcacaaagttagaaatgtgttataatgtcccgggataaaccgccaatggaaggctgtctgaatagggccacctggtaagaaaagagggaatattgtttctttcactatgatatcccaagaagatgtaagaaggcgcttcactgctcgaaagatttcgcgtttattggacccactcaattttccggagagtcccgcccaaatgaatattaaacgcttctcacgctggaggaatcacaattttggaagacccttgggcccccccaggaacttggcgcgccacagcgggaggacgaaggtggaacgtgggccgtggtgggcgccccaaaccctggcacccacaggagccgacaccaagtcacacagtgcattcttgtctcctcgaatttggagttaacccacagaaggcacattcccacgctttggcttaactggaaccctaagaccacccgcggtgtcctattgtgaacccttctgttcaaagacttttgcaagccttaaggattccccaccatttatgta

SEQ ID NO: 613688 - DNA, 109 bp, Homo sapiens
cctccatgctcatcggtgccacgcccccctccgtccctccacgtagtagaatcttgggggcggaggcttggaccgggcccagacgactgatcggaagactcactttcct

SEQ ID NO: 613689 - DNA, 274 bp, Homo sapiens
ggggctcagttgatcctcaacaagtcatcttctctaaagataatagattttttttttctaaagacggacaatcctccagcctctgggacccaggtggtgaagttaattctcacgggggagatcaacaagcggggtaaacggcagaggtggatggcgggccgggtcatctagacacctcagggcaatcattagcaaggccttctttcaagggaacaaaaaagcggggggggggggcatatgccggtaatcttaccacttcaggaagcggaggcgg

SEQ ID NO: 613690 - DNA, 484 bp, Homo sapiens
tcactaggacatgaacgagaccttcaaggagaagtttcctcacataccgctgacatctcagcaaaattatggagtctgaaacgagagatgctgtgaagattgctgcggaggagtgtggccttgaggagcccacggtggccatggcctacggctacttggaaaagctctgcctcaaggggaaattcaacaaacagacccggacgctgtgtgctggggcatgtgtgctgttagcagccacaatcggaagtgacctcacaaaaacacgaagtcaagcacttacttgacaaactggactagaagtaccggctgaacaggcgagaactgattgcctttgaatacccggtgtccgtggcctaggaattctgcctccagtagcccgagcacacaaagtcttgccccaatacagacaggcggtccagagttcctaggcaatgccccagaaggacagccgagggcaattatctcctcaagcaggtgaacagga

SEQ ID NO: 613691 - DNA, 265 bp, Homo sapiens
aaagaatgcatggcagagtgctgtctttaacagctttaactgtggcaggaactgttatgtttttttgtttttcttttttatttctggagtcggagtcttgtcctataacccagactggggtgcagtggcacggtcatagctcactgcggcctcagactcaagctcaagcgatcctcttaccttgcctcccaaagtgctgggattacaagcatgagtcaccgcgcccggctcattttaaaatttttgtagatcagtgtactgttgt

SEQ ID NO: 613692 - DNA, 604 bp, Homo sapiens
agcttcgccaagctcgccaagagtcccccgcgcttgggccagggtttttagggccccacccaaaaggccatctcaaatggaacaccccatggaaaccatgatgtttccatttcccaaattcggtggggataagggctacttccaaaggaggccctgagggttctcatggaaaaggagttccctggatttttggaaaatcaaaaagcccctttggctgtggccaaaataatgaaggccctggcccagggtaaagatggcaaagtgggcttccagaggtttttttccctaattgggggcctccccattgcaggcaatgactattttgtgggacccatgaagcagaagggaaagaagtaggcagaaatgagcggttggctcccccctgataaaggttgtcccaaagggtgggttaaggaatttgccccccagcttcccccatagaagggtttcatgggcagatcggggcccttagcaaagggaaaaataaaatttaactttcttttgccaagcagagaaagaaaagttaaaacccagataagcttttgatttttgtattgttggcacccccctgcccccaaaaaaaaaagtttttttttagttccca

SEQ ID NO: 613693 - DNA, 237 bp, Homo sapiens
cacacccccactttccccctagggttccattggaatattgaaaaggattcccttccttggaatttttttttaaaaccaaccaaccaaccaaaaagcctgtccccccttgggattccttcctttccttgggaggtcaatgtttgggtagatgaacccttttcatgttttggggctccggggtttttgtttcttttttttgcccttgggggagggttttgaataaaagttggggcccca

SEQ ID NO: 613694 - DNA, 219 bp, Homo sapiens
tctagaggatcctctacactgggttcgagtcgaagaaagaaacatatgcttgccaggagagagctgggcttccaagttacctgaccttaaagatgctgaagctgtgcagaagttcttccatttggaaggaaaatacagcttggtgaagagttactaggcctcccaaaagggtgaatatggagaaaaggggggcgtagaccatcttgaccaaaattgcaa

SEQ ID NO: 613695 - DNA, 423 bp, Homo sapiens
tgaggatcccgcagctcgtgggtctgggacttacatggttagccacgtgcgcccggcgctgtgtttttaagatgcaaggttaaacaacctgagagtgtttaaaaactgtattggttggtttatacttcacttcatcctgaaagactattcaaggtagcttacagagatgtggagaagccaaatataaagagagacatctcgaacaaatgtgagcgtaagattgggaatgcgatgtcgtaatggtcattaaaagaaagctgcggtaactatgtgtatattgggcacagtagatatcatagtagagaatgtgaacagggatatagagggtgatatcatattgagacacaggtctacttactatgcagagatattaatcttaaaagtatctcatgtggggagatgtgcgtgtgatcttagaacttt

SEQ ID NO: 613696 - DNA, 256 bp, Homo sapiens
tataatagggactttagctttgtcgtccaggccagagggcagtgtcaggaactttgctccccgccttccgggttcagcctccaatgtagctgggactacaggtgcccaccaacacgctcgactaatttttggtatttttagaagagatggggtttcaccgtatcagccagaatggtcttgatctcctgacctggggatccacatgcctgggcctcccaaagtagctgcgattacaggcgctcaccaccacgctaag

SEQ ID NO: 613697 - DNA, 860 bp, Homo sapiens
acctactattcatattgaccatcataagaggcacaacaccaccacccacacacggaactttcatcgctctacatggaaggactattgtttccagcatgactggcagcactagctcatgtaccttatcgagtcgtactttctctctcttactcgccttggcaaatagctgggcgtcgtagatatatcatcaccattacctggagaattattcattcacatggacggcccggctcgccttctcctatgccccatcacaaccaccgatgatgtggatattattttatctattccaatgttcttaagactctatatgattgccacagtcatgcttttacataccaaacttttcactgatgcctcctctcagaaacatatggagctacttaataccaccaactttcattccccgtcccgttatgaagactcccactgactagatgacccgcaactgatcctcctgcatttccacaatcttattatacccacacttaacgcttcgagtgtcccgcgctcgtggcaccgctcctgatcaatccgccgtttccaccccctcccttgtatcgatgacaccccacatccctaaatccccccctccctgcgctatgcagccatgtactccacccaatcatgcggatcgcgaccctgttcactttctggcacccctgcagacggacgatactcaacccgggcagctgttctccatgcgcactcccccctaaccaaacgccaaaaaccaagcccactatttagatctctcaaccccacacaacgatgcgcatgccgtccccccaattttatgaaccaacccgaccacgacccaccccccaagccaaataaatcattcaccaatatcacaaacc

SEQ ID NO: 613698 - DNA, 160 bp, Homo sapiens
agctattctacctgctcggtggtgatgtttttttcctaagtagaaactgaagcactcctcttccaaaatacagagactcactgtgttagtctgttttggcgttactaataaaggcgtacctgagactcggtaatttgtaaagaaaagaggttaactggct

SEQ ID NO: 613699 - DNA, 283 bp, Homo sapiens
ttccaggcgctctcgacctcagaacaccatccacagagtcccaagtataccacgcaggcacagtaaactcaagagcaatgagaagcaccgaatgccagctcagatatcattctgtgcctatcatggaaaagacactaggaggaagggcctggggcttatattgggatgtgaaaaacagactctgaaagaatgtactgtcaaatatgcttgaatgttcattttcatgaaacaattcccctcaagtcgggtgccctgaaaagcttgtgtatcatctcagctcaac

SEQ ID NO: 613700 - DNA, 976 bp, Homo sapiens
gccccgcaggccctggggctctgtccgcgtgggcccgcgctgctcgccccgagccaggagaacgagctcgaggaggatgcctggtgccctgtccctgctgctgtgccctgtggtgatggcactgccctgctgctgccctgcctgtgctgccatgggaatggagctgtgtgctgcctgctgcttgtccccctgcctggcgcgcggcgacgaccttgcagacctgccactgggcggcccccgtgcctgctgggtccccgagtgacgctggctggcacctgagagtgtggcgctgggccctggggccacgcagcggagcccagtgtccagtgaaggcgtctgaggacccgccgcccgtgccgcgccatggtgatgtcccagggcacctacacgttcctcacgtgcttcgccggcttctggctcatctggggtctcatcgtcctgctctgctgcttctgcagcttcctgcgccgccgcctcaaacggcgccaggaggagcgactgcgcgagcagaacctgcgcgccctagagctggagcccctcgaactcgagcggcagtctggccgggagcgccccgggccatggcgccagcgcagccaccaacacaccgatagccgccatggatggcgcctggcatcacgcgccactcgccattcgcacgttgcacgttgcaccccgatgcttgcaccacgggcccgcgcaagacggcacgcgcacggcgcaccccagacccggaaccaccagggcgctcccgcacccgacgctacgccaccgtgtcggatgacgacaacgggcgctggagcttaccccgcgcccacgctggaactcgtgcacattgttccaaaccacacgttgttaacgacacaggccggtgctgattggcagagcccgccgacgcctaatagcagaggtgctcacgcgacacgccgcgggcatctaccgcaggatcgtcaggccattcttgattgccgcgaagagc

SEQ ID NO: 613701 - DNA, 92 bp, Homo sapiens
  misc_feature (91)..(91): n is a, c, g, or t
acctttcatatgactaaatcttttgaaactatgtttttcctttaaattttaataaattttcttatgtttttattatggcaaaaaaaaaaana

SEQ ID NO: 613702 - DNA, 1019 bp, Homo sapiens
gaccctcatcaagaagatggagacatacagaaatagtactaaaccacatttacaaaatgccagtatcaggcggcggttctcgaagccaaagtgatgttgggatgtcaagtgaaatattagtagggcgggatgaacgcagagtagtgaggaaagttgagccaataatgacgtgaagtccgtggaagccgtggggctacaaaaaagtgttgagccgataaattgccgtcggaaatggtgaagggagactcgaagtactctgaggcttgtaggagggtaaactagatggagggccacatctgccagagcctggagttctgcaaaggccgggacccggttcccgggcccacaggtgggggtgttgcaaacccgagagaactgggttgcaaattcgggaagaatcagcatcaggttgggcagctgagtatgggagccaggagcctgccatgaggtttggggaacagagtgctgttttagagctggcagcagcatctcagccaagagaaggtaatattcccagaggatgtcagtcccaaggaccagtagttgccatcagttgggatcctgaaaactaactgggatccacacggggtgtagaaccatgcttgcctaatggtatcagcaggccatgctcagcaatcccagacgatatattgggcaactttttctagacaaggggccattggggtaacactcatcaccatttgggagtctcggggctcacatatacactatggtagaaccctgtggcgtaaattccccaggtgtacagtgtgtgcggacacacacacagctctaagtgctcccaaaaatacgcggggcgcatagagagattactcccccgttgttgggggaaaaatagtcacacaacacgcggtgggtaaaaaaatctcttgggtggaggacgcactatttaagtcaccagggtgcgacaactcctgtcggaaaaagatcgtgcttttgataaagagacgcaataataatagtcgttcagataacagatggtgatctcttcagaggta

SEQ ID NO: 613703 - DNA, 332 bp, Homo sapiens
  misc_feature (123)..(123): n is a, c, g, or t
  misc_feature (165)..(165): n is a, c, g, or t
cacagaaggtgggcaggctggggctgagcaggagatgatgaatttcatgtagacaggtgtgagtttgaggcgcctgtgggacattcatgagaggtgtctatgggctccagggctcgggctagngaaacgcatgtgggagacatcttacagctgatgtttgaaggntgggcttgcgtgaggctctctagaaacatgatgaacagcgagaaaggagaaggggtcatggacaccaccctggggtacactccactggagggaggctgggagcggagaagccaacaaaggaatgtaaagagggcttggatcatattcccgtcctacagccaaataat

SEQ ID NO: 613704 - DNA, 1390 bp, Homo sapiens
  misc_feature (62)..(62): n is a, c, g, or t
aggcttggtactgggccacgcgtaaataccaaaccccacatgttctccctccccccactaanaccccacatgttctcccaaacttgaatgatggacgctccctgtcagtgccctgcagatgtgatctccgcccctacctgaccgtggagcaaagaaggctgaaactgaagaactgaaaaaaaatggaactgagtaatacacgcacgcactatgtaacaagaaaacaaggagatacacatatggatgtgggataactaggatggagattagatatagataagtgaagaaacaaaaaaaagaaggaggatgaaaaaaaagaaagaaaaaaaaagaaaagataaaagaaaaagataccaaagaacacagaagaaaagcacacaacaaaagaaaacagaagaaagcgacaccaaagaacaaagcggacacgcagtcgaccatgaccaaagcaccacagagaaacgaacgacacaaaacaaaacaaaaacaatagacacgaacgcacgcgaaataacacaaaacagagacacaaaggacgaacacgaacaaaacacaaaccagccaaggcgagaaaaaaagaagaaaaacaacacaaaaaaacgacgaacaaaaaagagaacagaaacacgaaaagaaagagagcgaaccaaaagccaaggaacaacgagaaagacagcgcgagaaagataacaaacaaaaagcacaccaaagacgcgaaaacacgagagcgactaaacaaaaaaacaacacagacaggcgatacacaaagagagacaaaaaacaaagaaacgagcacagacaccaaaatcgaacacgagaacaagagagacaagacaacaagaaaacaacaccaaagacaaacgagagacgaagcaaaagaaagcgcgcacccaagacaaaacaccagaagaaaaacaggaaccacagaagaagacaaagacaaaccagacagaaaagacggaacacacagccacaaaaacgcgaacgaagaaacaagatcgacaaaccgatggacccaacgaagacaagcaacaccacaccaacgaacacaaaagccaacaggatacgacaggagaacagacacaagaagcacaaaagacacacgccgaaagacgggagaactaaccagcaacaagacggaagcgaccagacagaagaaccaaaacacaaccgcgacgaacagatacaaagagcagaagcaacagcactacaaggagcaaggcacagcagacaagccagacgaaaacaccaagcgaacaagcacgagacgcagacgaaagaacagaacaagccacagccaacgaatcgagaagaacaaaccaacacacgcagacccagcgagcgaaagcagaacgcacccaaagcagagcgacaacacccacagaccgaagag

SEQ ID NO: 613705 - DNA, 149 bp, Homo sapiens
caaggctggtctcgaactcctgggctcaagcactccgcccgtctcagcctcccaaaatgctgggattactggtgtgagccactatgcctaggtcctcttgcttaaaaaagttttgggcttcggtcatcaaacctaatttttgaaatgta

SEQ ID NO: 613706 - DNA, 642 bp, Homo sapiens
agcgagagaggcgcgcgggaggtcgtctagggaatcgaggtgccggctgctccttaccacacaatatacgagcagctgcaaggggagggtaaccatcatctagggacccagatggtgtaatggagctagacgggagattcagctcaatagacaatggcagcacagcacgcggcggaagtaccaagagggtagaggcaaccgcagacagccagagacacaagcaaactacggacagaacaggccagagagagagggaaggagcgaaagatgcgaaaacgaggaaccgtagcgagagcatcaggacacaccatacacagaccacaagacggcagacacgagggcccgagcgatatgcgcgaccagaccccgagcaacacgggcacacgaccaccgcaaacaacagaggcctcagaacgtgcaacaaaagtaagcacgataagacaccaggcgatgatccacaggatacaagaacgcgaccagcaccacaatgaaacaccagaaagcaaccagagcaaaagccaaacaacagagccatccaagccacacaaccgatatacacacacagaaggcgagactcacacgaagaaataacccaaagaaacgatgcgaggtagaagcacaccagcaccgcgcagcgacaac

SEQ ID NO: 613707 - DNA, 368 bp, Homo sapiens
gagcccctgggcccagctgattattttttttaaatggccccttatagttataggtgctcccccttttcagaattttttggtcctgttaggaaccaagaaatcatcccttgtggtttgccccccctaagaaggccatggctgggtaaagcctttgagttagagccctgtcctgatgtccttcagctaagtgggttgaagtaaaggaaaaaaattcccaaaagtccctttttgccccctgaagttttcctgaaattttagttccctttttttgggttgcatataggctggtttgggggcccccaactttatttctttccataacctgtttccctttaaaaccaaaccaaattaaaccattttccctttta

SEQ ID NO: 613708 - DNA, 459 bp, Homo sapiens
ggagacagggtctcactctatcacccaggcgggagtgcagtggtgtgatcatggctcactgcagccttggcctccgaggctcaagtgatcctcccacctcagcttcctgagtagttgggaacatggatacatgccactgagcctggctaattttttttttttctggtagagacagggtcctgctatgttgcccaagctggtctcgaactcctaggcacaagtgatccgtctgccttggcctccccaagtactgggattacaactgtaagccactgtgcccagcctcatctgttgttgttggtggtggtggtatttttgagacagggtctcgctctgttgcccaagctagagtgcagtgagctgagatcgtgccattgcactccaatctgggcgacagagcgagaatttatttaaaaaaaaaaaattaatgaaaactgataccttttcatggaaagcact

SEQ ID NO: 613709 - DNA, 617 bp, Homo sapiens
agcggggtgatccgccagcctcggctcccgaggtgccgggattgcagacggagtctcgttcactcagtgctcaatggtgcccaggctggagtgcagtggcgtgatcttggctcgctacaacctccacctcccagccgcctgccttggccccccaaagtgccgagattgcagcctctgcccagccgccaccccgtctgggaagtgaggagcgtctctgcctggccccccatcgtctgggatatgaggagcctctctgcctggctgcccagtctggaaagtgaggagcgtctctgcccggccgccatcccatctaggaagcgaggagcgcctcttccccgccgcatcccatctaggaagtgaggagcgtctctgcccggccgcccatcgtctgagatgtggggagcacctctgccccgccgccctgtctgggatgtgaggagcgcctctgctgggccgcaaccctgtctgggaggtgaggagcgtctctgcccggctccccgtctgagaagtgaggaaaccctctgcctggccaaccgccccgtctgacaagtgaggagccccttccgtccggcagcaccccgttgggaagtgaggagcgtctcagccggggcaccccg

SEQ ID NO: 613710 - DNA, 994 bp, Homo sapiens
gcgtatacgagttgcttcgggagcgagtcctcttgttatacgttatgtgtcctcccgtgtaaaatgccgcgcggaaagagtgggataacaccccagggggcccatttgctggaacccccgacggttccgcgttgttgaaccagagccacaaaggccgttttttggaggctgttccccacgggcacggggcctggattcttcaacttgggcacaagtgcccttcgagcagattctcacccttccagagctcaaggccaaccccttcaaggaccgaatcttcagggtcttctccacatccccagcccaagcaccccttagctttgaggacttcctggatctcctcagggtgttcagtgacacagccacgcccgacatcaagtccccttatgccttccgcatctttgaccttgatgatgacgggaccctggaccacgagaagagcctgagcccggctggtgaaactgcctcaccgggagaagggcgaggaacaccaccgggcttaagtgcgctctgaagatgaagcacgctcacatcgaacaaacgtgaggcacacctgaggcacggcctgggaacgggagggaagcacattggggctttggcccgaaaactttccctttcccacgagtcctcggaggaagtctgaacacttgaaccgggatggagaccactcaacctctttgagttccagcaacgtcatttcccgttttccagaactttgccagctcctttaagattgtcccgtgacacagcagccccacgcgtgtgtcctggcacaccctgtcccagaacctttttactgctgaagctgtggccaaaggtcaaagcctgtgttgccaagtgcgggccaaactggcccaagcctggagagctggcgctgtgcaagcctcaaccccgggcacaggggcggccctcgttgtcagggcctctcctcactgctgttgtcattgctccctttgtgtttgtactaatcagtaataaaggtttagaagtttga

SEQ ID NO: 613711 - DNA, 361 bp, Homo sapiens
ctcactccccgttggcacctggcgacagctggtcgctagaggactgaccaacaagttcgacgctttgaaagatgatgacatgtggggaccatgatcagaatgaagaaaacagctatcaacaagatggttcaagaagtccagacctgacatatacgactagaaaatgcccaaacccagactataggctaccagtgacgcctattccagtgaaaggcaacgggaaagtgggtcgccccacagcttctaaggcatcccaggaaaagactccttctcccatagaagaacatgaggaaccggatagcccgccagaaaagaatacatctactagccccccacccgagaaatctggggatgaagggtc

SEQ ID NO: 613712 - DNA, 172 bp, Homo sapiens
tagtataatgatgccagcagctaggacttggagagataggagaggtagcctgctgtgattaggaaagatcagacgaagaggggcgtttggtattgggttatggcagggggttttatattgataattgttgtgatgaaattgatgtgcccctcatagatagtagtgagtacac

SEQ ID NO: 613713 - DNA, 474 bp, Homo sapiens
tcgttaggccagagtgacggtatccacccactatcggggaactatcagaatatacacggaatatgctgaggaaggctgccagagctctgacgaactcctgcaggttcacgtcttgaacagtaactccaggcatcgctgcggcctccgtgctgccagccaggggacagggctgaattccctctaagtgggacagacgagctcaggatgtgcttcccagcttctctggattaatttgacctgaacctatatacagatcccttctgcccctgaagacctatccgcactcaacttctaacatgacgaactctactcgaatgcatcctttactttgcctgagctctattcgtgttgcatgtactaatgttgattccttcctcccaacatgtctccactgagcgcacccacagtctcccctagtcttcctctgtgggtgtgactaatgtgattataaccaacaaaacccttgactgttct

SEQ ID NO: 613714 - DNA, 410 bp, Homo sapiens
cccgtgatgtgtcacgtagaaaggagaagactgctctgagcacgactgaaactttgaaaaggaaggaataggttatcatcaggcagaaatttgattaaggcagttcaatgttgcgagcaacatgtacgacatacgctgagtcagagaaaatgttaactggctcaggaaaatcttcaagggacaggcataacagcaggcagttcagctcgttgtgctgaaatagcccctgtgttaagaacacgttctctgggtcctgtatatgctgctcggccatcagaggaagcatcagtgaaaacagtgacagcttcaggtaatggggtgtttctagtaatgttacgtaaagtccaagacgtgagtttaaggaactgaaataattttacatgaggatagtgattatcaattatacctgg

SEQ ID NO: 613715 - DNA, 527 bp, Homo sapiens
tatggagccagggatttgaaccgcgctgccaggaagttcggtgatccagctgccgagtagtcgcctgtattcgaatcgcgatgatcatcccctctctagagaggagctgggatccctcaagtacagtgagctgctgaacttagccaagagtctgggtctccgggcaacctgagggcaaccaagtgtggtgaacagccttgatcggctacattaaacatgaggccaaggaaagggaaatgagaatcaggatgacgggtcaaacttctgcatcctcttgtgatgagactgagataccagatcagcaaccaggaagaagctgagagacagacacttgggccatgtcagcaaaaccaggagaaggtgcaagactgtccgtggtggaccctgactcacagcagaatcattcagagataaaaataagtaatccccactgaaattccagaatcatgacagcaggaaagccaggatctcaagagctactgcaaaaagttccttctccaccagaggagcacaaagaagctgagaat

SEQ ID NO: 613716 - DNA, 649 bp, Homo sapiens
  misc_feature (12)..(12): n is a, c, g, or t
ggttctctcttnccggacctggtccgagcaggaggcgccatcatgggagtggacatccgccataacaaggaccgaaaggttcggcgcaaggagcccaagagccaggatatctacctgaggctgttggtcaagttatacaggtttctggccagaagaaccaactccacattcaaccaggttgtgttgaagaggttgtttatgagtcgcaccaaccggccgcctctgtccctttcccggatgatccggaagatgaagcttcctggccgggaaaacaagacggccgtggttgtggggaccataactgatgatgtgcgggttcaggaggtacccaaactgaaggtatgtgcactgcgcgtgaccagccgggcccgcagccgcatcctcagggcagggggcaagatcctcactttcgaccagctggccctggactcccctaagggctgtggcactgtcctgctctccggtcctcgcaagggccgagaggtgtaccggcatttcggcaaggccccaggaaccccgcacagccacaccaaaccctacgtccgctccaagggccggaagttcgagcgtgccagaggccgacgggccagccgaggctacaaaaactaaccctggatcctactctcttattaaaaagatttttgctgac

SEQ ID NO: 613717 - DNA, 803 bp, Homo sapiens
gtgcccggaggtaacggcacttggactccaggcggacttgaagccaggtgttgttccctgagccttcgattcctggctcttttgggacaccccaacctggcggcggccaggctcagacgcatccctggagactccctggacctagatcccgcagatctgcccgaccccccaggccgaccgagcaggaggcgccatcatgggagtggacatccgccataacaaggaccgaaaggttcggcgcaaggagcccaagagccaggatatctacctgaggctgttggtcaagttatacaggtttctggccagaagaaccaactccacattcaaccaggttgtgttgaagaggttgtttatgagtcgcaccaaccggccgcctctgtccctttcccggatgatccggaagatgaagcttcctggccgggaaaacaagacggccgtggttgtggggaccataactgatgatgtgcgggttcaggaggtacccaaactgaaggtatgtgcactgcgcgtgaccagccgggcccgcagccgcatcctcagggcagggggcaagatcctcactttcgaccagctggccctggactcccctaagggctgtggcactgtcctgctctccggtcctcgcaagggccgagaggtgtaccggcatttcggcaaggccccaggaaccccgcacagccacaccaaaccctacgtccgctccaagggccggaagttcgagcgtgccagaggccgacgggccagccgaggctacaaaaactaaccctggatcctactctcttattaaaaagatttttgctgac

SEQ ID NO: 613718 - DNA, 901 bp, Homo sapiens
  misc_feature (68)..(68): n is a, c, g, or t
  misc_feature (320)..(320): n is a, c, g, or t
  misc_feature (347)..(348): n is a, c, g, or t
  misc_feature (374)..(374): n is a, c, g, or t
  misc_feature (418)..(418): n is a, c, g, or t
  misc_feature (433)..(433): n is a, c, g, or t
  misc_feature (435)..(435): n is a, c, g, or t
  misc_feature (438)..(438): n is a, c, g, or t
  misc_feature (447)..(448): n is a, c, g, or t
  misc_feature (463)..(463): n is a, c, g, or t
  misc_feature (488)..(488): n is a, c, g, or t
  misc_feature (531)..(531): n is a, c, g, or t
  misc_feature (538)..(538): n is a, c, g, or t
  misc_feature (543)..(543): n is a, c, g, or t
  misc_feature (569)..(569): n is a, c, g, or t
  misc_feature (600)..(600): n is a, c, g, or t
  misc_feature (603)..(603): n is a, c, g, or t
  misc_feature (607)..(607): n is a, c, g, or t
  misc_feature (610)..(610): n is a, c, g, or t
  misc_feature (613)..(613): n is a, c, g, or t
  misc_feature (683)..(683): n is a, c, g, or t
  misc_feature (701)..(702): n is a, c, g, or t
agcggacagtgcaggcgcccaagccgccgccgccagatcggtgccgattcctgccctgccccgaccgncagcagctgaccatgtcccatcactgggggtatcggcaatagacaacggatcctgcagcactggcagtaaggacttccccattgccaagggagagcgccagatcccctgttgacagtcgacactcatacagccaagtatgacccttccctgaagcccctgtctgtttcctatgatcaagcaacttccctgaggatcctcaagcaattggtcagtgctttcaagcgtggagtctgatgactctcaggacaacngcagtgctcaagggatggacccctggnntggcacttacagattgattcacgttncactttcactggggttcacttgcatggcacaaggttcagagcantactgtggtatacancngantatatgctnncagaacttcacttgnttcactggaacaccaaatatgggcnattttgggacagctgtgcatcaacctgatggactgtgccgctnctaggtnatcancgtgaaggttggcagcgctaaaccgngccttcagaaagtcgtcgatgtgctggtatnccntttncgnacnagggcaagagtgctgacttcactaacttcgatcctcgtggcctccttcctgaatccttggattactgganctacccaggctcactganncaccctcctcttctggaatgtgtgacctggattgtgctcaaggaacccatcagcgtccagcagcgaagcaggtgttgaaattccgtaaacttaacttcaatggggagggtgaacccgaagaactgattggtggaccactgggcgccaggtccagacactgaagaacaggcaatccaaggtttccttcaatagatggtcc

SEQ ID NO: 613719 - DNA, 126 bp, Homo sapiens
cagacaaacagtgcctcctgagtaatttgtgactataggcacattctaccatgcctggctaatttttaaattctttggtagggggtcttgctatgttactcagtgttggtctcaaacctctttggg

SEQ ID NO: 613720 - DNA, 921 bp, Homo sapiens
ggtgcgtctgtccgggccattgttgtgtgttgtctgattatagttcaccaatccttgtcacttggtcgcgcttcgtgtgtgtatacttgcactgtattccctgggccccatttggatgttttcacgttcagctaaacgtcctctggcgactgtattctcgcccggaggcctaatgccctgggccatgcccccggacccttcgttcccggatcccttctcccaccttccggggccaacatcatctgtctctttacgcggtccggcgtctgaaacacaactatgacacgcgacttctggaacaaggaggcgccatcatgggagtggacatccgccataacaaggaccgaaaggttcggcgcaaggagcccaagagccaggatatctacctgaggctgttggtcaagttatacaggtttctggccagaagaaccaactccacattcaaccaggttgtgttgaagaggttgtttatgagtcgcaccaaccggccgcctctgtccctttcccggatgatccggaagatgaagcttcctggccgggaaaacaagacggccgtggttgtggggaccataactgatgatgtgcgggttcaggaggtacccaaactgaaggtatgtgcactgcgcgtgaccagccgggcccgcagccgcatcctcagggcagggggcaagatcctcactttcgaccagctggccctggactcccctaagggctgtggcactgtcctgctctccggtcctcgcaagggccgagaggtgtaccggcatttcggcaaggccccaggaaccccgcacagccacaccaaaccctacgtccgctccaagggccggaagttcgagcgtgccagaggccgacgggccagccgaggctacaaaaactaaccctggatcctactctcttattaaaaagatttttgctgac

SEQ ID NO: 613721 - DNA, 103 bp, Homo sapiens
aaattcgcggccgcgtcgactaggtgcgagaagacgacagaagggcgaggctacaaaaactaaccctggatcctactctcttattaaaaagatttttgctgac

SEQ ID NO: 613722 - DNA, 561 bp, Homo sapiens
tgctttacataagcacagctgatttactcgtatagagaggatcataatataaccggtacatatttctcttgttttatgtaagtggatgtatatcctcattgtgtcatacgagaccagttcccgacttaagtgaggcgtactaatatctaggttgcgcgggctctaatattgttgtcatggtcaattgaggcccatttattacattattatttctcgtccacaagagatgcattgtgacggttcaccgtttgctgcacgtgaatttggggtgatgagacatagatgacgccataggtgtcgtttacgaagacacgccttcagtgagatcgaagctgtcctgagatttatggagagcgaaagcacggtatctacctgcttttccaagaacacaagtgctgcataaacccaagtgaagaagaatacattgactttgctttgcaagacaactaaacacagagtatatggctagtgctaaaggtcgtcctgcttattgtgggtgtgaacaattgtaatcgggcaagagtatggtcatcattggtgatacacagcacctgaaaacgg

SEQ ID NO: 613723 - DNA, 722 bp, Homo sapiens
gcgggatcgtcgagtcgctacggtgacccgttatggtgcctccctccgatgaagaacactggtagagttacagagattcgaaagtacagcccaggcaacgccagaagtatcattcattgtcgtactgtttcgtgtgggtcaaagatcatagcattgattatacgagcgacgctagtgaaggcatcttgcgccacctgtggttccctgtcgtgatgacgatgtctggtgttgcctttggacgtacacgtaccacttccggtctgttacgggcggaatgtactcggcatcgaataagaactgtaacggagttggaagaagaccaggtaggagcgcgtcgcgtctgatgtcgtgtatgccatacatcactggatctatgggtaaacatggagttaatctctatgctgaaggtatgtgcactgcgcgtgaccagccgggcccgcagccgcatcctcagggcagggggcaagatcctcactttcgaccagctggccctggactcccctaagggctgtggcactgtcctgctctccggtcctcgcaagggccgagaggtgtaccggcatttcggcaaggccccaggaaccccgcacagccacaccaaaccctacgtccgctccaagggccggaagtccgaagtcgcttttcccaaagggcgacgggccagcgaggctacaaaaactaaccctggatcctactctcttattaaaaagatttttgctgac

SEQ ID NO: 613724 - DNA, 290 bp, Homo sapiens
ctcatcctacctatacgtcttgtgatgtccaatcgtaccgtggcatagtatagtgctcgtcactagatgactcgtcagcgcgggatctcgagcgatctcatcgacagctgctgactcctaggctgtgacgttcgtctctcgtctgaggcgggtgtcgcattcgcagccagaccgacgcacacaacctacgtcgctcaaggagttcgagcgtgccagaggccgacgggccagccgaggctacaaaaactaaccctggatcctactctcttattaaaaagatttttgctgac

SEQ ID NO: 613725 - DNA, 703 bp, Homo sapiens
  misc_feature (12)..(12): n is a, c, g, or t
ggttctctcttnccggacctggtccgagcaggaggcgccatcatgggagtggacatccgccataacaaggaccgaaaggttcggcgcaaggagcccaagagccaggatatctacctgaggctgttggtcaagttatacaggtttctggccagaagaaccaactccacattcaaccaggttgtgttgaagaggttgtttatgagtcgcaccaaccggccgcctctgtccctttcccggatgatccggaagatgaagcttcctggccgggaaaacaagacggccgtggttgtggggaccataactgatgatgtgcgggttcaggaggtacccaaactgaaggtatgtgcactgcgcgtgaccagccgggcccgcagccgcatcctcagggcagggggcaagatcctcactttcgaccagctggccctggactcccctaagggctgtggcactgtcctgctctccggtcctcgcaagggccgagaggtgtaccggcatttcggcaaggccccaggaaccccgcacagccacaccaaaccctacgtccgctccaagggccggaagttcgagcgtgccagaggccgacgggccagccgaggctacaaaaactaaccctggatcctactctcttattaaaaagatttttgctgacaaaaaaaaagagaagtcggtatgcaggcgagaaagaggagaaaaaaaagaaaaa

SEQ ID NO: 613726 - DNA, 993 bp, Homo sapiens
  misc_feature (12)..(12): n is a, c, g, or t
ggttctctcttnccggacctggtccgagcaggaggcgccatcatgggagtggacatccgccataacaaggaccgaaaggttcggcgcaaggagcccaagagccaggatatctacctgaggctgttggtcaagttatacaggtttctggccagaagaaccaactccacattcaaccaggttgtgttgaagaggttgtttatgagtcgcaccaaccggccgcctctgtccctttcccggatgatccggaagatgaagcttcctggccgggaaaacaagacggccgtggttgtggggaccataactgatgatgtgcgggttcaggaggtacccaaactgaaggtatgtgcactgcgcgtgaccagccgggcccgcagccgcatcctcagggcagggggcaagatcctcactttcgaccagctggccctggactcccctaagggctgtggcactgtcctgctctccggtcctcgcaagggccgagaggtgtaccggcatttcggcaaggccccaggaaccccgcacagccacaccaaaccctacgtccgctccaagggccggaagttcgagcgtgccagaggccgacgggccagccgaggctacaaaaactaaccctggatcctactctcttattaaaaagatttttgctgaccaaaaaaaaaaaaaaaaaaaaaaaaaaaaatttgtgggcggccgggccggaaaagtttaaaacctctcggtggggccgggcggcggcgcccaggatgggtacggtgagaacctggccaaataaggtgctccaaaggagaaaccgtggcgcatgagactaagggctgtggttttctccaccaaataaaaaacggcgcgcggggggacaccgggagctggttttagaaccaaacctcaaaaaggaggcgtccaggacgcacaaaacgggtcctcttacacacacaggagggccacaaggggggacgccgagatattaaaatttaccgcgcgcgcgtggggaaaaat

SEQ ID NO: 613727 - DNA, 575 bp, Homo sapiens
  misc_feature (12)..(12): n is a, c, g, or t
ggttctctcttnccggacctggtccgagcaggaggcgccatcatgggagtggacatccgccataacaaggaccgaaaggttcggcgcaaggagcccaagagccaggatatctacctgaggctgttggtcaagttatacaggtttctggccagaagaaccaactccacattcaaccaggttgtgttgaagaggttgtttatgagtcgcaccaaccggccgcctctgtccctttcccggatgatccggaagatgaagcttcctgaaggtatgtgcactgcgcgtgaccagccgggcccgcagccgcatcctcagggcagggggcaagatcctcactttcgaccagctggccctggactcccctaagggctgtggcactgtcctgctctccggtcctcgcaagggccgagaggtgtaccggcatttcggcaaggccccaggaaccccgcacagccacaccaaaccctacgtccgctccaagggccggaagttcgagcgtgccagaggccgacgggccagccgaggctacaaaaactaaccctggatcctactctcttattaaaaagatttttgctgac

SEQ ID NO: 613728 - DNA, 634 bp, Homo sapiens
  misc_feature (12)..(12): n is a, c, g, or t
ggttctctcttnccggacctggtccgagcaggaggcgccatcatgggagtggacatccgccataacaaggaccgaaaggttcggcgcaaggagcccaagagccaggatatctacctgaggctgttggtcaagttatacaggtttctggccagaagaaccaactccacattcaaccaggttgtgttgaagaggttgtttatgagtcgcaccaaccggccgcctctgtccctttcccggatgatccggaagatgaagcttcctggccgggaaaacaagacggccgtggttgtggggaccataactgatgatgtgcgggttcaggaggtacccaaactgaaggtatgtgcactgcgcgtgaccagccgggcccgcagccgcatcctcagggcagggggcaagatcctcactttcgaccagctggccctggactcccctaagggctgtggcactgtcctgctctccggtcctcgcaagggccgagagttacgattcgcagccagtacgcattcggcaagcccaggaacccgcacagcacacaactagctcgtcaggcgagtgcagctgcaggacagcagcgcagtacaaactactgatctatctctataagttgtcgaacaaaaagtgcaggcgcgat

SEQ ID NO: 613729 - DNA, 295 bp, Homo sapiens
atcgctggtgctgctgtaatgggggctgaagagtctgaggcaaagcattagaggttgccctgtagatccaaaattaggcaaggaaagctgggatgctggtaaaggtactgtaacctgctggtaaatcactctggtgactgagcacgtgttataaaaatctgtctgatcaggctgttgtacttctccataatatagatttgaggcctgggtaagatttgctctggtctgatataactatggtgtgtgcaatcagctgtgtaatcctctctagttcctgatgcctgtccccacttga

SEQ ID NO: 613730 - DNA, 230 bp, Homo sapiens
gtggctcacaccctgtaatccccagcaaactttaggggaggcagagaaagggcagatcacgaggcccaggagttcgagaccagccctggccaacatggtggaaccccatcctctactaaaaatacaaaaactagcctggccatggttgtggcacacctgtagtcccaggcctacttcagaaggctgaggccaggagaatcacttgaaaccctggaggtgaaggttgcagt

SEQ ID NO: 613731 - DNA, 284 bp, Homo sapiens
ggtcgacgattaattggatgttacgtgaacttcgtgttattaaaaaaatgaagtccatcccagcactttgggaggccgaggcaggtggatcacttgaggtcaggagttcgagaccagcctaaccaagatggagtctcgctctgtctcccaggctggagtgcagtggtgcgatctctgctcactgcaacgtctgcctcccgggtccaagcaattctccggcttcagccccctgagtagctgggattacaggtgtggtcgacgcggccgcgaatttagtagtagta

SEQ ID NO: 613732 - DNA, 1347 bp, Homo sapiens
  misc_feature (505)..(505): n is a, c, g, or t
tatactacacacacttatttacgatatcatacacacaggggagacacacatacgagatacgagacgactcggcggtggacacagcgggacacacgcagacgtgtgtgtgggagacagagacacgtgtggggtggcgttttgagagtactgtgttctcacaacacagcgtggctcacatatacactatataatcacgcgttgtgttcacagcacatactgttgtgagcacgactacggtgtgtgacctgaagagcggtgtggcacgcacacacacttacacgtgcgcgtaatacgagtacacagcacacgcactacgcacgcgtgtaccacagcgagcagcggtgagtagcacgtgagagagagacactaccgagacacgagaggtgtggagagcaccgtagcacatagcgacggcgcccacaacgatgtgtggtttacacgcgagagaagcaacacatacccatcgcgcaccaaacaacgagtggcctccccaccatgtagcganggggcacacacaccacaacgcccgcgggaaaaacacgacgccagggagcgccgccacgggatccaccccctcacaacggggacacgacacgcgcacgccgtgggagcgcacgtgcggcacaccataaacaacgatgagtagtgtataaaaccgcaaccagtgtattaacaccgcccatagtgaagaataccaccagcagagggtagcagcaccaacaaccaccaataccgtcgataccactctcgccgacgatgcccacccgcagacggagacggacgacgcggcagggagaaacgagtctaaacccaccaccaggagagaagaacacaacacaaacagaacaacagcagcaaccacgatcgagcagcccgtaaacccaacacaacagcaatacaacagcaggcgaccaaccacaccgccaccctaacaccaacaccgacacgcgagaaaaccaaaacaaaacataacaacacacaaccagcaaagtggagccaccatctctacgtcggcctcaaccaagaggcagccatagtagacaccaccgcggagtcaacaagaccacccggcgtggcacaacaaatcacaaataacccccactaccaccaaaacaaaagacgaaagtgcacagacaaccacacacagaaggccacagacgccaagaaacacagatggactaccccccacaccccactagacatcacgagcgaagcaaacacacccagacgaggcgccacacggagcggggacacataacccaacaccccacacccccccaccccccaccacacggtacgctccccccggccaaccaaccagccaacggcggccacacccccactccg

SEQ ID NO: 613733 - DNA, 117 bp, Homo sapiens
gttcatgggcaacgcagggctgggctgaattaaaggaatcggtgggctagttaactgcagcaggagcatgtctttaaggcacagatcgctcatgctattgaaacttctaaaactagg

SEQ ID NO: 613734 - DNA, 84 bp, Homo sapiens
acatctgtgtacttctgtgccagcagccagcactcgggggggccagttgagcagttcttcgggccagggacgctcacgcgtcta

SEQ ID NO: 613735 - DNA, 1655 bp, Homo sapiens
  misc_feature (1405)..(1405): n is a, c, g, or t
  misc_feature (1600)..(1600): n is a, c, g, or t
  misc_feature (1603)..(1603): n is a, c, g, or t
ggacttgtatttaaaaaaaaaaaaaaaaaagctgggacttggttggcagctttcataccccaagcagattgactggataaaaccgtgggagataaggataagacaaaatgtggcaacacaatttttaatctcttaaaaatttcctgtgtgtcaccacaagaagggcattcagctgtgcctccatttggcaagcgaaaacggtgggcgctactggggcactgtgtggccagtgttgttccaattgcacaattataatgtgacagagagttatatattttaacaatatattattcgggcgtctttaaacacaatttttaacacaacaacttttgtgcacaatctataaaggctataacatttatacaattttttacacccgcctatatttttctacacaccatttattgtgtatcataacaccaaacacacgcacacatgtgcgccaccgtgtgtctaacaacaccccgggaaacggtggtctacaatataataccgcgttcacaaattaaagggtgtgccaatatatattatcataggcgctcctccggcacacaatacgacagacagggcgcccatttctacacaaccacacgcagacactgtgtcgcgacagatctcccattatttatcaagccgccaaacgtggcgatcttacaacacactcttcaattttcgcgaccctttttggttgtgtcttaccccagcaagaatttctccacaggctcttggggctatgagcacagcagcagtggtataattatcccccacagtcttatatctccatggggtgtggttacatcatccccaagcaatttgtaggggcgctataccaccgtagaggtcgaaaacgggcgttatcacaaaacccccaaactgtcggcgccacctcatctgggggtccacattaatccaatttcactacccaacaaggggcggcgcaacaccactcgacccgcaattataatttatattacaccctattcacacgccccacctaatcgttcacctgattcaacactttcctccgttgtcacacattttataccacgcggcggccaacaccagcgtgtggtctatcaccctcgtaaagcaaactgttgtttgggtggtgccccacccgacaggatcaacaaagcaaccagaaggcctcgaaagaaagaaggctcccaaagtcgggcaaacacatgtggctcgttgacacaaaacatcctcgtcataaaaactcgatgggggccatgtccaccaaactaaaaggccggagccatttctacccacgtgtgcaacagcagctatcttccagaccgacgtgctgctatttcatgccacaccaacacgactttgtggctgtgtgtcgcgagccagccggcaacgactatcacttatcaatacaccgcagcggcgacgnggcgctctcacgacatacacgctactcatcagaaaggcaagacccattctctcgatcacactaagacagggccagcctgtaggaggaacacactctcattcgtctccccaacatgtctccatccgctgttcagggtccggcagacagacttctttgaagacagaccctcctcagctctatcttcgacacgcacgnggncgtgcacactccaccttgactaaacaggaagagcgcacgtgtgtgctggtca

SEQ ID NO: 613736 - DNA, 162 bp, Homo sapiens
aggggggtctttaagggtttttttttggggaaaaggttcccaggggtttaatttttcccccccttgggggggtaaacaagggtttttttccccgggggggcccctttttttcccttaaattgggttttttttcccccccaaaaaatttggggggttgcccca

SEQ ID NO: 613737 - DNA, 287 bp, Homo sapiens
  misc_feature (111)..(111): n is a, c, g, or t
  misc_feature (131)..(131): n is a, c, g, or t
  misc_feature (273)..(273): n is a, c, g, or t
ggcggatctcaaattcctaggctcatgctatcttcctgcctctgcctccctaagtgctggtttataggtgtgagccaccacacctggcctgcaactctatttttaattttnattttaattaattatttttntttgagatggagtcttgctctgtcacccgagatcgtgccactgcacttccagcctgagcgacagagccagactccgtcttcaaaaaagaaagagtttttgctttcaggggatcttcatagggctaatcataattgatagggncataattaggatat

SEQ ID NO: 613738 - DNA, 392 bp, Homo sapiens
  misc_feature (156)..(156): n is a, c, g, or t
  misc_feature (161)..(161): n is a, c, g, or t
  misc_feature (246)..(247): n is a, c, g, or t
gctctctctgtggggctagtcgcgcccacctggactccgttagcctgtcctgctacagatcgagctgctcgcctcacacctgggaagcgagcggtggtaatggtgcgtcgtggctcggtccccgctcgtgccaggacctgaacgcgccttctgatnggganagccgtgggaaggacagttatgaaacgagtcagctggatgaccagagtgctgaaacccacagccacaagcagtccagattatatnngcggaaagccaatgatgagagcaatgagcattccgatgtgattgatagtcaggaactttccaaagtcagccgtgaattccacagccatgaatttcacagccatgaagatatgctggttgtagaccccaccccacagagagagcgt

SEQ ID NO: 613739 - DNA, 172 bp, Homo sapiens
tctctgttgtacggttcccccaatcaaatcctcattttcccatccagcatttttcccatggggttcaagcagcctcatgccacagcaaccagttcaagcacagtcagtggttgctcctcaccccattccagtggcctgagccagtgggcagctgcagcacagtcttccgtgg

SEQ ID NO: 613740 - DNA, 356 bp, Homo sapiens
  misc_feature (121)..(122): n is a, c, g, or t
cagtatttggaggtggggctaatgggaggtatttaggtcataagggtccactctcagaatggatcaatgacaaaataaaaagagctcgacctctcaggctcaaacagtcctcttgcctcannctcctgagtagctgggaccacaggcacacaccacaacacccagctaatattttaaatgttttgtagagacgaggtctcactatgtttcccaggctggtctcgaactcctgagctcaagtaatcttcccgcctcggcctcccaaaggctgggattacaggtgtgagccatcgcacctgtcctgggttttgtttttttttttctagatttttcagtgagagatactttcttccttg

SEQ ID NO: 613741 - DNA, 181 bp, Homo sapiens
actacttacacagggaaaggcatgtgaagacacagcaagaggtctgcaagacaaggagagtagacatactagtaactaaccctgtaagcatattcatctatggacttccagcctccagaactgtgagaaaataaatttctgttcagccacccataagtccatggtactctgtaatgacagg

SEQ ID NO: 613742 - DNA, 974 bp, Homo sapiens
  misc_feature (32)..(32): n is a, c, g, or t
  misc_feature (62)..(62): n is a, c, g, or t
  misc_feature (67)..(67): n is a, c, g, or t
  misc_feature (72)..(72): n is a, c, g, or t
  misc_feature (76)..(76): n is a, c, g, or t
  misc_feature (93)..(93): n is a, c, g, or t
  misc_feature (97)..(97): n is a, c, g, or t
  misc_feature (122)..(122): n is a, c, g, or t
  misc_feature (131)..(131): n is a, c, g, or t
  misc_feature (138)..(138): n is a, c, g, or t
  misc_feature (147)..(147): n is a, c, g, or t
  misc_feature (149)..(150): n is a, c, g, or t
  misc_feature (159)..(159): n is a, c, g, or t
  misc_feature (174)..(174): n is a, c, g, or t
  misc_feature (227)..(227): n is a, c, g, or t
  misc_feature (278)..(278): n is a, c, g, or t
  misc_feature (289)..(289): n is a, c, g, or t
  misc_feature (314)..(314): n is a, c, g, or t
  misc_feature (316)..(316): n is a, c, g, or t
  misc_feature (329)..(329): n is a, c, g, or t
  misc_feature (363)..(363): n is a, c, g, or t
  misc_feature (365)..(365): n is a, c, g, or t
  misc_feature (367)..(367): n is a, c, g, or t
  misc_feature (370)..(370): n is a, c, g, or t
  misc_feature (375)..(375): n is a, c, g, or t
  misc_feature (391)..(391): n is a, c, g, or t
  misc_feature (419)..(419): n is a, c, g, or t
  misc_feature (437)..(437): n is a, c, g, or t
  misc_feature (463)..(463): n is a, c, g, or t
  misc_feature (504)..(504): n is a, c, g, or t
  misc_feature (508)..(508): n is a, c, g, or t
  misc_feature (512)..(512): n is a, c, g, or t
  misc_feature (515)..(515): n is a, c, g, or t
  misc_feature (531)..(531): n is a, c, g, or t
  misc_feature (535)..(535): n is a, c, g, or t
  misc_feature (537)..(537): n is a, c, g, or t
  misc_feature (610)..(610): n is a, c, g, or t
  misc_feature (617)..(617): n is a, c, g, or t
  misc_feature (737)..(737): n is a, c, g, or t
  misc_feature (770)..(770): n is a, c, g, or t
  misc_feature (772)..(772): n is a, c, g, or t
  misc_feature (844)..(844): n is a, c, g, or t
tcccctgacagggcgatacccacaaacactanactacaaactagcatctagacctgtgttgnccaanacacnaagnacatatatggctagtgnaatnaaaaaattggattttaaagtttcantcaatttanacttaanccgaagcantnnaaaatgttnaaatatatatatatnccttgtgggggtttttattagggcagaatggaaaatgggaactagagtgcttncttggttctgataggaaagtgaattatttatatacttacaatacaggatgntgattttcagntatagttcctgaattttatggtaananttttgtagtcatntcaatagctgtctttcccaaaggcactttagtgncngntcntattnccttaatcattgttcncactgtatcatcttgtaatttattcatntcttgtaatctgcccatncccttttaataagtttaggtcagccnctcagaaccatttctttttcatgggatggggtagggggagntaangctngcntgcccacaactgagtnactnanaaaaaaaaaagcaactctggttgagaaatcagatgcatgagattgtatgtctaattctgcaagaccctgaagncatggcncttaaaggatgccatcatgtagtttagaagccactaatttccgaggagtaatctaatgttggttagatctttggattgactgcagcaaagtattggtagagcagtctatctcagtataantctttctaggaaaatttgggaagcgactttaananaaaaacgaggcagatttacttatttgccattttctatgttaacatgcttaattatgttggaaactgaatctntctttccagtaccacttccgctgtcacggtaaagtccgccatcagaagactgaaggagttgaaagaccagtagacgctcctctactctttgagacatcactggcctataataaatgggttaatttatgta

SEQ ID NO: 613743 - DNA, 366 bp, Homo sapiens
  misc_feature (32)..(32): n is a, c, g, or t
  misc_feature (35)..(35): n is a, c, g, or t
acacgcgttgtcggtgtgtctgggctcggacntangtcgcggcgacatggccaaacgtaccaagaaagtcgggatcgtcggtaaatacgggacccgctatggggggtgaagaaaattgaaatcagccagcacgccaagtacacttgctctttctgtggcaaaaccaagatgaagagacgagctgtggggatctggcactgtggttcctgcatgaagacagtggctggcggtgcctggacgtacaataccacttccgctgtcacggtaaagtccgccatcagaagactgaaggagttgaaagaccagtagacgctcctctactctttgagacatcactggcctataataaatgggttaatttatgta

SEQ ID NO: 613744 - DNA, 249 bp, Homo sapiens
tggtaccaatttcacctaaccatgtttaatcatcagtaccctgtaaactgaactgtcctttttttcttttttcaagtcatcagggttcttcgagtaaacgactctggccatgttaagcagcctctgctttatgataatacataaacataatacaaaactaaaacaaaaacaaaaccaccattactatatcctaggctgtcaaacctgatgttttctgttgccaggagaaggttgtttttgctgtgtatg

SEQ ID NO: 613745 - DNA, 814 bp, Homo sapiens
gtggagtgacggtcatgctgcggcgtggacacttggcatgcagggacgtggccatagaattccctcaggaggagtggaaatgtctggaccctgctcacaggactttatgcagggaagctgatggtggagaactacaaggaacctggtctttcctgggaatctgtattcctgacctgtagtgttatctccatgtctgcgagactgaaggagagatccccggatatctgcgagaggtgaagtgtacaaattgagctaaacaatccaggtggctagggagctgcgatcaaaggtgtgagacgcagagtcatcggtctgtacaccacaggcttggacgtgacaatgacccgcgaatctccggattcaattggcaatcgcttcgctgtcctggattcaagcaacttcttctgacattcggactccccaaagtgctagagattacagggctgtgagccgtccgtggcctggcgctcaacttctgtctaacttttatgtggtaagaggacagggtttcaggtctgctgtccaggctaaatggcagctggtgcagttgacggtcgctgcatccttgaacttggaggggcagagagctgctcttcccagactcaggtgaatccaacccgacttcaggactacccaagagtttctgggaattcacaggacatgagttcagtgtacccgggtctgatatttctaataatgcttcacggcacattgagtttctagaaatccactaaaagcggcaacctaatacaatggaaattacccgaattgagatcgtcgcgatacgcaaaataattggactaggagaaagcaa

SEQ ID NO: 613746 - DNA, 613 bp, Homo sapiens
  misc_feature (32)..(32): n is a, c, g, or t
  misc_feature (35)..(35): n is a, c, g, or t
acacgcgttgtcggtgtgtctgggctcggacntangtcgcggcgacatggccaaacgtaccaagaaagtcgggatcgtcggtaaatacgggacccgctatggggcctccctccggaaaatggtgaagaaaattgaaatcagccagcacgccaagtacacttgctctttctgtggcaaaaccaagatgaagagacgagctgtggggatctggcactgtggttcctgcatgaagacagtggctggcggtgcctggacgtacaagtaacctaagcaagaccctaatggaaccgaaagtgcgacgctgatggaatctaagtgctctagaccaatggaacggcgactggaaataacagtggatagtcacatggctatggatcctaagtcagattgatgccctggaaagatcatcccatggcaagatctcatgttagattacacttcctgttcatcatcctcattgcaagatccaagatcatgcctcattaccttcatgccgtgtaaaacctgccccatgcccccagctcctaggagacagatttgagccaggctcctgtctttctctggcagccgttgcgatgaacttcttctttctactaaaaaaaaaaatataata

SEQ ID NO: 613747 - DNA, 271 bp, Homo sapiens
  misc_feature (32)..(32): n is a, c, g, or t
  misc_feature (35)..(35): n is a, c, g, or t
  misc_feature (239)..(240): n is a, c, g, or t
acacgcgttgtcggtgtgtctgggctcggacntangtcgcggcgacatggccaaacgtaccaagaaagtcgggatcgtcggtaaatacgggacccgctatggggcctccctccggaaaatggtgaagaaaattgaaatcagccagcacgccaagtacacttgctctttctgtggcaaaaccaagatgaagagacgagctgtggggatctggcactgtcttcatgcaggaaccacagtgnnagatccccacagctcgtctctttcatcttgg

SEQ ID NO: 613748 - DNA, 732 bp, Homo sapiens
  misc_feature (449)..(449): n is a, c, g, or t
  misc_feature (464)..(464): n is a, c, g, or t
cagaagatggcagtctgctccataaccagagcaagtgcagtgggaaagctggactctcatacccactcacattcatgccttatataagcctctcctcctggttaaccttaacaggggagtgattcctctgctggttgctggttttccttttctcttaccctattccttctttttttttttaacatatagggtatttttttcttttaacatatagggtatttaccttcattttgtttatttccatttgtttccttcttcattcatgttcatctctgctattccttctccctccagaagggatggaaaccctattttcttttctccaagaccatggctggactgcttccctcactcggactgcttgacagtcttctagcagtgagtaggaggaacagaagctgttcctgatgttacaaatgaacaaggatctcccaggtaacccagctccncacacccaattttgntactaatttctcaaacagaaatttctggttacccttctttcttatcactgagtgaaagggacaggcatgcacattgtgccatacatgccatcagaatagagtgtgggggcaggggcggcaggtcaattctgttattccaagacttttgggagctgaagtaaggggatcatttgtgggtcaggagatcaagactaagcctgtgcaacataattggcctgtctttactttacacgtgggccgggaattcactttaacgggagaccggttg

SEQ ID NO: 613749 - DNA, 142 bp, Homo sapiens
tcccttaaaaattattcattaaaatcaaaaaggcccacaaccttttaaactttcccccccccctaaatttttttaaaagaaaaaccttttttttttattccccccaaacccggccaaaacctttttcaaaactttgaaaaaa

SEQ ID NO: 613750 - DNA, 179 bp, Homo sapiens
gatccaaagaattcgaccaagcagggctctcggcagaacccgcaacgcgaacccccgcccaacgcaaggttgttaacttccccgctaaagccgcaagtgaattaaggaggggttcttcggggtccgcaaccgcactcctaaaaccctaatttctaaaaacctttataaacatcgccaaa

SEQ ID NO: 613751 - DNA, 351 bp, Homo sapiens
  misc_feature (3)..(3): n is a, c, g, or t
  misc_feature (8)..(8): n is a, c, g, or t
aanaccanaagccaatacacctgtggtattaaaattaaaaagaatcccaattatgtttaccctcaaaagaacctgtttttgccttcttgggagcaatattgcccctgtgagactgcatgcctataaggtaaggttgtgcttgttaaagacccaagacatgactgggttccacagtctccaaaggaagagggtgggctagtctgtttttattattattttaaaattgtataattggggtctttcttagagttcagaaaaggtatagcttactcttttttaattgtttatttagttgtaagcttggtgattgttttctgatccacattgtgtgtgttcttcaataaaatcttt

SEQ ID NO: 613752 - DNA, 843 bp, Homo sapiens
aatgtgtaggagccggagcaggagaccaggagacccacggacacgcggagatagcgccataccattcccagcgccacagtcatgcatgacatcctggttaccccgacatcgtccccacccggtgttagcaggcaagcaggatagtcaacaggtatcatgtcatgaccagatacaccaccatcaacaggtactcccatccgtcccggcgaaggcaccgctttcgttcaggtgggtctccagtatctgtcctagggtactgcaagcaagcaagcatgcaagcatgcaggcagtcatgcaatacagtgaacctggcaggcagcaagggcaaacagtccccaccatcgatccccactaggaccaagttgcccttgacaggaggctggcgttcatgagatacaatgggcatgataggaggtcagaacctcatgtgccttcatctggggacaggcacacaggagttggaccaggtgcgcagcctggttacgcacatacaatgggcgccaacatgggcaggggccaccaaacattcccaagcaatgaacgacgctacatgccagctcatcactcgcacttccgggccaaaccgacgactggcacacctcggtccctggcgcgccgctcgactccatcgcaagggccatggaggggaaacctgaccccagagacaatcctgcgagcacacgcgggatacaacgacaagacaggcatgcacaaaagcatagatacacagaggacccactgagaaccgcttccagggaccaccaccaaaggagcccccagaacggacccacggcttagcaacaccactgataaggagagaggcctgcaagaacggcaagccaa

SEQ ID NO: 613753 - DNA, 116 bp, Homo sapiens
  misc_feature (85)..(85): n is a, c, g, or t
ttgtccaacttatacactgtatactgttatctctaaagcacaggtgaataatgttctgcatatttttaaataatcacatgtaccnctgttgaaaatgtaacctcgtgcctgcgact

SEQ ID NO: 613754 - DNA, 165 bp, Homo sapiens
ggcaagtaaagcacactttttttttctcctcaaaatgtttttccctgtgtatcctattatggatactggttttgtcaatcatgatccttaatttcctctccttttttagggatatagcagaaatgctattactgaaatggatttcctttttctgaaatgtaatca

SEQ ID NO: 613755 - DNA, 855 bp, Homo sapiens
gactatctcttttgcctaataaatacagagggctgtgtaaagctcagggcccttgttcactagagacaaggtgtcccctgacccttcttccaaacatattcttttgtctcttgtctttattcctgcattcatccccctttgttcagtccaccagggatcctggcaggctgcaagtggtgcctcgaacagcaacagaatctggtgctttacaagtggcgtccaaacacaggggcttcgaggatgtgaatgaagaatgtctgctagagcagaggaactgaaattgacaaggcgaatggggaccccgggatgagtctgctggcagcggatataaggtcagtgccctaaaaaggtactaggagcagtgctttaaagaagtactgggaatgggaagttttctgaatcagggtaacatggagcagaatttgtctattgaaggaaaacattatgtgcagttgcttaaagtttcgttgaaacaaactggtgctcggggttctcagacattcattaagatgctacaggaggttattacgcataacccatggtttccaccggttataaaattctggatgtggcaagattgggacagagcaggagaacgattacaaacagcgctcatgaacaaaaggtcttaagagtgggatctcttcgggttttcccactgtggagttcaattgggtacgtggtacttctaccatttagcctccttattattcctgtgggacagcaaggctggagtctaaaaatctgaaagatcctgtggtcccacccacaagttcccgctgaacattacaacaacaggcccaggcatggggggctcacgcctggtaatccccagcactttggagaggccaaggg

SEQ ID NO: 613756 - DNA, 243 bp, Homo sapiens
  misc_feature (12)..(13): n is a, c, g, or t
  misc_feature (20)..(20): n is a, c, g, or t
ttgggccgtgannaaaaggnggagaactcttaatttcaccgctcagcttcaatccactgtatgaagacagacaacagtttaataacaactgatcaggaggtgagctggatctatctgcacatgcacctaggccacaggaagactgaaatagaggagatctcgatagagcacgtgagaggactagaaccaaaccataccagtcagcccgcactggtttttcacaggggcagaagatgtagccgc

SEQ ID NO: 613757 - DNA, 504 bp, Homo sapiens
tgggcttccttttggtatagttggaatgtccacagtgaggaggataaaaactaaaaatgaactatctctaaaagacaaaacattttttctttcctagatcagtaaggtaacggtgacaagaatacccagccataaaaagaacaggggggaaagcaaagatctgtgtctcatggctcacctaatagcaccggtaattaatacagaaccaccaggaggatatgtcaggacaacaatgacatggatcatgagggcagcatccagaatggagtgcaggcctctcgggcccacagtctcggtatctgcggtgaagggggtatagataagcggcccatccttcggggtataaaagcggacggacttaagggtagccaagacaacaaccaggcagagagtcacagggccaaggagcatgatcacatgcttggggccatatttcaaggtcagctcctcatcttcttcctcatctggctcaaccaccggcggtgagtaccctggggtcgtcca

SEQ ID NO: 613758 - DNA, 327 bp, Homo sapiens
cagcctttagctcctgtctggattacctcctgggagtgtcatgtgtaaattcatcgtggtcttcacacgagataaagagcaatgggtattaagtctaactgtgggagctgggtgcagtggctcatgcctgtaatccccgcactttgtggaagctgaggcaggaggatcgcttgtaggccaggagttggagatcatgccctgggcaacatgggcgaagcctatcctctggaaaaaaaatacaagaattagctggtcgtgacggtgagtgcctgtactcccagcactttgggagcccaaggcgggcagatcacgacgtcaggagatcga

SEQ ID NO: 613759 - DNA, 194 bp, Homo sapiens
  misc_feature (161)..(161): n is a, c, g, or t
cctgtgggcatcacggtctgaattccgggctcaagccatcgcctgccgcacctcccaaagtgatgggattacaggcctgggccactgtgcctggccccaacatctccacttctgatctcatttttcgtgttttctcaccatactgatatattttacgtttngtcacatttactggtctctcactagacacattc

SEQ ID NO: 613760 - DNA, 677 bp, Homo sapiens
cgtgatctcggctcgctgcgacctccgcctcccgggttcgggcgattctctgcctcagcctcctgagttgctgggattgcaggcgcccgccaccacgcccggctgatttttgtatttttagtacagatggggtttcgccatcttggccaggctggtcttgaactcctgacctcatgacccgcctgtctcggcttcccaaggtgctgggattgtaggtgtgagccaccgcgcctggctgaacatttttacttttttagaaatgttccaagtcagccaggcgcgggggctcgcgcctgtagtcccagcactttgggaggccggggtaggcggatcacttgaggtcaggagttcgagtccagcctggccggcctggcgaagccccgtctctactaataatgcaggggttagccgggcctggtggtgggcgcctgtatttccagctacaggcataaggctgagacaggggaatcgcttgggcccggaatgtggaggttgcagtagccgagattgcgccactgcactccagcctgggtgacggagtgaaactgtctcaaaaaaaaaagaaagacaagaaagaaaaagaaatatcccaggtcaaagctttgatatctaggagtttgaggctttggtggatattttgggatttagataagtgttattaacagcttttaaatata

SEQ ID NO: 613761 - DNA, 892 bp, Homo sapiens
  misc_feature (18)..(18): n is a, c, g, or t
  misc_feature (79)..(79): n is a, c, g, or t
  misc_feature (84)..(84): n is a, c, g, or t
  misc_feature (148)..(148): n is a, c, g, or t
  misc_feature (163)..(164): n is a, c, g, or t
  misc_feature (172)..(172): n is a, c, g, or t
  misc_feature (175)..(175): n is a, c, g, or t
  misc_feature (177)..(177): n is a, c, g, or t
  misc_feature (181)..(182): n is a, c, g, or t
  misc_feature (185)..(186): n is a, c, g, or t
  misc_feature (188)..(188): n is a, c, g, or t
  misc_feature (190)..(190): n is a, c, g, or t
  misc_feature (192)..(192): n is a, c, g, or t
  misc_feature (194)..(194): n is a, c, g, or t
  misc_feature (199)..(199): n is a, c, g, or t
  misc_feature (202)..(202): n is a, c, g, or t
  misc_feature (205)..(206): n is a, c, g, or t
  misc_feature (208)..(208): n is a, c, g, or t
  misc_feature (210)..(210): n is a, c, g, or t
  misc_feature (217)..(217): n is a, c, g, or t
  misc_feature (232)..(232): n is a, c, g, or t
  misc_feature (235)..(236): n is a, c, g, or t
  misc_feature (253)..(253): n is a, c, g, or t
  misc_feature (268)..(268): n is a, c, g, or t
  misc_feature (283)..(283): n is a, c, g, or t
  misc_feature (289)..(289): n is a, c, g, or t
  misc_feature (365)..(365): n is a, c, g, or t
  misc_feature (368)..(368): n is a, c, g, or t
  misc_feature (395)..(395): n is a, c, g, or t
  misc_feature (404)..(404): n is a, c, g, or t
  misc_feature (590)..(590): n is a, c, g, or t
  misc_feature (600)..(600): n is a, c, g, or t
  misc_feature (602)..(602): n is a, c, g, or t
ccgcagtgggtgtgtgangggaggacggacagacccagacgccgccggaccaggaggacgctgacgaggcaccatgcgngagancgtgcacatccaggcgggccagtgcggcaaccagatcggcgccaagttttgggaggtcatcagngatgagcatgggatnnaccccacnggnanttannatnnananantnatttncanctnnananaatcaangtttactacaatgangcnnctggtaacaaatatgtncctcgggccatcctngtggatctggagccnggcacnatggattcggttaggtctggctcgggccatcctcgtggatctggagccaggcacgatggattcggttaggtctggnccnttcggccagatcttcagaccagacaanttcgtgttnggccagagtggagccgggaataactgggccaagggccactacacagagggagccgagctggtcgactcggtcctggatgtggtgaggaaggagtcagagagctgtgactgtctccagggcttccagctgacccactctctggggggcggcacggggtccgggatgggcaccctgctcatcagcaanatccgggaanantacccagaccgcatcatgaacaccttcagcgtcatgccctcacccaaggtgtcagacacggtggtggagccctacaacgccaccctctcggtccaccagctggtggaaaacacagatgaaacctactgcattgacaacgaggccctgtatgacatctgcttccgcaccctgaagctgaccacccccacctacggggacctcaaccacctggtgtcggccaccatgagcggggtcaccacctgcctgcgcttcccgggccagctgaacgcagacctgcgcaactggcggtg

SEQ ID NO: 613762 - DNA, 103 bp, Homo sapiens
  misc_feature (91)..(91): n is a, c, g, or t
cctcagaggatccctttctctgatcgcttttctctgatcgctctttctcttgatcgcgtatctcttgatcgactcccccccgatacgaggncaaggtgtaccg

SEQ ID NO: 613763 - DNA, 392 bp, Homo sapiens
gagctccccctactggagaagggattcgtgagaagaaatgaagtcagcccgtcagtaaatgaagttgatctgcctgctggctttctgttgactggcccggaggctgtactgcgagaccctgtgagacttccctagtcgtaagagtaggatgtctgtctgaaggtcactccatcaggtggaaggaatgcactggagtacaggatgagaaggagatgctgctcttttagtggccgggatgtggctatagatgtggtgtccgcctaagtgtcagggaccttctggtatattttacgggaaagaggtaagctgtctgtcggggacttggttgaagtgttactacaggagtgaggcgatttgacctgctcaaaggtgatcttgaagatggacagaat

SEQ ID NO: 613764 - DNA, 830 bp, Homo sapiens
  misc_feature (18)..(18): n is a, c, g, or t
  misc_feature (79)..(79): n is a, c, g, or t
  misc_feature (84)..(84): n is a, c, g, or t
  misc_feature (148)..(148): n is a, c, g, or t
  misc_feature (163)..(164): n is a, c, g, or t
  misc_feature (172)..(172): n is a, c, g, or t
  misc_feature (175)..(175): n is a, c, g, or t
  misc_feature (177)..(177): n is a, c, g, or t
  misc_feature (181)..(182): n is a, c, g, or t
  misc_feature (185)..(186): n is a, c, g, or t
  misc_feature (188)..(188): n is a, c, g, or t
  misc_feature (190)..(190): n is a, c, g, or t
  misc_feature (192)..(192): n is a, c, g, or t
  misc_feature (194)..(194): n is a, c, g, or t
  misc_feature (199)..(199): n is a, c, g, or t
  misc_feature (202)..(202): n is a, c, g, or t
  misc_feature (205)..(206): n is a, c, g, or t
  misc_feature (208)..(208): n is a, c, g, or t
  misc_feature (210)..(210): n is a, c, g, or t
  misc_feature (217)..(217): n is a, c, g, or t
  misc_feature (232)..(232): n is a, c, g, or t
  misc_feature (235)..(236): n is a, c, g, or t
  misc_feature (253)..(253): n is a, c, g, or t
  misc_feature (268)..(268): n is a, c, g, or t
  misc_feature (283)..(283): n is a, c, g, or t
  misc_feature (289)..(289): n is a, c, g, or t
  misc_feature (303)..(303): n is a, c, g, or t
  misc_feature (306)..(306): n is a, c, g, or t
  misc_feature (333)..(333): n is a, c, g, or t
  misc_feature (342)..(342): n is a, c, g, or t
  misc_feature (528)..(528): n is a, c, g, or t
  misc_feature (538)..(538): n is a, c, g, or t
  misc_feature (540)..(540): n is a, c, g, or t
ccgcagtgggtgtgtgangggaggacggacagacccagacgccgccggaccaggaggacgctgacgaggcaccatgcgngagancgtgcacatccaggcgggccagtgcggcaaccagatcggcgccaagttttgggaggtcatcagngatgagcatgggatnnaccccacnggnanttannatnnananantnatttncanctnnananaatcaangtttactacaatgangcnnctggtaacaaatatgtncctcgggccatcctngtggatctggagccnggcacnatggaaggtctggnccnttcggccagatcttcagaccagacaanttcgtgttnggccagagtggagccgggaataactgggccaagggccactacacagagggagccgagctggtcgactcggtcctggatgtggtgaggaaggagtcagagagctgtgactgtctccagggcttccagctgacccactctctggggggcggcacggggtccgggatgggcaccctgctcatcagcaanatccgggaanantacccagaccgcatcatgaacaccttcagcgtcatgccctcacccaaggtgtcagacacggtggtggagccctacaacgccaccctctcggtccaccagctggtggaaaacacagatgaaacctactgcattgacaacgaggccctgtatgacatctgcttccgcaccctgaagctgaccacccccacctacggggacctcaaccacctggtgtcggccaccatgagcggggtcaccacctgcctgcgcttcccgggccagctgaacgcagacctgcgcaactggcggtg

SEQ ID NO: 613765 - DNA, 1014 bp, Homo sapiens
  misc_feature (516)..(516): n is a, c, g, or t
acttaaacaacaataagatcagcaacatccctgatgagtatttcaagcgttttaatgcattgcagtatctgcgtttatctcacaacgaactggctgatagtggaatacctggaaattctttcaatgtgtcatccctggttgagctggatctgtcctataacaagcttaaaaacataccaactgtcaatgaaaaccttgaaaactattacctggaggtcaatcaacttgagaagtttgacataaagagcttctgcaagatcctggggccattatcctactccaagatcaagcatttgcgtttggatggcaatcgcatctcagaaaccagtcttccaccggatatgtatgaatgtctacgtgttgctaacgaagtcactcttaattaatatctgtatcctggaacaatattttatggttatgtttttctgtgtgtcagttttcatagtacccatattttattactgtttattacttccatgaattttaaaatctgagggaaatgttttgtaaacatcnattttttttaaagaaaagatgaaaggcaggcctatttcatcacaagaacacacacatatacacgaatagacatcaaactcaatgctttatttgtaaatttagtgtttttttatttctactgtcaaatgatgtgcaaaaccttttactggttgcatggaaatcagccaagttttataatccttaaatcttaatgttcctcaaagcttggattaaatacatatggatgttactctcttgcaccaaattatcttgatacattcaaatttgtctggttaaaaaataggtggtagatattgaggccaagaatattgcaaaatacatgaagcttcatgcacttaaagaagtatttttagaataagaatttgcatacttacctagtgaaacttttctagaattatttttcactctaagtcatgtatgtttctctttgattatttgcatgttatgtttaataagctactagcaaaataaaacatagcaaatggcaaaaaaaaaaaa

SEQ ID NO: 613766 - DNA, 430 bp, Homo sapiens
  misc_feature (14)..(14): n is a, c, g, or t
cacccccaatgctnattgtaaattagttgttttttattttccccggccaaaaaataggggccaacccctcttttgtgtgggacgaggaaaacaagcccaagttttataatccttaaatcttaatgttcctcaaagcttggattaaatacatatggatgttactctcttgcaccaaattatcttgatacattcaaatttgtctggttaaaaaataggtggtagatattgaggccaagaatattgcaaaatacatgaagcttcatgcacttaaagaagtatttttagaataagaatttgcatacttacctagtgaaacttttctagaattatttttcactctaagtcatgtatgtttctctttgattatttgcatgttatgtttaataagctactagcaaaataaaacatagcaaatggcaaaaaaaaaaaa

SEQ ID NO: 613767 - DNA, 115 bp, Homo sapiens
gtgtgctgagaccagtcttaccgtggcgggaactgagcgctccagtcttcactagggaattgctgaataggcacagagggcaccatgtacacctttcagaccagtctgcaacctc

SEQ ID NO: 613768 - DNA, 126 bp, Homo sapiens
cccctgtacaggctgatgcagcgcctcaacagcaggacatgtaggcaacacgagcaggcacagcgcggctaccactgtccacacgcttacacaagccaggcccgcagtggccttcggagagctagc

SEQ ID NO: 613769 - DNA, 230 bp, Homo sapiens
ctcatagtctcagctacacttttctcaagtccttctcttgccctccatggtccagttccagcaatcgcactgctcacttcatacagggagtccagtaacggctttgttgttcttagcttccttttacacgttcctttggtctcattagtgcttgacttgcttcttctcctttcagaacctgagtaacatataaaagaaaaaccacctccacttagaacagccagagatac

SEQ ID NO: 613770 - DNA, 397 bp, Homo sapiens
gaatctggggtagactcagtaacgggtcaactgtcgtacttcaacattgaattatcgacgtggtctagatgccatcaccttgcactgtatcgctggtctgtacaagacatcactacatgatcattcctgactgttgcttctccattactcaatcagtggattcataaagttagaaggaagccagctctacaccagcagttcacccttctggagtgtccattaacttacaatcactggccgtcgtataacactgagggtacagaatcggccacgtacttcaatcacaggcttccggacagcctgcttttctgtttcttccaataagagatacttatcattgacatcttggagagcactgtccaactgaggctggatatcacctctcccagcacaagaa

SEQ ID NO: 613771 - DNA, 121 bp, Homo sapiens
gcagtgtacttcaagactgaataaacataatgaaaatatatactaggagatacaacctacaaatgtgaatgaaatagtcttcaaacctgactatacataagattattcattgggtacctga

SEQ ID NO: 613772 - DNA, 178 bp, Homo sapiens
tcagccggaccgccaagcactcttttcttcatgtatttaggcatctagttgatcccatatctattgtgaacagtgctgcagtaaacatgggtgtgtaatgtttcttcaatactgacttcctttccttttgataaatacccagtaaggagacagctggctcatacagtagttctatttg

SEQ ID NO: 613773 - DNA, 694 bp, Homo sapiens
  misc_feature (56)..(56): n is a, c, g, or t
  misc_feature (63)..(63): n is a, c, g, or t
  misc_feature (75)..(75): n is a, c, g, or t
  misc_feature (87)..(87): n is a, c, g, or t
  misc_feature (104)..(105): n is a, c, g, or t
  misc_feature (108)..(108): n is a, c, g, or t
  misc_feature (114)..(115): n is a, c, g, or t
  misc_feature (117)..(121): n is a, c, g, or t
  misc_feature (123)..(123): n is a, c, g, or t
  misc_feature (139)..(139): n is a, c, g, or t
  misc_feature (182)..(182): n is a, c, g, or t
  misc_feature (564)..(564): n is a, c, g, or t
  misc_feature (639)..(639): n is a, c, g, or t
  misc_feature (666)..(666): n is a, c, g, or t
caaactacaaccacataaaacacaaaaaaaacacaaaaataaaaaacaatgaaatnatatagnaattatatattntaatttcatccncccaaccaccactcctnntanctcctnncnnnnnanttatttttatcatttnctcatttttttttccagatataacttatgaattcacaattatntacttaccatttttctcctttttatatacaaatggcagttactgttctcaaccttatttttcctacctaataacataaactgaaggttatcccacatcactacataaatggtttccaagtcctccttatttattcattgttgtttacccaggagtaggctgtatgaatataccacaatttagggaaccagaaccctgaaatggtgtcatttaaacagcttccaatcttttgttttcacaaacgctgcattaatgaatacttctgtatgttcatcattttgtacatgttttagtatgtacattcctagaagtggaattgctggcccaaaaaccaaatgcatttgtggttttgattacttttgaataattcctctttgaatganaagagtttttcctggacttgctatttgctggaggttcatgtgggaaaagaaaccagggccacattctaagcagancagttttttttttttttgacaactganaattttttccccccacagctgttcgttc

SEQ ID NO: 613774 - DNA, 788 bp, Homo sapiens
  misc_feature (572)..(572): n is a, c, g, or t
  misc_feature (684)..(684): n is a, c, g, or t
cctctaaccatggtcatgtcgtggggcaaggaacctgagctgacttgcactaccaacctgatgagctgtattacacgaattaattgaccaaccctggctaatggaaatacagctgatgcggtgcctacccctactccaccatcaaagagtggctttttactggattcagatgattttataggacagagggcctttgctatctagcctttcgtatagtagcatacgcactatgactaatggccatggatacaagctatccctggcagaaagtgacagtgaaatcctgtgagatacaactaccattgatccacagggatgaagaagatggacagccttatcaagctgtagactacaacaaagacggagtgcatgatagctactccttattacaccagatgctctgaaaggatggcttgctcaatcatgaagacggctaaaaagctggtactgcggtgatgctcgactaagagcatgatcagcctagtggcacctgtggggtcaaggatccgttcagctcggattggcttccgctttacatctccacccttaggagctcaacttggctaaccagncgacacttccactaaacctgtgatggacagagacagcactgggacttacagaggtcttattctacgagagcacatttacctttacaggctgaattaactaatataattcagncaatcctttgcaacgtctgaattggtcaaatgttcttaaacaaggggggcaggaatatccccggtccgagaggcattttgttaagagagctaccatgtgtggga

SEQ ID NO: 613775 - DNA, 300 bp, Homo sapiens
  misc_feature (22)..(22): n is a, c, g, or t
  misc_feature (125)..(125): n is a, c, g, or t
  misc_feature (152)..(152): n is a, c, g, or t
  misc_feature (157)..(157): n is a, c, g, or t
  misc_feature (174)..(174): n is a, c, g, or t
  misc_feature (224)..(224): n is a, c, g, or t
  misc_feature (236)..(236): n is a, c, g, or t
  misc_feature (265)..(265): n is a, c, g, or t
  misc_feature (294)..(294): n is a, c, g, or t
gcctacttggcaggttgaggtnggaggattgcttgagcctgaaaggtggaggttgcagtgagatgaggtcatgctactgcactacagcctgagaggcagagtgagaccctgtttcaaaaaaaaanaaaatcaactactcaactggctgcagnatagntgttacatcagcaggcntgaaaacaacattaaggttgggcacaggggctcatgtctgtaatcccagnactttgggaggnaaaggtaggaggattgcttgagcctaggnattccaggccggcctgagcaacacagtgnccccat

SEQ ID NO: 613776 - DNA, 383 bp, Homo sapiens
  misc_feature (27)..(27): n is a, c, g, or t
  misc_feature (158)..(158): n is a, c, g, or t
  misc_feature (295)..(295): n is a, c, g, or t
  misc_feature (307)..(307): n is a, c, g, or t
  misc_feature (373)..(373): n is a, c, g, or t
gaaatatgaaaagacaaaaagcatgtncttgaggaggagtttggtgtggctaattttcagaacttgctgatgatccaaggacagaggaaaatctaggagggaagcatctgagaatccacgatgctgacttttaggctggttagggtatatgttttgtntggtacctacttctgcagatgctctctcttggaaatgttaatgccttgcaggtatttcattccagagaatgaaagtgatatgtgttaggttgaagcctataaatgaggcagggcacagtgtttcacgttggtaattnccagcggctttngggaggccgaggccggcggatcacggaggtcgggagtttcaagaccagccttggccaacatggtgnaaccccgtct

SEQ ID NO: 613777 - DNA, 872 bp, Homo sapiens
cacttaggctaggtactgaggccctgggtgttacatctggcactgaggcgctgtctgccccgtgatgcacagatgcctcgcctttgcctgatcctgccgccctgtccacaccctgccgccagctcaccatggatgatgatatctgccgcgctcgtctgtcgacaacgtgctccgtgcatgtgcaatgtgcctgtgtcttctgctgtgggctgactgatgcccccctgtgtgcctgtcttcccctccatctgtgtgtgtgctgccccatgtgcaacctatgtggctgtgattggttgtgtgcattgtgtgtcatgaatgtgattccttagttgttgtgtgctgactgatgtgcccatgatgcaaatgatgatgtgcagtcctccaccctttgaatgtaccccccattctgatgcactgtgcatctgtcaccagagcttgtggactgacattgtgatgacaaatcttgtgcaccagcacctatactacagatgatgcattgctgtgttgtgctccctgatgtgagcacccctgtgcttgcttgacctgatgtgcccccccgtgaaccccactgtgccaaaccactgcggaaggagagacttgagcgccaggagtacagtagtctttggacgagctctttacagacacccccaggtccactagtaactgtatgcttactccccacggtgcctgtgcttactccctcttggtgcctgccctccttgtgcccgtgtaacccactatgtgccattcggtgcattgtgccctccccgggtagaaccgtggggttcacccccacacatgttgcccccgtcttaccgactcgggtgttatgcccctccccccaatgccatcctgcgtctggaccccttgga

SEQ ID NO: 613778 - DNA, 186 bp, Homo sapiens
cgagcacgccatcgctatatagcctcaatgctgagaaattactcctgggcccagaaggtgtcacataggtggcttgggttacttggtgctcaggcaacaacttggcacagggcccaggttgatgaacaacaacaatttctttaaatatgtgtggactcaagatggaggcctctgggcagagggaac

SEQ ID NO: 613779 - DNA, 546 bp, Homo sapiens
gcagaggaactaaaacactcccttctcattaggacctggctgtggataaaaatttctccccaggtccatcccatctaatgcagtgacaatgacctgtaatgctatcctgacaccaactggtaacatactgcagaataattcccgggctaaccaccccagagtcagcacagaccacacaagttccagggcatagtcctcaaaaagatgcccttacttcatacgccaactgcttttttgggggaccccaggccactcataacttttggaccaaataggaacaaatacagggggtaccatcatccctacaggttggataattcactagaatgactcacagaaatcacagggagcacagaaccttgccatttacaggtttatttattaaaggacacagatcaggaaccagccaaattgaaaaagacacagggggcaaagatctgagtggggtttggaacgcaagggcttcagggcccctgtctttgggggaaactgggaacatcacaccttctggtccggggggagtggttaacccaaccaggaaagctc

SEQ ID NO: 613780 - DNA, 492 bp, Homo sapiens
  misc_feature (307)..(307): n is a, c, g, or t
tacgcgatctagaggaccccggcccatgcacagttcaaatgacagcacagatatctgctctgcagtagttcaaatgaagtctcaggagtttagaaactgtctgaggtgcttggacttctaatttaatacttttagggtattttggttttcgtgttggtgttgactctctgtgtattcattcgttgaaatagttcgtatggtcatggttatgagagaataaaattcaacttagtgtacaacaaaatatggattccaggaagcttagagggtggctaccagtgagacaatgagcagtatccccccaggntgggcagcatgtcgcacatctaaaatttgtggggttacttagttaatttaagacggattctcgctgtgtcgcccaggctggagtgcagtggcgtgatctcggttcacgtgcaagctctgcctcccggggtcatgccattctcctgcctcaggctcccgagtagctgggactataggggaacacca

SEQ ID NO: 613781 - DNA, 295 bp, Homo sapiens
aggcaaagcaagcaaatccctggatgatgaagtgaatgctttcaagcaaatgaaagacggcggtgagctgctccagtcccagggatcccaggctggaggctcacagagtctgaagagcgacaccgagaagaaaacttaactctgctgtttgctgcatgctgaatgagagccagggtcctgtttgggcttcctgtagacagccttttcctgcgcaacagagctgggactccctttctctaatttcccccttaacatgcctagggaagcatacaatccaacccgcgcccatcaattt

SEQ ID NO: 613782 - DNA, 551 bp, Homo sapiens
  misc_feature (105)..(105): n is a, c, g, or t
ttgtcacttgcttttgaaatgtgcatttgtacttaggcagttaacagttagccacaactcctcatctattcttcctagtagcgcaggggtggggcagacttttcntacaaagagccagctagtacacactggaggccctgtggtctctgtagcagctctcgcctttgtagtgcaaaagcagccaaaacaatatgccagccaatggcatggccagccaaccagtgtggctatgttccaataaaactaggaggctagctggatttgacccactggctgtcgttggctgactcctgtgttagaccctccatggtcttatatgcgttatgtgcagttattctcccatctctctcaaaagggaaacgtcagtgacctgaacattgtgctcagagtaccagagttcttgcttaagttgcaggtaactgactaggctgtatgaaccacatagtgggtagactaggtaagaataatgtggcaataaattagtatgacatgtttaatagtaattatgtctatatggcattttggaataaatggcaaattgtttacaagtt

SEQ ID NO: 613783 - DNA, 901 bp, Homo sapiens
gccgcccttttggatgtttttttttttccccatctgcatcacattaatttttaaagggaagggattttcgaaaaaaaacaccgtggccagaattatggaataaaaactaaatacaaatgtaggtctattctgtattggtttaaatacccacaaaaacctattacagaaaatgcccgtgttacaaaacacaacaaaggttcaaccatcgagaatgtccccatcagccagggctgaaaattccagtctcgggtatacgggaattaaggcatgcagtcctggtctggggatggatcacggggtgtgtggcacagccagtgctttcacccaaatttgaccagaaaattggccactgggccaggtaaaccctacatgacgtgttgggttcatgtgtcacataactaccgaagttcctcccacacgatgcaatgccgggtgggatcgtacttctggtaaaatcccttcgtcgatatagagccgaaatgtccttctctatgtggtatcctcatccagcgcatgagaaggcactccaccaagtcctgtggcatcatcttcagacatgtccgcattttggaccacggcttcggtcgcacatggtcccgtgcaaaggggctgccgcttgcacggcccccgggggcggggtcaacacacgccaggccggtaaaaaaccgaggaaacgaaaactagttctaaaacgggagcggcgcccagcaaatactcccgcgcaagcacaccactgcgtgccggtgaaaaaagaaacctaagcagataactcatagaaacacggcatgcgcgacaaataccaaaatcgcccgagcgcgccacagcccaggcgacaccaccaccaggaccggtacagcgcaagccacacaaacaacggaaacacacagggtcgctgtcgctc

SEQ ID NO: 613784 - DNA, 1022 bp, Homo sapiens
gtgatggcggtgatgtctcacagaaagttctccgactcccacagatgggtccctcggcttcctgcctcgcgaagcgcaggagcaggcatcgtgggacggtgagggagcttccctttaggatgatcccatcgcacatgctcggtccagctcacatgcttcctgggataccaaggctggcatgactcacatcgtgcgggaattcgacaggccgggatccaatggtgaacaatgaaggagtgtgcgttgagagtgctgtgaccattgtggagcatcatcacccatgggtggttgtgggcattgtgggctacgtggaagatgcctcgtacgactccggaggcttctgtgactgctctttggtgcacgcgcatcagtgatgaatgctatgagtgcgtgtgctttaataattggggtcaatctcagaccgaaggtctattaccagagttactgggataacatcgcgctcggatgatagatcggttgccgccatcgaggtgaatagaggacttcggtgacagtgttgataaagtgaggtgccaaagtctagtcctggttgtgattggccgggcaaccagatgctgcactgctttcctctgcgccagaaagaaaggccctagctgatcgggagatccagagtgaaggggagggactgggggcggagaagctggaccttgggccccgtcagacgcttgatcagcgaggtatcctgtggaagcaccgagtccgggcagcgatgaagatgatctgaggttattgggggtgagcatggcaaagttacaaaggtgtgaccaggtgttgggcaacaaggaagtgcgggcagaaccacgaaggctgcgctaggtgctgcatggggcatggatctgtgggtgtacgcttgggagggctagaggagggatacacacggttggagaacaaaggttaaatgaggggaatttagagggagcgtgaaatggccaggtgtacattataagagaagtggggtgcttgcacggacggctgagttggagaaggccaaatataaaagg

SEQ ID NO: 613785 - DNA, 371 bp, Homo sapiens
  misc_feature (362)..(362): n is a, c, g, or t
caaaacaactttagtcttcctttcaaacatatatatatttagacttccttattttatatatataggtgtccctcggtatcagtgggagattggttccaagacctcccacagacagaaaaatttgcagatgctcaagtcccttatataaaatggtggagtatttgcatataaggtatacacatcctccagttacctaaaatcagctctagattacttataatacttaatacaatgtaaatagctgttatattgtattgttcagagaataatgacagggaaaagtctttttttataaagacttataagacttaaaagccagccacgtgcgatggtggctcatgcctgtaatcccagcacttggngccgctcgg

SEQ ID NO: 613786 - DNA, 136 bp, Homo sapiens
ttctccccacgggcagtgactcataatcttccccatgcttttccatcttgacaggtggctgtaaagaaattctcttggccagaagggtggctcacgcctgtaagcccaacactttcacaggccaaatcgggaggac

SEQ ID NO: 613787 - DNA, 128 bp, Homo sapiens
gcaagcaacaaacactaagtgtgtctgttctgggccctgctcaccaacactgccagtgtcagcagtggcatgttccctggtcttgcagcagcttgcagtgtgcatcctctcagcagtctgcacctcga

SEQ ID NO: 613788 - DNA, 492 bp, Homo sapiens
tctgagttaagatgagtgggaaaccatctcaataaacacattttggataaaaaaaaaaaaaaaaaaaaaaaaaaaaaaaaaaaaaaaaaaaaaaaaaaaaaaaaaaaaaggggggaaaaaaaaaaataatatcttaaaaaagggaaaaaaaatataaaaaaaaaggggggttttttttaattgggtctggggggtttttttatagatccgaagggtaattgtgtgtacgtgatgggtgtaaaacacacattgttatgatgagggtgaaaacaatctgtgcacagggggggacactgttggatgaagaagaacaccatatttgctggtgggggaaagagacacattcagtggggggacaattttccacgaaggaggacttctatatgcctgtgggggggaaatttataaggttcgaagctaattactaaggggtgttaaacagacgggataaagtagttattggcgtagagaaacgttgttgtgttgtgatac

SEQ ID NO: 613789 - DNA, 357 bp, Homo sapiens
tggatgaaaaaggacaccctgtgaaaaggtcctagctggagtcagacccctctgtgacctatctcctcaggcctctagaggacatatggccaggcccgggcacacaccagcccaccctgagagacccctttgggaccaaccacctgtgagtcctgcgatgcgtttaagcaccctgtgcccctaccctatctgtatttcctgatggcgtagtttgagcctctgtggatgagatgacagcttgctatcacccgtgaatcaaggaagctgtcacgtcagtctcacttctgtggtttgcacaaacctgtttttagacttccaaagccagattaagatttttatctttgaggcccaactaat

SEQ ID NO: 613790 - DNA, 242 bp, Homo sapiens
atataagagacaaagatgatagaacatgaatatagaagcattagacagaatgaaaagagattcgagaattacagtataggtcctcaccccgtacgtgatcaagctcgccatcaacataggggcggtcgatcggccgaacgggagcaaagtgcataacaaagtcatgccaaggctcggaggattggccattatttatcggtgtcgccgtcggctatttagtcggcgggggccgagcagagttt

SEQ ID NO: 613791 - DNA, 285 bp, Homo sapiens
agtgatattttaaaagccagtagttggaccaaaaagtggtggcgcatgccttgtaatccccacacttttggaggctaaggcaggagggtcacttgaagccaggagtttgagaccaaacttgggcaacatagcaagacccccattctacaaaaagtaaaaaataaaaattagctgggcatgttgacatgtgcctgtagtcctagctactcaggaggctgaggtagaaggattgcttgagcctaggagtttgaggctgcagtgatcaccactgcactacagcctggg

SEQ ID NO: 613792 - DNA, 252 bp, Homo sapiens
tttttttcagcagccctttggaagtggattctccccaggccccctttgcaggggggccacatcacctgttttgaatttttaaaagcacccctgctttcagaactccttatttatttgacttgtttgcatccctgaactaaaatgtaagctccatgagggcaaggccttcctttgttttgtttccctgctgtatccccagggcctggaatagtgcttggtgtgtagcaggccctcaataaactgtggaaagga

SEQ ID NO: 613793 - DNA, 119 bp, Homo sapiens
agtcccttctaccgattaacaactccctgcaacccgggaatcagagtatttcagctcaacctcgatagcgtcactcgctaccgcatcccgttgttacatattgttctccgaataagtcc

SEQ ID NO: 613794 - DNA, 774 bp, Homo sapiens
  misc_feature (399)..(399): n is a, c, g, or t
  misc_feature (403)..(403): n is a, c, g, or t
agacaggtgttaatgtgcctagaaatttgaaactaatttgaggaaaccggtgtattaccgtgtgtgtactcagggaagagacagcgtcactgtcgccaaaaagaacgggataaaaaaggggggacatagcaaaaccagaggtccgagcttattagaccaacagggatacaagggaaagttgcgggcggggaagaaagtggaaaaggcgggaaaaacattgtcattattttcgtacgggtttaaaaaggaccgttatatccaatgcacggttgtggttagagcaccattaaggagatggatgaaatacgtcagaatgttatattgcagcccatcggctaaatccacggggggataaccggtaatttttgggccaaaaggggccaggcttgtaagatgtcnaaanaaagggatccagatggcaagaaagaaatttagtggattggaaatctctctgattttcctttttgtcatagttactataatagctattgccttaattgttgttttagcaactaagacacctgctgttgatgaaattagtgattctacttcaactccagctactactcgtgtgactacaaatccttctgattcaggaaaatgtccaaatgtgttaaatgatcctgtcaatgtgagaataaactgcattccagaacaattcccaacagaggtctgcagcaaaagtctttaatatttttaatgaatatatacattattatattaagataattgctgaatattggatcgatcttatttaataaagatctagacata

SEQ ID NO: 613795 - DNA, 806 bp, Homo sapiens
cggtatctcaaggataatgaaccgatagtaaccgtgaattactagaaaattcatcaacatagatagtgaacggcgccgggggaaaaattggacatgaacgtcaaacgtagtaaggaagtctataggatggaacggagaacaaaatacaatatagatgtaagactcactgatgtagttataaagcacaaaaacagcgctaataaaagacaaaagagtagaagaaacgatagagaaccgaatgtcatatattatcgtgaaagtaaaaaaagttagatgaaataacttcatgaaaaagggtatggtgataataaattgatgcggagaaaatataggccctcaacagaattacagcgctgacgagagggagtatacaagcagggggaaaaacagtaaatttttgtgccaaaaaggaagtaacatgttaactgtcaagagaaagggatccagatggcaagaaagaaatttagtggattggaaatctctctgattttcctttttgtcatagttactataatagctattgccttaattgttgttttagcaactaagacacctgctgttgatgaaattagtgattctacttcaactccagctactactcgtgtgactacaaatccttctgattcaggaaaatgtccaaatgtgttaaatgatcctgtcaatgtgagaataaactgcattccagaacaattcccaacagaggtctgcagcaaaagtctttaatatttttaatgaatatatacattattatattaagataattgctgaatattggatcgatcttatttaataaagatctagacata

SEQ ID NO: 613796 - DNA, 836 bp, Homo sapiens
  misc_feature (558)..(558): n is a, c, g, or t
  misc_feature (563)..(563): n is a, c, g, or t
  misc_feature (566)..(566): n is a, c, g, or t
  misc_feature (570)..(570): n is a, c, g, or t
cgatataaatcccaaataatatcttaggataatgtgagatatggcatgagtaaccgaaaacagccatatagtgcttaaatagatatataaaagctatacacgcaaaaatagtaatatacaaggaaaaaatgaaggaaaaataaataaaatatctaaaacatataaacatacaatataactagataaacatcaccaaatatgagaagtaaagaaaaatattcacattgcacaataaaagaaagggtgagtagggagacaacattgcaaaaaaaacaaagtattacgatatataatctacaatacgcaaataataaatagattataaaataggggcggacaaataaaggtaaatacagacctgaagaacagtagaggaaggagatttgtagaaggtctcaggaacaggaagactataccgtactcagcgggtcttagattgtataaactttaacgaacggacttgaactacctagaaatgttccttgaaaagccctttttaaaatatcgaaggtggtaaatccagtaaatattttggcaataaaggtcaaagcctgtaanctgtncanaganagggatccagatggcaagaaagaaatttagtggattggaaatctctctgattttcctttttgtcatagttactataatagctattgccttaattgttgttttagcaactaagacacctgctgttgatgaaattagtgattctacttcaactccagctactactcgtgtgactacaaatccttctgattcaggaaaatgtccaaatgtgttaaatgatcctgtcaatgtgagaataaactgcattccagaacaattcccaacagagg

SEQ ID NO: 613797 - DNA, 107 bp, Homo sapiens
cacagcatggccttacaaccagttcatcaagagctggacagcttcagcgggaagccacgggctcggggccacccgctggcacggcgctgcccatcgagggcgttatc

SEQ ID NO: 613798 - DNA, 96 bp, Homo sapiens
gccagcaccaaccagacatctatgtacctctgtgccagcagtttgactagcgcggccggggagctgttttttggagaaggctctaggctgaccgta

SEQ ID NO: 613799 - DNA, 1745 bp, Homo sapiens
acaccgtggtgtagagtggctgtgtcgcggacggtgcagtgcgctgtgcagaatgttgtgctaccagggctatttagccatagttggcaagcgagcaaagtttccaccatctgtcgtgtgtacgagctcatgaaatgtgtttgtgaatgacgcgagagacattttcggctcaccgagcgttatagtgtgatctggctgtgagccaccccattgcctggatgtgtgtgcccattgtcaaggcaaccttgtcttgaccatgccatgaacgtgcacttgaacgtgatgaatgtgatgacatgtgccatccttggaatgacaagccctcatccacttggaatgagaaacgtcagatgtatgtactctgcaatataaggttatcagatgtgcacgatgcttttggcattgcagcattgtagacatgtggtgactctgaaaacggtatgttggcaatgcaggggtattggtaggcgcctgtgttggccaattcgtatacttttcgatacagtcgttatacaccgtgactgactcttgttttcatcgaataggttgaagccgaaggagactgcaagcagtaattgattggtaaccgaggggagccacacattcacccagtgacacgaatgcacatctatggagcaaacaccggaacgttggagctgagttgggcaacaaaaacgacacacggaaccccaacacacgacgccgaatcggcgattggggacacaaaattgacaacgtgtgttggcaaaaccgcccgcaaattccccaataggggacacttctcatgcaccatatacacaaacagaggctgtgggggtgacgatttaaagtagcagagacagcatcggaaaagctggactgatcttggggacacgaaagacagattggacggaaatgaattggcatatgggagcacgcttaggcgatgccgcatatggaaataccgcgttggcggtggcaccattgttggcagtcatgttgagtatcaatcctgtgacccaattggcaagagcattcaactcagattgggcagtttaattgtttaagcgttgtgtgagaagacgagacttaggtatataattggcacacaacacacaggaatggatacaccaaccattggactacagtcaagagatggacgcccagagtaaacacccttggaaacaagagagaaacaacgacacaacgagacagccaaaccacacaagcaacagacagcacacaaactcagcaccacgaaccacctacaaagaacaaaagccggaggcagacggacacgaacatcacgtaagcagaaacataccaagacagtgggcaggcccaacaaacgaatcaaaatagcaagcgacgcacgacacatcgagctgtgcaagaagagcggcgggacaccccacgcagcgcttgacccaccatcacacagcgacgaaccagcccccacacaacccaccaagcgcacgagcccgcgaacacgccaccgccagcagcacacacccacgccgcacgcacaccaccactgacgcgcgccggctccgaccgcaggccaccacaccaaacagaaaaacacgcccaggcggacaccacaccactgcccccgtccacccaccccccgcgaccgcaccgcccccgcagccgatcaacaccaccacacacgacaccccacacacaccagcccgccaccaagacgcaacaccgcatacacaccaccacaacacacatccacactcacgacagccacccacgccaca

SEQ ID NO: 613800 - DNA, 329 bp, Homo sapiens
attttttttggcagccttatccaagtctggtacaacatagcaaagagaacaggctatgaaataagggatccagatggcaagaaagaaatttagtggattggaaatctctctgattttcctttttgtcatagttactataatagctattgccttaattgttgttttagcaactaagacacctgctgttgatgaaattagtgattctacttcaactccagctactactcgtgtgactacaaatccttctgattcaggaaaatgtccaaatgtgttaaatgatcctgtcaatgtgagaataaactgcattccagaacaattcccaacagagg

SEQ ID NO: 613801 - DNA, 235 bp, Homo sapiens
  misc_feature (101)..(101): n is a, c, g, or t
cggcgatctctctctattatctcaaaccagtctgtagcatatgttctggatgctctgagagatacttgccttctctgcttttctcatgtctttctgatatnactgtgatcactttctgtatgctctcaccagatcacatttctgtgatgccacacaatttatcccaactcctgatacacaagcactcctcttacagcagacattctggaagaagtggttttcacagtcatatcag

SEQ ID NO: 613802 - DNA, 793 bp, Homo sapiens
  misc_feature (747)..(747): n is a, c, g, or t
  misc_feature (756)..(756): n is a, c, g, or t
ctccgagactaagcaaccccctcagaaatttaaatggctctttccacgacgagcaaaacttaagtgtcttcatgaaactgagtaaaaactggaactaacacctgtctcccacgatcccagtttctgatagagaccggcatccgcaaaacattctccagccgcccaacattccaaacagcccgtccaacactcgcgcacgttcaccaccggttctcccaagcccgccatcccaccgccacggccgactcaaggctgcttatccccccacccccaggcatctaaaagttccacctcaaccccattgggcgaaccctcgcaggcaactccagtattcttctgccaacaaaggcccgagcctgtcaccttccacccctcagggatccagatggcaagaaagaaatttagtggattggaaatctctctgattttcctttttgtcatagttactataatagctattgccttaattgttgttttagcaactaagacacctgctgttgatgaaattagtgattctacttcaactccagctactactcgtgtgactacaaatccttctgattcaggaaaatgtccaaatgtgttaaatgatcctgtcaatgtgagaataaactgcattccagaacaattcccaacagaggtctgcagcaaaagtctttaatatttttaatgaatatatacattattatattaagataattgctgaatattggatcgatcttatttaataaagatctagacatacgngcaggtgancccaccatgatcataatactggtagaagtagagaaaa

SEQ ID NO: 613803 - DNA, 2013 bp, Homo sapiens
  misc_feature (1)..(1): n is a, c, g, or t
  misc_feature (1962)..(1962): n is a, c, g, or t
nagggatggaattgctccgctctccctttgctcaaaggaccaaaaaggcatcgccttaattgttgttttagcaactaagacacctgctgttgatgaaattagtgattctacttcaactccagctactactcgtgtgactacaaatccttctgattcaggaaaatgtccaaatgtgttaaatgatcctgtcaatgtgagaataaactgcattccagaacaattcccaacagagggaatttgtgcacagagaggctgctgctggaggccgtggaatgactctcttattccttggtgcttcttcgttgataatcatggttataacgttcaagacatgacaacaacaagtattggagttgaagccaaattaaacaggataccttcacctacactatttggaaatgacatcaacagtgttctcttcacaactcaaaatcagacacccaatcgtttccggttcaagattactgatccaaataaaagaagatatgaagttcctcatcagtatgtaaaagagtttactggacccacagtttctgatacgttgtatgatgtgaaggttgcccaaaacccatttagcatccaagttattaggaaaagcaacggtaaaactttgtttgacaccagcattggtcccttagtgtactctgaccagtacttacagatctcagcccgtcttccaagtgattatatttatggtattggagaacaagttcataagagatttcgtcatgatttatcctggaaaacatggccaatttttactcgagaccaacttcctggtgataataataataatttatacggccatcaaacattctttatgtgtattgaagatacatctggaaagtcattcggtgtttttttaatgaatagcaatgcaatggagatttttatccagcctactccaatagtaacatatagagttaccggtggcattctggatttttacatccttctaggagatacaccagaacaagtagttcaacagtatcaacagcttgttggactaccagcaatgccagcatattggaatcttggattccaactaagtcgctggaattataagtcactagatgtagtgaaagaagtggtaaggagaaaccgggaagctggcataccatttgatacacaggtcactgatattgactacatggaagacaagaaagactttacttatgatcaagttgcgtttaacggactccctcaatttgtgcaagatttgcatgaccatggacagaaatatgtcatcatcttggaccctgcaatttccataggtcgacgtgccaatggaacaacatatgcaacctatgagaggggaaacacacaacatgtgtggataaatgagtcagatggaagtacaccaattattggagaggtatggccaggattaacagtataccctgatttcactaatccaaactgcattgattggtgggcaaatgaatgcagtattttccatcaagaagtgcaatatgatggactttggattgacatgaatgaagtttccagctttattcaaggttcaacaaaaggatgtaatgtaaacaaattgaattatccaccgtttactcctgatattcttgacaaactcatgtattccaaaacaatttgcatggatgctgtgcagaactggggtaaacagtatgatgttcatagcctctatggatacagcatggctatagccacagagcaagctgtacaaaaagtttttcctaataagagaagcttcattcttacccgctcaacatttgctggatctggaagacatgctgctcattggttaggagacaatactgcttcatgggaacaaatggaatggtctataactggaatgctggagttcagtttgtttggaatacctttggttggagcagacatctgtggatttgtggctgaaaccacagaagaactttgcagaagatggatgcaacttggggcattttatccattttccagaaaccntaattctgacggatatgaacatcaggatcctgcattttttgggcagaattc

SEQ ID NO: 613804 - DNA, 790 bp, Homo sapiens
gatagggaataggaccaataatttaaaggactctaatcggggatgtttttatatggcgtggtaacgaacaatatggcttgtccaggttgttttgatttgccaatcggaatatttccctttcagaggggaaatttggataattacacagaattccatattatgcaaattgttctccccttaccaatatgtttttcatgactcacagggtcgcatccttttttaaggtataaaaacaaagttgtgaatccggaagaaaggtacatgttgttaccttatgaatacacaccaagccctttggtaaatagagtttggatttcttcagggcgagtcaataggattctacactgtcaattttaaaagtatgattggatcttttccttttgatgaatagggcttgaaattgtgggtctttttaaatgcaaaatttattttaaaattttcattttataagaattcatgtattctttcaaaaagtacttattacttgataattctgagaaaattaatttaatgtcatgttttattttattgagttttttcctcccccagaaattagtgattctacttcaactccagctactactcgtgtgactacaaatccttctgattcaggaaaatgtccaaatgtgttaaatgatcctgtcaatgtgagaataaactgcattccagaacaattcccaacagaggtctgcagcaaaagtctttaatatttttaatgaatatatacattattatattaagataattgctgaatattggatcgatcttatttaataaagatctagacata

SEQ ID NO: 613805 - DNA, 322 bp, Homo sapiens
atctagaggatcccgtaagcgtcagggtcagggccgatcaggctctggggagtgaggtattggaatctgaggctcagggtcagggcccgcgtcaggctctaggagtgaagctattggaattgaggtcagtgtggagtgcaggctcaggaataggtattagaatccaggtatgaagttcaggtttggggaattagagccgtgagtatttggggaagagcacggagcgctgctagcacggggcttgggtgttggaacactgggcctcctgcctggggtctgagatgacagagtagggggttaaaaattttgtggggcccccccc

SEQ ID NO: 613806 - DNA, 313 bp, Homo sapiens
acccgcggcgtgttcatgcagaaagttagaggggtttaaaagctaaatccaagtcctggtgacagagtgagaaccgatgcaccttgtggaagccagacagcagagtgagccttcagtcagtcctgtctgcagctgctttttataaacttggcataaatatgtgcttgggaacaccaggacagtgtgtcttggatatacctctaccattagaaaacacacacatacatcacacataacacacatgcacataacacacatacatacatcacacacatacacgcacacatagcacacacaaacacaacacacacag

SEQ ID NO: 613807 - DNA, 826 bp, Homo sapiens
gggagggtgtcctaacgaataaaaggaaatgaatcccacacccggcagggttgtcccacaacagcaaaccactcggctatgtttgtccattatagatgtatatacagcaacgcgaaaggcatacataacatctcaaacttcacattgttgtaaaagccacaagaactataaggtaaaaaagcagtgcataatatggcaaatgaattgggaagagaggacggcgtaaaacacaattgagaaattttatttggagaattattggaaaggaagcgtaatatatagcaaaaatggtgcaggcataagtaacaaataaagccgtatctgcagaggcggccacgaagttgctttccgatgccattagagatattccaccggtggcaatgtacagtaaattttttgacacaatagggtccgaatcaagttaggtgtccagaaaaaagggatccagatggcaagaaagaaatttagtggattggaaatctctctgattttcctttttgtcatagttactataatagctattggccttaattgttgatttaacacataaaacaccgcgggtaaatgttttttcttcccccggggaaattagtgattctacttcaactccagctactactcgtgtgactacaaatccttctgattcaggaaaatgtccaaatgtgttaaatgatcctgtcaatgtgagaataaactgcattccagaacaattcccaacagaggtctgcagcaaaagtctttaatatttttaatgaatatatacattattatattaagataattgctgaatattggatcgatcttatttaataaagatctagacata

SEQ ID NO: 613808 - DNA, 801 bp, Homo sapiens
ccggacatattctacggtataacggttaacacataatcatgggattatgggggaaaatgcataggtaattgtcgtatatgctgagagtagtaaagtacatatttgtgaatataatttatgtgaaaaaattaggaagacagaatagtaacttttaagcgttaacgatgataataaggatatagaggagctataataaggacttgaacaaaaggaaatataaccgctacaaaatgtggggaaagtgttattttatgtcattatacaggcaataaaacctcctagtacgggaatgttaaagggagaatgactcgaaatgcggaaaaccccacataagttctttctcaaacctataagaaaaaaaacaagttggaatatccagtgactatatgggcccagagaagccccaacctttcaaattgtccagatatagggattcaaaagggcaggaaagtaatgttggggagcggaaaaactccataaatttcctttttgtcatagtcacaagaaaagcaatatccttcattgttgtttaaaaaagataaacacacctgcggttgatgaaattagtgattctacttcaactccagctactactcgtgtgactacaaatccttctgattcaggaaaatgtccaaatgtgttaaatgatcctgtcaatgtgagaataaactgcattccagaacaattcccaacagaggtctgcagcaaaagtctttaatatttttaatgaatatatacattattatattaagataattgctgaatattggatcgatcttatttaataaagatctagacata

SEQ ID NO: 613809 - DNA, 118 bp, Homo sapiens
ggttttttgggggggggccaaaatttttggttttttagcccccccatttgtttaatttaggatttttcgcccttggcctgggccccaataaggggggtttagggcttttggaaattta

SEQ ID NO: 613810 - DNA, 2420 bp, Homo sapiens
  misc_feature (2369)..(2369): n is a, c, g, or t
ctctgtcgcacctatagcgccacataccgtaccgagttcacgatgcgcacgagccatgatgcccgctgccaatctttagtgttgcgctcccacacttttcatacatagcatttcaaattacttccgctcgcgcacgctgcgcatctctgcggacgcgatccacgcgtacgctatccatcgccattttactgtcgcgtggccgcagattgcgcactccgtcactagttccgctgttatagtccgcttgaagcccctgaggtgtgaagcctcgggaatgatcttctccgaggcctaatgaaaaatatgagacggtgtaatatccggtggtgttattttgccataatggctctaggcctgtcaggtttctcgggaacagggatccagatggcaagaaagaaatttagtggattggaaatctctctgattttcctttttgtcatagttactataatagctattgccttaattgttgttttagcaactaagacacctgctgttgatgaaattagtgattctacttcaactccagctactactcgtgtgactacaaatccttctgattcaggaaaatgtccaaatgtgttaaatgatcctgtcaatgtgagaataaactgcattccagaacaattcccaacagagggaatttgtgcacagagaggctgctgctggaggccgtggaatgactctcttattccttggtgcttcttcgttgataatcatggttataacgttcaagacatgacaacaacaagtattggagttgaagccaaattaaacaggataccttcacctacactatttggaaatgacatcaacagtgttctcttcacaactcaaaatcagacacccaatcgtttccggttcaagattactgatccaaataaaagaagatatgaagttcctcatcagtatgtaaaagagtttactggacccacagtttctgatacgttgtatgatgtgaaggttgcccaaaacccatttagcatccaagttattaggaaaagcaacggtaaaactttgtttgacaccagcattggtcccttagtgtactctgaccagtacttacagatctcagcccgtcttccaagtgattatatttatggtattggagaacaagttcataagagatttcgtcatgatttatcctggaaaacatggccaatttttactcgagaccaacttcctggtgataataataataatttatacggccatcaaacattctttatgtgtattgaagatacatctggaaagtcattcggtgtttttttaatgaatagcaatgcaatggagatttttatccagcctactccaatagtaacatatagagttaccggtggcattctggatttttacatccttctaggagatacaccagaacaagtagttcaacagtatcaacagcttgttggactaccagcaatgccagcatattggaatcttggattccaactaagtcgctggaattataagtcactagatgtagtgaaagaagtggtaaggagaaaccgggaagctggcataccatttgatacacaggtcactgatattgactacatggaagacaagaaagactttacttatgatcaagttgcgtttaacggactccctcaatttgtgcaagatttgcatgaccatggacagaaatatgtcatcatcttggaccctgcaatttccataggtcgacgtgccaatggaacaacatatgcaacctatgagaggggaaacacacaacatgtgtggataaatgagtcagatggaagtacaccaattattggagaggtatggccaggattaacagtataccctgatttcactaatccaaactgcattgattggtgggcaaatgaatgcagtattttccatcaagaagtgcaatatgatggactttggattgacatgaatgaagtttccagctttattcaaggttcaacaaaaggatgtaatgtaaacaaattgaattatccaccgtttactcctgatattcttgacaaactcatgtattccaaaacaatttgcatggatgctgtgcagaactggggtaaacagtatgatgttcatagcctctatggatacagcatggctatagccacagagcaagctgtacaaaaagtttttcctaataagagaagcttcattcttacccgctcaacatttgctggatctggaagacatgctgctcattggttaggagacaatactgcttcatgggaacaaatggaatggtctataactggaatgctggagttcagtttgtttggaatacctttggttggagcagacatctgtggatttgtggctgaaaccacagaagaactttgcagaagatggatgcaacttggggcattttatccattttccagaaaccntaattctgacggatatgaacatcaggatcctgcattttttgggcagaattc

SEQ ID NO: 613811 - DNA, 963 bp, Homo sapiens
aagaagtggaaggctgaccatgatgagcagtagatgaatgtgtatgtctaaacaaggactgctctgtgtcctcacagatgaatgaggtcatgctgggaattccctctgcagggaactttcttttcggagcatgcagttccataaatgcagatgtttgtctcattaccttggtggggattttattaaggtattattatagttttaataagtaaatatttttaggttgcagaatggactcctcatctttatattcacgaaaaagcaatctgaagaaaacaaataaaagcctgtgtatttagcaaaaaaaaaaaaaaaaaaaaaaaaaaaaaaaaaaaaaaaaaaaaggagaagaaaaagagaaaaaaagaaaaaaaaaaacaaaaaaaaaaaatagtaatataaagaagaggggcagctagatatttgggggtgagtatatgcatacgactgctagtaggaggcgcagtgtatttaacaaaggaatgaaggtagtggaaataaaacacaagacgtagtgagaaaagaactattgataacaagcgagacctatttatagtaagagaggggagagaaaaatagatggccagaaacaacctcgatacagcacgatatgtggaagaaccctccaagcagggctaacaaaggaaaactatcacgaaggggtattaaaagagggaagaaaaaaccaaaatgcgggcgacagtacgtgaaaggcggggccacataaaagtccctactccgacacccacgaagaccaacactacccatataatcaggacaccaaaagatattatacacagccaaccacagaccatcaaggcacaacaacccaagacataccaaaacaaaaacagagaagccaaaacagaccaggcacaagcccacaccaaacagacacgacacacccgaccgcgccccacaagtaccagagcacagaacgcacccccagcgagccgcagaggc

SEQ ID NO: 613812 - DNA, 227 bp, Homo sapiens
ggcgtcaagtggcccaatctaacagctccagggtagccacaaccatcgtgatgattgccattattgtgtgctagtggctagaggtagacccaatagaactctgccccaacagggcaacagccaagctcaattctccaagccccctgaacagaccttccacatccaggagaagctgttgttgtctagagctacttagtgtcaaatccaggccagcttggctgcttgat

SEQ ID NO: 613813 - DNA, 282 bp, Homo sapiens
gtcgatctctagcaggatcccctaacatgtatgtcggaaagaatctgtcatttaatctagatcacattgagatttgctgattgaagcttaagaacatctgttaactgcgactcagcatgcagaaggtgcggattgatgagtacgattactccaagcccattccaggggcaatagaagaagccctttgaggatcactggaggaagcacaccctgtcctatgtggacgttggcactgggaaggtcactctggaactatagacccttgatcgacattcattgtta

SEQ ID NO: 613814 - DNA, 93 bp, Homo sapiens
gtaagaaagcgctctatttagcctaggcttgacaatacttatatgaacatttaaactaaaggcttactccctaatcttgggtggctttccttt

SEQ ID NO: 613815 - DNA, 1193 bp, Homo sapiens
acccacgtcgtccgcaggaacgtgctgggttaagccgatgggtgcgaccggtgccaggaatgacggatgatatcatccttcttcttctctggatgtagcgagtccgaggctcgagagagctcttgtcctgcagccatggagatgtggaccgccagaggctaaggaagcgtgcgtgggtggagtgaccgttagtgctgaggtgaggcaagctggctaaaggcctggatgcgcgtcaaggcagaaggctctcggagcgaatccggagtaactgggtatgcactcagggcgtactcacgggatgacacccatgacaggcatggatgcatgctcacctgcggggatagtgacatgtgatgcccctggccacggggaagttttcacgaaagaacgcgatttcggatgagagagtgggaagccgtctctacgacatcgagagcactatggcagggctcgacatcctctagcgttaacgctagtggacaaaacttcgcgaggcgacgagtactcgagcacgctaagcgaagaagtaagaggcgaagtcgcgtctatgcgtccataggggaagggacccccaactcgcggtaatgattaaatttcgagttccctccaaaatgcccctcgaaaacattttgaccatgaatttatttctacacataggctctttgggtcgggaaaagtgcaatttgtgctcgtgaacgagttcagttaatcgtttcccagtggggctgcgctatagggaagataggagggcgcggaaacaggcgagcagacgcagccttcgccgttatagcggagaaccgtggacaaggcgcgtggaggtggcgaacgggaaagcaagacctgcaatgggcggaggtacccccattaggggttcccccctacggggacaagggcagtctctgccgtgggaaaacctggtggaactgttgcaaaggcaatttgtctctggtcctttccgccataagggccccttggattcagaacgggcgcgggggcaggaacaagcataagagaaactcacaccgaagagcgggtttggggaacacagggtgtcagcttcggggtggcaattcatacacccaacagttcgcaatagggggtgccacaagagacctttgggcggttgccgccccttgtagtgaaggggcctctcaaaggggacagtcccactgcgcacttctcacacatggagg

SEQ ID NO: 613816 - DNA, 155 bp, Homo sapiens
gctcgaccctccccactctcttcacccccaaagaataagcacagccgaggccgacatcacaccccctctctcgctgacagttaccccattccactcatttcctgctgcaactaagtcagcaacacagtttctctgatgtcggcctcggtgtgttc

SEQ ID NO: 613817 - DNA, 528 bp, Homo sapiens
gcttttcgctcaggcccgtgtgccgacagagatgggcaacgtgtcgtggcattcgataatgctaggaagctccgtagtcaccgatgagaccagaacgtggcatgaggggggtataagaaagctcattggggcacagccctaaaggccaacccttttggaggtgcttctcatgccacaggaatccgtgctgccacaaagtcaggagtgaagccaaaacaaggccaaattcctgccatctaggaagtgtggtaagggtccagctgtatcacggaaatgcgcaaggaaaaatcaccagcctttggttaccccaactgaccgagttggcttgacacctttcactgcgacggaaaactgatgaagttctggatggctcgggattcagggtcgcaaagggacagtggctgtggggtgattattcctggaaggtccggattccaaggttgtccaagtagccaggggtatcatctttggaccctactccacaggcacggcaaggaaggcccagattcatacgtatcactggcgaca

SEQ ID NO: 613818 - DNA, 157 bp, Homo sapiens
aactcccccttcccccatatgaggacgtggcaagaagatgacatggattagaaccaaaaaacagctgtcgccaaaccccgactctgtcgttgccttgattttgaacttccagcctccagaactatgaaaaataaaattttgttgtttgtaaaaaaaa

SEQ ID NO: 613819 - DNA, 228 bp, Homo sapiens
gacgcgctgtatgatgatgcccatcgtgggtaacatagtacttgccgactctcgactcttacaactaggcggctatggtataatacgcctcacactcattctcaaaccccctgacaaaacacacattagcctaacacctataccttgtacctataccctgatgacggccatacattatacacaacgcttccatactgccctaccgataacacagcaccctaaaaattc

SEQ ID NO: 613820 - DNA, 188 bp, Homo sapiens
aacaggggatcatgtgcaggtttgttgcatgggtaaattgtgtgttgcaggggtttggtatataaataatcttgtcacccatttaatcagcatagtacccaatagagtagtttttcagtcctcaccctcctctcactctccaacactaatttcccatctttcaattttcttgttatagtgctttcctt

SEQ ID NO: 613821 - DNA, 297 bp, Homo sapiens
caaagctgagagtttcaaagttcttcaaagaaataaagctgggattcttccgggcccatacatgatctccccagaaatgtccagctagatgagcccccaaatccccttaattgttccccccagtgatgccccccccagactcaaaatgatttgaggggcttgtttaaatattagatataccagggttaagatatttcagaagtatgtaaaataaacccgttttaatttaaaatttgagataaggatttttaaactattaaatccatttttgtcccatagaaatatgtttaattatta

SEQ ID NO: 613822 - DNA, 413 bp, Homo sapiens
ttttttttttaaaaaaaaaagggttttttttaaaaaaaggggtttccccccccaccaaaagtgggaaggggttttttcccccaaaaaacccctttttttttggttaccaaaaaaaaggcttttttggccctttcccttttccccaaaaaggggccccaaaaagggggttttccccttccaagttttaaccggttaaaatttttttgggtccccagggggcatttttaaggaaaaaggggtttttttttttggggggccaagggggaaacccccaaaaatttttccacgccttttgggcaccccccaattttaaagaaagggggggggggccttccccccccggggtttttattccccaaaaaaaaggggccccccgggaaaaaaaccaaaaaaaaatttttgttttccttgga

SEQ ID NO: 613823 - DNA, 262 bp, Homo sapiens
  misc_feature (6)..(6): n is a, c, g, or t
gctcantttcagttctgggctcggacacagaaccactttttcctcctgggattccaggcttgaaatgggaggaacttccacaaaagtctctgacatgccctggagacattttcttcattgtcttggtgattaacatttggctccttgttacttatggaaatttctgcagtgggcttgaatctctcctcagaaaatgggattttcttttctattgcattgtcaggctgcaaattttccaaacttttttgctgttttccttttg

SEQ ID NO: 613824 - DNA, 230 bp, Homo sapiens
gggcacctgggagtgctgcgttccagtggcacgttaccacctgccacagagcaaggggttgggctgttttgataaggccgatggtattgatgataaagccccatggttcatggttttggatattgtaagtaaatcttctagccaaagtctaaaaatcctgtttcttatagaatcatttacagtgtttgtggaacagcgggtggcttctctagttttccatatttgaaggg

SEQ ID NO: 613825 - DNA, 211 bp, Homo sapiens
  misc_feature (66)..(66): n is a, c, g, or t
aacccaggaggcggaggtagcagtaagctgagatggcaccaccacactccagcctgagcgacagangggactctgtctcaaaaaaaaaaaaaaaaaaaaagtcccctgggttccgggccttaagaaaaaaaaccggttatacaacttgggggtttaaaatttttttttttccccgccaaaaaaagtttttgaagggaaccattccttacat

SEQ ID NO: 613826 - DNA, 750 bp, Homo sapiens
  misc_feature (3)..(3): n is a, c, g, or t
  misc_feature (19)..(19): n is a, c, g, or t
  misc_feature (23)..(23): n is a, c, g, or t
  misc_feature (26)..(26): n is a, c, g, or t
  misc_feature (41)..(41): n is a, c, g, or t
  misc_feature (43)..(43): n is a, c, g, or t
  misc_feature (51)..(53): n is a, c, g, or t
  misc_feature (84)..(84): n is a, c, g, or t
ccnagttccttgtattccntacnccnctctccccccaaggncncagcgggnnngtcattatggccgggggaggtggggagaatnaattttttttggtggttattggaggatagataaagggggggtattaggaaggagtgtgggggcaagaatgataacatgggggatgaatggcagaaggtagattgatgttgaaatttaggagggatgctgaggagtgatgatgaaaaggaggtactaagaggggtatgtttgtgggtaaagtggaaaagtttgaggttagagttaaagaggagtatagttaaagaggggggtaattggcttggggaaaatgggatatgttaattggggttagagaaataaaggagagtttgggctgttttgttaatgcaggtgttaaagaatagaaaaggggaaggaagataatgaatgaacaggggtatagaggttataaaaaagagagggggaaagggctaaagaggggtgtatttggtggggattgtagatgaacgaaattgtatgcataaatagaaattggggtttagaagagcttttttattagagtaatttggtgagaagaataaaagggttggaagggggggtaggctctgaggggaagaagataaagtgtatgggaaggtaaaagtattatgattgctaatatggggtgggagtagaataaattcgggtagagggggggggaataaataaaaatagggaagaaagggagaaaaatttggatgttgagaa

SEQ ID NO: 613827 - DNA, 1173 bp, Homo sapiens
gcagtactctgtgcattggtatgaactggccggtcgtttcacagtccgaggtcactagttcccggtagttcagctgccacatgaatagaacagcaatgagagccagtcattatggcactttgaagagattctaatcgtaatcaatgtgaacacgtcttgaaaaaggatccgagagtaaactgaagtgtaagctaacaactctacgcagctatataatgcaggccactgaagtgaccttgtaacatgcccaaaccatggtgtatttgacttgatcaacaatggccaagatggtgactgtcatgtgaatgtcccttgagcgatgccttgcctcatagtgacagcttgccgaggcagaacttatgttgcgattttggttgtccatgtttgagtccttcattggaatcctctagtcacggtggagcctggaacagacaggaaatcaactggtgtttgaaactctggtggtgacctccgaagatggcatcacaaagatcatgttcaaccggaccaaaaagaaaaatgccatagacactgagatgtatcatgaaattatgcgtgcacttaacagctgccagcaaggatgactcaatcatcactgtattaacaggaaatggtgactattacagtactgggaactgatctgactaacttcactgcatattccccctggtggaacgtagaggagcaaagctagacaataatgccgttcacttgagggactctgtgggctgataatagattttacttaagcctcttgattgcagttggtcaatggtccagctgtgggcatctcccgtacccttcctttgggctattcgatgcggtgtatgcatctgaacagggcacaattttattacaccagttagtcccgctaaggccaaggtccggaaaggattgtcctcttaccctttccggagataattgagccccggccaacggccaccacgagaatggtaatttttggaaacgaagttaacgcggggaggacgcctcatgtccaaggacgtgatctcggaagttatacgtaatagcgctattcgaaacaagttgtgacgcactgaagagatttgaaggaccccaagcctagagctatcaagacaagtagacgaacagaaacaactcagagctcgcacaagtctcggaggcgaatagaagatgatggcatgtcccaga

SEQ ID NO: 613828 - DNA, 907 bp, Homo sapiens
ggcctcggtgacaatgagcgctcttcctagtgtgctgggattcagtccccaaacacagcgggaggggtccctggggcagatggggcttgtaccagcgtcgggtggtttagttcgagtccctttatgtggagaaatgggagatgaaagactgaccacgtgccaggtgtggccgaagcccccgggagggccacattcgggggagctggggggtcgaggggaggagccaccgactggcatctgcttgccagcgacatggccccatccctggaagtcctcgggagcggagcgctggatcggcaggcgggctcgtgggcgtccccgatggaggagaagctgtagttattttaccaaaagttgtgtacatctgtggcagatgtatagatttctgtgactaatcactgaactagatgaatgttaaatttgtttatggtctgaagcctgagtctattgttggatctgtagaataatcattgccagggtgacttttgttcaagagaaaaggattgtactgtattaagaaccgatgaaaaaaaaattctcctgtaacatattttgaaggaaaacttgggttgtgtgagaagaaaaagtagttggtacttaacacttcattccatttttgcacttttaaagtaagacccttagggacggctttgaggcctaaagagaatccgctcgaccggtcacttacagcataccagcacgatgcacagaaggagcggggcccgccaaataatagcacacccaggggggggacaacagttaggtcaacgccaggatgtccgtataggcagggggcccacaagggagacagagaagaataacgcagcgcgacggcgttaacaaaggtgtcgtgcgtgagacagacgagccgggcactttggaagcacaccaacgtggggggggacac

SEQ ID NO: 613829 - DNA, 819 bp, Homo sapiens
agcgggttccgcgtccccgccgccgggaggaggtgcccactcgctcgcggcgcgcgccggccggcagactcgggctgtgggcgattgcctccgtgaccgcgatggctccctcgccacgaggaggaagatgcagacgcttgtctgaaagggtaagagagtcggctactggctgagtcgagaagaaaactcaagaatgctgaatttccaggtcttcgccgagctgtgcaagctgaatccttagtcggccgatcgaggagcagggcccccgtggacgtcatcatgccacaagctgactgacgttatccttgaagccgaccagaatgatagccagatcgctggagctgggtgcacacggttccaggatgtacatcgatgcccagcactgagaccgatctgtccgggactacgctcgccgtgccatcggaaccctgcttgaccgttccaagtcgcgtatgaggctcatgccggaagattgaggcctacatggaagacgagcaggatctgtctcggcacccttcatggagctcacgagccgtgtgcggggatgacaaccatgcggctgtcgggacgaaagaacggcttgagcttgtcccgattcatttgcaaaaccagaggtgggtcatggcaccaagtctcacgagatggctatcgtgttcaaccaggagggcctgaaggccatcgagtcagcctgcgttggtccagaatttcatcgaacacaacgccgtcctgtaccaagtgtaccgggttggcgaatctacgcggtggtccagaggcccttactcaagaacttctcggcagggacattagaccgtggattca

SEQ ID NO: 613830 - DNA, 722 bp, Homo sapiens
cccaccaggttttagatgcgtgtagagcgggatgtacctgaatgtcactgacccagctgcgagggggggaacagagcacaactacggtgatgatcatcaaatgtgctgatgacgaaaaactagggcactcatggagcgactaagctcaccagtatgctgtaaaccgaatggattatcatatatagtgagctaacgcacccaaatgtcttccattgaaaggcctgtctgcaaggaggagccagagccaggatttaagcgccatggcattggggccagcctgtgggcctgaggcatacaggctacgtcattgagctgcactttgttgccaagggccccagtggttgtttagagagtctgaaggtgacctgcagcacgggcaaatgctggatagaagccaaaggcctccattcactgggtgtcacagcctttgatgggcgaggtttgcctatatgagcgactgttaaagcacaagaaccctgaagatctactgaggtgcctggaggatttttaagcgacctgaacctgtcatcaatacacctgaaggatgcagctttacaagactgctctgaggccctgggagacagccatcaggttaagctcgaattgtaccgaactggcacactgcatgaagactcaagaaaggtgccggctgggagcactgggcttacctcattctgcagcagggtgcggttacaatgagcggcgcaattacatgtaagaag

SEQ ID NO: 613831 - DNA, 603 bp, Homo sapiens
  misc_feature (38)..(38): n is a, c, g, or t
  misc_feature (75)..(75): n is a, c, g, or t
  misc_feature (169)..(169): n is a, c, g, or t
  misc_feature (262)..(263): n is a, c, g, or t
  misc_feature (500)..(500): n is a, c, g, or t
ccctctcctatgggggaggagtgggtgggcctcttttnaaaccgcggggggggggggtgctcccccaaatttgtncccccccgccgcgccccggggtgtgtgtttggcgcggggggggtactctccccccgtgtggccccccccttttcccccaaggggggcgctctcnggggggtctccccccaggggggggggtgtggggggggggggtgtttttcataaaaaactcccccccccccccccccccccctttctccccccnngtgaggggaggggggggggggggggggggggggggggggtttttttttttcccccccgcgggggggggttttttttaaaacccccctttggggggggggggggggcccccccccgggggggggggttttttttttcccccccccccccccccccgggggggggggggggggcccccccaagggggggccttttttttttggccccccggcccccccccccccccccggggggggggngggggggggttttttcccccccccccccccccgggggggtttttttttttttttttttttggggggggcccccttttttttgtggggggggccccccccccca

SEQ ID NO: 613832 - DNA, 781 bp, Homo sapiens
cgaccgccgcggctaactggtgctacgcaaccgtcgcgccccgtgcccgctcctccaccatcgtcgccagcctcggcacccccgcgccctccaactcctcctccttccgccccaagctcatcaggaacaccccagtccaggccgcgcccgtcgcacccgcattgatggacgccgccgtggagcgcctcaagaccgggttcgagaagttcaagaccgaggtctacgacaagaagcccgatttcttcgagcccctcaaggccggccaggcgcccaagtacatggtgttcgcgtgtgccgactcccgtgtgtgcccctcggtcaccctgggcctggagcccggcgaggccttcaccatccgcaacatcgccaacatggtcccgtcctactgcaagaacaagtacgctggtgttggatcggccatcgaatacgccgtctgtgctctcaaggttgaggtcatcgtggtgattggccacagccgctgcggtggaatcaaggctctcctctcactcaaggatggcgcagacgactccttccacttcgtcgaggactgggtcaggatcggcttcccggccaagaagaaggtgcagactgagtgcgcctcaatgcctttcgatgaccagtgcaccgtcctcgaaaaggaggccgtgaacgtgtccctccagaacctcttgacctacccgttcgtcaaggagggtgtgtccaacggaaccctcaagctcgttggcggcactacgacttcgtctccggcaagttcgagacatgggagtagtaaatcttcccc

SEQ ID NO: 613833 - DNA, 977 bp, Homo sapiens
ggagctcttagagataagacatagaggtgtctggttctgagacaaggaagttccgctaagtgagagacacaactgactcagactgactcagagaacgtgattatattcctggtccctagaacgaacctatatgagacactccagtccctgacgtccaccttgcctccaggtgcccagaacagcccatcgtggggacttcaccctcagcaagtggacgccgcttggtcctgccagggcaggatgtgtgtctgccttggggatgtacaagcgacaataggcctctcatgtgccaggcttcccgtgtgctcaaagtcctcaggaaggagcccaccactggttggagggactggagactggatgggcgacccagtagtaacctgcactgcccagggtggcaaaggcatagtatcactcattactaaagtatcgagcagggcacaccgtagctgggtgcacgcatgtggtacttggtggcatgagcagcgttgatgtcagaccaaatatcgatccagaataatcctccgagatccgtgcatgaagatggcagctgccccacgtcagtgccctggaggtgaagcaaacgacggctgggaaagtaaacgtaacaacaagtggcgacaggatgctatgcacgactgggacataggatatagcgaccgctcccacggaagctcgtctccatagagtatacaaagtcatttcccctggcggttacggggccggatcgtgggtcgcttatgactactagtattgacagaatcaagttgcatgaaccccaggcaagtacaaaggtccttaaggagaagggcgcgagggtcctccaaaatcaatccactgtgcatccagctagatgtcatgccacccctgcagaagcgctgatgtcctcaaagatcggagtcaaccgcaggatttgtgacctctcgggctatgtgaaataacccggggggcaacacacgacaaccgtcctgcattctctc

SEQ ID NO: 613834 - DNA, 358 bp, Homo sapiens
  misc_feature (9)..(9): n is a, c, g, or t
  misc_feature (142)..(142): n is a, c, g, or t
  misc_feature (159)..(159): n is a, c, g, or t
  misc_feature (168)..(168): n is a, c, g, or t
  misc_feature (175)..(175): n is a, c, g, or t
  misc_feature (201)..(201): n is a, c, g, or t
  misc_feature (219)..(219): n is a, c, g, or t
  misc_feature (247)..(247): n is a, c, g, or t
  misc_feature (293)..(293): n is a, c, g, or t
  misc_feature (339)..(339): n is a, c, g, or t
gtgattgtnccactgcactccaggttgggtaatgcagcgagactgcgtctcaaaaaataaataaaataaaaaaaaaaaaaaaaaaaaaaaaaaaaaaaagcaccaccgcactccagcctgggcaatagagtgagaacctgtnttccaaaaagaaaaatnttaaaagantgatctnggccaggcgtggaggctcatgcttgnaatcccagcactttgggnggccaagaacaggtggttcacttgaggncaggagttcgagaccagcctggccaacatagcaaaacccccatctntactaaaattacaaaaagttaactgggcatggtggtacatgccctngtaatcccagttacttccg

SEQ ID NO: 613835 - DNA, 426 bp, Homo sapiens
  misc_feature (34)..(34): n is a, c, g, or t
  misc_feature (397)..(398): n is a, c, g, or t
ctgccccgtaagcacaattgcgctctataggagngtgcgaagttaaagcctcaactcacgtgcgcgcacgagtgactcacgcccgtgacatggccagagccctggcgaggccgaggtgggcggatcacctgagttcaggagtttgagaccaacctggccaacatgccaaaaccttgtctctattaaaactacaaacaattaatggggcatgggcgtgggcacctacaatcccagctactggggaggctgaggccaaagaatcacttgaacctgggaggcgaggttgcagtgagccaagattgtgcactgcactccagcctgggtgacagagcaaaactcatcttaaaaagaaaaagaagacgggatagaaagaaagatggacgaaagaaagaaaganngaagaagaatgatgtaggctggacccgt

SEQ ID NO: 613836 - DNA, 91 bp, Homo sapiens
  misc_feature (71)..(71): n is a, c, g, or t
  misc_feature (90)..(90): n is a, c, g, or t
cctggcagaataatttggataattctttatatcactctgaagctaattgactatctgagatgtgttgttcntataaagtgaagtgatctna

SEQ ID NO: 613837 - DNA, 1315 bp, Homo sapiens
  misc_feature (170)..(170): n is a, c, g, or t
  misc_feature (565)..(565): n is a, c, g, or t
taaacctttccttatgagcatgccggggttggggttggacagtggagggtacataatggcactggtcgggttggattggtgaagattattgggcgctggtcacattggtccagtctcagtggttttcaatctggcaccgcaggcttaatcgcggacggagaatgtttccnatggtgtaacttatatctactaacacatattagagattctctctatataagggtgagataagtattgggtcccaattgggtgttgtggagagagtctcagttaataaatgtgttgggggaattttaaaaggtaagtggggtggtctgagctatgaaagcgcgcattctcatttaacagtgggggtgggcgtggcttatatagaggcgccactaccatagtgggcgtgtgtctacaattttttttataacagcttcgatcttacatacccagagggggtttttataatacgctatagtgtgtttccccaagagagagcgcgtgtgtctcccctctttgggggcaatctaacacgacgttttaacaatatatctcaccaagagggagggaaaatctntcacgagacggggattctccgtgtggggccgccacacattctatcacacgaggttgtgacccagcttcaagacattctcctaactacttggtggaaacaaacaacccaggtatatatcacacccgagaggactctgcggggataaaggtatattgatggagtccgagccctactctataataaacccctgtttgctgccgcaggacacaaaataaccactaatttttaatatcacactaacagaacaaaaagtatcagataacaaataaaaataagtaaacaatacaaaaaataacacacataaaaaacacaaaaatcctaagagagagaacaagaaaccataacataataatcacagagggacaggaagacgagacgaaaacaaaacaaagagtccgtatcatataaattcagaccactaggatgagccaactaggcaggatactaacaacaacagggctcgagggtagatacctcagcgcgaacacaccacaagaacaattcatgcctgatgcaaacccacgaggggaagaaacaaacagcaagggggggagacacccccccaatactaggggagaggaagcaaggatcaactaaaaataattacgcaacaccaaacaccgcgcacggataatgaccgcgcggtaataagaagaaaaaccgagagcgacgaagataggccggtccacgcagcagcagaagatcagtccgacgagacgcacaatcaacaagaggagcagaagccacaag

SEQ ID NO: 613838 - DNA, 157 bp, Homo sapiens
ggctaagaagaatacctctcttggatacccgttttggtttttttagtcaatactactaaaggcttagtaatgatatctcacaattaaaaactatgacggaagtgatctcaacatcgagagaacactggcacgcagagaaagagcgggaccagcagat

SEQ ID NO: 613839 - DNA, 218 bp, Homo sapiens
gttggtattaaggatcccagagtcattctgcatctcagatcaggtgtactgatattctaagtgtctagatggttaattcttttaagggcctgttctcggctagctggcatcatgtataaaataattctctttaatatgctcggggtctaggtgttaatagagtgttggcttaaagatcatgcagagaagtggaggtcgtgggtaccgggagctcgaat

SEQ ID NO: 613840 - DNA, 123 bp, Homo sapiens
gtgttgactgacttacagttagtacgagattgaggggagaaaaagtgaacgggctaaaaggggtaaagtttgcgctgtgttggcctcactccacttgagttactggggcctgagtcctaagga

SEQ ID NO: 613841 - DNA, 351 bp, Homo sapiens
tagctaattcttattaatcgtaaagatggagtcaagctagtacgcccaggatgatctcaactgcggtctcacgtgatcctccctccttagcctcccaacgtgctgagattacaggccgtgacaatcaatttctaacaaactctcaaatattgtagacgctactttgtctttgacctcaccaccctcaaatacacacacggatttgaacagacacctactaactgacaaaaacgactttgtagaccctacctgggcccctgcacacactaccaggaccacacttctgaagtatcacatgttgcgggctactgacgggacttacagacggatctacttacgactcacctgaca

SEQ ID NO: 613842 - DNA, 196 bp, Homo sapiens
  misc_feature (153)..(153): n is a, c, g, or t
gggtgttgacagtgtgggacagaaaaatgaactccatctacaagtgattacctagttgtgagctgtggcatgtggttagaagccatcagaggtgcaaggcgttagaaaagaccctggccatgaccctgactccactctataaaccctgggtcnttctcctttggctggtgctagtcagacacctttcaacgggggg

SEQ ID NO: 613843 - DNA, 156 bp, Homo sapiens
agagatatttcactgaaggagtataagcagatgacagagagaacatgagggacgttcgcctacaccgggccatcatgcggggatcagtgggggctgctgtatgtcttggatgccgaacggggacggtgacataggcatcatagccaaagaggcacg

SEQ ID NO: 613844 - DNA, 412 bp, Homo sapiens
tcgacttttgaatgatctgctgaaccagcctttaatacctgggataaatcccacttggtgtatattctaacatccctgccatatctgactctggttctgatacttgctctttctcgtcaaactgttttttcttgcctttaatatgtcttgtaatttcttttcttgattactggacatgacacacaagttaagaggaactgctgcaaacaggcctttagtaatgtggtgataaaatatggagggagaggaagggttctatagtcctaggagggggtctcaatcttttagtgagcttgtaccactgaactgtgaacttcacacatgcttctcaggcccccctgacccccttgcataggacaagatggctagagtgtattggagttgggtatttcccttcttccatgtggaaggc

SEQ ID NO: 613845 - DNA, 139 bp, Homo sapiens
ggggctgccaggctgccaggtgatggaggggcattccagagtcgtggaggagctactgacagggacttggtagtaaaatctctcggcgtagcagcgtcgggtatctacgccagctaagttcacttcgtgatactcggga

SEQ ID NO: 613846 - DNA, 94 bp, Homo sapiens
ggatttgctggtgcagtacaactaggcttaataggaactcgaattcaagttctaaacgttagaagcttgaattcgagcagtagtagtagtaggc

SEQ ID NO: 613847 - DNA, 165 bp, Homo sapiens
gacttagatccacactggcattatccagacatactttcactcaaaaagacacatgctcctgtggagttccatcgtgctcagtggttaacgaatccaactaggaaacatgaggttgctgggttcaatcccgtggccttcgtcatgttgggttaatggatcctggcg

SEQ ID NO: 613848 - DNA, 145 bp, Homo sapiens
cactagaaactgctacagacttacccgtatattgtcaagatcatagctgactttaaaaacagtagtaataaactttttgatgctagctgtttactgggttgatgtttttgatgtcataaatagaccttgtttaagtagtcacaag

SEQ ID NO: 613849 - DNA, 446 bp, Homo sapiens
aatgccgacatacacgaaatcaatcaaatagattatagactgaattttagatctgaaactatgaaactactagaagaaaacactggggaaccaccccgtgacattggtctgagcaaatatttcttgtgtaagttctcaaaagcacaggcaaccagagcaaaaatagacaattggaattacataatgctaaaaagcttctgcaccacacaggaaacaacaaactgaatagacaaaccacagatagagagaaaatctttgcaatctaactgacaagggactaataacctgaatatataaagaactcaaacaactaaatagcaaagaaacaaataatttcattcttaaaaatgggcaaaaaattgggacaaacatttttcaaaaagaagacatacaagtggcctacagttatattttttaaatgtttgacattgctaatcatcagataa

SEQ ID NO: 613850 - DNA, 273 bp, Homo sapiens
  misc_feature (14)..(14): n is a, c, g, or t
gagtgaccagaggnaagaagagtgaacacagcgtagtgaacgaatcagcacgaaagatccccatgttgttgggaaaagcctatgaacgtcatcagcgacgcactatcggcctgacggtgttggccgcgctgatggtgccgctgacggcgggcacgatgctgatgctgatgccgccggcccgcgcggtggacaactgggaggtggagggcgcgaacggcacgctccacgtctacggcgcgttgacggaaagcgcctgcagtctggaaatgacca

SEQ ID NO: 613851 - DNA, 1272 bp, Homo sapiens
aactacctcggactcctgcctcactcatttacaccaaccacaccaactatctataaacctagccatggaccatccccttatgagacgggacgcagtgattataggcatttcgcgtctaagattaaaaagtgccctagcccacgttcattaccagcagaggcacacctacagccccattatccccatactagattattatcgaaaccatcagcctacgtcagttcaaccaaactagccctggccgtacgccataaaccgctaacattactgcaggaccaccatactcatgcaacctaacttggaagcgccaaccctagcaactatcaaaccacttacaccgttccctctacacttatcatcttcacaagttctaattcatcactgactcatccatagaaatcgcatgtcgccgttaatcccaagccatacgtcgtgcacacgttctcgtcaagcctctacctgcacagacaacagcatacacaaacacagcacgcaaacaaaacacaaacaacacacacaaaaaagcggcagcacagaacaaaaatacccaccaggcaccccgtaaacagagaaacacaaaaacacgcaacaaggtgaccacaaacaagaaacaaaaaacacgcacacgacaccaagacaaccacacaaccacccaccaggacacaccgcaacaacatggcaccaccagagaaacaaccactccaacagcgagccggaccaaccacggaaccacctcacgccgaccatcacagagcccacacgggcacacaccacaccacaagcagaccacaggcgtcaccacaacccaaaacaaatgaacacgcgccgccacacgacagaccacagagaacgacccgcagcacccactcaccaaccggcgcagagcagcacagagcccacacacccaaaccacacccccacagaccacaaaccaacgggacacaactagaccaccagaaccacaccgcagaccaaaccacaccacacaccgggacggacagtctggaaacacgcagaccacgagaaccagagcgaaacgacgagacagacgaaaaaccaaagaaaggaagaacagacacgaaaatcctagcagaatcgagaacaagacaaaaccgaagagacaaaagagcacgcgacgaaaagcaacaacgcagagaacaggagggcaaaggaacgacgaagcaggagaaagcggagagaaacaacgccaagaaccagaagaagagacaaaaaagaaaaacaaaacagcaagcaagacagagaaaaacagag

SEQ ID NO: 613852 - DNA, 135 bp, Homo sapiens
cgagctgccccccccagggacccaggctttgatgcgagatccatcctcgttcaaggtttggttgacaggaacagagctcatcgaggcgcactcgacagagatgtgcccacgagcagtcgagtacatgtttctggt

SEQ ID NO: 613853 - DNA, 1348 bp, Homo sapiens
acccacgcgatcgcggacgcgtggtatcgaccacgcgtcgggcagcggatgccactgatggaggccgtggtgaacaaccaccatggaggatagcccgatatacatggtgcagcgtggatggcatgtgtctatcgcaaggaggaggacggttccaccttggcatccaccacgcagcacaaaatcgggaacattggagatggtcagcctgtctgctgagcacaaggacaggtggacgtcaaagcccaggacagtggggggtggacggcccatcaatctgggcatgcagagcaacaaggcacatcgaggatgatccgacatgctaaatgacgacggggcagccgaacgatcaaccatcacttgacaacgacggaagaacaatctggcctgcaactggagccatccattcaccggagcagacagaccgccaatcgaaacggaagatcacattcatgaaagtgacgcagcatgatgaacacatccattgactggtcacaagatacacaatgggagaaacaaccaccccacgtgaacaaatacgcaagacaacggaggcagagacgtaacccatgcacctggcagatgcataggataagtacactggtacaacagtgggagccaaaccaatgaagacgtggcgggaaacaaaaaaacgaagaaggaaccacagcaaaggggcaccgtggacataccgagagcggacacggacaggaagaggcacaagaccgacatcaacacaccacaccgcaaagagctccgaacaaggagcaatggggacacatcaaggcaaaaccagacaaaagaacgaaaggcatcacacaatgccaggagaacggagagacacggaggcaacgagaagaaacagtggcaccaataaccgaagaggacacccacagaagatctgacactgagcgacgaccccggccacaggcaggaataataccacagcagaaacaccaacacaaaagaaacagacaacaagacacggacgtcatcgaacagagaaaacaaccacacaggtagaagcagagcacaagaaggacaacaaggcacaccaacaaagaagtaggaacggaaaaaaacaagaaagagaagagaaaacgcagacggcccagacacagaaaacaacagaaagtgacgagcgaagcaagaaggataagcagagaaggaagcgagaaacagccacaacagaacaaaaccagagaccagagcgacaaagacagccaccaagacagcaaagacgagaaacacagaaccagcaaaaggacgaagaaggcagaaagacaacagacaaagagggagacacaacacgaaagcaggcaacgtcgacacgaacacgcaaccacacaac

SEQ ID NO: 613854 - DNA, 271 bp, Homo sapiens
tcgctattcatcggcaccaggttagttagatacagagtgttgacacaaagggtctccaaggccccaccagagtagctagatacagaggggccattggtgcattcacaaaccctgagctagacacagggtgctgattggtgtatttacaatccctgagctagacataaaggttctccaaggacccatcagagtagctagatacagagctgaagggctcctcaagtgctgccaaagtgggagcccaggcagaggaggtgccgatgaatagcga

SEQ ID NO: 613855 - DNA, 415 bp, Homo sapiens
  misc_feature (279)..(279): n is a, c, g, or t
tcgacctttgggaggccaaggcgggtggatcacctgaggtcaggagtttgagaccagcctggccaacatggtgaaaccccatctctactaaaaatacaaaaattagccagggagggtgatgcacacctgtaatctcagcttctctggaggctgaggcaggagaatcgcttgaacccgggaggcagaggtttcagtgagccgagattgtaccactgcactccagcctgggcgacaaagtgagactatcttaaaaacaaaacaaaacaacaactacaaaanaagcaaaaggagaagctgggttgggctctcaggtgggtactatcaacacctgtctgagtgggatgagggatcggaacaccagctgggcttgagaaatgggggtccacacagccccttcccagtcgacgcggccgca

SEQ ID NO: 613856 - DNA, 120 bp, Homo sapiens
gatctagaggatcctccatcttatttcattatttttaaacacagcacagggagaatccaaaatgagttcccaagatgaatgacaaatgacagcccatatcataaccaggtattttctgat

SEQ ID NO: 613857 - DNA, 761 bp, Homo sapiens
  misc_feature (761)..(761): n is a, c, g, or t
cgcgcggggagccagggcgcccgagcccggcgcgccgcagggcgcgcagcccccgacgcgccctgtggggacccggacgcaggagggaccctgccccgggaaaagggcgtgtggagaccgtgggctccgagcccgagttcatccccccacagacccgctgagcgacctgatgacagccgtggttccgcgctcgggaagcccatagtcactgcgcctgtcggtgtcatgcgcacggcatctcgtggcctagaaattcggtggagcgatgtccgggttgacccttggcattgcgactggaaccttgtgttgccaggttgcgcattggcgtgtgttcacaacggactcctgacaagggcgggcacttggcatccacttccatggtagctagttcacacgatgagcgaagcattgttgacattgtattgtgcctgaacattttcctatggcttgacggtccgcgtcggtagggggcatagcactcaatagtagcgggacccacctcacgtcggggcaatcacaacgactgttaatccaggtgttgaccttaaagtcctatcacaaccgattggttagatacatgactcagcaggggaaggatcatttaaaccttcgtctaccatcccctggcgataggattcggccattatacgtttcccagtatatagcgcttccacataacgccactgaggagaacaaccgcttcgatcgaccctttacactttgagccaatacttactgaacgcttcctcccccactatagn

SEQ ID NO: 613858 - DNA, 746 bp, Homo sapiens
  misc_feature (76)..(76): n is a, c, g, or t
  misc_feature (134)..(134): n is a, c, g, or t
  misc_feature (146)..(146): n is a, c, g, or t
  misc_feature (155)..(155): n is a, c, g, or t
  misc_feature (163)..(163): n is a, c, g, or t
  misc_feature (174)..(174): n is a, c, g, or t
  misc_feature (180)..(180): n is a, c, g, or t
  misc_feature (185)..(185): n is a, c, g, or t
  misc_feature (199)..(199): n is a, c, g, or t
  misc_feature (201)..(201): n is a, c, g, or t
  misc_feature (214)..(214): n is a, c, g, or t
  misc_feature (223)..(223): n is a, c, g, or t
  misc_feature (248)..(248): n is a, c, g, or t
  misc_feature (260)..(260): n is a, c, g, or t
  misc_feature (264)..(264): n is a, c, g, or t
  misc_feature (268)..(268): n is a, c, g, or t
  misc_feature (297)..(297): n is a, c, g, or t
  misc_feature (312)..(312): n is a, c, g, or t
  misc_feature (314)..(314): n is a, c, g, or t
  misc_feature (324)..(324): n is a, c, g, or t
  misc_feature (328)..(328): n is a, c, g, or t
  misc_feature (339)..(339): n is a, c, g, or t
  misc_feature (347)..(347): n is a, c, g, or t
  misc_feature (365)..(365): n is a, c, g, or t
  misc_feature (392)..(393): n is a, c, g, or t
  misc_feature (397)..(397): n is a, c, g, or t
  misc_feature (413)..(413): n is a, c, g, or t
  misc_feature (424)..(424): n is a, c, g, or t
  misc_feature (559)..(559): n is a, c, g, or t
  misc_feature (564)..(564): n is a, c, g, or t
  misc_feature (672)..(672): n is a, c, g, or t
  misc_feature (684)..(684): n is a, c, g, or t
  misc_feature (717)..(717): n is a, c, g, or t
gtacccggttgtcctcaggcgctgtcagatctgtggtttttctacttgaaggacacaatgttttccaaactagcanatttgcagaggtttactgtacttagtcgcggagttcattcttcaatggcttctgctanatctgttgcaantaaaaaaanaatccaangccctccaaantctgangaaanttttgaaaaggaananaaatatggtgcanaaaaataanatcctttacctgtagccctggaganaggaaaaagtanttanttangggatgtaaaaagcaaaaaatattttganttcctgagttcttanantgctgtcaancaanggcattgtcancccaaaantgtgaatgctctgaagantcaagtggaaaaaataaacttaaaaannaaanctttctaaaaaaaagnaattggtgaanaaaaggaatatattactaaacttttcaactaccacaaagttcttcctatgaatacaggagtggaggctggagagactgcctgtaaactagctcgtaagtggggctataccgtgaagggcattcagaaatacaaancaaanattgtttttgcagctgggaacttctggggtaggacgttgtctgctatctccagttccacagacccaaccagttacgatggttttggaccatttatgccgggattcganatcattccctanaatgatctgcccgcactggagcgtgctcttcangatccaaatgtggctgcgttcatggtaga

SEQ ID NO: 613859 - DNA, 276 bp, Homo sapiens
  misc_feature (10)..(11): n is a, c, g, or t
  misc_feature (55)..(55): n is a, c, g, or t
  misc_feature (109)..(109): n is a, c, g, or t
  misc_feature (117)..(117): n is a, c, g, or t
  misc_feature (263)..(263): n is a, c, g, or t
ggtggttgannccttatgaaatggcttggagccactctctcagtagtaagtgacntcttcctctattacttctcatgagagctgactgttaaaaagagcctggaaatcnccttgtancctctcttgctacgtgatctctgcacatgccagctcctttttgccttctaccatgagtggaagcagcctaaagccctcaccagaaatagatgttggtgccatgtttcttgtacagcctgcagaaccatgagacaaataaacttttnatttttataaatt

SEQ ID NO: 613860 - DNA, 865 bp, Homo sapiens
tgcacactgctcttatgtaataccttacacaactacttgtgcggtctcttctcctggggcaccccccccagtgttggcccccgacataattgcgccccctaaatcgctgtgatcccctgttcacaagttccctctcctatttggaaaacactgcttttatcttctcggaaaaaattccctgtgtcctctttcacgaaagcatattcccgcgggttgaaaaattacggggcacaccgtctgcacacagttttgcacattcctgtaaccacagtgcttatcgcaaacacccttagctgcgcgcgttaacttcaacttacacagttctccccccctgtaaacaatcaagattcgtctcacgaagggcacagaaacttcgctagcctttttcgctccaggacacctcgtggtagggctccccgtcaatatgcccccagggggcggaaaaccccagaaatgtgggcgcacatcgtgtggacaacattatggtcgtctagttgctagtcctctcccaagtgtgtacgctcacattcagcgcctttgagttacatacacggactgtatatgggttgtgacatattcccaaaacctacttctgccagtattcaaaacaatggaagaatccaacacacagcccttccttaaccaaagaattgcaatttactcatcttttgaatatttcaatgacgtgatattattcaccccctggtatgaataactttatgcataatatttcctcttggttaacacgctcctagattacgaaaacccctcccccctccttatttaaatccccggaccaccagacgtatgagaataaaatcgccccgcagttgccttttagaaactataaaacaaaaaacataac

SEQ ID NO: 613861 - DNA, 609 bp, Homo sapiens
tggcagaatattatttgcagatatctgcaaatttggtaggaaagcttttttttctaaatggaactatcctgaaaacaaagggaaaaaagggcaaacacacacacactcacacacacaaacaaacacacacactcacatgcgagccttcccccaaatccttccaagtcttcattctatttaagctgttcataaataatatctgatgataatctcattgaaaatgcatatgtttttatgttaatttttgttaatttgacatccctagacgatatcatgaaaatatttactgtgtgtacgtttgtgtgtgtgtatgtgtgtgtgtgggtgcagttttgtccccttagtccatgatgaattaaaataagtagtttacctatagataactaaaattctatacatgtcttcatgaagtttaccttatttaaccgttgcaattaacacatatcccagaaaaatctttaaattttatttttaatattatcctaatgttgctgagttcccagcaacacaattatttattgcagccaacatctaccatgcttactattacagcaagctcttttcaagttcttaaatcaataacacacaaggcagggccctgtgattttt

SEQ ID NO: 613862 - DNA, 242 bp, Homo sapiens
cgattcagaggcgttgcgcattcaacccccggacgccgtcagcaggacctgatcagcagatggtcgccgtcattcaagccgtctcagaatctggcacacgacagccggtcactgagtgccgggtgcgcaccctcgcgctgtctggtatcgtgccgctcgctggcgactacgcgcacttgtgtgccgatctggtcttgctggcctgtccttgcagatggggtacgcgagcctctgaattcgta

SEQ ID NO: 613863 - DNA, 154 bp, Homo sapiens
atcagctcggacctatttgtgtgattgcgcgtaagcagaatatttgccgtggatcgagcggcgctcactgaagcaaatgtttcagactatatgcagcatgttttagatccagaaaagtcaaaggtcattcgttatgaattacctgcgatgaatg

SEQ ID NO: 613864 - DNA, 143 bp, Homo sapiens
  misc_feature (122)..(122): n is a, c, g, or t
aattggtccgcttgctcccatgctcgtcctccagttttcagaagtctgtccagttccaagaatggctccttcctttagttcactaacattggcacttagtgggtgaagtgccgcttaccctngaagatcttgggagtctcagt

SEQ ID NO: 613865 - DNA, 373 bp, Homo sapiens
tgagtttagtgattccttccaacaaatagatgggtgtgtcactttgaggactaggtaataaaaggcattgcatcctccttactctctcttggatccttcactctagggaaagccagcagccatattgtaaggccactcaactccatggagaagacctagaagtgaggagcagaggcctccagccaaaagccatgtgagggagccatcttggaagcaattctccaggcccaaacttcagatgactgtggtcccagccaatgcattgaccacaacctcatgagagaccctgagctagaaccacctagctaagccactctcaaatatcttatctacagaaactgagatgataaatgtttgtggtttaagcaaaaaa

SEQ ID NO: 613866 - DNA, 209 bp, Homo sapiens
ccagctatacactgctataccacgtgtagattccattctttccattccgttcaagttgaatccattccattgcattacattccattcgattccattcgatttcactcgggttgattccattccattgcattccattccattccattccattccattccgttccattctattccattacattcggattgattctattggtggtatagcct

SEQ ID NO: 613867 - DNA, 560 bp, Homo sapiens
cacgcgtcgccacgcgtcgcccctgcactcaaggccacattccctcgacaacggctgcacgggctctcggcgccaagaccggcctggacctcacagcgccgagagcccctgcactcaaggccacattccctcgatcaacaggctgcacgggctgtccgggatccgaggtgtctgtccgcagactgggatgagtctactcgatgcatctccggagacctgcctgtcagatctgaggtgtctccttgactggcagagttgcgctcacgctgagggctggctgtagatgaactacatcgtctctgttgtatactttaatgttttcagataatgaggactatttcgaacgcttaagatgtgtttcattcatgaaagcgtgtagacaagctgtatttactgttctggtgttatttgatcgttgtaagttaactgaggtaagttcgggcaacagagtaggaatttacgacaaaacgtgaagctgggaagcttcccgttgagggcagtgcaggaggtgcgagttgcagactgtaggccggcatcacgtagctcgttgctcggctaat

SEQ ID NO: 613868 - DNA, 175 bp, Homo sapiens
gcggagcatatccaggcagaaaccgagctgtgtgccgaggctgatgagctccgggcccgcctgaccgccaagaagcaggaataagaagagatctgccattacctagaggccagggtggcggaggaggaggagcgctgccagcacctgcaggcggagaagaagaagatgcagcgtt

SEQ ID NO: 613869 - DNA, 553 bp, Homo sapiens
  misc_feature (77)..(77): n is a, c, g, or t
tcaccgcttatacttctaaggatcgctgtctcggattttccagtcttaattttatattttattaatctattggagtngtgcttttcccatttatagacgtgtagcagtaatgcaagaagttcttgagctgaattcctgttgtgacaacttcctataattacagtagataactttttcttttagtcgtatataacttttctatcacacttgtgcatggacaagagatatgcttcatccaataaacataagcttaaatattagatgctcttgggtcaaaatgtccttttaccaaactgacctttttatgcagtctttgggtacatcactttaaagctttttatcattttacagaatacttgtaaaagcatatccacatcttaaaccagtggtgcacatgtggatttacagctcatggactctactgttcagctttaatttataaaaccatatcacacatttaatgttatacagtatttacatatagtggaacatagggataactccagtttatgtaaatttctgtcaagtgttgtagcctgcccagagtgacttc

SEQ ID NO: 613870 - DNA, 1486 bp, Homo sapiens
  misc_feature (267)..(267): n is a, c, g, or t
  misc_feature (535)..(535): n is a, c, g, or t
  misc_feature (1154)..(1154): n is a, c, g, or t
ccataaatagttgtgtggtggctgcccctctccctccgcgctccccccaactgttgggtgggaagaagacatcccatcaagacccttgttgggggtgcttgtgtgttatcaacagtcgttggtgggcgcttcctacacacagacggggtgttgaacgattttttaatttgtggtcccccgttctggtaggagccccccccatcattggtccctccacgggctgtcccgcgcctactatttattagtggggccgctcctccgcgggcngcttaatttatgggctcgccgcccgctcgggttaaataatttttgggtggaagaatggttggggcgcacgccaccaacaaccgaccagccggggcgttatcaacaacccacgcgtcgttgggagacataatggccccacaaaagagtttttttgcgtcgtcggagagcgcttgtaagtatagggggagataatcaagagagatttgtgtgaggattctccgcctccccgcccgtcttttctgtcgggcggtgtgattataagtaaatnaagcctgtcctcggtcgatggaataagaagatgtgtgggctccccgcctcaacagaaagttgttctgctgatggaggaatagtgttctgctggtggtgtgaaataatagtctctcgtctccacaacgtgtgtgtgtagtagataatattggggaggtgtcctcctctggtgcgacacaggcccaccacactggatgtgtgtgtgttgatagaggagagcggctctctctctacagagactaatagtcgcacaccctctctgtgggggggtgtctctctgctttgttgtgctctgttgtgttcgctgatgagtagtaaagagtagagagcacacagacacacagctgtttgcgcggggtgtgggggtgtgtgtcacatctcacacacagacacactggggggagcacacacagagaagagggctctgcgctcggagagagactctgcgcgcacacagggtgtcacaccaccacagtgtctgcggtcgctcacagagaagagagtgctcacagagagagaggctgaaataaggagataatattaatgtcctctcaaataatcctcgcgcacacccacacactctctctataatcacacagtgtggtgggtagaagagaccncgggtgtctctcacagagaactctgtgttgtgtgtgttcacacattggggcgcacatctgtagaagtgtgtatagtgagagtgtaaaaggagactctggtgtaaaggagagaaccacatagcacttcgtgtaaaacctcttcacagagaaggagaaaggaagaatatgtgtttttgggagaccacaccttgggtgttttcttgttttggcgtggtgggcacagtgtttaaagtgtaataagttgtttataaatcaagagactttttaatgggaaccacttgaccccaaatttgtcaccagaattttgagaccccatttaaaaagtttaatga

SEQ ID NO: 613871 - DNA, 1052 bp, Homo sapiens
cggtaccctctccctactgtatcctacctagaagagttattagaagtgaatccagcaatattctagcagattcagtcagccaagtcaattcttagtttcacttctaaaagaataagttagaaatcccaaactgctgggcttgtcagattcttatacactgcttgtggaaggtctagggtgccctacaatatttgggccgatccacatatctctaacaccattaatatgaatcattggaaatattttacttattaacaaagtctcttgtgttaagctacagataaagcttttgtggtagtgtctgaagtgactagagtttttttcaaatgctagcagccctgaagttgtattcccaattaggatatgtcagacgttaagcaggcacccccagagtaactattatgactgattaacatatgccaaaataatttttaaaaattatatcaagtataacagaacttattaaagatttcacaggttattataccctcacactagggtggggtgaagctctttactgctctaaactcaacaacctgctgtgtagaggtgaactggcaacttatccttagtgacagcctgttcatccttaggggtgtgtgtgtgtgtgtgtgtgtgtagtgtgtgtgtgtgtgtagtgtgtgaagagagaagaaagccctgtgtcaactaactccaaggcacaacaaaaaaacactatgaagacacacacatatgaaaccaaaaacaccaccagcaaacctcgcaccaagcacgtcgaaaaactacgagaagagagcatatacaacacaaacaaaggagtacgaacctccacacaaagcaaaataccggcagagaatcgagaaaaaactatcctaaacaagcaccatacaacaacacaaaacacacaaaagcgcgataatcacacacgaagcaagcaacacaaagcagaccacagagagcccaaaatagaatcacctaaaaaaaaaaacaaataacacagcaactaaccgagactgaaataacacacccatcctagaaacgatcgaacaacacacaagaacaacacaaag

SEQ ID NO: 613872 - DNA, 441 bp, Homo sapiens
  misc_feature (148)..(148): n is a, c, g, or t
acaaatacaatctttaaaatttttttctaattctagcacttttatagaggcaggtagatctctgtgggttcaaggctagcctatactctgtatttcaaaacataacaacatttctgcactaaaaaaggtgttgtgtattgccttgccngtaattccctgtcagacagagccagcgttctgacctttcatcacctaggttggctttgtctctgaacttattgatggcatacctagctttcttatgaagggtgggaagagttaatgagtcttatgtccttgcttgccattgtatgactttagacctaagtcagatgacacttggtaagatggctttttacccccattgtggtttatgttggagaagagcgtctctgcttttttactggcagtaatcctttagtgggttaatgttatgacctgggaagtttatttagaatttag

SEQ ID NO: 613873 - DNA, 255 bp, Homo sapiens
ctggccgatctacatttattggaaagaaatcttagtggaggtatgctgggccatggagagccaatccatgatgtgttgagatttagtaaaccccattctcacccacaagaagtaaaggcagtacaaggggactcccagtggtttcctccagaccagggactgcaccaatccaaacttcgtagactctgcagatttggtaactttccaactgtattagtccattttcatgctgctgataaagacataccccagcct

SEQ ID NO: 613874 - DNA, 243 bp, Homo sapiens
  misc_feature (56)..(56): n is a, c, g, or t
ctatatctgtcagtgcaaggacttgggggtagtacccacccttcgggcttactccngaacagattttgttggcatagctttgggggggcagttttttaaaaatgggctcaaccccaaaaagcccaagttcatgcagctgtggcagagttacagttttgtggtttcatgttagttcccttatagttactgtgtaattagtgccccttaatgtatgttaccaaaaataaatatatttaccccaga

SEQ ID NO: 613875 - DNA, 1671 bp, Homo sapiens
gaattccgccaatgtattccgagcggcgataacggatacccctccagtcacgggcctgcccacctgctcctgttcggtcgtggggctgcgatggacattcggaaattctttggggctatatcaagtggaaaaaagcctgtaaatgagacagtaaagaagaatgagaagacaaaaccttcggagggaactgtcaaaggaaagaaaggagtaaaggaagccaaggttaataatccctgcaaagaggatgcctccagaccaaagcagcacaacaagaaaaagaggatcatctatgactcagattcagaatcagaggagacagtgcaagtaaaaaatgctaaaaagaaatcagaaaaattgccagtgtcttgtaaacctggtaaaatctctcggaaggatcctgttacctatatttctgagacagatgaagacgatgactttttatgtaaaaaggcagcctccaaatcaaaagagaatggagtatctacaaacagttaccttggagcatcaaacgtgaaaaagaatgaagaaaacactaagactaagagtaaaccgttatcaccaataaaactaacaccgacatcagtgcttgattattttggaactgaaagtgtccagagatctgggaagaagatggtggcgagcaaaaagaaagagtcttctcaaaccccagatgattccagattaaatgatgaggccatcgccaagcagctgcagcttgatgaagatgcagagctggagaggcagttgcatgaagatgaagaatttgcaagaacactggccttgttggatgaagaacctaagaccaaaaaggctcgaaaggactctgaagagggagaatcattttcacctgccaaagctgagttaagcaaagcagcaaagcagaagagccctgctaacgagcatttctcaattggaagaaagacctacagtcctgctaagtacggcaagggtagaggctcagaaggcaccaagcagccctgcagatcagctcaccagaaggaagcctgctcctctctcaaggccagctccaagctggctcttatgaaagcacaagaagaaaattcttacaaagaaacagaactgctggctgcaaaaagagaaagtgccattgagcccaaaggagagaaaacaactcctaggaaaacgaaaggctctccaactaaaagagagtctgtaagcccagaagattctgaaaagaatcgcaccaattatcaaagcttatcgaagctacttaaatcgagaaggtcccaaagccctgggctccaaagaaatacccaagggagctgaaaactgcttggagggcctgacgttcgtgatcaccggagtgctggagtccatcgaagcagaagaagccaagtctctaattgaacgttatggggggaaagtaacaggaaacgtgagcaagaaaaccagctacctcgtcatgggccgggacagcgggcagtccaagagtgacaaggcagcagctctgggaacaaaaatccttgatgaagacggcctgttggatctgattcgaactatgccgggcaaaaaaatccaagtcgaaatcgctgctgaggctgagatgaagaaagaaaagtccaaatcagagagagacagagagagacagagaggcagagagagacagagagaggagaaggaggaggaggaataggaggaagaggaggaggg

SEQ ID NO: 613876 - DNA, 497 bp, Homo sapiens
  misc_feature (51)..(51): n is a, c, g, or t
  misc_feature (75)..(75): n is a, c, g, or t
  misc_feature (113)..(114): n is a, c, g, or t
  misc_feature (124)..(126): n is a, c, g, or t
  misc_feature (174)..(174): n is a, c, g, or t
  misc_feature (181)..(181): n is a, c, g, or t
  misc_feature (187)..(187): n is a, c, g, or t
  misc_feature (211)..(212): n is a, c, g, or t
  misc_feature (355)..(355): n is a, c, g, or t
  misc_feature (388)..(388): n is a, c, g, or t
  misc_feature (399)..(399): n is a, c, g, or t
  misc_feature (404)..(404): n is a, c, g, or t
  misc_feature (408)..(408): n is a, c, g, or t
  misc_feature (414)..(414): n is a, c, g, or t
  misc_feature (419)..(421): n is a, c, g, or t
  misc_feature (423)..(423): n is a, c, g, or t
  misc_feature (426)..(429): n is a, c, g, or t
  misc_feature (436)..(436): n is a, c, g, or t
  misc_feature (486)..(486): n is a, c, g, or t
ggagagcccagtggtggatccagcctgaagtcctgccctctctcatctgtntggaaaggaggtagcacctttttngggaaacgggttagggagtaaagactgcaccctacatnntcctggtggnnngggggataacagtaaaggaatttgcaacgttttaatgccatgcctgantttaggntcaggngtggtgacttgggtaaccacttgnngtgggggcctgggattccctgctgtgtgccgtgataacagcaaatggtgataaggagaaagccaagacctgtggcctgatgcagggctgggggcggggggtgatcacttcagcaggcacaacacacttcactggctgcggagntggaggggtgactctgggagctcaggggcaatngatccaaagangctanggancttgtnccctnnnanacnnnntacattnactatactacctccacttccatcatatacctttccttataccccaatttnatttcctctac

SEQ ID NO: 613877 - DNA, 292 bp, Homo sapiens
gccggctcatctccgcgcgcagaggcagcgtcgcagcgagcacaccaccttcgacccctcctcctccccgtagcctgccggctcttcccgccgcctcgcttgcgagtgagacgatggcgaggccgtcgtcgtcgccgatggcgacgaggctgccgctgttgcttgtgctgctgtcgtcgctggccctgcaggcggcggcgcagaagtacaatgcggtgtacagcttcggcgactcgatcacggacacgggcaacctgtgcaccaacggccgcccctcggcgatcaccttcac

SEQ ID NO: 613878 - DNA, 779 bp, Homo sapiens
gcaattctcctgcctccgcctcccgagtagctgggatgacaggcatgtgccaccactacccgactaatttcatatatttagtagagacggggtttctccgcgtaggtcaggccgttctcaaacttctgacctcaggtgatctgcccgcctcgacctcccaatagtgctgggatgacaggcatgagccacgtgtgcccagcctgtcgactatatcttcaaattatgtctagggacagggtcttgttctgtcacccaggctggagggcagtggtacagtcatagctcactgcagtctcaaagctcctgggctcaagcgagtcctcatcaggctcagcctcccgtgtacgctggggctccagggaacagatccgcgcactgctggttaatattaggtatttttgggtagagtcagggtttcatcacatggacacaggtctggtctcaaagttcctgggctgcagtgagtcctcccgccttagcttccagagtggccaggatcacaggcgggcaccaacatgcccaggtcaatttgactcaggggtagagacgtggtctggctatgtggtccaggggggtctcaaactccgtggggtcgaactgatcgctcccagctcaactctgccatagccaggacctcaggtgtcagcaacatacccacagctaatcgtatcggttaagtagagatggggtctggcctctgtatgctcaggctggtgtgtagtaggggcacggtcatagttcacggtacccttcaacgcctgggctgaatcagttgtccg

SEQ ID NO: 613879 - DNA, 164 bp, Homo sapiens
tctctccggatctcctcctcagcatacgcagtctagtccagcggaggagcggccctcttccccctactcctggccacaattgagctgctgctaacggtctactccccaagattgagcggagtgcctcggcaccctccttgcaccgcacccaggccgatgagttg

SEQ ID NO: 613880 - DNA, 143 bp, Homo sapiens
gtgatagacagatgagaagaaggaggagtctgaagagtcagatgatgacatgggattggccttttgattaaattcctgctccccctgcaaagtaaagcctgttttacacatctcaaaaaacaacaaatacaatacaaaaaggg

SEQ ID NO: 613881 - DNA, 462 bp, Homo sapiens
gcctactactactaaattagcggccctgcgacctttgggaggctgaggcaggaagactgcctgagcccaggagtttgagatcagcctgggcaacatagcaagatcccatttctaccaaagtactgacaagcatgagacactgtgcctggcctcattttttcttgagcaactaataaatggtactgtgttctaaattttagttttcaattattcattgttatttgtggaaatatgaatgtgtgtgtgtgtttgtgtgtgtatgtgtgtttgtgcgtgtatgtgtgtgtctgtgggtatgtgtttggatatctgcaaccacaaacttgtttattaattctaaaaggtttcttttcaaactctagtgtcttcttgtttgttgattccttggagatctcctatgcagccaaccatataatctggcaacaggaagagttttatttattcctttctatctgtatatct

SEQ ID NO: 613882 - DNA, 452 bp, Homo sapiens
cttcctcaataaaaacacatatgatccagcaatcccactactgggtatatatccaaaggaaatgaaatcagtatgttgaagagatacttccacgttcactgaagcattgttcacaatcgccaagacatcaacctaagtgtccatcaacagaagatagatagggctgagcgcggtggcccacgcctgtaatcccagcactttgggaggccaaggcaggtggatcatttgaggtcagaagttcttgaccagcctggccaacatgatgaaaccccgtctctacaaaagatacaaaaattaggcaggcatcttggagggcgcctgtaatcccacctactcgggctgaagtgagaatggcttgaacccaggaagtggagatttcagtgagctgagattccgccactgcagtccagcctgagcgacaagagtgagaagagtgagacttcatctcaaaa

SEQ ID NO: 613883 - DNA, 946 bp, Homo sapiens
ctcttctcacaggaccagccactagcgcagtctcgagcgatggcctatgtgcccgcagcagggttaccagtcccacctacaagccgatgctgctcgttatctaccagcccatcgccgggcgggctcaaagtggcgaatgtctgtttacactccaacggagtggccagtcgagctagcatgaagctggttcttcgatgaactttgtggttgggcaggatccgggctcagacgtcgccttccacttcaatccgtcgcgttatgacgagctagtggacaagagtggtcttcaatgacgtagcagggcgggaagtggcgagcagcgaggagaggaagaggagcatgcccttcaaaaaagggtgccgcctttgtagctaggtcttcatagatcctggactgcagcactacaagagtggtggtaaactggaaagtcccttctatgagtacggtgcaccggtcttccctcgtacagagtggtctacccaccgtgcaatgtggatggggatctgtaaccttcaattcaattcaacttcatcggaggccagtccctccggcccctagggtacctcctgattgatgccacctttacccgtggtcccggacattgccatcaaagatgctgagacagctctgcgcaccactggataggaacccacaagctttcaaaccgtgctgtgccagtatgtcggtgaggctgccaagggagggctcacatttcgacagaaactcatcaatcattgaagcgggctatgtgccttcccaagagagcgagaagctcttgctatctagaacttcaagggtgggctaccttcagggcgaccattagactcttgctacattaaatcccacgacatgggcaacgagtaccggtggtaccaggaaccagtgctgcctgaatgggctacgatgggggactcccgaggcaaaagcaagataaccccataagcca

SEQ ID NO: 613884 - DNA, 347 bp, Homo sapiens
cgtgagcagcacgttggggggcaggacagaaggacaagagtctaacacactggaggggtggtgtgagagggagagtacatgggctcagtccacaggcagaggacaagggctggtactgaccattcccctcacaggagtgtgcgcctcaaaggccaccccagacacacaccacacatacgaagtatacaaatcctccccagcttccacaaggcaaagaattccccagcctgggaactgtggagttcttgtagccgtcaccatcgtacgccttgagtcacagagctcgtgatcagtaggagaaccgtagcgatcctgcaaggcattcatcacaccattggccagcggga

SEQ ID NO: 613885 - DNA, 332 bp, Homo sapiens
gaccggaccctcgcgacgtgtatccctcgcgaacgtgtgatccgggaagatagacaaggtagagccgagaagaatgtatattctggtgacttggggtggagagttctgtagatgtctgttaggtccgcttggtgcagagctgaattcaattcctggatatccttgttaactttctgtctcgtggatctgtctaatgttgacagtggggtgttaaagtctcccattattattgtgtgggagtctaagtctcttggtagatctctaaggacttgctttatgaatctgggctcctgtatggggtgcatatagatttaggataacaagttcgcgag

SEQ ID NO: 613886 - DNA, 667 bp, Homo sapiens
  misc_feature (33)..(33): n is a, c, g, or t
  misc_feature (63)..(63): n is a, c, g, or t
  misc_feature (66)..(66): n is a, c, g, or t
  misc_feature (73)..(74): n is a, c, g, or t
  misc_feature (82)..(82): n is a, c, g, or t
  misc_feature (84)..(84): n is a, c, g, or t
  misc_feature (94)..(94): n is a, c, g, or t
  misc_feature (96)..(96): n is a, c, g, or t
  misc_feature (106)..(106): n is a, c, g, or t
  misc_feature (126)..(126): n is a, c, g, or t
  misc_feature (131)..(132): n is a, c, g, or t
  misc_feature (139)..(139): n is a, c, g, or t
  misc_feature (146)..(146): n is a, c, g, or t
  misc_feature (149)..(149): n is a, c, g, or t
  misc_feature (159)..(159): n is a, c, g, or t
  misc_feature (172)..(172): n is a, c, g, or t
  misc_feature (176)..(176): n is a, c, g, or t
  misc_feature (183)..(183): n is a, c, g, or t
  misc_feature (185)..(185): n is a, c, g, or t
  misc_feature (188)..(188): n is a, c, g, or t
  misc_feature (197)..(197): n is a, c, g, or t
  misc_feature (202)..(202): n is a, c, g, or t
  misc_feature (209)..(209): n is a, c, g, or t
  misc_feature (212)..(213): n is a, c, g, or t
  misc_feature (215)..(215): n is a, c, g, or t
  misc_feature (219)..(219): n is a, c, g, or t
  misc_feature (231)..(231): n is a, c, g, or t
  misc_feature (238)..(238): n is a, c, g, or t
  misc_feature (250)..(250): n is a, c, g, or t
  misc_feature (256)..(257): n is a, c, g, or t
  misc_feature (284)..(284): n is a, c, g, or t
  misc_feature (286)..(286): n is a, c, g, or t
  misc_feature (309)..(309): n is a, c, g, or t
  misc_feature (315)..(315): n is a, c, g, or t
  misc_feature (339)..(339): n is a, c, g, or t
  misc_feature (344)..(344): n is a, c, g, or t
  misc_feature (349)..(349): n is a, c, g, or t
  misc_feature (389)..(389): n is a, c, g, or t
  misc_feature (403)..(403): n is a, c, g, or t
  misc_feature (418)..(418): n is a, c, g, or t
  misc_feature (433)..(433): n is a, c, g, or t
  misc_feature (461)..(461): n is a, c, g, or t
  misc_feature (484)..(484): n is a, c, g, or t
  misc_feature (509)..(509): n is a, c, g, or t
  misc_feature (561)..(561): n is a, c, g, or t
  misc_feature (585)..(585): n is a, c, g, or t
  misc_feature (589)..(589): n is a, c, g, or t
  misc_feature (663)..(663): n is a, c, g, or t
ccggagcctcacacacctataaatatctcaganccaaccagtcgcgaacagaggaagtaatanaantgcattnntaaatgtncncatgcgacangnagaggcagtnaatattagatctggtaaganacagnnggcccgnggggggntcngcggggggangccgccccaaganagcngccccancngancctgccccnatccnggccggnccnncncggnagtggccccccngtagacnccggccactccntgcctnncagccactcaccagctcaccccattcngncacctgccccagcctctcgcggngcttgncacgcctcccaccatgaagcactnccctncattnacacagaaagtcttctccttctccgcacattttacaaganggcttgtcccagtngtggatgtagatgtngaaagtctaggagcngtttggagattagtttctgttgtttgtngctgagtagctgacttgggcgtnctcacctcagggttccgggtgggtnaagggaaggatggcgcagtggacggcaagaaagaaaaggcaaaatacgattnttcggtgtgggtgccgctgagggntcanaggagagaacagctttgttaccttgcactgttacttgaacctcactttcagatttatccccagagacaggtgangtgt

SEQ ID NO: 613887 - DNA, 537 bp, Homo sapiens
aaggcctctctaattcaaggcactgtccagtgttttgcacagcattcacagctaaccatgatgtaatcacggtggcagttacctgtcctctgtgttatcacgaaaaagcattgtccaacgtagttagccgttcttgggtgaacatcaggaacagcacttcataaggtttgggttcagccagcagtgggatcattcgaccagattgaaggctaaaagacatgcgtttgtttcagcccaaaagtgattaaaaatgactgaggtttcaagtgaggaatgggaaagatcttatccgcctgtagttaaaagaaaagaagagcatgatacgtacggatcacgaggtgaggagttcaagccggatgaacatggtgaaacgccgtctttaccgaaaatacaaaaatcatccgggcatcgtgaagggtgcctgtaatcccagctgctggcaagcctgaggcaggaagattacttggtcccagcaggcgtagtttgcagtgagctttgatcatgccattacaaaacagcctgggatacatacaaaca

SEQ ID NO: 613888 - DNA, 184 bp, Homo sapiens
aggacgttgatggctcgacatgtctatgcatcagagatgtggccattaaggagcccctagatggatgtcgtggagcccaagacagctggtcaccaacgcgctgcctcatagaaggaggtggacatctatacacgtcaaggtggacagacctgtaccttcacctaccccgttctgcactgcaaga

SEQ ID NO: 613889 - DNA, 804 bp, Homo sapiens
gcaggaaccagcccgaggccaccagggctgctccctgcagtgctgggctgccgggcggcacgccactcaaccagcacccacgagcacatgcacctgcacgctggccgctgcacgacgggcttccctggcacggctggctgcgtggcctctgctgctgacgcgccggcctgctgacagatccaaccctggcccggacgccctcacctcggcaccacctgcccccttgccagcctcgcgttccactcctcgcgccgcgtgccccctggcagcctcagccggccacttgcctccgcacggctccctcaccgcgcagcgctgcccacaaccactcgcactgtttacccgccctaccaaccacgccacgggctcttcacctcatgccctgccagccactgcccctccccttcacacggcgttcactcgccccctgctgacgcctgcttggcgcgctgcgcgcaccacaagtcctgccacgcccgcgcccttcattgacctggctgcctggccttgcgcgcgcgccaggcttccccacgcgcctccccacgcaccccaaatcccctcccccttgccatcaccacaaagcaagccctgcgtgcacgaaacacgcactctcgctgcggcctccgcgtggcctgccgcgccagcccctgtgctgcggcaccgcccccatacgcaacacgcggcacgcgaacccggggcccttctccacgccgagacccgcccgttgcgcactttcattggcggccttgccacccctccaaatgccaaaacccaagcgcggtcgcacagggcctgggccccaca

SEQ ID NO: 613890 - DNA, 175 bp, Homo sapiens
aggatctttcactgctcattattagcggctgatcgattttggtgtcctgagtccaacatcgagctcgtgaaccctattgttgatatgtgactctagacatatggattgcgctgttatccctagggtaacttgttccgttggtcaggttattggatcaattgagtatagtagttcg

SEQ ID NO: 613891 - DNA, 716 bp, Homo sapiens
  misc_feature (256)..(256): n is a, c, g, or t
  misc_feature (288)..(288): n is a, c, g, or t
  misc_feature (290)..(290): n is a, c, g, or t
  misc_feature (338)..(338): n is a, c, g, or t
  misc_feature (347)..(347): n is a, c, g, or t
  misc_feature (393)..(393): n is a, c, g, or t
  misc_feature (444)..(444): n is a, c, g, or t
  misc_feature (481)..(481): n is a, c, g, or t
  misc_feature (529)..(529): n is a, c, g, or t
  misc_feature (532)..(532): n is a, c, g, or t
  misc_feature (610)..(610): n is a, c, g, or t
  misc_feature (612)..(612): n is a, c, g, or t
  misc_feature (622)..(622): n is a, c, g, or t
  misc_feature (625)..(625): n is a, c, g, or t
  misc_feature (637)..(637): n is a, c, g, or t
ggccgagaacccgggcggccccccgagccgagggctgctggacgacggtttccaggtgctgcccggggagcgtggctccggcgaggcgccgccgggtggggaccgcagcaccgggggcggcgggggcgatgggggcggtgggggcggcggcgcggaggcggggacgggggcaggcggcggctgtggcagctgctgccctggcgggctgcggcggagctcctcctgcacggcgcccgcagcaagccctactcgtgcnccgagtgcggcaaaagcttcggcgtgcgcaanancctcatcatccaccaccgcagccacaccaaagagcggccctacgaatncgctgagtncgaaaaaagcttcaacttccactcgggcctcatccgccaccaaatnacgcaccgcggcgagcggccctacaaattctcggagttcgaaaaaacctanaaccgtaaagaacaccttcagaaccacacaacggctncacacgggcgaacggcctttccaattttcacttttcggcaaaaacttnatncgcaagacagaacctgctcaaacacacaacgcatccacacggggcgagcgcccctacacgtgcggcgagtgcggcaanancttccgctanaangagtcgctcaangaccacctgcgcgtgcacagcggcggcccgggccccggcgccccacggcagctcccgccgcctcctgagcgagactagg

SEQ ID NO: 613892 - DNA, 346 bp, Homo sapiens
gccaccgatcgccgggcgcgctttgtcgggctcgaggcttatacggcggcgggcggcaccgtgctgcgcgacctctttaccgaggatcgcggcggctatctggaagacgtcgcgctgctcgatctgctggtcacggcaaggcttggccgcgaggcggatcggttgcgggcgaccgagtgctagaagtggacggagccccatctcgactttccgcacgcccacggcatgcgtcggacatacccgcatccggtcgagctgtcggcggaggatcaggccgcgcttgaggccgttcagagcgagttcgaccggctgaccgagcagcatcagacggccgaggaattgcccg

SEQ ID NO: 613893 - DNA, 167 bp, Homo sapiens
cccttacctacattgtttcaacatgccagaggctgttcacctgccagcggcgtggacacctttctcgggtgtcctacgggcgctcaggactctactccctcagcagcgtggtgaccgtgccctccagcagcttgggcacccagacctacatctgcaacgtgaatcac

SEQ ID NO: 613894 - DNA, 436 bp, Homo sapiens
tgagcagagcccgatggaagtgagaagggcgtgaaaagaacagtctcttcagtagtggtggagaaatgatatttatatgcagaagaatgaaattagaaccttatctcttgccatataaaaaaatcaaatcaaaatgtattaaaggcttaaatctaagacctctaactataaaactactaaaagaaaacattaggtaaatgcttcagggtcttggtcttggcaaatatttttctagtaataccccacaagcacagacaaccaaagcaaacatgggcaaataggatcacatcaagttaaaaaccttttgcacagcaaaagaaataatcaacaacatgaagagataactcatataatggaagaagacatttgcaggctacccatctgacaagggattaataatcagaaaatataacgagctcaaacaactctacaaaaa

SEQ ID NO: 613895 - DNA, 220 bp, Homo sapiens
  misc_feature (37)..(37): n is a, c, g, or t
  misc_feature (66)..(66): n is a, c, g, or t
  misc_feature (100)..(100): n is a, c, g, or t
  misc_feature (116)..(116): n is a, c, g, or t
  misc_feature (131)..(131): n is a, c, g, or t
  misc_feature (216)..(216): n is a, c, g, or t
taatggaacacatgatttgaatagcttttcagtatgngtgcttgtcttgattatgagttgctaggnttgctaaggaaacccaactcaatctactgttaancttggaatttattggnttatgtagggatgangtctgaggacagggttgactgcatccttaaggctctgatgctgatgatgctgcttctgagttactcacatcttcacaccttgctnggtc

SEQ ID NO: 613896 - DNA, 1056 bp, Homo sapiens
aacattcaggatggaagcttggactctgaatgctgctgagtctggtgtacaacacaaaccttcagaccccgcagggaggccggctaaccagtgaaccccaaacccagagagaaggctgtggatgctagtgacctcttatgctgtggaccctcatattgacctttcagcctctgtctgtatggaagcagtacttattagctgcctcatagtcttctgtacatcttactgggtttaattaaaaaaaaaacgaaaaaactctgtggtacacaacacagctttaacacaatacctaaactgctatacaacctagatgtactcaggtatactcaacggcaacgtagagtaactaaatctcatcctgcatgcgtaaatctagactttatataacccccattgatccctcgtgataagtatgtcaccaatatatgattataaacacgagacactgatgctggaccttcatgattaaaaagccctaccacttgggcaaggcattaggactcactgtacggtctaactctggtgatatctccacagccttaccttccccatccttcaactgtatcaagtatgtcatgtatgtccaccaatcacgttacatatggctgtagcacaattacatatctgatgcgtagcacgaacgaggagacctatcactggtattaagtcccgatctgggacatacacttatacctgctaggtgataagttggaactctctcactaacacgcagcataggccaccctgactcttacacctcaacaacagggaaacaaatataccattctatcacatcactcccacgaagacatcactaacatcgcttcacccctatagtgtaatacccacacacaacccaaagccacctacaacccgccacacacacagcgactaaccacacgcgcacacaacacgcacacacacacaacaccaaccgggcggaaccacacacaacacccacaacaccagagcacaaccacacacgaccgacgcaagacacaaacccacggaccaacaaaacaaacaagacaacggaaacacacacaccaccgcaca

SEQ ID NO: 613897 - DNA, 135 bp, Homo sapiens
agacagcttctgagagctggatacaggtgcgcacacaactggctaaatttttgtattttttagtagaggtggggtttcaccatgttggccaggctggtctcgaactcctgatcctgcccacctcccagagtgggt

SEQ ID NO: 613898 - DNA, 219 bp, Homo sapiens
gcgattcagaggatccagtggaagaagtgcttttattatattattattatacttaagttttagggtacatgtgcacaacgtgcaggttggttacatatgtatacatgtgccaggtgggtgtgctgcacccgttaactcatcatttagcgtcaggtatatctcctaaggctatccctcccccctccccgtcagatgcacattcaagcacattattccaag

SEQ ID NO: 613899 - DNA, 447 bp, Homo sapiens
tccataatgtgtcccagaggaccaaataaagaactaaaaaactaagcaggcgcagtggctcacgcctgtaatcccagcacttaggaaagctgaggcgggagatcacctgaggtcaggagttcgagaccagcctggcctacatggtgaaaccccatctctactaaaaatacaaaaattagctgggcatggtgatgggtgcccgtaatctcagctactcgggaggctgaagtaggaggatcgcttgaaccctgggggtggaggttgcagtgagcagagatcgtgccatggcacaccagtctgggtgacgagcaaagctctgtctcaaaaataaaataaataaaataagattaaaaaaatagaataaccatcttaacaattttaagtgtgcggttcagtagtgttaggtacactcacattgttgggcacacattatgtaggggtaccgag

SEQ ID NO: 613900 - DNA, 132 bp, Homo sapiens
ctaaggtggagtacagcggtgcaatcacagcgtcactgcgagctgcaaactcaaactcccaggctcaaacgtgcctccggactcagcctccagattagctgggacatgaggtgtgccccacagagagagcgt

SEQ ID NO: 613901 - DNA, 841 bp, Homo sapiens
aaacaggagaggctgggctgcgtgactgccgggttgtggatggtctgacttggacgagaatgaccccctgacccaagggtgcccctgggaacggggaagtctgcggacccccggggccgcccgggctggggggcaaaggcctccctggaccccccggagaggcaggagtgagcggcccccaggtgggatcggctccgcggcccccgggaccttctggactcccgagctcccttgtccccgcaggacctccctggagcccctggacagccaggagtcctccgctgaagggcgcctactgaccttcagtgcccaagtatctgcccgacaggtaccccagggacgcccgctggaatgccagggttcaagggagcccactggctacaagagtgcgagcaggggggaagtcggaaaggacggggagaaagggtgaccctggacccacactgggagcccgaccgggctccgggcagacgtgggcgctgaggggaccccgggggattacggagggacctggcagggacactacggggaccacctggggaccggagatcgcatatggggttccggagggaccggctgggatcccaggagcgcctggggacacgcggggtgacccgaggcgaagaggggaccgagaaaagggttccgcgggggccccaaagaggttagcgtcggggcgagcaacctaggacgcacaagggaaacccagcgggagttgaccggcaccaaagcgcaacgaggcgggcaatgccggggccaaggaacggccaaaatgccgtgcacacagagctgagtgccagaacgggggagggttggcggcagcggtgcgccgggagaaaag

SEQ ID NO: 613902 - DNA, 901 bp, Homo sapiens
  misc_feature (73)..(73): n is a, c, g, or t
  misc_feature (132)..(132): n is a, c, g, or t
  misc_feature (134)..(134): n is a, c, g, or t
  misc_feature (156)..(156): n is a, c, g, or t
  misc_feature (167)..(167): n is a, c, g, or t
  misc_feature (171)..(171): n is a, c, g, or t
  misc_feature (173)..(173): n is a, c, g, or t
  misc_feature (177)..(177): n is a, c, g, or t
  misc_feature (179)..(179): n is a, c, g, or t
  misc_feature (191)..(191): n is a, c, g, or t
  misc_feature (195)..(195): n is a, c, g, or t
  misc_feature (210)..(210): n is a, c, g, or t
  misc_feature (214)..(216): n is a, c, g, or t
  misc_feature (221)..(221): n is a, c, g, or t
  misc_feature (226)..(226): n is a, c, g, or t
  misc_feature (228)..(228): n is a, c, g, or t
  misc_feature (232)..(232): n is a, c, g, or t
  misc_feature (276)..(276): n is a, c, g, or t
  misc_feature (279)..(279): n is a, c, g, or t
  misc_feature (281)..(281): n is a, c, g, or t
  misc_feature (286)..(287): n is a, c, g, or t
  misc_feature (299)..(299): n is a, c, g, or t
  misc_feature (325)..(325): n is a, c, g, or t
  misc_feature (337)..(337): n is a, c, g, or t
  misc_feature (349)..(349): n is a, c, g, or t
  misc_feature (415)..(415): n is a, c, g, or t
  misc_feature (455)..(455): n is a, c, g, or t
  misc_feature (538)..(538): n is a, c, g, or t
  misc_feature (560)..(560): n is a, c, g, or t
  misc_feature (569)..(569): n is a, c, g, or t
  misc_feature (627)..(627): n is a, c, g, or t
  misc_feature (664)..(664): n is a, c, g, or t
  misc_feature (670)..(670): n is a, c, g, or t
  misc_feature (728)..(728): n is a, c, g, or t
  misc_feature (736)..(736): n is a, c, g, or t
  misc_feature (763)..(763): n is a, c, g, or t
  misc_feature (774)..(774): n is a, c, g, or t
  misc_feature (780)..(780): n is a, c, g, or t
  misc_feature (796)..(796): n is a, c, g, or t
  misc_feature (799)..(799): n is a, c, g, or t
  misc_feature (811)..(811): n is a, c, g, or t
  misc_feature (826)..(826): n is a, c, g, or t
  misc_feature (900)..(900): n is a, c, g, or t
tgtagaaattacttttattatgttaaaatattccttaataaactagcaattatttatgtggaggagcatccanaaaacaggttcatgactgaattatccttgtccttgattatagagattcatgaatgacananataaccctattttctggagtanctgtgaagctntacnangctntnaggttggaggcncttntccctgcctgttaanctgnnnctatnacatnangacnggatggacattatttttctcttttgaattaaatctttacaacanttngnatgcnntttccagaatgnatcagttcaaaggctttgttgatttnatcaaaagaaanattgtgagtaanaaattcatcaacttttatctttttggacaaatattcagacaccaactttgggacactttctacacncttccatcccccaaaggcagtccctttccatgtgcgaccngttaccagccggaatggacgagtgggaatttcttcacctgaagcagccactccaaccacgacgctgacgccccaccccttgtnaaaagccttaagtgctgctctnatgaacttnaaattaccaatacattcaaaggaatagtccactcctccatcggtcatctcaatgagcncttcctggatgggtttactaaaatcctgagggttaanacattnagtggctccaaactctttggcccttgcaaatttatctttattgatgttcacaccaatnatccgggnagcaccagccactttacagcccatganaactgccaatncgactnctcccagaacaaaganggnacaaacagagcnagggtccaacttggnagttttcacagcagccccataaccggttgaaatgccaaacctagaaggcagatttatccaaggtgctaaggatnt

SEQ ID NO: 613903 - DNA, 812 bp, Homo sapiens
cagtgcccaccaggtgagggggctggcctggtgggtcttgtggaaggcccctccccagtgccctaggccacctcgcggaagccttcagcctccgcccctacactgcagccccttgtggacttgatgtgtgtgggccccaggtggtgttctcatgtgaccccatcccaccaccatcccagtgcatatccactgtctccaaagagcgccattccatgtcaccctctgtctatcccatgcgccttggttggctggtggtaggctgcgtgcctgctggtgtgactacccagtttatatatgctagtgtggaaacagtgctcctgagaaatttgcacaacctgaccctcacgtgtgtgcctggccagttggctgttgcccatgggtagcccattatcctccctccttcctgccatcgttgtagcatcccctatatgtgatccatcttgagtgtgacctcaaggagagtgccggtgtccctaaactggacgggggggcgtcatcccttgcgggtgccaggacctgaacgggggtcctcggacgtgcatacgaactggacgatggtttccatgtggacttgtgcacgaagatagctgatgcagattggtaggtagtttggtaggcaagaaaccgtttaatggcctcatcaacacagccacacgttgaacccgattaccacacgaggggcctcctaggtgacccttgtgccttgggcaaacccccaagtggggcagcaggccttgcggtggggcctgaggcaccgcagcgcccgcggctcccagccgccaccgcccacatccagaccgacacacgccgac

SEQ ID NO: 613904 - DNA, 411 bp, Homo sapiens
cacagacattaaaacaacttatcaaaatttatgggatgtagtgaaatgcagctgcttagataaaatttatacattgaatgaatatctcagaacataatgatcataatcaatcacctcagagtctaccttaagaaactggaaaaagaatagcaaattaaactcctagttagcggaagaaaaaaaagtaatagaattagagcagaaatcataaaattaaaaacagaacattaatagactaactcaatgaaatccaatgcttttttttaaaaaaaagatccatacatcaataaaatcaataagcctttagccagtctaagagaaagagagagaggacacagattactcataagtgacagggggaatatcactacagttcccatagtatttaaaaggataataaaataactctac

SEQ ID NO: 613905 - DNA, 151 bp, Homo sapiens
gacggagaggactcccgggggttgacgagggctcgcaggttctgcatcacgacgagtcaaggacagccatggcgtagatggcaagcatgtggtgtgcggcaagcgttctagcagggcatggacggtggctgcggaacggtggagcagcacc

SEQ ID NO: 613906 - DNA, 434 bp, Homo sapiens
gggtggtgaaaatatcttacagttccaatctgaggttccagattgtatttttcaagaacaactaagggtggaaggaagggaggttacaatgaggatgaagaacaagtaggagtaagaaaccggcagaaggggacagaaagatggtgtcttcagagagatgtggagaggaaaatggtggcctgggaagagagaagatcataagaaatggtaaccacagtaacatgaataggaaaatgatggtataagcaaaaaacacagattcgaaaataggaaaaattattttgtaaaacaatatttatttctctcatgttgcccaagccagaatgcagtggctattcacaagcacactcacagtgcactacagtcttgaactcctggggtccagtgatcatctcacctcagccacctgagtagctgggactatatgtgcgtgc

SEQ ID NO: 613907 - DNA, 1300 bp, Homo sapiens
tgtggtcctcgtgttttttgttgtctgttgtgggtgttgttcggtgcgttgtgtggggtggttgcgctggtggtttgctgctggtgtcgtgcgatcgtggcttgtgcgtagcatgtttttgctcggtgtctacatggtctgctgtacgtgtggtggtcttatctttttttgggtcttctcagtggtcttcgtctgtgttgtaccgggtcgtgtcccagtggggtgtggcgacggcccgctctcacgttgtgggcgtatgtgtgctcgcgcattggtttttgtggggccattcttttgggggccttgtgggggtgggtcgtgtgggggtggtgcctgtctgtgttgttatcatgttgtggggttggtcccgatgtttggcctcctgcgatggtttgtatgtggccatccaggtccctgtgctatccctgcagtgggacacttggcgggccactgacagtcagtctgttcatgcagtttctccaggggcacgttttgtttcgtgtgttgccccggggtgttcattggtggtcccacgattccaggccagtgtccagcgcgtcagttgttgtctggagcctagagcccgtctgtttttgttcgacagacgggccttctagctgtttctccccagattccgagtcaccggggttgtgagtgggcaaagtggaaacgctttgtggtgacaccattgagtggcgtttattgcccccacgtgtgggtaccggttcttctgtggatttgcaatgggcctgtgatttttgaggcccacaggtggtgtcccaacacattccacactcatggggaaagcgttaactgtggtgccctccttggaactgggtgttggtggtcccatggaacattctctctcttgtgatttccaggtccagtaggcggcgcaggtatatgcctctatgatgatagatttttgagcccccatttctccagacccctcacaatcccatcctgtccctggaacaatcccatcaaggatttcccatagagggtgtactggtgccctacctccagtcttggcacccagatgcctgctcattgaggagagttactgctggcccaggccagaaagaatatgggctcttgccaatgtagaccagacctggaggggactcttccccttgagccactagccagctggaggaattgggagattcatggctatcaaggttgtgttaatcgattgtggggatgaaaagtcattgtgtatggaaagcggggctcatggctgattggccaataaaatggcggctgcccttgtcattgtttcccaaaaaagaaataaaaa

SEQ ID NO: 613908 - DNA, 129 bp, Homo sapiens
tcgataatacggtcacgctcggatccagcccgggtcatctgccaaatcgagtccaaatcaggttattttcgtgtccgtgtcatgaggtttcctgcctaaaagccgagagaaaaacgctgtgcggacgag

SEQ ID NO: 613909 - DNA, 101 bp, Homo sapiens
gcgacttatgctaacctacctaccattgcgctggagaacacagattctgctctgagctatgtggacattgccattccatgcaacaacaagggagctcactc

SEQ ID NO: 613910 - DNA, 1264 bp, Homo sapiens
  misc_feature (126)..(126): n is a, c, g, or t
  misc_feature (366)..(366): n is a, c, g, or t
  misc_feature (421)..(421): n is a, c, g, or t
  misc_feature (445)..(445): n is a, c, g, or t
  misc_feature (489)..(489): n is a, c, g, or t
  misc_feature (910)..(910): n is a, c, g, or t
gcgaacgcggagagcacgccatgaaggtcctcgggcacgctagccagaggagtacaaggtgagtgaggtcggactgcctgcaccagcccctcacaatgtcctacacgccagtcccctcataccgcnatgcgaaatcctttgcgtccatatatcactgtcgctcggccagaggtctcccgacttcatggctagctttgtaatcgtcaggtcccaatgaatgattgaagaacgtcttacaggggtggagacttgttcatatctgtgtgcgcagagtgctattgagaaagtaccgcccctcgcagagggtggtaaccataccgtatcggggggaacttcatggcctttgccgcataaattgaccctcgncctggaacagacagggaaagcgcacgaccagatcgagttcgctagccctgagganattagcccagggcgagacctagtngacaacaccgcacaggactgcatgtgtacactccgcagagttgncataaccagaatgtaacatgtgtgggagttgcgcccggggcgaaaccggacgacacccggattggcactcgaacctacgcattaatcaaagactcaattcgaaaccgggttgagaaagggacaggagtacccagcacgccggagcgaacgccgaggatgtttgaccccgccaccgggcccctgggcccctcgttttcagaacgccaagggatgtgcccaacgttaactttctccaagaagcatactacaggattccacccgtccctaggcacgcgcaaactctgcgcgctccacttcgctgtcccagctccaagggcaaccaacatgttcccaccaggcttattagaaccccaacgccataggggacgcgtctccccaaaacgaaccccttccatttgcggttatcgattgcctacgcggncccccttttcgctgtgccgcgcgttttgatttgtcgccttctatagactaagaaaacatcccatgcggaaagctgccccaccgcgcatgaaaccgaaaaaaggggcccttccccatttgcaaagcgaacatgaacgggccttgacattttaatgcgttgggctcccccccgggttgggccacacagaacttaaagtcgaaattgaacacacaaacttagtaatttccaatttccccccaagccacagcgaaaaagggccagggtatatacagaccttttcccatagtcctattgacaacaaacacgggggtcccgaaaaaaaccaagtattgcgggggggcccttgggggaaac

SEQ ID NO: 613911 - DNA, 485 bp, Homo sapiens
  misc_feature (20)..(20): n is a, c, g, or t
  misc_feature (174)..(174): n is a, c, g, or t
  misc_feature (348)..(348): n is a, c, g, or t
  misc_feature (393)..(393): n is a, c, g, or t
gaagtgctgcccggtaaganagcttaagaccattcagtggttgctgctacttattcagtggcctgagcagtgggagctgcagaccagtcttccgtggcaggctgagtgctccagtcttcagctggaaactgctgaataggcacagagggcacctgcatgcctcagaccaatctncaacctcaggccgagtagcagtgaactcgggagctggagcagtccattcaccctgaaactcctcctggtcacagtcttttcagtagcagcctgctcttctttttcaatctcttcaggatctctgtacaagcagagatcaggcatgacctcccgcaagtgttcacaggaaatggngccacgcatgtgcagaacttctcaggccagcatccaccacatcanacccaccgagtgagctccctttgtgcatgcaatggcaatgttcacatagcgcagaggggaatctgtgttacacagcgcaatggtaggcaggt

SEQ ID NO: 613912 - DNA, 507 bp, Homo sapiens
  misc_feature (313)..(313): n is a, c, g, or t
  misc_feature (413)..(416): n is a, c, g, or t
  misc_feature (418)..(418): n is a, c, g, or t
  misc_feature (420)..(420): n is a, c, g, or t
  misc_feature (423)..(423): n is a, c, g, or t
  misc_feature (425)..(425): n is a, c, g, or t
  misc_feature (434)..(434): n is a, c, g, or t
catcctctgtattagtgaatggctcagtcagaagtcttgacttacagataacagattttacattggctggcttaagcagaggagggatttgttaagggtattaggcagcttacagaattgtggggcaaactggagaactaattccaagccatagaactgatttgacctgataagaaaactgctgttactgtcactaccatcaaatgctacatgccaggatatcaactcgtctgttatacctactgccgggggcactgaaaccacttctgctattgcttgagaccaggagttcgagaccagcctgggcaaaatngtgagaccttgtctctacaaacataaaaataaaaaaatttgccagatatggcagcacatgcttgtataatcccagttactggggagctgagacaggagannnncntnaancncgggaggtngagcttgcagtgagccgagatcgcaccactgcactccagactgggagacccagtgagactaggtctcaaaaaa

SEQ ID NO: 613913 - DNA, 147 bp, Homo sapiens
attttccccattgtcagggttgcttccacagtcatacatttcttcatgtacagtcagggctgcaggcaccaggcaacacaggccatggcacatcttccccattgtcagggtttcaacacagtcaagcatcacttcatgttcagtcaa

SEQ ID NO: 613914 - DNA, 1204 bp, Homo sapiens
ggtttttggcttctgctcgcgcggctttgttttttctgtttttcgtcgccgtttttcttgtgttcctggtgtggttggtcgtggcgcgggtggttttgtccttccgttttttttttgtgtgtgtttttgtttttttctgttagttcggggttctgctttttttgttttctgttcttcttccttcttttttctttcctttcttcttgtctagtgtattcgttcgttgtgggtttctgtctgtgcttttttttcttgtctcgcgtctctcgctggtttgggtgtttgtgtgtggtgttttgttttggcgcgtcgcgcctccgccctcctcctctcccgtctcgtcgtctctccctctccgtttctggggctcttcgtgtctctcttttgttgtcgtggcttgttcgcgtcgtgcgcgccgtctcccgccgctcgcgggcgcgtccccgctcccctcgcctcgcgctcgctcgcgcctctctcttgctcgttgtttctggtgttgtctgtgtgtttgtgtgcccgcacgcgccctctctgccctctcttttttgttttcggtttgtcgcctgttctgtctctgtcgtctgtgttgtgtgtgtggtgttatatatatatatttttttcccctcctgcacgcacgcgacacgtgtagctcgcctcctcttcctctcggttgtcttctctctctctcttcttgtctctcctcctctctctcttctcctcctctctccctctctcggctcctccctccgcgctgcgcgcgcgcgtggcgtccccccccactgcctccctctctctctttttctctcttccccgcccctctcttgtcgccccgccccccccgcccccgctctcgttctgcttgtcgcgcgcgcgcctcactaatatatatatataagcaccgctctctctctcctcctctctctctctctctcttttttttttttttttttctctctctctttttactatatatataataatttataagttagaaaaaaaaaaaaaaaaataaaaaaaaaaaaaaaaaaaaaaaacaaatacaaatataaaaaaaaaaataaataataacaatatcatataataaaatataataaatacaacacatagaaataaaacaataaataaaaatataacatacccaccattacataatacaacaataaataaacataacatataaacatatacaattaacataata

SEQ ID NO: 613915 - DNA, 122 bp, Homo sapiens
  misc_feature (92)..(92): n is a, c, g, or t
  misc_feature (119)..(119): n is a, c, g, or t
tgttcaagcgattcttctgtctcagcctcccgagtagttaggattacaggcgcgcactaccacgcctggctaattttactgtatgtaggagngacagcgtaacaacgtgttaacgagtntct

SEQ ID NO: 613916 - DNA, 374 bp, Homo sapiens
cttgattgactaaacagcaagaacttattctttttcatctactgataaaaggaagagaataatactttaagaagagctcaagctccagctggtatcagagaagtcagtagaggtcactgagaccggcagtctttcttgctctttggattagtgccctcagctggaactgtttacgggacagaagacgtaacatgcttcaggaagacatccaggtctatcacgcccccttctcaaggcttctcccaagtaaaagatagtgtcttcaatagcgtatactactgcataacagattcaggatctgtttgactaagggagctgtgggaatgataacttcatcgatatcattgttttccgactgatattccattttttca

SEQ ID NO: 613917 - DNA, 198 bp, Homo sapiens
ggtaccgtccttgctcctcgttacttctctgtcgcgttttagtttcccttatctataatcttatttgactggcaaatcatggaaaaatgtagtgcaatttggctcagagcttctgtgtttctaccctttctgaactagtgttctccatttcttcagggccaggctctctcctgcgtttagaagcttgggtaccgagct

SEQ ID NO: 613918 - DNA, 1007 bp, Homo sapiens
  misc_feature (217)..(217): n is a, c, g, or t
  misc_feature (348)..(348): n is a, c, g, or t
cacccccgccccccctgttttttttgtatccacaccggcgcgctcaacacaccatattgttataatacaacatcatattagcacccccccgtgtattatggtgtagtgctccattatacaccacatcatcacaccacgcagtatgtttttatagtagtgtgcaacaccagcatcttatatataggagatcatcttctcgagaatgaggattagcccncacacacaggtggtgttgtggtacgcaccacactaagtatagcgacacacggcgcgttgtgtgtagtataagacacgcgccgcgcgcggcgccacacgtgtgagacgtcatatgtgacgcccggtgtctcntcataacagggtggtaacgtcgcgagggcgctcttctgcggtgtgggcggacgaattttttcctggggcacacgcagagagccccaccgtgttgtgtcatctgtcctctgtggtctctgtgatgagagtgtgttgttctgcttctcataagagggtgatgataaatcacactgctgtgtgtgtgagagagatatagtagtgtctctctgggtgtctccgtctcgtccacagagagcctcccgcgcgcgcgccctcgttggtctcccaacactgtccgctctcggagagaaatgtgtagagagagaatatacacacaggagctcttctctctgcgttcacacactcgcccccggacgcggagaaatgagagatatccacacaaatctctgttctacacagagttcacacagagaaaataaaagggagacacacacggtggagaagtgttataaagtgttcagagagcacgcacagataccctcttgaacaccccctcggtgtcacttcacctcgagcacacaagaagaaaggcacagagagagaaactgagaacccgtgtccctcgcccccccgtttgtgcacctgtaaagaactgtaaatgtaaccccaccaccctgattgtgaactgttattatatttaaataccttaaaatcccaaa

SEQ ID NO: 613919 - DNA, 176 bp, Homo sapiens
agatgacctggaatgtggagattgccaactaccggaagctgctggagggagaggagagccggatcaccatctccccatccagacctactctgacctcaacttccgagaaaacagccctgcagcaacaggggttctgcgcgtcccataccaagcacagacggtgctgatcaatgacc

SEQ ID NO: 613920 - DNA, 524 bp, Homo sapiens
tggagagggggtctcacaggcggtccaggcgggtttcgaactccggaccccgaggcccgcctcagcctcccagagggcggggattacgggtgtgagccaccaggcccggcctttttatttaaatccaattggacaaggttggccttacaaagggtctaaatacctcaattaaggttaaggtaactatcaaggtggcaaggtagctcagtttaaatctaccgtcttactctttttttttaaaattattttttctggcttttctctggtccggccttcttcggaattaagtggtgtggtgactttatctccacttttcacttattgggctacagggtttttttcttatggtgggctctaaggtttacagtatatacatagctcacttacggtgatctacttggaccattagtctactagggatcacttcacatatagtacaagaaccttagaataatacactttaagttccactcccactcttagtagtatttggggcataacatttgaagggtacatgtatcata

SEQ ID NO: 613921 - DNA, 439 bp, Homo sapiens
gtgtgatgacaaatgacatgacaagatgctcaacatcgggaggttgaggcaggagaatcacttgaatctgaaaggcagaggtagcagtgaactgagatgtgccactgtactccagcctgggcgacaaagtgagactctgtctgaaaaaaaaaaaaaagttcatggaggaaaaaaaattttaaaagttttcaaagaaaggtctctctcttttctcccctctcttctcccctccccttcctttcattttcagaaaaaagggagaaattggtgcatataataagatgaaaccaaacacacttctaaaaatcggcttagatcctttcttaaaaaaaatctgtggaatattttcagggccttggcaaaatatagtataatcagggaatacctaagaaaaataaactggtgggcaagtaaatgatacagatgacagggattttct

SEQ ID NO: 613922 - DNA, 979 bp, Homo sapiens
agcggattcttccggtggagatggttgcggccgtggcggggatgctgctaggtgcgagtatccctgtcgcccgaagcgtggaccggtctgccttaccctcgcatacgtgtcctgacttagtggcgtcctggggtctgtataggcctggcattcgatacgtcgtgggattgccacgttgcaagcttggctagcaaagctctagattgagcctcgttgtactttgagaatacttatccacctccacgtagagactcaagccttagttcaccacatctagtttgctcttagcccatacttcgcctcacagtagcccccgccgcaccaaggagggcaggcataagagcacatcgagtcaaaggctttgcttcactgcacagtggggagaaatacgccagtcagcttattctctacggaacgaaccgggaagattgactaatcgccgtcactcgccagtagagtggttgagcttccttgaggctcgctagaaggtgaccgatacgcttgtcattactagcgagcaccgctaacgtctttgccggaaaaactagcgaaaagaatcggcttgagtggacatcgtggtctttgccacgcgagaggcaagggctcacctagaagagggcctcccattcactttgggaatgtgaacttcctacattgtatcgcataaactccctcgctggtccccccttctattgtggttgggtggacaaccaaatcgaaattgactggtcatgggatcaagtagaacacgtacgacacccatacgagttccaaacggaatggactcgtgctcaatcggggaattccctttcaaaagggaagccttgtttggcccaatttcccctgtggccgactggttttagtgcttgggctagccaatttgtatttgacataccaatttccatacgaggaccaggggtagagggcctttttatttccaaattcgttacctttccaaatgcctaccccccagcacttg

SEQ ID NO: 613923 - DNA, 773 bp, Homo sapiens
ggcgggacaacccagtcttacgacacgcccgacgccggcgcctccttctcccgccacttcgccgccaacttcctggacgtcttcggcgaggaggtgcgccgcgtgctggtggctgggccgacgactcgtgggcgctggccgtgagcgcagaggccatggagccggagctcgcggacacctctgcactcaaggctggctgccctacggccactcgcggagctcggaggacgtgtccacgcacgcgtgcaccaaggccccgcgttcgcaaagggcttctcgctgccgcaacatgagcctgtgccgtggtggaccgcgcgtgctgcagacagtgtgtgcacctgtgctgcgcctctgccccgagccccgacgcggcatgcttgccccgtgcaccgtccgagcccccgcgacaatgtggactgcggtgcctgagcgctgtccgcggaacgctggcttgcaaggtggagctggtggacacttcaacgcgagggggcgctgcgcttcctggtgtgcgacgacgcggccgcggtgctccgggggctcggctcagtggcagacgttgccgcccttgctctgcgccggggctgtggccgacggaacgcttccgctggaagttctccgtgcgcccaaagcctcagggcccaaggtcaggattcccacctggtcagcactccttgaggtccgcaaccaccatgccccctggaaattgcagagaaggataacacatttcgtcctcacaggtagagaatgggagcgaatacatcttggagagcacg

SEQ ID NO: 613924 - DNA, 489 bp, Homo sapiens
gaatctgcctgcagcttgaccttgaacttcccagcctccagaactctgaggaataaatttctgttatgtgaccgaaaaaaaaaaaaaaaaaaaaaaaaaaaacaatatgtgtgcggggcgcgcgcgcccgcggcggccccgcgagaaaaacgttttcttaaaaaccaatctcggttggggcgcgcgcggggcgcccagagagggtaagtgggacacatggggccaataacgcgggctcccaaaggaaaacccggggccaaggacaaggtggcgggggtttctctcaacaacataaaaaaagcgcgcgcgggggggggaacccgcggagcgctgttcctgagaaccaaaattttccaaagagggggagcgtccgaggagacgaccactaaagcggggggttgctaaacaacaacaacgggggaaggccccaaagggagaaccgcccagaattattcaaaattaacggcccgcggccgcggggaaaaaagg

SEQ ID NO: 613925 - DNA, 849 bp, Homo sapiens
  misc_feature (75)..(75): n is a, c, g, or t
ccggtgccatcgactactgcaaatccaaagcgtcaaccttcgccttcatggagagcctgaccctggggctgctgnactgtccgggagtcagcgccaccacagtgctgcccttccacaccagcaccgagatgttccagggcatgagagtcaggtttcccaacctctttcccccactgaagccggagacggtggcccggaggacagtggaagctgtgcagctcaaccaggccctcctcctcctcccatggacaatgcatgccctcgttatcttgaaaagcatacttccacaggctgcactcgaggagatccacaaattctcaggaacctacacctgcatgaacactttcaaagggcggacatagagacaggatgaagacatgcttgaggagccacggagtttgggggccacagcacctgggcacacacccgagcacctgtccattggcatgcttctgctgggtgagcaggacagctcctgtccccagcgaagaatccggctgcccctgggccagtcccaggacctttgcacaggactgatgggtataactgacccccacagggaggcaggaaaacagccagaagccaccttgacacttttgaacatttccagttctgtagagtttattgtcaattgcttctcaagtctaaccagcctcagcagtgtgcatagaccatttccaggagggtctgtccccagatgctctgcctcccgttccaaaacccactcatcctcagcttgcacaaactggttgaacggcaggaatgaaaaataaagagagatggcttttgtgatttcctttgttcaaatcttccgtgggcagttgggagggagccagtcccaaccataaa

SEQ ID NO: 613926 - DNA, 789 bp, Homo sapiens
  misc_feature (1)..(1): n is a, c, g, or t
  misc_feature (124)..(124): n is a, c, g, or t
  misc_feature (143)..(152): n is a, c, g, or t
  misc_feature (221)..(221): n is a, c, g, or t
  misc_feature (286)..(286): n is a, c, g, or t
  misc_feature (296)..(296): n is a, c, g, or t
  misc_feature (341)..(341): n is a, c, g, or t
  misc_feature (364)..(364): n is a, c, g, or t
  misc_feature (381)..(383): n is a, c, g, or t
  misc_feature (390)..(390): n is a, c, g, or t
  misc_feature (402)..(404): n is a, c, g, or t
  misc_feature (411)..(411): n is a, c, g, or t
  misc_feature (413)..(413): n is a, c, g, or t
  misc_feature (585)..(585): n is a, c, g, or t
  misc_feature (604)..(604): n is a, c, g, or t
  misc_feature (613)..(613): n is a, c, g, or t
  misc_feature (626)..(626): n is a, c, g, or t
  misc_feature (664)..(664): n is a, c, g, or t
  misc_feature (787)..(787): n is a, c, g, or t
nccaacaccccccagcttggttgcccttaatctctcttgttgtcatggaaggctcattttgttgtttccttctgaagaagcaggattttggtgtagatacatatttttcattacaaatgcagtnggtagaccataacctatannnnnnnnnnctgtatgaatttgagaagagcattttctgagctctagagacgaagctgagttttaacaatgcagttctnatggtatcacatctattaatgcctcattaggagggacagatatgaaaaaagtttagaggtaattnaccctttgtnctaccttggtactataacaaaccaaagaggatgataatatttgtnttaactgtgttccttctttgatngcctactttaaaatccnnncttggcnatctccagcttnnnaaatttncntttcttataagttaagttagataaataacttttctatgtttatgttatatactccctctgttttcctagaccttgattcacatgaattacatgatttacatactttgcatgatagccaagttatagtttttattaattatattaattcctcaaggacacaggaaccactatnatgattcatgataattgtnatacaactngagggacattggnagacattatgccttactcatttatttcttaaaggagtnattagaggtaaattttagctaaatatgagatagaaaatgtgcattaacacaaaaatttgcctcttcccttttcagtttttgtttagattaaaacagaatcttttatattctcttagagcagcngc

SEQ ID NO: 613927 - DNA, 1233 bp, Homo sapiens
tgggagtcccctgtctgcgttgagggttgttgtttctccctcccgggggggggtgcgtgtttgtttgtggtggctgtgtcgtcgacgcatctttggtgttggcaccccgttgtggggtgtgctccctgtcgtggctcttccttctttgttgggagttgtggtgtgatgggttggtggtcttctcccccgtgctcttatctctccctgtggtgtgtttgtggttgcatgcgatcacaaaacgcgccgcacgtgtggtggtttggtgttggggggcccacaaagaaggtggttgtgctgtcacacgcggctcactcttctcttctgtcggtggagataatatgtgtggggcgtcgcgcgggggcttagggatccttgtggttgcccgcgccttgttgtatgttttctgtcccgcgagcgtcccctgtctccacgtcgcgcacctcgcgtggtatactacactcgggggtgtgttctcgcggaggtccgcaccgctatgtttttctcttctgtgggcgacacccactccccgggggggggaggacccctcgtggagggagtggtgggcgcccgctgtgattactcctcggtgttgcctcccccctctctctctcagagagagagatagagtgtgtgcacccctccctctccctcacacgcgctccccccacaccacgcagggtgttgcccccccccgcgatagtgtggggcgcccacacgcttgttgtaccccacagtttttctcccgcagcgtgtaatctcgaaggggaggacaagagacacaacagttccacactgcctctatctatatagggcgccctccagagccgcgttttgttttctttaagagaacgcggcgctcttagatacaaagcgcatctctcgggggatcacaccacacacttgttcttttctctctgtgtgtttggtgtggaggccccccccccccgaaagagccccccccggggttggcgcgccgaagtattcccacaagagatttttttttggcgccccggtggagagggcgcccccgagaggcggggagagccacccccgggcccccccccccgggtgtttgtgttttttgtgctgtgccccccctctcccccctctctccctcggggggcgagagtgtcccccctcctctcggggggcccctctcccccctctgtttctctctccgagaaagggttttttttttggtggggttttaataaacatttccccccgtctcca

SEQ ID NO: 613928 - DNA, 1017 bp, Homo sapiens
  misc_feature (918)..(919): n is a, c, g, or t
  misc_feature (925)..(925): n is a, c, g, or t
  misc_feature (932)..(932): n is a, c, g, or t
  misc_feature (934)..(934): n is a, c, g, or t
  misc_feature (936)..(936): n is a, c, g, or t
  misc_feature (942)..(942): n is a, c, g, or t
  misc_feature (954)..(954): n is a, c, g, or t
  misc_feature (956)..(956): n is a, c, g, or t
gaaaaatgtttagacgggctcacatcaccccaataaacaaaataaggtttggtcctagcctttctattagctcttagtaagattacacatgcaagcatccccgttccagtgagttcaccctctaaatcaccacgatcaaaagggacaagcatcaagcacgcagcaatgcagctcaaaacgcttagcctagccacacccccacgggaaacagcagtgattaacctttagcaataaacgaaagtttaactaagctatactaaccccagggttggtcaatttcgtgccagccaccgcggtcacacgattaacccaagtcaatagaagccggcgtaaagagtgttttagatcaccccctccccaataaagctaaaactcacctgagttgtaaaaaactccagttgacacaaaatagactacgaaagtggctttaacatatctgaacacacaatagctaagacccaaactgggattagataccccactatgcttagccctaaacctcaacagttaaatcaacaaaactgctcgccagaacactacgagccacagcttaaaactcaaaggacctggcggtgcttcatatccctctagaggagcctgttctgtaatcgataaaccccgatcaacctcaccacctcttgctcagcctatataccgccatcttcagcaaaccctgatgaaggctacaaagtaagcgcaagtacccacgtaaagacgttaggtcaaggtgtagcccatgaggtggcaagaaatgggctacattttctaccccagaaaactacgatagcccttatgaaacttaagggtcgaaggtggatttagcagtaaactgagagtagagtgcttagttgaacagggccctgaagcgcgtacacacggcgtacctcctcagtatattcaaaggacttattaacctanntttttngggaagntncnggtggntggaggctgggnanaaaaaaggggggaaacaggagaaagccatttaagcaaaggtaaaagggaaagaaaagatga

SEQ ID NO: 613929 - DNA, 502 bp, Homo sapiens
agatcatgccgctccgagtaccagcctggtcctcactcaattgctatctagctgagtgccacagtggaacgacaacattagatctcatgaaaaccagaatggaaccactttcacttcataaactcatttataaaagtgcccatgatgaatagcaagaagtaccctgtggcccatctcattgaacaaaacttggaaagccaagggtggggcatcgtgcagctctcccataatctgagtattggtgatcctgtgtagcccacaacttcaaacatcttcttatatatttgctgtgggctctcggcccttctgttttcaaggccatcatggagaaactggagatgtccaagttccagcccactctcctaacactaccccgcatcaaagtgacgaccagccaggatatgctctcaatcatggagaaattggaattcttcgatttttcttatgaccttaacctgtgtgggctgacagaggacccagatcttcaggtttctgcgatgca

SEQ ID NO: 613930 - DNA, 830 bp, Homo sapiens
gactccaaatgggtcgcagtcgcagccgttgctccacggaggaaacgtaggcgttcccggctccacatcccgggggagagagaagcgcaggcgcccgagaaaggtccaggtctcggcgagagagatcggagaaggagccgttcaggaatcccggcactgaaaacggttcccggatcgtccgaagacgacatagatcccacatcgtccttccccgttcttcgatggaaagaaggaagagatgagggaaatgtagaagaatcaataagaagcaaaaggagcaaaagaaagggcaagattactgaggaaagagtttagagcggcaaaacaggaggaacgaagatagagaatgatgacacgttacatgggatttagcctgccttgtgattccacaaaaaggtaagaaggcggatggttctgtaaatgcctatgccataaaatgtctctcagaagaggaagtaccaggcagtacatgatgtcgaaagggtggattcaaaagacccttgtggattttccattgggcatgaggaattggacaggttgttccgaaaggatgatttttttttttcccctcatctgtggtccagaggaggtgcctttgtaattgtatttaacttttgcattttcaaaaacacaggatctccagttctccttttctgtacaagtacagaaaatcttattatgactatatgccagttaactttacctgtggcttcaacagaaggaaggttcactattacattttttcttttacggaaatatcattgggggcagggggtaaacccattatttggccttattcctgggaagccggatatgttcttccggaggca

SEQ ID NO: 613931 - DNA, 1016 bp, Homo sapiens
  misc_feature (917)..(918): n is a, c, g, or t
  misc_feature (924)..(924): n is a, c, g, or t
  misc_feature (931)..(931): n is a, c, g, or t
  misc_feature (933)..(933): n is a, c, g, or t
  misc_feature (935)..(935): n is a, c, g, or t
  misc_feature (941)..(941): n is a, c, g, or t
  misc_feature (953)..(953): n is a, c, g, or t
  misc_feature (955)..(955): n is a, c, g, or t
gtacgctggtccacagcataaactattccagcataaactattataggttggtcctagcctttctattagctcttagtaagattacacatgcaagcatccccgttccagtgagttcaccctctaaatcaccacgatcaaaagggacaagcatcaagcacgcagcaatgcagctcaaaacgcttagcctagccacacccccacgggaaacagcagtgattaacctttagcaataaacgaaagtttaactaagctatactaaccccagggttggtcaatttcgtgccagccaccgcggtcacacgattaacccaagtcaatagaagccggcgtaaagagtgttttagatcaccccctccccaataaagctaaaactcacctgagttgtaaaaaactccagttgacacaaaatagactacgaaagtggctttaacatatctgaacacacaatagctaagacccaaactgggattagataccccactatgcttagccctaaacctcaacagttaaatcaacaaaactgctcgccagaacactacgagccacagcttaaaactcaaaggacctggcggtgcttcatatccctctagaggagcctgttctgtaatcgataaaccccgatcaacctcaccacctcttgctcagcctatataccgccatcttcagcaaaccctgatgaaggctacaaagtaagcgcaagtacccacgtaaagacgttaggtcaaggtgtagcccatgaggtggcaagaaatgggctacattttctaccccagaaaactacgatagcccttatgaaacttaagggtcgaaggtggatttagcagtaaactgagagtagagtgcttagttgaacagggccctgaagcgcgtacacacggcgtacctcctcagtatattcaaaggacttattaacctanntttttngggaagntncnggtggntggaggctgggnanaaaaaaggggggaaacaggagaaagccatttaagcaaaggtaaaagggaaagaaaagatga

SEQ ID NO: 613932 - DNA, 1300 bp, Homo sapiens
  misc_feature (934)..(934): n is a, c, g, or t
  misc_feature (943)..(943): n is a, c, g, or t
  misc_feature (949)..(949): n is a, c, g, or t
  misc_feature (981)..(981): n is a, c, g, or t
  misc_feature (984)..(984): n is a, c, g, or t
  misc_feature (990)..(990): n is a, c, g, or t
  misc_feature (994)..(994): n is a, c, g, or t
  misc_feature (1088)..(1088): n is a, c, g, or t
  misc_feature (1104)..(1104): n is a, c, g, or t
  misc_feature (1125)..(1125): n is a, c, g, or t
  misc_feature (1147)..(1147): n is a, c, g, or t
  misc_feature (1186)..(1186): n is a, c, g, or t
  misc_feature (1192)..(1192): n is a, c, g, or t
  misc_feature (1200)..(1200): n is a, c, g, or t
  misc_feature (1223)..(1223): n is a, c, g, or t
  misc_feature (1226)..(1226): n is a, c, g, or t
  misc_feature (1245)..(1245): n is a, c, g, or t
  misc_feature (1269)..(1269): n is a, c, g, or t
gaaaaatgtttagacgggctcacatcaccccaataaacaaaataaggtttggtcctagcctttctattagctcttagtaagattacacatgcaagcatccccgttccagtgagttcaccctctaaatcaccacgatcaaaagggacaagcatcaagcacgcagcaatgcagctcaaaacgcttagcctagccacacccccacgggaaacagcagtgattaacctttagcaataaacgaaagtttaactaagctatactaaccccagggttggtcaatttcgtgccagccaccgcggtcacacgattaacccaagtcaatagaagccggcgtaaagagtgttttagatcaccccctccccaataaagctaaaactcacctgagttgtaaaaaactccagttgacacaaaatagactacgaaagtggctttaacatatctgaacacacaatagctaagacccaaactgggattagataccccactatgcttagccctaaacctcaacagttaaatcaacaaaactgctcgccagaacactacgagccacagcttaaaactcaaaggacctggcggtgcttcatatccctctagaggagcctgttctgtaatcgataaaccccgatcaacctcaccacctcttgctcagcctatataccgccatcttcagcaaaccctgatgaaggctacaaagtaagcgcaagtacccacgtaaagacgttaggtcaaggtgtagcccatgaggtggcaagaaatgggctacattttctaccccagaaaactacgatagcccttatgaaacttaagggtcgaaggtggatttagcagtaaactgagagtagagtgcttagttgaacagggccctgaagcgcgtacacaccgcccgtcaccctcctcaagtatacttcaaaggacatttaactaaaacccctacgcntttatatanaggagncaagtcgtaacatggtaagtgtactggaaagngcncttggncganccagagtgtagcttaacacaaagcacccaacttacacttaggagattcaacttaacttgaccgctctgagctaaacctagccccaaacccactncaccttactaccaggnaaaccttagccaaaccatttnccccaataaaagtataggcggnaggaattggaacctgggcgcaataggatatagttccgcnaggggnaaggtggnaaatttttaccccaagcctaatnttngcaaggggttaaccccctntacccttctgggataatgggtttnccttgggaattacttttcccaagggggggcc

SEQ ID NO: 613933 - DNA, 136 bp, Homo sapiens
acgctgtgaggagaggctgcgctgtgcaggcatcgggaggcaggaggctgggcttatcgaggctgcaggggcacaaaagtcaaaagcggggttgggaaggcgcgggaggcatgagctgggctgggccgaaagaggc

SEQ ID NO: 613934 - DNA, 289 bp, Homo sapiens
agaaggatacaccagattatcgttatatgtggaatctaaaaagtcaaactcatagaaacagtagaagggcagttaccaaaggcagggacgtggggttaggatgggggctgtggacgtacacaatttcagttaggagagataggttcaatacatctgttgtatttcatggtgactatagttcatgatatatggtgtacttgcaaatggctaagagtagattttaagtgttcttaccacaaaaaataagcatgtgaagtaatgcatgtgtccagcagcttgagatacgcga

SEQ ID NO: 613935 - DNA, 1023 bp, Homo sapiens
gaaaaatgtttagacgggctcacatcaccccaataaacaaaataaggtttggtcctagcctttctattagctcttagtaagattacacatgcaagcatccccgttccagtgagttcaccctctaaatcaccacgatcaaaagggacaagcatcaagcacgcagcaatgcagctcaaaacgcttagcctagccacacccccacgggaaacagcagtgattaacctttagcaataaacgaaagtttaactaagctatactaaccccagggttggtcaatttcgtgccagccaccgcggtcacacgattaacccaagtcaatagaagccggcgtaaagagtgttttagatcaccccctccccaataaagctaaaactcacctgagttgtaaaaaactccagttgacacaaaatagactacgaaagtggctttaacatatctgaacacacaatagctaagacccaaactgggattagataccccactatgcttagccctaaacctcaacagttaaatcaacaaaactgctcgccagaacactacgagccacagcttaaaactcaaaggacctggcggtgcttcatatccctctagaggagcctgttctgtaatcgataaaccccgatcaacctcaccacctcttgctcagcctatataccgccatcttcagcaaaccctgatgaaggctacaaagtaagcgcaagtacccacgtaaagacgttaggtcaaggtgtagcccatgaggtggcaagaaatgggctacattttctaccccagaaaactacgatagcccttatgaaacttaagggtcgaaggtggatttagcagtaaactgagagtagagtgcttagttgaacagggccctgaagcgcgtacacactcgccggctccctccttatgttttcttcaagggtcattaactgaaacctcttcgcttttcttttgggggggtcatggtgcttccttggttagtgtcctgggacagtggcctggggctgatcaaaatatttacagttaaaaaaaaaa

SEQ ID NO: 613936 - DNA, 524 bp, Homo sapiens
  misc_feature (18)..(18): n is a, c, g, or t
  misc_feature (65)..(65): n is a, c, g, or t
  misc_feature (67)..(67): n is a, c, g, or t
  misc_feature (71)..(71): n is a, c, g, or t
  misc_feature (74)..(74): n is a, c, g, or t
  misc_feature (81)..(81): n is a, c, g, or t
  misc_feature (83)..(84): n is a, c, g, or t
  misc_feature (99)..(99): n is a, c, g, or t
  misc_feature (107)..(107): n is a, c, g, or t
  misc_feature (112)..(114): n is a, c, g, or t
  misc_feature (116)..(116): n is a, c, g, or t
  misc_feature (123)..(123): n is a, c, g, or t
  misc_feature (125)..(129): n is a, c, g, or t
  misc_feature (133)..(134): n is a, c, g, or t
  misc_feature (136)..(137): n is a, c, g, or t
  misc_feature (145)..(145): n is a, c, g, or t
  misc_feature (149)..(149): n is a, c, g, or t
  misc_feature (165)..(165): n is a, c, g, or t
  misc_feature (173)..(173): n is a, c, g, or t
  misc_feature (201)..(202): n is a, c, g, or t
  misc_feature (210)..(210): n is a, c, g, or t
  misc_feature (267)..(267): n is a, c, g, or t
  misc_feature (376)..(376): n is a, c, g, or t
  misc_feature (418)..(418): n is a, c, g, or t
aagacaaacgcacccccnccaccacctgcccatcatgtcactgcactgaatacggtaggcaactntnacanaanggtattngnntctaaacacagaaangggatagnaaaannngngtattanannnnnaggnnannggaaaaanaaanggggtctgtaattgancaaaaaancattatgtagtgcatgaatattaaaatnntgcaaaanaaacccctgtatccatagtgtttaaaccataaaaccaatacctggtatatacatganaaaacaaagcatgtaaaataatatgcagcctaaagaattcaaagacaacaaaggtgacaaagtcaggtaaaagaaaggcaattagggacataagatattttttaaagcnggaagctgatgatgtccactgtaagcctggaagaaaccaggngtttgaacacggagcagttactgataggaaggataaagtgctacatctctaacagcaagcaaattaactctgctgaaattgccagaatgaaggccaaggtggtttt

SEQ ID NO: 613937 - DNA, 1818 bp, Homo sapiens
  misc_feature (75)..(75): n is a, c, g, or t
  misc_feature (1452)..(1452): n is a, c, g, or t
  misc_feature (1461)..(1461): n is a, c, g, or t
  misc_feature (1467)..(1467): n is a, c, g, or t
  misc_feature (1499)..(1499): n is a, c, g, or t
  misc_feature (1502)..(1502): n is a, c, g, or t
  misc_feature (1508)..(1508): n is a, c, g, or t
  misc_feature (1512)..(1512): n is a, c, g, or t
  misc_feature (1606)..(1606): n is a, c, g, or t
  misc_feature (1622)..(1622): n is a, c, g, or t
  misc_feature (1643)..(1643): n is a, c, g, or t
  misc_feature (1665)..(1665): n is a, c, g, or t
  misc_feature (1704)..(1704): n is a, c, g, or t
  misc_feature (1710)..(1710): n is a, c, g, or t
  misc_feature (1718)..(1718): n is a, c, g, or t
  misc_feature (1741)..(1741): n is a, c, g, or t
  misc_feature (1744)..(1744): n is a, c, g, or t
  misc_feature (1763)..(1763): n is a, c, g, or t
  misc_feature (1787)..(1787): n is a, c, g, or t
ccggtgccatcgactactgcaaatccaaagcgtcaaccttcgccttcatggagagcctgaccctggggctgctgnactgtccgggagtcagcgccaccacagtgctgcccttccacaccagcaccgagatgttccagggcatgagagtcaggtttcccaacctctttcccccactgaagccggagacggtggcccggaggacagtggaagctgtgcagctcaaccaggccctcctcctcctcccatggacaatgcatgccctcgttatcttgaaaagcatacttccacaggctgcactcgaggagatccacaaattctcaggaacctacacctgcatgaacactttcaaagggcggacatagagacaggatgaagacatgcttgaggagccacggagtttgggggccacagcacctgggcacacacccgagcacctgtccattggcatgcttctgctgggtgagcaggacagctcctgtccccagcgaagaatccggctgcccctgggccagtcccaggacctttgcacaggactgatgggtataactgacccccacagggaggcaggaaaacagccagaagccaccttgacacttttgaacatttccagttctgtagagtttattgtcaattgcttctcaagtctaaccagcctcagcagtgtgcatagaccatttccaggagggtctgtccccagatgctctgcctccacacccccacgggaaacagcagtgattaacctttagcaataaacgaaagtttaactaagctatactaaccccagggttggtcaatttcgtgccagccaccgcggtcacacgattaacccaagtcaatagaagccggcgtaaagagtgttttagatcaccccctccccaataaagctaaaactcacctgagttgtaaaaaactccagttgacacaaaatagactacgaaagtggctttaacatatctgaacacacaatagctaagacccaaactgggattagataccccactatgcttagccctaaacctcaacagttaaatcaacaaaactgctcgccagaacactacgagccacagcttaaaactcaaaggacctggcggtgcttcatatccctctagaggagcctgttctgtaatcgataaaccccgatcaacctcaccacctcttgctcagcctatataccgccatcttcagcaaaccctgatgaaggctacaaagtaagcgcaagtacccacgtaaagacgttaggtcaaggtgtagcccatgaggtggcaagaaatgggctacattttctaccccagaaaactacgatagcccttatgaaacttaagggtcgaaggtggatttagcagtaaactgagagtagagtgcttagttgaacagggccctgaagcgcgtacacaccgcccgtcaccctcctcaagtatacttcaaaggacatttaactaaaacccctacgcntttatatanaggagncaagtcgtaacatggtaagtgtactggaaagngcncttggncganccagagtgtagcttaacacaaagcacccaacttacacttaggagattcaacttaacttgaccgctctgagctaaacctagccccaaacccactncaccttactaccaggnaaaccttagccaaaccatttnccccaataaaagtataggcggnaggaattggaacctgggcgcaataggatatagttccgcnaggggnaaggtggnaaatttttaccccaagcctaatnttngcaaggggttaaccccctntacccttctgggataatgggtttnccttgggaattacttttcccaagggggggcc

SEQ ID NO: 613938 - DNA, 1382 bp, Homo sapiens
  misc_feature (1016)..(1016): n is a, c, g, or t
  misc_feature (1025)..(1025): n is a, c, g, or t
  misc_feature (1031)..(1031): n is a, c, g, or t
  misc_feature (1063)..(1063): n is a, c, g, or t
  misc_feature (1066)..(1066): n is a, c, g, or t
  misc_feature (1072)..(1072): n is a, c, g, or t
  misc_feature (1076)..(1076): n is a, c, g, or t
  misc_feature (1170)..(1170): n is a, c, g, or t
  misc_feature (1186)..(1186): n is a, c, g, or t
  misc_feature (1207)..(1207): n is a, c, g, or t
  misc_feature (1229)..(1229): n is a, c, g, or t
  misc_feature (1268)..(1268): n is a, c, g, or t
  misc_feature (1274)..(1274): n is a, c, g, or t
  misc_feature (1282)..(1282): n is a, c, g, or t
  misc_feature (1305)..(1305): n is a, c, g, or t
  misc_feature (1308)..(1308): n is a, c, g, or t
  misc_feature (1327)..(1327): n is a, c, g, or t
  misc_feature (1351)..(1351): n is a, c, g, or t
gaaaaatgtttagacgggctcacatcaccccaataaacaaaataaggtttggtcctagcctttctattagctcttagtaagattacacatgcaagcatccccgttccagtgagttcaccctctaaatcaccacgatcaaaagggacaagcatcaagcacgcagcaatgcagctcaaaacgcttagcctagccacacccccacgggaaacagcagtgattaacctttagcaataaacgaaagtttaactaagctatactaaccccagggttggtcaatttcgtgccagccaccgcggtcacacgattaacccaagtcaatagaagccggcgtaaagagtgttttagatcaccccctccccaataaagctaaaactcacctgagttgtaaaaaactccagttgacacaaaatagactacgaaagtggctttaacatatctgaacacacaatagctaagacccaaactgggattagataccccactatgcttagccctaaacctcaacagttaaatcaacaaaactgctgaggtttagggctaagcatagtggggtatctaatcccactatgcttagcctaaacctcaacagttaaatcaacaaaactgctcgccagaacactacgagccacagcttaaaactcaaaggacctggcggtgcttcatatccctctagaggagcctgttctgtaatcgataaaccccgatcaacctcaccacctcttgctcagcctatataccgccatcttcagcaaaccctgatgaaggctacaaagtaagcgcaagtacccacgtaaagacgttaggtcaaggtgtagcccatgaggtggcaagaaatgggctacattttctaccccagaaaactacgatagcccttatgaaacttaagggtcgaaggtggatttagcagtaaactgagagtagagtgcttagttgaacagggccctgaagcgcgtacacaccgcccgtcaccctcctcaagtatacttcaaaggacatttaactaaaacccctacgcntttatatanaggagncaagtcgtaacatggtaagtgtactggaaagngcncttggncganccagagtgtagcttaacacaaagcacccaacttacacttaggagattcaacttaacttgaccgctctgagctaaacctagccccaaacccactncaccttactaccaggnaaaccttagccaaaccatttnccccaataaaagtataggcggnaggaattggaacctgggcgcaataggatatagttccgcnaggggnaaggtggnaaatttttaccccaagcctaatnttngcaaggggttaaccccctntacccttctgggataatgggtttnccttgggaattacttttcccaagggggggcc

SEQ ID NO: 613939 - DNA, 851 bp, Homo sapiens
tgcccacagaagcctctaaatcccctgtaaatgtaactgttagtccaagagaggaacagctctttggacactaggaaaaaacgtgtagagagagtaaaaaatttaacacccgatagtaggcctgaaaagcagcaccaattaagaaagcgttcaagctcaagcacccactacctaaaaaatcccaaacatataactgaactcctcacacccaagtggaccaagtctatcaccctatagaagaactaagtgttagtataagtaacgagtgaggaaacattctcctccgcataagcctggctgtcagattaaaacactgaactgacacacttaacagcgccaactatctacacagtgccagagccaacaagtcgattattaccctcacgtgtcagcccaacacaggcagtgctcatataccggaaaggttagaaagaagtaacaaggaactcggcaaatcttaccccgcctgtttaccagagaacatcacctctagcatcaccagtattagaggcaccgcctgcccagtgacacatgtctaacggccgcggtaccctaaccgtgcaaaggtagcataatcacttgtgccttaaatagggacctgtatgaatcggctccacgagggtcccacgccgtctcttactttctacaccagtgaaagtggacctgcccgtgaagaggcgggcatgactccactctcagaccgagaagaccctatgggagctttctgtattactgccacagtaccctacaaccgccaggtcctaactaccaactgctaaaaatcccgtgggcgactcgacaaaccactccagcagcatgcagctcccacccagcactgttctatgtcctag

SEQ ID NO: 613940 - DNA, 634 bp, Homo sapiens
gaaaaatgtttagacgggctcacatcaccccaataaacaaaataaggtttggtcctagcctttctattagctcttagtaagattacacatgcaagcatccccgttccagtgagttcaccctctaaatcaccacgatcaaaagggacaagcatcaagcacgcagcaatgcagctcaaaacgcttagcctagccacacccccacgggaaacagcagtgattaacctttagcaataaacgaaagtttaactaagctatactaaccccagggttggtcaatttcgtgccagccaccgcggtcacacgattaacccaagtcaatagaagccggcgtaaagagtgttttagatcaccccctccccaataaagctaaaactcacctgagttgtaaaaaactccagttgacacaaaatagactacgaaagtggctttaacatatctgaacacacaatagctaagacccaaactgggattagataccccactatgcttagcccagagcctacagacagcatgattgcagatcgtctttagaagatcactacgagccacaatcttaaaggttaatgaggatgacgatgactataaggatatagactgatcaagtatgaagtctatggataatacacgcagcacc

SEQ ID NO: 613941 - DNA, 498 bp, Homo sapiens
gaaaaatgtttagacgggctcacatcaccccaataaacaaaataaggtttggtcctagcctttctattagctcttagtaagattacacatgcaagcatccccgttccagtgagttcaccctctaaatcaccacgatcaaaagggacaagcatcaagcacgcagcaatgcagctcaaaacgcttagcctagccacacccccacgggaaacagcagtgattaacctttagcaataaacgaaagtttaactaagctatactaaccccagggttggtcaatttcgtgccagccaccgcggtcacacgattaacccaagtcaatagaagccggcgtaaagagtgttttagatcaccccctccccaataaagctaaaactcacctgagttgtaaaaaactccagttgacacaaaatagactacgaaagtggctttaacatatctgaacacacagcgtggagcacacaggtagagatgagacacagtggcgacgagctgatattt

SEQ ID NO: 613942 - DNA, 529 bp, Homo sapiens
gtacgctggtccacagcataaactattccagcataaactattataggttggtcctagcctttctattagctcttagtaagattacacatgcaagcatccccgttccagtgagttcaccctctaaatcaccacgatcaaaagggacaagcatcaagcacgcagcaatgcagctcaaaacgcttagcctagccacacccccacgggaaacagcagtgattaacctttagcaataaacgaaagtttaactaagctatactaaccccagggttggtcaatttcgtgccagccaccgcggtcacacgattaacccaagtcaatagaagccggcgtaaagagtgttttagatcaccccctccccaataaagctaaaactcacctgagttgtaaaaaactcagtggacacaaatagactcgaagtgcttacatatctgacacacatagcttagccaactggattatatacccactatgctagccctacctcacagtaatcacaacgctcgccagacctgaccgcctggatcctgta

SEQ ID NO: 613943 - DNA, 472 bp, Homo sapiens
  misc_feature (385)..(385): n is a, c, g, or t
  misc_feature (392)..(392): n is a, c, g, or t
  misc_feature (416)..(416): n is a, c, g, or t
  misc_feature (446)..(446): n is a, c, g, or t
ctgttgacagacaatattggctaagctggagtgcagatggcacaatctcaacccactgcaagctccagctcccaggtttatatttttctcatgcctcagcctcccaagaagctgggactacaggcatgtgccccaagaggccagttaagttttctttttccttttttcttttttcttggttgagacggattttcgctcgtcacccacactggagtgcaatggcgcgatctcggcccactgtaacctccgactcccgggtccaagcgattctcccgactcagcctcccgagcagccgggactagaggcacccgtcaccacgcccgctacctttggcattcctagtagagacggagttccaccacgctggtcaggctgatctcaaanccccggnctcaagtgactcacctgccttggnctcccaaagtgctggaatcacagtgccggnctatctttgccatattggtctgcaca

SEQ ID NO: 613944 - DNA, 241 bp, Homo sapiens
attccagacgtacacacttacagtaccatgcatatatgtatgtatgtagagttgggctctcaccgtattgccaaactggtctcaaacctctggcttatgcaatctgccacctgggcctcctaaagtgctgggccgtgggccactgtgcctggccttctgtaatttattcactgattgattgattgattgagatggagtcttgctctgtcatccaggttggagtgcaatagagcgatctcgg

SEQ ID NO: 613945 - DNA, 167 bp, Homo sapiens
ccgacagcacagagaaggaggaagcacaaccttgtgtctgctgtgacccgctgttccatgctagacctgtgtttcctccccagctcatctttctcgtcccagagaggtggggctggatgtctccatctctgtctcaactatgtgcagtgagctgcaacttcttacct

SEQ ID NO: 613946 - DNA, 164 bp, Homo sapiens
tcacttgctcctatgtatcccttccttcctagctatactcctgtatgtttactatcagaacaatatcttcgccgcgtgtggtgtctcacgcctgtattcccgcttcttgggtcgctgatgcgggcatatcatcgcacgtcgggagttcgtgacccgcctgtgtc

SEQ ID NO: 613947 - DNA, 1290 bp, Homo sapiens
ggctgcacatcatggacctctggatcttgtcctgtttctccagcagtgggtggtgtctgaaacgcttcccgggaggctcctgcatgggcagctctgacgagtgacactgagtggtggcgtgatgcgtccccactggtctttggctggcgtgatcatcccgaaacgaagggttatcgtgtggagccaggttaccacaacagtgacgtgtcatgttcgtatcaacgtggagcgcgaggcggtgtgcggttcgctggtacagagtacttgcgtatcaccaatgaggagtacgctgtcggcgttcagacaagcgacagatgggcggaggtaccagggcgggtgacgggaggcgtaggaggctcggcactagctgcgctgaggtactggaaaccacgcgcagaacggacactcgctgtgaagcaagacgcgctcgcggcgcggcaggctggacgaccgtacgtgcgaggactacaacctagggggttcgtggaggatgcttcaccagtgttgcacgccagggctgatgtcgtaattctctagaggggtgatcgtgtgtaatcactggccgacaaggagcccattggaccctttgttatggcaccagaaatgcgtgccctcggggtccttgtctcctggttggacgatcggtatgcgtgagtgcccatgtgccaagccaattgggcgcaaggtccatggggtcgggtatcgcgcgggaaaaccgggcgccaggcgcagacggaaagaaaaaagcacgtgtggcggggttagcgttggtgcccgaaccgagggggcgccgtttagaatttctcggagggaaaatcggggtaaggctatccgtcggggtaaaacgcccgttgttgcccaaaggtggagctccaccacttgcggcgttgggacgtggggcggttggaggaacaaggatagacgcaaaggaggtgtgtgcgacacattcccgggggcaagaacatggtgtttcacagaaaagggcggggggtgtgaacgccaaaacccccccaagttggtcctcccaccaccacagggatgtgaggagcagagcgcagccgattaggcagcaacaagaaggcgtcccccggtgggggggaggaacagggaaacaaacgaccaccggcggagtgccaccacaacacaacacgacggggtttagggagcgggaaaagaaacgcttcgcgcgggggacaggtgaagggggccaaccatccggcggcgcaacaccctttgtcgaagagaggtttccacataaggcccccaccccgaagggaaaaaggaaacgag

SEQ ID NO: 613948 - DNA, 1291 bp, Homo sapiens
gacgcttttctcattctgtcaacacccacacgacctataggcacaatgaagtgagtaacctttattttcccttactttattctctcttcaggctcaggcttcattcccagggagtggtagtaatcagtcgcagcatgccaccacaagcagttgcaggtatgctccatcaggtattcacagcatatagggcagcaagcaaacattatcaaacagccatagcgtgttgcatatgcccttatgctccagctcatcttccaagacccgctggtcccatacgtctgcaagccctctatgctcacacacattacagttagcactgcaagtaaccgtaggcaattttagcctacaacaccatgttgctagctggatggaaggtcaaagcttgagacacattggtgcactacaatacacctctcgatacgccatttacacaggaagaaccaacatacaactggcacacaagagacgccacaacagtcattccggatgcaccaaccccataaagagatgcacacacctgcgccgtggaactgggcagagaagcccaacacccccacggaccaaccgtggacgcaggcacccactggcaactgcctagtcattggcaaacccacaacaccgaggtcgcccaacaccccccagaaaaccatccaacccgacacctatgggcagaacagcagccacgaaagaccaggaaagagtgacatgggaggcaccgcaggcaaaataaacagatgaagacaaggacgacgcaagaccaaatcaaaggacacacgcaagtaccattaaaactcagtggcaaaagagggacgacgcaaacggaaaaggtgcacgtacaccatgggaaatagagcccccggggaaacagcacccgagtcacctgagatgcactaaagaaaagccacatcacaaggctaggcaagaagaacaaaccggcaaagggagacccaacgccagccacgaacagaaccgccagggcgtgcccctgtaaggcccacaaggcatacgacatgacaaaatcgaggagaatgacacggggcacagcacgaccgaaccggccaaaaaacgaagacaacaacaaagagagacacacacaacccgcgaccaataagggaacacacagaaagcagtacgaaggcgccatgagcagaaatacacgaccaggcacaccgagagaaccacaccaccaaaactgaagaaagagaaaaaaagacacacacgaaccgcaacacgcgatagaccacacaagccaccgagagcaaggacaaaaggacaaacacaagcgcaccac

SEQ ID NO: 613949 - DNA, 366 bp, Homo sapiens
ttcagagggcgagatgtcgcatcagcggaaacctggatttggttctgacctgtggggctgagaaggggtgcccggaagtgatcgtgggactgaccggaagcgagccttggaggggaaagagagagcgagacatgcggagtgaggcggcagctagcctgcccagtggctgtcccgtggactgacacctgcgcccccgtgtgcaagcaggatcatttggtgccaacactcattcagcattcccgattaactaggatgaatttaagactgtgctcccatgtgttctcaagtggtagtttaaaaagtggattcttaaagtgcctttcaattgtctgtgaacgtataaaggactgatctgtctcattttga

SEQ ID NO: 613950 - DNA, 387 bp, Homo sapiens
ggcgcctcagggtcagcgtattgagcaggtggcgatctgtacgcagagctggacaccaataacactctgtcactcaagttggaaccacggcacagatgtcggatccttatctgataaagaggaatggctgtagtatggctacctactggcacgagaagggcggctagaggatgtagagaaccttggatgccgcctttacaatatctctgaccagcatgcagcaccgtgggtggtttctggctgtcaccagcttctcatcagcaaacgctcatcccgggccctctcatttcaggcagccaaggccattcagctgaacagtaatagagttcaggctctgctcacttcaagggagcagcacttcaggcaacaataggccgcatccaaagc

SEQ ID NO: 613951 - DNA, 338 bp, Homo sapiens
acgacgccgtgagcttcccatagcctgcccgctatgtccgagatagtgcgcagctgcatccaccaggtcgaggtcccgggagcaggcggcgatcagccggagctcttatcggcggccccatagggcgcgccgtgcaggcaggcttaggtcccgttcaacagcgtcagcagctcctacgagcacaagcgcctctagtgttcaggccgccgtgcgcgtgagcacgcgcctgccgcgcgcaggcccaaggcgccccccggcgcggcccgcgcgccccccggccagcccgccgaacccgacgctccgcgctcgtccccgggccccggagcgcgcgaggaggg

SEQ ID NO: 613952 - DNA, 321 bp, Homo sapiens
  misc_feature (9)..(9): n is a, c, g, or t
  misc_feature (25)..(25): n is a, c, g, or t
  misc_feature (99)..(99): n is a, c, g, or t
  misc_feature (110)..(110): n is a, c, g, or t
  misc_feature (120)..(120): n is a, c, g, or t
  misc_feature (166)..(166): n is a, c, g, or t
  misc_feature (275)..(275): n is a, c, g, or t
gcaagtgcntacctaccaccatctngcagcttagcctgccttaatgtgctcaaacccttacattagcctacacttgggcaatcatctaactaaacctanttttattattnatttattatntatttatttttgaatcagagtcttgctctgtcgcccagctggagtncatggcgcgatctcggctcaccacaacttccgctctgggttcagcgattctcctgcctctgctgtatcccgacatttgggatgccgggtgggaggatcgcttgagtccngaagttcgagatcagcctgggcaacatggggagacctcgtctctcc

SEQ ID NO: 613953 - DNA, 136 bp, Homo sapiens
gcgggcagggactgggacaggtttcagtcctaaaagcacttgagctacacacagagggaccaacactcaggaggcataggttaagagcacagggggggattcatttaaaagagatcaggagggtaatctaggtcag

SEQ ID NO: 613954 - DNA, 396 bp, Homo sapiens
gtctaaatgctagtattttattcagcaaaaatgcatctgaattcataagtgatctataagttctttagtttttgttttattaaaacaggtccataaaaatctgttttatcggtattttagaaaaatgatcttttggattcatacagattcaatgtatcctttccatgtctgatgtttttcatatattcccatttccataatttagggttttatttaaaaatctcttttgaaaacagtgtgatttcattctgtgtatacatttatgcaaagttagatgtattgtatgtctaatgcacacaaactgaagctgtactaaaatacatcaagggtaaattttcttgctacttttttatttcttattttttgctttactacacaataccttagaaaggcaaa

SEQ ID NO: 613955 - DNA, 213 bp, Homo sapiens
attcggctcggtaccctcttcctacgggtactaagatgtttcacttccccgcgttaccacccacacccctatacattcagggcagggccaccggacactactccggacattccaggtttccccattcggacacccccggatcacagctcgctcaccaactccccagggcttatcgcaggtcacaacgtccttcatcggctcttggtgccaagg

SEQ ID NO: 613956 - DNA, 895 bp, Homo sapiens
tatatcagggcctatttaggagatacttctgaggcctaaggagttttgccaagcagttccttgagcgccgtgccaaacagaaagccaaccagcagcgtcagcagacagcacgctgctgtagctgcagcagaagccggcacagaagtccgtcaccagagccataaacagcgggactctgtgtgcgggatgaaccacagtacactccattcagtatttcagaccaatcaagagcaacaaccaaaaatccaatttctgaggctgtgcaagagtggcacacgaagaagacaaaacgcagaagatggtccgagcagatcccagtttataaggatctccagtcaagtgcatcatcggagcgcactcaaccatgggtgacactcgagacgtggatgactacttgagcaccctgccagtggactgggcatcccctctcctgtgtgccgacctatggagtctccaccttgtaccagcaaaacttacctcaccatttactctttatcactctgcaacaaatcacagaacccgatcatctacaggcttttcttctggcccttttgtgtccagattctttaatccatttcgtcggtgaacgatctcagactatagataacgtgcgcttggacccctgtggtctttgagagcgttgcaaggggcgattactcccccaagcaggggttgtttttacgcacgcttgtgtcccttgtgcttgttctgtcatctacttgctcccagaacagtgtggtgggaccggccatagcagtggtttgcttggccctggccctcgaattgggtcttctcgtttgccccctcgggcatgctcatggggcccggcgcgacgttaccccttgggattataccctgttggccgcccaggacctcggagtcgcccttaataacg

SEQ ID NO: 613957 - DNA, 456 bp, Homo sapiens
  misc_feature (224)..(224): n is a, c, g, or t
aagcaaagcaaaaacaaaaacaaaaacacctaaaaaacctgcagttttgtttgtactttgtttttaaattatgctttctattttgagatcattgcaaactcaacacaattgtaagtaatgatacagagggatcttgtgtacccttcacccagcctcccccaatggcaacatcttgcaaaactacaatgtagtctcataaccaggatattgacattgatacagtnaagatacaggacattctcatcaccacagggatccccaggatgcccacttccctccacccccacaccccagccgtgtccctaacccctggcaaccaggaatccactctccatttctataatgttgtcatttcaagaatgttattcaatggaatcatatagtatgtaacctgttttgagcttaaaaaaaaagtccacctgactttaatgaggaaaataaaaatgaatattgaaa

SEQ ID NO: 613958 - DNA, 135 bp, Homo sapiens
ggctgtaggctatgctttaggatctcgtcgtgcagaatttagacgcgttccaggcgggtgtcaatgagcgtggggacggctataagctgcctcttgtccttgatctcgttggacgctacccatgtcttgattggg

SEQ ID NO: 613959 - DNA, 309 bp, Homo sapiens
aggatcccccgctcggtcggggcccaacatgatgagcgaaccaaggagcagataccgaaacgatgctctaatgcgatttatgaccgaaacgaaacccaccgtggaactccttcccgtaaagggagaggtgagaccgaaagaactccagccgcggcattctattggagctgactctgtgccagccaacacagaaaacgaagtagagcctcgagatgcccgccctgcatgacgacagaggaccgaccactcaaccaggatcggggatgacagatatcacgacggaggagatggctgaggtaaacatgtatg

SEQ ID NO: 613960 - DNA, 356 bp, Homo sapiens
  misc_feature (51)..(51): n is a, c, g, or t
  misc_feature (61)..(61): n is a, c, g, or t
  misc_feature (79)..(79): n is a, c, g, or t
  misc_feature (111)..(112): n is a, c, g, or t
  misc_feature (164)..(164): n is a, c, g, or t
  misc_feature (166)..(166): n is a, c, g, or t
  misc_feature (179)..(179): n is a, c, g, or t
  misc_feature (186)..(186): n is a, c, g, or t
  misc_feature (274)..(274): n is a, c, g, or t
  misc_feature (291)..(291): n is a, c, g, or t
  misc_feature (304)..(304): n is a, c, g, or t
ctgaagcagtagagcagcccgtagttcttgagcagtgcgtaatggttgtcntgagtttgtnttagacttgctgtaggtntgcttgacggatctgcccagtgcggcggctgnngtcttccagcctcccgcatcagcgtttggatgccttcctctaggtcctttangnggtgatagtgatngctgttngaggtgttatagacctaggttgttggcgaacatactcctgaggtaatcgcacgggctccagccacgatcgatgagcaggcggcggggngcggtgcgcctggtttngttttctgtggtnttttccgtcttgttggagggtggtgggggtgatatgttaataaggaaaaagg

SEQ ID NO: 613961 - DNA, 333 bp, Homo sapiens
  misc_feature (56)..(56): n is a, c, g, or t
ggtccccagtttgcccaaaaaggccaggaggggaaatgattttatccctaaaaccngcccccccccttttttaacggggggggaagaacggtttcaaaactgtttgtttcaattggccctttaagtttggtagtaaaagcctggtttatggtaccaatgcctggttaaaccttcaaaaggaaaggagaatgttttgtgggcccctttggttttttttttgggggggggccgtttttagtttttagtttttaaaaacgggcctttttaatgggaaccacttggcccaaaatttgttccaggatttttgggcccctttaaaaaggttaatgggga

SEQ ID NO: 613962 - DNA, 2798 bp, Homo sapiens
ggcgaagaggcggggcgcccaagctgccgcgctggcattttctcctggacaaggagagagtgcggctgctgagagccgagcccagcaatcccgatcctctgagtcgtgaagaagggaggcagcgagggggttggggttggggcctgaggcaagcccccaggctccgctcttgccagagggacaggagccatggctcagaaaatggactgtggtgcgggcctcctcggcttccaggctgaggcctccgtagaagacagcgccttgcttatgcagaccttgatggaggccatccagatctcagaggctccacctactaaccaggccaccgcagctgctagtccccagagttcacagcccccaactgccaatgagatggctgacattcaggtttcagcagctgccgctaggcctaagtcagcctttaaagtccagaatgccaccacaaaaggcccaaatggtgtctatgatttctctcaggctcataatgccaaggatgtgcccaacacgcagcccaaggcagcctttaagtcccaaaatgctaccccaaagggtccaaatgctgcctatgatttttcccaggcagcaaccactggtgagttagctgctaacaagtctgagatggccttcaaggcccagaatgccactactaaagtgggcccaaatgccacctacaatttctctcagtctctcaatgccaatgacctggccaacagcaggcctaagacccctttcaaggcttggaatgataccactaaggccccaacagctgatacccagacccagaatgtaaatcaggccaaaatggccacttcccaggctgacatagagaccgacccaggtatctctgaacctgacggtgcaactgcacagacatcagcagatggttcccaggctcagaatctggagtcccggacaataattcggggcaagaggacccgcaagattaataacttgaatgttgaagagaacagcagtggggatcagaggcgggccccactggctgcagggacctggaggtctgcaccagttccagtgaccactcagaacccacctggcgcaccccccaatgtgctctggcagacgccattggcttggcagaacccctcaggctggcaaaaccagacagccaggcagaccccaccagcacgtcagagccctccagctaggcagaccccaccagcctggcagaacccagtcgcttggcagaacccagtgatttggccaaacccagtaatctggcagaacccagtgatctggccaaaccccattgtctggcccggccctgttgtctggccgaatccactggcctggcagaatccacctggatggcagactccacctggatggcagaccccaccgggctggcagggtcctccagactggcaaggtcctcctgactggccgctaccacccgactggccactgccacctgattggccacttcccactgactggccactaccacctgactggatccccgctgattggccaattccacctgactggcagaacctgcgcccctcgcctaacctgcgcccttctcccaactcgcgtgcctcacagaacccaggtgctgcacagccccgagatgtggcccttcttcaggaaagagcaaataagttggtcaagtacttgatgcttaaggactacacaaaggtgcccatcaagcgctcagaaatgctgagagatatcatccgtgaatacactgatgtttatccagaaatcattgaacgtgcatgctttgtcctagagaagaaatttgggattcaactgaaagaaattgacaaagaagaacacctgtatattctcatcagtacccccgagtccctggctggcatactgggaacgaccaaagacacacccaagctcggtctcctcttggtgattctgggtgtcatcttcatgaatggcaaccgtgccagtgaggctgtcctctgggaggcactacgcaagatgggactgcgtcctggggtgagacatcccctccttggagatctaaggaaacttctcacctatgagtttgtaaagcagaaatacctggactacagacgagtgcccaacagcaaccccccggagtatgagttcctctggggcctccgttcctaccatgagactagcaagatgaaagtgctgagattcattgcagaggttcagaaaagagaccctcgtgactggactgcacagttcatggaggctgcagatgaggccttggatgctctggatgctgctgcagctgaggccgaagcccgggctgaagcaagaacccgcatgggaattggagatgaggctgtgtctgggccctggagctgggatgacattgagtttgagctgctgacctgggatgaggaaggagattttggagatccctggtccagaattccatttaccttctgggccagataccaccagaatgcccgctccagattccctcagacctttgccggtcccattattggtcctggtggtacagccagtgccaacttcgctgccaactttggtgccattggtttcttctgggttgagtgagatgttggatattgctatcaatcgcagtagtctttcccctgtgtgaggctgaagcctcagattccttctaaacacagctatctagagagccacatcctgttgactgaaagtggcatgcaagataaatttatttgctgttccttgtctactgctttttttccccttgtgtgctgtcaagttttggtatcagaaataaacattgaaattgcaaagtgaaaaaaaaaacaaaaatgcgagggcatcattacgggggggaaaaaggggtacgaaag

SEQ ID NO: 613963 - DNA, 2707 bp, Homo sapiens
agcgggaaacaaaagaggacagcacttccggtcacgccatcgttgctgccttcttcgtcaagcccccaggctccgctcttgccagagggacaggagccatggctcagaaaatggactgtggtgcgggcctcctcggcttccaggctgaggcctccgtagaagacagcgccttgcttatgcagaccttgatggaggccatccagatctcagaggctccacctactaaccaggccaccgcagctgctagtccccagagttcacagcccccaactgccaatgagatggctgacattcaggtttcagcagctgccgctaggcctaagtcagcctttaaagtccagaatgccaccacaaaaggcccaaatggtgtctatgatttctctcaggctcataatgccaaggatgtgcccaacacgcagcccaaggcagcctttaagtcccaaaatgctaccccaaagggtccaaatgctgcctatgatttttcccaggcagcaaccactggtgagttagctgctaacaagtctgagatggccttcaaggcccagaatgccactactaaagtgggcccaaatgccacctacaatttctctcagtctctcaatgccaatgacctggccaacagcaggcctaagacccctttcaaggcttggaatgataccactaaggccccaacagctgatacccagacccagaatgtaaatcaggccaaaatggccacttcccaggctgacatagagaccgacccaggtatctctgaacctgacggtgcaactgcacagacatcagcagatggttcccaggctcagaatctggagtcccggacaataattcggggcaagaggacccgcaagattaataacttgaatgttgaagagaacagcagtggggatcagaggcgggccccactggctgcagggacctggaggtctgcaccagttccagtgaccactcagaacccacctggcgcaccccccaatgtgctctggcagacgccattggcttggcagaacccctcaggctggcaaaaccagacagccaggcagaccccaccagcacgtcagagccctccagctaggcagaccccaccagcctggcagaacccagtcgcttggcagaacccagtgatttggccaaacccagtaatctggcagaacccagtgatctggccaaaccccattgtctggcccggccctgttgtctggccgaatccactggcctggcagaatccacctggatggcagactccacctggatggcagaccccaccgggctggcagggtcctccagactggcaaggtcctcctgactggccgctaccacccgactggccactgccacctgattggccacttcccactgactggccactaccacctgactggatccccgctgattggccaattccacctgactggcagaacctgcgcccctcgcctaacctgcgcccttctcccaactcgcgtgcctcacagaacccaggtgctgcacagccccgagatgtggcccttcttcaggaaagagcaaataagttggtcaagtacttgatgcttaaggactacacaaaggtgcccatcaagcgctcagaaatgctgagagatatcatccgtgaatacactgatgtttatccagaaatcattgaacgtgcatgctttgtcctagagaagaaatttgggattcaactgaaagaaattgacaaagaagaacacctgtatattctcatcagtacccccgagtccctggctggcatactgggaacgaccaaagacacacccaagctcggtctcctcttggtgattctgggtgtcatcttcatgaatggcaaccgtgccagtgaggctgtcctctgggaggcactacgcaagatgggactgcgtcctggggtgagacatcccctccttggagatctaaggaaacttctcacctatgagtttgtaaagcagaaatacctggactacagacgagtgcccaacagcaaccccccggagtatgagttcctctggggcctccgttcctaccatgagactagcaagatgaaagtgctgagattcattgcagaggttcagaaaagagaccctcgtgactggactgcacagttcatggaggctgcagatgaggccttggatgctctggatgctgctgcagctgaggccgaagcccgggctgaagcaagaacccgcatgggaattggagatgaggctgtgtctgggccctggagctgggatgacattgagtttgagctgctgacctgggatgaggaaggagattttggagatccctggtccagaattccatttaccttctgggccagataccaccagaatgcccgctccagattccctcagacctttgccggtcccattattggtcctggtggtacagccagtgccaacttcgctgccaactttggtgccattggtttcttctgggttgagtgagatgttggatattgctatcaatcgcagtagtctttcccctgtgtgaggctgaagcctcagattccttctaaacacagctatctagagagccacatcctgttgactgaaagtggcatgcaagataaatttatttgctgttccttgtctactgctttttttccccttgtgtgctgtcaagttttggtatcagaaataaacattgaaattgcaaagtgaaaaaaaaaacaaaaatgcgagggcatcattacgggggggaaaaaggggtacgaaag

SEQ ID NO: 613964 - DNA, 166 bp, Homo sapiens
agtcatggactgtggaatgtgaggggagtgggtcgctccaccagattccagcaccggtggccagtgcagctcagagccctttggcggactacaggagctgcacagacggtcactcaaagaaagatgtgcctgtgccctactccttggcgatggcaaagggcttctc

SEQ ID NO: 613965 - DNA, 349 bp, Homo sapiens
gcttttcttttcctcttgtgcctagttaagtggtaatgtgatggagataggggaaatcacataacttgtacaagtatggggtaattgcttaaacatgccttggggaagtctgatagcgtctctgcacgggacctctgacaaaggccattccaggagacggggttaagctatttcccacactctcctgttaacactggagtcttgcaagacccagaggagaacccactttctttttccagagaggctccacagattaggaaatgtgtgtatttagtgaaaaatagggttgtagtgaaatagttactatttcatgaaagtagagattttttagagtttttgaaataccaca

SEQ ID NO: 613966 - DNA, 2708 bp, Homo sapiens
ggcgaagaggcggggcgcccaagctgccgcgctggcattttctcctggacaaggagagagtgcggctgctgagagccgagcccagcaatcccgatcctctgagtcgtgaagaagggaggcagcgagggggttggggttggggcctgaggcaagcccccaggctccgctcttgccagagggacaggagccatggctcagaaaatggactgtggtgcgggcctcctcggcttccaggctgaggcctccgtagaagacagcgccttgcttatgcagaccttgatggaggccatccagatctcagaggctccacctactaaccaggccaccgcagctgctagtccccagagttcacagcccccaactgccaatgagatggctgacattcaggtttcagcagctgccgctaggcctaagtcagcctttaaagtccagaatgccaccacaaaaggcccaaatggtgtctatgatttctctcaggctcataatgccaaggatgtgcccaacacgcagcccaaggcagcctttaagtcccaaaatgctaccccaaagggtccaaatgctgcctatgatttttcccaggcagcaaccactggtgagttagctgctaacaagtctgagatggccttcaaggcccagaatgccactactaaagtgggcccaaatgccacctacaatttctctcagtctctcaatgccaatgacctggccaacagcaggcctaagacccctttcaaggcttggaatgataccactaaggccccaacagctgatacccagacccagaatgtaaatcaggccaaaatggccacttcccaggctgacatagagaccgacccaggtatctctgaacctgacggtgcaactgcacagacatcagcagatggttcccaggctcagaatctggagtcccggacaataattcggggcaagaggacccgcaagattaataacttgaatgttgaagagaacagcagtggggatcagaggcgggccccactggctgcagggacctggaggtctgcaccagttccagtgaccactcagaacccacctggcgcaccccccaatgtgctctggcagacgccattggcttggcagaacccagtcgcttggcagaacccagtgatttggccaaacccagtaatctggcagaacccagtgatctggccaaaccccattgtctggcccggccctgttgtctggccgaatccactggcctggcagaatccacctggatggcagactccacctggatggcagaccccaccgggctggcagggtcctccagactggcaaggtcctcctgactggccgctaccacccgactggccactgccacctgattggccacttcccactgactggccactaccacctgactggatccccgctgattggccaattccacctgactggcagaacctgcgcccctcgcctaacctgcgcccttctcccaactcgcgtgcctcacagaacccaggtgctgcacagccccgagatgtggcccttcttcaggaaagagcaaataagttggtcaagtacttgatgcttaaggactacacaaaggtgcccatcaagcgctcagaaatgctgagagatatcatccgtgaatacactgatgtttatccagaaatcattgaacgtgcatgctttgtcctagagaagaaatttgggattcaactgaaagaaattgacaaagaagaacacctgtatattctcatcagtacccccgagtccctggctggcatactgggaacgaccaaagacacacccaagctcggtctcctcttggtgattctgggtgtcatcttcatgaatggcaaccgtgccagtgaggctgtcctctgggaggcactacgcaagatgggactgcgtcctggggtgagacatcccctccttggagatctaaggaaacttctcacctatgagtttgtaaagcagaaatacctggactacagacgagtgcccaacagcaaccccccggagtatgagttcctctggggcctccgttcctaccatgagactagcaagatgaaagtgctgagattcattgcagaggttcagaaaagagaccctcgtgactggactgcacagttcatggaggctgcagatgaggccttggatgctctggatgctgctgcagctgaggccgaagcccgggctgaagcaagaacccgcatgggaattggagatgaggctgtgtctgggccctggagctgggatgacattgagtttgagctgctgacctgggatgaggaaggagattttggagatccctggtccagaattccatttaccttctgggccagataccaccagaatgcccgctccagattccctcagacctttgccggtcccattattggtcctggtggtacagccagtgccaacttcgctgccaactttggtgccattggtttcttctgggttgagtgagatgttggatattgctatcaatcgcagtagtctttcccctgtgtgaggctgaagcctcagattccttctaaacacagctatctagagagccacatcctgttgactgaaagtggcatgcaagataaatttatttgctgttccttgtctactgctttttttccccttgtgtgctgtcaagttttggtatcagaaataaacattgaaattgcaaagtgaaaaaaaaaacaaaaatgcgagggcatcattacgggggggaaaaaggggtacgaaag

SEQ ID NO: 613967 - DNA, 746 bp, Homo sapiens
gtcagagcgaccttccctctaaaagcattttatagcgttaaatataaagagagcacacccaacgctcgcagccacaaacggcaagaaactcactctggacatcctgctgcttctcccgctactgatcgtctagctccctatagaccttctagaagctcttattcctaatcaggatataatgaagcacccgtgaaagcatgctgattacagtagctgcccatggaatggagagacagactccctatgaactctttaaacacaaaagaaagcgtgctctctagcatataaataagcatggaacggaggaaacacgctccaaatgcatggtactgggtaccaagaatcatacctttgcggtggactgcgagaaccgacaagatattaacggctctggcaacacgctgaaggcagaaacttgggacgctccaaatttagtacataaagctggcgtaacctatacatcagatatgtatgctacacaagatcctcagatcagaaagactatggaagtgtgtgtactcgctcatacttggactacccaggccttctttgctgtgatgacgaggaataaccatgctcacattgtacatgccgattagtacgatgaacatgtttcgtgtcactacttactgagtaactgcacaacaagatagcggttgttgtgtccataaaaatttgacagagtcactgttttgcttacaataactggctacaacgtgcatgtgctctttagcacacgttgcttt

SEQ ID NO: 613968 - DNA, 147 bp, Homo sapiens
tctttccctgaaagctaggtcctcggggctaaacacaaccgcctctcagctctagaattgggtgattttcatcatggcccttaaccggaccaaataatttcttaaatcggctctccctctgtgcggggagaccggcttttacggggt

SEQ ID NO: 613969 - DNA, 2759 bp, Homo sapiens
tattcatcccgggctggtctttaattgttaattacctggccctcggctctacagatcctctgagtcgtgaagaagggaggcagcgagggggttggggttggggcctgaggcaagcccccaggctccgctcttgccagagggacaggagccatggctcagaaaatggactgtggtgcgggcctcctcggcttccaggctgaggcctccgtagaagacagcgccttgcttatgcagaccttgatggaggccatccagatctcagaggctccacctactaaccaggccaccgcagctgctagtccccagagttcacagcccccaactgccaatgagatggctgacattcaggtttcagcagctgccgctaggcctaagtcagcctttaaagtccagaatgccaccacaaaaggcccaaatggtgtctatgatttctctcaggctcataatgccaaggatgtgcccaacacgcagcccaaggcagcctttaagtcccaaaatgctaccccaaagggtccaaatgctgcctatgatttttcccaggcagcaaccactggtgagttagctgctaacaagtctgagatggccttcaaggcccagaatgccactactaaagtgggcccaaatgccacctacaatttctctcagtctctcaatgccaatgacctggccaacagcaggcctaagacccctttcaaggcttggaatgataccactaaggccccaacagctgatacccagacccagaatgtaaatcaggccaaaatggccacttcccaggctgacatagagaccgacccaggtatctctgaacctgacggtgcaactgcacagacatcagcagatggttcccaggctcagaatctggagtcccggacaataattcggggcaagaggacccgcaagattaataacttgaatgttgaagagaacagcagtggggatcagaggcgggccccactggctgcagggacctggaggtctgcaccagttccagtgaccactcagaacccacctggcgcaccccccaatgtgctctggcagacgccattggcttggcagaacccctcaggctggcaaaaccagacagccaggcagaccccaccagcacgtcagagccctccagctaggcagaccccaccagcctggcagaacccagtcgcttggcagaacccagtgatttggccaaacccagtaatctggcagaacccagtgatctggccaaaccccattgtctggcccggccctgttgtctggccgaatccactggcctggcagaatccacctggatggcagactccacctggatggcagaccccaccgggctggcagggtcctccagactggcaaggtcctcctgactggccgctaccacccgactggccactgccacctgattggccacttcccactgactggccactaccacctgactggatccccgctgattggccaattccacctgactggcagaacctgcgcccctcgcctaacctgcgcccttctcccaactcgcgtgcctcacagaacccaggtgctgcacagccccgagatgtggcccttcttcaggaaagagcaaataagttggtcaagtacttgatgcttaaggactacacaaaggtgcccatcaagcgctcagaaatgctgagagatatcatccgtgaatacactgatgtttatccagaaatcattgaacgtgcatgctttgtcctagagaagaaatttgggattcaactgaaagaaattgacaaagaagaacacctgtatattctcatcagtacccccgagtccctggctggcatactgggaacgaccaaagacacacccaagctcggtctcctcttggtgattctgggtgtcatcttcatgaatggcaaccgtgccagtgaggctgtcctctgggaggcactacgcaagatgggactgcgtcctggggtgagacatcccctccttggagatctaaggaaacttctcacctatgagtttgtaaagcagaaatacctggactacagacgagtgcccaacagcaaccccccggagtatgagttcctctggggcctccgttcctaccatgagactagcaagatgaaagtgctgagattcattgcagaggttcagaaaagagaccctcgtgactggactgcacagttcatggaggctgcagatgaggccttggatgctctggatgctgctgcagctgaggccgaagcccgggctgaagcaagaacccgcatgggaattggagatgaggctgtgtctgggccctggagctgggatgacattgagtttgagctgctgacctgggatgaggaaggagattttggagatccctggtccagaattccatttaccttctgggccagataccaccagaatgcccgctccagattccctcagacctttgccggtcccattattggtcctggtggtacagccagtgccaacttcgctgccaactttggtgccattggtttcttctgggttgagtgagatgttggatattgctatcaatcgcagtagtctttcccctgtgtgaggctgaagcctcagattccttctaaacacagctatctagagagccacatcctgttgactgaaagtggcatgcaagataaatttatttgctgttccttgtctactgctttttttccccttgtgtgctgtcaagttttggtatcagaaataaacattgaaattgcaaagtgaaaaaaaaaacaaaaatgcgagggcatcattacgggggggaaaaaggggtacgaaag

SEQ ID NO: 613970 - DNA, 298 bp, Homo sapiens
cagtcggtaggaaacgttgatgagcatgaggtactccattgtggtgtcctctttatatcattgagcagtggttcgtagttctccttgaagaggtccttcacatcccttgtgagggggattcctaggtattttattctctttgaagcaattgtgaatgggagtcactcagtatttggctctctgtttgttattgttgtataggaatgcttgtgatttttgcacattgattttgtatcctgagactttgctgaagttgcggatcagcttaaggagattttgggctcagtcgaacggactg

SEQ ID NO: 613971 - DNA, 3476 bp, Homo sapiens
ggcgaagaggcggggcgcccaagctgccgcgctggcattttctcctggacaaggagagagtgcggctgctgagagccgagcccagcaatcccgatcctctgagtcgtgaagaagggaggcagcgagggggttggggttggggcctgaggcaagcccccaggctccgctcttgccagagggacaggagccatggctcagaaaatggactgtggtgcgggcctcctcggcttccaggctgaggcctccgtagaagacagcgccttgcttatgcagaccttgatggaggccatccagatctcagaggctccacctactaaccaggccaccgcagctgctagtccccagagttcacagcccccaactgccaatgagatggctgacattcaggtttcagcagctgccgctaggcctaagtcagcctttaaagtccagaatgccaccacaaaaggcccaaatggtgtctatgatttctctcaggctcataatgccaaggatgtgcccaacacgcagcccaaggcagcctttaagtcccaaaatgctaccccaaagggtccaaatgctgcctatgatttttcccaggcagcaaccactggtgagttagctgctaacaagtctgagatggccttcaaggcccagaatgccactactaaagtgggcccaaatgccacctacaatttctctcagtctctcaatgccaatgacctggccaacagcaggcctaagacccctttcaaggcttggaatgataccactaaggccccaacagctgatacccagacccagaatgtaaatcaggccaaaatggccacttcccaggctgacatagagaccgacccaggtatctctgaacctgacggtgcaactgcacagacatcagcagatggttcccaggctcagaatctggagtcccggacaataattcggggcaagaggacccgcaagattaataacttgaatgttgaagagaacagcagtggggatcagaggcgggccccactggctgcagggacctggaggtctgcaccagttccagtgaccactcagaacccacctggcgcaccccccaatgtgctctggcagacgccattggcttggcagaacccctcaggctggcaaaaccagacagccaggcagaccccaccagcacgtcagagccctccagctaggcagaccccaccagcctggcagaacccagtcgcttggcagaacccagtgatttggccaaacccagtaatctggcagaacccagtgatctggccaaaccccattgtctggcccggccctgttgtctggccgaatccactggcctggcagaatccacctggatggcagactccacctggatggcagaccccaccgggctggcagggtcctccagactggcaaggtcctcctgactggccgctaccacccgactggccactgccacctgattggccacttcccactgactggccactaccacctgactggatccccgctgattggccaattccacctgactggcagaacctgcgcccctcgcctaacctgcgcccttctcccaactcgcgtgcctcacagaacccaggtgctgcacagccccgagatgtggcccttcttcaggaaagagcaaataagttggtcaagtacttgatgcttaaggactacacaaaggtgcccatcaagcgctcagaaatgctgagagatatcatccgtgaatacactgatgtttatccagaaatcattgaacgtgcatgctttgtcctagagaagaaatttgggattcaactgaaagaaattgacaaagaagaacacctgtatattctcatcagtacccccgagtccctggctggcatactgggaacgaccaaagacacacccaagctcggtctcctcttggtgattctgggtgtcatcttcatgaatggcaaccgtgccagtgaggctgtcctctgggaggcactacgcaagatgggactgcgtcctggggtgagacatcccctccttggagatctaaggaaacttctcacctatgagtttgtaaagcagaaatacctggactacagacgagtgcccaacagcaaccccccggagtatgagttcctctggggcctccgttcctaccatgagactagcaagatgaaagtgctgagattcattgcagaggttcagaaaagagaccctcgtgactggactgcacagttcatggaggctgcagatgaggccttggatgctctggatgctgctgcagctgaggccgaagcccgggctgaagcaagaacccgcatgggaattggagatgaggctgtgtctgggccctggagctgggatgacattgagtttgagctgctgacctgggatgaggaaggagattttggagatccctggtccagaattccatttaccttctgggccagataccaccagaatgcccgctccagattccctcagacctttgccggtcccattattggtcctggtggtacagccagtgccaacttcgctgccaactttggtgccattggtttcttctgggttgagtgagatgttggatattgctatcaatcgcagtagtctttcccctgtgtgaggctgaagcctcagattccttctaaacacagctatctagagagccacatcctgttgactgaaagtggcatgcaagataaatttatttgctgttccttgtctactgctttttttccccttgtgtgctgtcaagttttggtatcagaaataaacatgttaaatgccaagagttaattaccaaaaaaaaaaaaaaaaaaaacaaaaaaaaaaaaaaaaacaaaaagaaaacaaaaaaaaaaaagagagagaggggggcggggcccccagaaagagaaattccccgcgggggggcccccgccctgggcggcgcccccccgcttgttttgggcaacaaaaggagggccccccaaaaataggggggacggctatacattaataaacgcagaaggaggcggcgccgagagtattaaacacaagaccgcagcaagagggggggaaaaaccgcgcgtcacacgcgggcaatcctcgcgggaggagggaggaccacccaatatcagcgcggagggggagaagccaaccaccgggggggagcacacaacagcacccctcaccgaaaggagtaatatgagaagcgccccacgcgcacgggcagacacaatcaacaacagcaacctccagagccgcggctcacaacagggcggtgggacacaacacacagcggaaaataccactcccgcggcctcactaaaaagcaattagtgcgcccacccccgggcgtagaaattagttttggcacagacaaagtatatgtacaaccgggggggccgggagtaagtagatagtaatcgggcgcagccacaaccagacatgaagcccaggccgcaccagcgcgcagcgccaaggactaaacaccaaaacgaacgacgaacgcccgtacggcgcagaccgacgcaccagcaccacac

SEQ ID NO: 613972 - DNA, 2684 bp, Homo sapiens
  misc_feature (34)..(35): n is a, c, g, or t
aactatacgggctaggtacgaggctgggtggtgnncaagcccccaggctccgctcttgccagagggacaggagccatggctcagaaaatggactgtggtgcgggcctcctcggcttccaggctgaggcctccgtagaagacagcgccttgcttatgcagaccttgatggaggccatccagatctcagaggctccacctactaaccaggccaccgcagctgctagtccccagagttcacagcccccaactgccaatgagatggctgacattcaggtttcagcagctgccgctaggcctaagtcagcctttaaagtccagaatgccaccacaaaaggcccaaatggtgtctatgatttctctcaggctcataatgccaaggatgtgcccaacacgcagcccaaggcagcctttaagtcccaaaatgctaccccaaagggtccaaatgctgcctatgatttttcccaggcagcaaccactggtgagttagctgctaacaagtctgagatggccttcaaggcccagaatgccactactaaagtgggcccaaatgccacctacaatttctctcagtctctcaatgccaatgacctggccaacagcaggcctaagacccctttcaaggcttggaatgataccactaaggccccaacagctgatacccagacccagaatgtaaatcaggccaaaatggccacttcccaggctgacatagagaccgacccaggtatctctgaacctgacggtgcaactgcacagacatcagcagatggttcccaggctcagaatctggagtcccggacaataattcggggcaagaggacccgcaagattaataacttgaatgttgaagagaacagcagtggggatcagaggcgggccccactggctgcagggacctggaggtctgcaccagttccagtgaccactcagaacccacctggcgcaccccccaatgtgctctggcagacgccattggcttggcagaacccctcaggctggcaaaaccagacagccaggcagaccccaccagcacgtcagagccctccagctaggcagaccccaccagcctggcagaacccagtcgcttggcagaacccagtgatttggccaaacccagtaatctggcagaacccagtgatctggccaaaccccattgtctggcccggccctgttgtctggccgaatccactggcctggcagaatccacctggatggcagactccacctggatggcagaccccaccgggctggcagggtcctccagactggcaaggtcctcctgactggccgctaccacccgactggccactgccacctgattggccacttcccactgactggccactaccacctgactggatccccgctgattggccaattccacctgactggcagaacctgcgcccctcgcctaacctgcgcccttctcccaactcgcgtgcctcacagaacccaggtgctgcacagccccgagatgtggcccttcttcaggaaagagcaaataagttggtcaagtacttgatgcttaaggactacacaaaggtgcccatcaagcgctcagaaatgctgagagatatcatccgtgaatacactgatgtttatccagaaatcattgaacgtgcatgctttgtcctagagaagaaatttgggattcaactgaaagaaattgacaaagaagaacacctgtatattctcatcagtacccccgagtccctggctggcatactgggaacgaccaaagacacacccaagctcggtctcctcttggtgattctgggtgtcatcttcatgaatggcaaccgtgccagtgaggctgtcctctgggaggcactacgcaagatgggactgcgtcctggggtgagacatcccctccttggagatctaaggaaacttctcacctatgagtttgtaaagcagaaatacctggactacagacgagtgcccaacagcaaccccccggagtatgagttcctctggggcctccgttcctaccatgagactagcaagatgaaagtgctgagattcattgcagaggttcagaaaagagaccctcgtgactggactgcacagttcatggaggctgcagatgaggccttggatgctctggatgctgctgcagctgaggccgaagcccgggctgaagcaagaacccgcatgggaattggagatgaggctgtgtctgggccctggagctgggatgacattgagtttgagctgctgacctgggatgaggaaggagattttggagatccctggtccagaattccatttaccttctgggccagataccaccagaatgcccgctccagattccctcagacctttgccggtcccattattggtcctggtggtacagccagtgccaacttcgctgccaactttggtgccattggtttcttctgggttgagtgagatgttggatattgctatcaatcgcagtagtctttcccctgtgtgaggctgaagcctcagattccttctaaacacagctatctagagagccacatcctgttgactgaaagtggcatgcaagataaatttatttgctgttccttgtctactgctttttttccccttgtgtgctgtcaagttttggtatcagaaataaacattgaaattgcaaagtgaaaaaaaaaacaaaaatgcgagggcatcattacgggggggaaaaaggggtacgaaag

SEQ ID NO: 613973 - DNA, 475 bp, Homo sapiens
ccagtccattagtttcgactccattgcattcgagtgcattccattccgtggctgtccattccattccgtttgatgccattccatacgattccattcaattcgagaccattctattcctgtccattccttgtggttcgattccatttcactctagtccattccattccattcaattccattcgactctattccgttccattcaattccattccattcgattccatttttttcgagaaccttccattacactcccttccattccagtgcattccattccagtctcttcagttcgattccattccattcgtttcgattcctttccattccagcccattccattccattccattcctttcctttccgtttcattagattccattgcattcgattccattcaattcaattccgtgctattccatttgattcatttccatttaattccattccattagattccattccgtacgattccatt

SEQ ID NO: 613974 - DNA, 299 bp, Homo sapiens
gtcctccaatatcttactttgagctatgtcacatgcatcacctcctcagaatgtctgcctgctcttcgcctgactggtcttcccagtgaacctcatctgcgcttctgtatttaccaccacacagctaggttagatgtcctgtctccttatatatcagtacatactgtgtatagccgtgttaaaattcttggcacagggaagtctaatggctgatttaaattctgtgtcatccctttagaagcatgtagagagcagtagatatgttataatacatcatcgtgttcatagatctcagggcc

SEQ ID NO: 613975 - DNA, 2966 bp, Homo sapiens
ggcgaagaggcggggcgcccaagctgccgcgctggcattttctcctggacaaggagagagtgcggctgctgagagccgagcccagcaatcccgatcctctgagtcgtgaagaagggaggcagcgagggggttggggttggggcctgaggcaagcccccaggctccgctcttgccagagggacaggagccatggctcagaaaatggactgtggtgcgggcctcctcggcttccagaatcctgacgcttgtagagcagtctgtcaccccctcccccagcctcctgcctccaccctccctctttctgcattccccactctgtgcgaccccccttattctcaactccgcgatccgcctgccgtcctgagctgctactgcacgcctcttggagcgtccccggctcctgctgaggcctccgtagaagacagcgccttgcttatgcagaccttgatggaggccatccagatctcagaggctccacctactaaccaggccaccgcagctgctagtccccagagttcacagcccccaactgccaatgagatggctgacattcaggtttcagcagctgccgctaggcctaagtcagcctttaaagtccagaatgccaccacaaaaggcccaaatggtgtctatgatttctctcaggctcataatgccaaggatgtgcccaacacgcagcccaaggcagcctttaagtcccaaaatgctaccccaaagggtccaaatgctgcctatgatttttcccaggcagcaaccactggtgagttagctgctaacaagtctgagatggccttcaaggcccagaatgccactactaaagtgggcccaaatgccacctacaatttctctcagtctctcaatgccaatgacctggccaacagcaggcctaagacccctttcaaggcttggaatgataccactaaggccccaacagctgatacccagacccagaatgtaaatcaggccaaaatggccacttcccaggctgacatagagaccgacccaggtatctctgaacctgacggtgcaactgcacagacatcagcagatggttcccaggctcagaatctggagtcccggacaataattcggggcaagaggacccgcaagattaataacttgaatgttgaagagaacagcagtggggatcagaggcgggccccactggctgcagggacctggaggtctgcaccagttccagtgaccactcagaacccacctggcgcaccccccaatgtgctctggcagacgccattggcttggcagaacccctcaggctggcaaaaccagacagccaggcagaccccaccagcacgtcagagccctccagctaggcagaccccaccagcctggcagaacccagtcgcttggcagaacccagtgatttggccaaacccagtaatctggcagaacccagtgatctggccaaaccccattgtctggcccggccctgttgtctggccgaatccactggcctggcagaatccacctggatggcagactccacctggatggcagaccccaccgggctggcagggtcctccagactggcaaggtcctcctgactggccgctaccacccgactggccactgccacctgattggccacttcccactgactggccactaccacctgactggatccccgctgattggccaattccacctgactggcagaacctgcgcccctcgcctaacctgcgcccttctcccaactcgcgtgcctcacagaacccaggtgctgcacagccccgagatgtggcccttcttcaggaaagagcaaataagttggtcaagtacttgatgcttaaggactacacaaaggtgcccatcaagcgctcagaaatgctgagagatatcatccgtgaatacactgatgtttatccagaaatcattgaacgtgcatgctttgtcctagagaagaaatttgggattcaactgaaagaaattgacaaagaagaacacctgtatattctcatcagtacccccgagtccctggctggcatactgggaacgaccaaagacacacccaagctcggtctcctcttggtgattctgggtgtcatcttcatgaatggcaaccgtgccagtgaggctgtcctctgggaggcactacgcaagatgggactgcgtcctggggtgagacatcccctccttggagatctaaggaaacttctcacctatgagtttgtaaagcagaaatacctggactacagacgagtgcccaacagcaaccccccggagtatgagttcctctggggcctccgttcctaccatgagactagcaagatgaaagtgctgagattcattgcagaggttcagaaaagagaccctcgtgactggactgcacagttcatggaggctgcagatgaggccttggatgctctggatgctgctgcagctgaggccgaagcccgggctgaagcaagaacccgcatgggaattggagatgaggctgtgtctgggccctggagctgggatgacattgagtttgagctgctgacctgggatgaggaaggagattttggagatccctggtccagaattccatttaccttctgggccagataccaccagaatgcccgctccagattccctcagacctttgccggtcccattattggtcctggtggtacagccagtgccaacttcgctgccaactttggtgccattggtttcttctgggttgagtgagatgttggatattgctatcaatcgcagtagtctttcccctgtgtgaggctgaagcctcagattccttctaaacacagctatctagagagccacatcctgttgactgaaagtggcatgcaagataaatttatttgctgttccttgtctactgctttttttccccttgtgtgctgtcaagttttggtatcagaaataaacattgaaattgcaaagtgaaaaaaaaaacaaaaatgcgagggcatcattacgggggggaaaaaggggtacgaaag

SEQ ID NO: 613976 - DNA, 110 bp, Homo sapiens
atgatactctgggagtacacaagggtactgctattattactaatcaaatcttcaagtatatataactttgatagagtatccaataattaccttcccatataaatatgtgt

SEQ ID NO: 613977 - DNA, 2932 bp, Homo sapiens
ttgctcctggtagtacgtagatagtgcgtcgtgcttacaagccgagcccagcaatcccgatcctctgagtcgtgaagaagggaggcagcgagggggttggggttggggcctgaggcaagcccccaggctccgctcttgccagagggacaggagccatggctcagaaaatggactgtggtgcgggcctcctcggcttccagaatcctgacgcttgtagagcagtctgtcaccccctcccccagcctcctgcctccaccctccctctttctgcattccccactctgtgcgaccccccttattctcaactccgcgatccgcctgccgtcctgagctgctactgcacgcctcttggagcgtccccggctcctgctgaggcctccgtagaagacagcgccttgcttatgcagaccttgatggaggccatccagatctcagaggctccacctactaaccaggccaccgcagctgctagtccccagagttcacagcccccaactgccaatgagatggctgacattcaggtttcagcagctgccgctaggcctaagtcagcctttaaagtccagaatgccaccacaaaaggcccaaatggtgtctatgatttctctcaggctcataatgccaaggatgtgcccaacacgcagcccaaggcagcctttaagtcccaaaatgctaccccaaagggtccaaatgctgcctatgatttttcccaggcagcaaccactggtgagttagctgctaacaagtctgagatggccttcaaggcccagaatgccactactaaagtgggcccaaatgccacctacaatttctctcagtctctcaatgccaatgacctggccaacagcaggcctaagacccctttcaaggcttggaatgataccactaaggccccaacagctgatacccagacccagaatgtaaatcaggccaaaatggccacttcccaggctgacatagagaccgacccaggtatctctgaacctgacggtgcaactgcacagacatcagcagatggttcccaggctcagaatctggagtcccggacaataattcggggcaagaggacccgcaagattaataacttgaatgttgaagagaacagcagtggggatcagaggcgggccccactggctgcagggacctggaggtctgcaccagttccagtgaccactcagaacccacctggcgcaccccccaatgtgctctggcagacgccattggcttggcagaacccctcaggctggcaaaaccagacagccaggcagaccccaccagcacgtcagagccctccagctaggcagaccccaccagcctggcagaacccagtcgcttggcagaacccagtgatttggccaaacccagtaatctggcagaacccagtgatctggccaaaccccattgtctggcccggccctgttgtctggccgaatccactggcctggcagaatccacctggatggcagactccacctggatggcagaccccaccgggctggcagggtcctccagactggcaaggtcctcctgactggccgctaccacccgactggccactgccacctgattggccacttcccactgactggccactaccacctgactggatccccgctgattggccaattccacctgactggcagaacctgcgcccctcgcctaacctgcgcccttctcccaactcgcgtgcctcacagaacccaggtgctgcacagccccgagatgtggcccttcttcaggaaagagcaaataagttggtcaagtacttgatgcttaaggactacacaaaggtgcccatcaagcgctcagaaatgctgagagatatcatccgtgaatacactgatgtttatccagaaatcattgaacgtgcatgctttgtcctagagaagaaatttgggattcaactgaaagaaattgacaaagaagaacacctgtatattctcatcagtacccccgagtccctggctggcatactgggaacgaccaaagacacacccaagctcggtctcctcttggtgattctgggtgtcatcttcatgaatggcaaccgtgccagtgaggctgtcctctgggaggcactacgcaagatgggactgcgtcctggggtgagacatcccctccttggagatctaaggaaacttctcacctatgagtttgtaaagcagaaatacctggactacagacgagtgcccaacagcaaccccccggagtatgagttcctctggggcctccgttcctaccatgagactagcaagatgaaagtgctgagattcattgcagaggttcagaaaagagaccctcgtgactggactgcacagttcatggaggctgcagatgaggccttggatgctctggatgctgctgcagctgaggccgaagcccgggctgaagcaagaacccgcatgggaattggagatgaggctgtgtctgggccctggagctgggatgacattgagtttgagctgctgacctgggatgaggaaggagattttggagatccctggtccagaattccatttaccttctgggccagataccaccagaatgcccgctccagattccctcagacctttgccggtcccattattggtcctggtggtacagccagtgccaacttcgctgccaactttggtgccattggtttcttctgggttgagtgagatgttggatattgctatcaatcgcagtagtctttcccctgtgtgaggctgaagcctcagattccttctaaacacagctatctagagagccacatcctgttgactgaaagtggcatgcaagataaatttatttgctgttccttgtctactgctttttttccccttgtgtgctgtcaagttttggtatcagaaataaacattgaaattgcaaagtgaaaaaaaaaacaaaaatgcgagggcatcattacgggggggaaaaaggggtacgaaag

SEQ ID NO: 613978 - DNA, 462 bp, Homo sapiens
ccttttataggtgggcgggcggaggtctcgctctgtcaccaggctggagtgcagtggcaccatctcaactcactgcaaccttcgcctctagagttcaagtgattcccctgcctcagcctcccaagtagctgggattacagatgcctgccaccaggaccgatttttttttttttttggtattttaagtaaaaacagggtttcgccatatgggccaggctgttctcgaactcctgacctcaggtgatctgcctgcctcggcctcccaaagtgctcccaacggattacaggagtgagccactgaacccagccttaaatctcttcaagtgtgaaccaagcaaaagcttgataattgtccctcatcgcaactgtcggctctcttatccacaggtacaggtaatacacctcttccaaatcaaatggctatataacacagccaactaaatccattccctgacatacgtc

SEQ ID NO: 613979 - DNA, 765 bp, Homo sapiens
taaaggggcgcagcattggtcttaattttcccccaggcgattaagggcagcagcagggccctgaaaattagcaagcagcagcagcagcgaggtggtgcaggaaggagtggagggaaaggacaccaagtttgggggagagggaagggacccttctatcggccttagaggggagaggaaaaccctgaaggtggggccctccccagtcccgtcttcggggcacagatcccaccatgtctggctcaccagtacgggtccccagtcaaagcagaggggtgtgcactgggggttggactggtagtacagccctcaagcaccgggcctccaggctggcaggaatatgagccagtgtctccacattggctcgtgcctcagttgtaacaattggtaaacatagggcactacctagaatacggggtacatttggtggtggtgagtaagaggggaccgcaaaaggccctgggctaagggaaaacgcagccggtcactatgggggtggacgaggtgtcagacttgttggcagtgggctttcacggggggtacagaagcagagagattcccaggggcctcagaagggacggggagcggccggagattttgacacaggccaaggaaagaggcctttcaaacactgtgggcacaacaggtcaggccctgcccccaaggggaaacatcccccataaacaccgggatacaggactctttcaaaagagatatagtccaattccctaaatccccaaaaaaccaaaggccaagtggacaggggtc

SEQ ID NO: 613980 - DNA, 2713 bp, Homo sapiens
ggcgaagaggcggggcgcccaagctgccgcgctggcattttctcctggacaaggagagagtgcggctgctgagagccgagcccagcaatcccgatcctctgagtcgtgaagaagggaggcagcgagggggttggggttggggcctgagggctgaggcctccgtagaagacagcgccttgcttatgcagaccttgatggaggccatccagatctcagaggctccacctactaaccaggccaccgcagctgctagtccccagagttcacagcccccaactgccaatgagatggctgacattcaggtttcagcagctgccgctaggcctaagtcagcctttaaagtccagaatgccaccacaaaaggcccaaatggtgtctatgatttctctcaggctcataatgccaaggatgtgcccaacacgcagcccaaggcagcctttaagtcccaaaatgctaccccaaagggtccaaatgctgcctatgatttttcccaggcagcaaccactggtgagttagctgctaacaagtctgagatggccttcaaggcccagaatgccactactaaagtgggcccaaatgccacctacaatttctctcagtctctcaatgccaatgacctggccaacagcaggcctaagacccctttcaaggcttggaatgataccactaaggccccaacagctgatacccagacccagaatgtaaatcaggccaaaatggccacttcccaggctgacatagagaccgacccaggtatctctgaacctgacggtgcaactgcacagacatcagcagatggttcccaggctcagaatctggagtcccggacaataattcggggcaagaggacccgcaagattaataacttgaatgttgaagagaacagcagtggggatcagaggcgggccccactggctgcagggacctggaggtctgcaccagttccagtgaccactcagaacccacctggcgcaccccccaatgtgctctggcagacgccattggcttggcagaacccctcaggctggcaaaaccagacagccaggcagaccccaccagcacgtcagagccctccagctaggcagaccccaccagcctggcagaacccagtcgcttggcagaacccagtgatttggccaaacccagtaatctggcagaacccagtgatctggccaaaccccattgtctggcccggccctgttgtctggccgaatccactggcctggcagaatccacctggatggcagactccacctggatggcagaccccaccgggctggcagggtcctccagactggcaaggtcctcctgactggccgctaccacccgactggccactgccacctgattggccacttcccactgactggccactaccacctgactggatccccgctgattggccaattccacctgactggcagaacctgcgcccctcgcctaacctgcgcccttctcccaactcgcgtgcctcacagaacccaggtgctgcacagccccgagatgtggcccttcttcaggaaagagcaaataagttggtcaagtacttgatgcttaaggactacacaaaggtgcccatcaagcgctcagaaatgctgagagatatcatccgtgaatacactgatgtttatccagaaatcattgaacgtgcatgctttgtcctagagaagaaatttgggattcaactgaaagaaattgacaaagaagaacacctgtatattctcatcagtacccccgagtccctggctggcatactgggaacgaccaaagacacacccaagctcggtctcctcttggtgattctgggtgtcatcttcatgaatggcaaccgtgccagtgaggctgtcctctgggaggcactacgcaagatgggactgcgtcctggggtgagacatcccctccttggagatctaaggaaacttctcacctatgagtttgtaaagcagaaatacctggactacagacgagtgcccaacagcaaccccccggagtatgagttcctctggggcctccgttcctaccatgagactagcaagatgaaagtgctgagattcattgcagaggttcagaaaagagaccctcgtgactggactgcacagttcatggaggctgcagatgaggccttggatgctctggatgctgctgcagctgaggccgaagcccgggctgaagcaagaacccgcatgggaattggagatgaggctgtgtctgggccctggagctgggatgacattgagtttgagctgctgacctgggatgaggaaggagattttggagatccctggtccagaattccatttaccttctgggccagataccaccagaatgcccgctccagattccctcagacctttgccggtcccattattggtcctggtggtacagccagtgccaacttcgctgccaactttggtgccattggtttcttctgggttgagtgagatgttggatattgctatcaatcgcagtagtctttcccctgtgtgaggctgaagcctcagattccttctaaacacagctatctagagagccacatcctgttgactgaaagtggcatgcaagataaatttatttgctgttccttgtctactgctttttttccccttgtgtgctgtcaagttttggtatcagaaataaacattgaaattgcaaagtgaaaaaaaaaacaaaaatgcgagggcatcattacgggggggaaaaaggggtacgaaag

SEQ ID NO: 613981 - DNA, 341 bp, Homo sapiens
taccaaatgaaaatcgctttaatttaatcgctttggtttggtattttggcaacaaaaacccccgtgttccagaagttcagaactgtgtgtagcttgaactgtggttcagaactgtggaagacaagtggcacgccaggctgtgtgtggagcggccacccccctgtgtgtcgtcccctctctctctctgtgtgggccaaagacggggccccccaaacaccccccagagggtgacacaccagagtgtctcccgaaggcagagtgcccacagctctccactgtgcgcaccggctgtgggccccacccacaccaaacttataaggccgaatcacgagggtctccaa

SEQ ID NO: 613982 - DNA, 2766 bp, Homo sapiens
actagttctagcggacgcgtgggtcgacccacgcgtcgcgcccctcgcgggccccctagatctctgcctcagcccccctgtttttgcacccaccgccggctgcaggctccgctgctgcgctgcacccgggctccctattcccaccccacctcctgctcagaggcccagagatttaatttctttccccccgtgtgctttgcaggctgaggcctccgtagaagacagcgccttgcttatgcagaccttgatggaggccatccagatctcagaggctccacctactaaccaggccaccgcagctgctagtccccagagttcacagcccccaactgccaatgagatggctgacattcaggtttcagcagctgccgctaggcctaagtcagcctttaaagtccagaatgccaccacaaaaggcccaaatggtgtctatgatttctctcaggctcataatgccaaggatgtgcccaacacgcagcccaaggcagcctttaagtcccaaaatgctaccccaaagggtccaaatgctgcctatgatttttcccaggcagcaaccactggtgagttagctgctaacaagtctgagatggccttcaaggcccagaatgccactactaaagtgggcccaaatgccacctacaatttctctcagtctctcaatgccaatgacctggccaacagcaggcctaagacccctttcaaggcttggaatgataccactaaggccccaacagctgatacccagacccagaatgtaaatcaggccaaaatggccacttcccaggctgacatagagaccgacccaggtatctctgaacctgacggtgcaactgcacagacatcagcagatggttcccaggctcagaatctggagtcccggacaataattcggggcaagaggacccgcaagattaataacttgaatgttgaagagaacagcagtggggatcagaggcgggccccactggctgcagggacctggaggtctgcaccagttccagtgaccactcagaacccacctggcgcaccccccaatgtgctctggcagacgccattggcttggcagaacccctcaggctggcaaaaccagacagccaggcagaccccaccagcacgtcagagccctccagctaggcagaccccaccagcctggcagaacccagtcgcttggcagaacccagtgatttggccaaacccagtaatctggcagaacccagtgatctggccaaaccccattgtctggcccggccctgttgtctggccgaatccactggcctggcagaatccacctggatggcagactccacctggatggcagaccccaccgggctggcagggtcctccagactggcaaggtcctcctgactggccgctaccacccgactggccactgccacctgattggccacttcccactgactggccactaccacctgactggatccccgctgattggccaattccacctgactggcagaacctgcgcccctcgcctaacctgcgcccttctcccaactcgcgtgcctcacagaacccaggtgctgcacagccccgagatgtggcccttcttcaggaaagagcaaataagttggtcaagtacttgatgcttaaggactacacaaaggtgcccatcaagcgctcagaaatgctgagagatatcatccgtgaatacactgatgtttatccagaaatcattgaacgtgcatgctttgtcctagagaagaaatttgggattcaactgaaagaaattgacaaagaagaacacctgtatattctcatcagtacccccgagtccctggctggcatactgggaacgaccaaagacacacccaagctcggtctcctcttggtgattctgggtgtcatcttcatgaatggcaaccgtgccagtgaggctgtcctctgggaggcactacgcaagatgggactgcgtcctggggtgagacatcccctccttggagatctaaggaaacttctcacctatgagtttgtaaagcagaaatacctggactacagacgagtgcccaacagcaaccccccggagtatgagttcctctggggcctccgttcctaccatgagactagcaagatgaaagtgctgagattcattgcagaggttcagaaaagagaccctcgtgactggactgcacagttcatggaggctgcagatgaggccttggatgctctggatgctgctgcagctgaggccgaagcccgggctgaagcaagaacccgcatgggaattggagatgaggctgtgtctgggccctggagctgggatgacattgagtttgagctgctgacctgggatgaggaaggagattttggagatccctggtccagaattccatttaccttctgggccagataccaccagaatgcccgctccagattccctcagacctttgccggtcccattattggtcctggtggtacagccagtgccaacttcgctgccaactttggtgccattggtttcttctgggttgagtgagatgttggatattgctatcaatcgcagtagtctttcccctgtgtgaggctgaagcctcagattccttctaaacacagctatctagagagccacatcctgttgactgaaagtggcatgcaagataaatttatttgctgttccttgtctactgctttttttccccttgtgtgctgtcaagttttggtatcagaaataaacattgaaattgcaaagtgaaaaaaaaaacaaaaatgcgagggcatcattacgggggggaaaaaggggtacgaaag

SEQ ID NO: 613983 - DNA, 203 bp, Homo sapiens
gcgactaatcaccaccaacaatgactaatcaaactaacctcaaacaaatgataaccatacacaacactataggacgagcctgatctctatactagtatcctcaatcatatttattaccacaactaacctcctcggactcctgctcactcatttacaccaaccacccaactatctataaacctagcatggcatccccttatgag

SEQ ID NO: 613984 - DNA, 231 bp, Homo sapiens
cccaataaatgcaaggcacttgattggtcttgaaaccatccctcccggaccccaatccatggaaaaattgtgttccgcgaaaccggtctctggtgccaaaaaggttggggcccgcttttggaaaagctggaaaaggcaagttaacgcattttcccccctccgtttgaaaggcccatcccccattgtcctcctatccctcaacccgggcatcattacggggttttcttttta

SEQ ID NO: 613985 - DNA, 386 bp, Homo sapiens
caaaatttttcccttaaagaaaaaaaatcccatgaaccatttgaactgatgagccccagaacttcagttgaaatttttttccctttttagcaggctaaaaaaacatctgggtttaaatgttctgtttaaggccccttcataaattcaagccccccccctggtcagttttgtgtgatagaataaaaaaatgttccccccagggtaaggaccgccccctgtaaatttcttttccttaaggggcccagtaaatgtccaaatagttatagccccctgttttgtaagggaggccctttttaatctattattcctaccccattaaaactgtttgcagaaaaaaaagaatttttctaataatctgtaaaattatgctaacttccccaagtggg

SEQ ID NO: 613986 - DNA, 527 bp, Homo sapiens
gaagattgaggtctttctgttgcagtgataaaaatgtcctaaaattgactgtagcgatggtcacacaactctgaatatgcttaagaccattgaattacacactttacgttggtgaattgtatggtatgtaaattatagttcaataacatagttacaaaagataatcaaaagcatgaaagcactattgatgtggtttggatctgtgtcctcaccgagtctcatgttgaaatgtaagccccctggtgggaggcgatgggattatggggcagagtcctcacgaacggtttagcaccacccgctcagtgctgttctcctgatattgagtcctcatcccatctggttgcttcaaagtgtgtggtgcctcccctctatctccctcctgctctggccatataagatgtgcctgcttctccttcgccttctaacatgattgtaagtttcctgaggcctccctagaagcaaaagctgctgtgcttcctgtaccatctacaggaccgtgagccaattaaacctcttttctttataag

SEQ ID NO: 613987 - DNA, 3112 bp, Homo sapiens
gatctggctcccggaagttccacgtcagtcagtctgacggtcagtggatcggtgggtttatctcaaggcctgagtagccggtaacaaacgagggttcccgggattggaccgacgcagccatgcctctgcgacttgatatcaaaagaaagctaactgctagatctgatcgagttaagagtgtggatctgcatcctacagagccatggatgttggcaagtctttacaatggcagtgtgtgtgtttggaatcatgaaacacagacactggtgaagacatttgaagtatgtgatcttcctgttcgagctgcaaagtttgttgcaaggaagaattgggttgtgacaggagcggatgacatgcagattagagtgttcaattacaatactctggagagagttcatatgtttgaagcacactcagactacattcgctgtattgctgttcatccaacccagcctttcattctaactagcagtgatgacatgcttattaagctctgggactgggataaaaaatggtcttgctcacaagtgtttgaaggacacacccattatgttatgcagattgtgatcaaccccaaagataacaatcagtttgccagtgcctctttggacaggactatcaaggtgtggcagttgggctcttcgtcaccaaacttcactttggaaggacatgagaaaggcgtgaattgcattgattactacagtggtggggacaagccatacctcatttcaggtgcagatgaccgtcttgttaaaatatgggattatcagaataaaacatgtgtgcagacactggaaggacatgcccaaaatgtgtcttgtgccagctttcatcctgagttgccaatcattatcacaggttcagaagatggaacagtacgtatttggcattcaagcacctaccggcttgagagcacactgaattatggaatggagagggtatggtgcgtggccagtctaagagggtcaaacaatgtcgctttgggctatgatgaagggagcatcattgttaagcttggtcgggaggaacctgccatgtccatggatgccaatggaaagataatttgggccaagcattcagaagtccagcaggccaacctaaaagcaatgggagatgctgaaattaaagatggtgaaagattgccactggcagtaaaggatatgggcagttgtgaaatataccctcagactattcagcacaatcctaatgggcggtttgtggtggtgtgtggtgatggggagtatatcatctacacagcaatggcattgagaaacaagagctttggatctgctcaggagtttgcatgggcccacgattcttcagagtatgcaataagagagagcaacagcattgtaaagatatttaagaactttaaggaaaaaaaatcatttaaaccagattttggagcagaaagtatctacggcggcttcttattgggagtcagatctgtaaatggcttagccttctatgactgggacaatacagaactcatacgaagaattgaaattcagcccaaacatattttctggtctgactctggagagctagtctgtattgctactgaggaatcattttttatccttaagtatctgtcagaaaaagtcttggctgcacaggaaacacatgagggagttactgaagatggcattgaagatgcctttgaggttcttggtgagattcaggaaattgtgaaaacagggctttgggtaggcgattgcttcatttacacaagttctgtgaacagattaaattattatgttggaggagaaatagtcaccattgcccacttggacaggacgatgtatctcctaggctacattcctaaagacaacaggctttatctgggggataaagaattgaacatcattagctattccctgctggtttcagtcctggaataccagacagctgtcatgcggagggactttagcatggctgataaggtccttcctaccattccaaaagaacagaggaccagagttgcacactttttggaaaagcagggcttcaagcagcaagctcttacagtatccacagatcctgagcatcgttttgagcttgctcttcagcttggagagttaaaaattgcataccagttagcagtggaagcagagtcagaacagaagtggaaacaacttgctgaacttgccattagtaaatgtcagtttggcctagcccaggagtgcctgcatcatgcacaggattatgggggcctgctgcttttggccactgcctctggaaatgctaatatggtgaacaagctagcagagggtgcggagagagatggcaaaaataatgtggcattcatgagctactttttacagggcaaggttgatgcctgcctagagctcttaattagaactggacggctgccagaagctgccttcttggcccgaacttacttacccagtcaggtttcaagggtagtgaaactctggagagagaatctctcaaaagtcaatcagaaagcagcagaatcccttgctgacccaacagagtatgaaaacctgttccctggattaaaagaagcctttgttgttgaagaatgggtgaaggaaacacatgctgatctgtggccagccaaacaatacccacttgtcacgccaaatgaagagagaaatgtcatggaagagggaaaagactttcagccctcaagatctacagctcaacaggaacttgatgggaaacctgcttctcctactccggttattgtggcctcccacacagccaacaaagaagaaaagagtttactcgaactagaagtagatttggataatttggaattagaagatattgacacaacagatatcaatctggatgaagatattttggatgattgactgtaatgctttccatttacctgactaaacagatcattattatatataggtattgattgctaccctgaccacagtgctttggactatgagaaacttcttagatttttatatgtaaatgctgtggaccactgggagcacaatgcccacatcatcttaagaagagtttatgtgcagcatttaaatcactgtgttttccttgttaactaaaacagacatgggctttgatttttttcatactattagaccatatctcataaaaccttttgaattaa

SEQ ID NO: 613988 - DNA, 326 bp, Homo sapiens
ggcaacttccacctccggggtccaaatgattctccggcctcagcctcccaagtagcggggataacagaggcccgcccccacgccaagctaatttccgtactttaagaagagagggggtacctccaggtgggccaggcgggtctcgaactccggacctggagtgatccaccaacccaagcctcccagagggcggggatcacaggctggagtcaccgggccgggggctgggtttccttataatctccataatgctgggcggtgcctaccttggtaattggtagataagggaaggtgtccaccgggacttggatgatgtccttacctcg

SEQ ID NO: 613989 - DNA, 542 bp, Homo sapiens
ttggttgatcgatgccgctggtgtttatcgatgccatcggtgtaattgatgccacgggtgttatcgatgccactggtgtatatacgatgccacgtgcatgtggtgatggggagtatatcatctacacagcaatggcattgagaaacaagagctttggatctgctcaggagtttgcatgggcccacgattcttcagagtatgcaataagagagagcaacagcattgtaaagatatttaagaactttaaggaaaaaaaatcatttaaaccagattttggagcagaaagtatctacggcggcttcttattgggagtcagatctgtaaatggcttagccttctatgactgggacaatacagaactcatacgaagaattgaaattcagcccaaacatattttctggtctgactctggagagctagtctgtattgctactgaggaatcattttttatccttaagtatctgtcagaaaaagtcttggcatcgataaacaccggtgtgtatcgatgccaccgtattgtgcttccaggtgccccagaagga

SEQ ID NO: 613990 - DNA, 692 bp, Homo sapiens
gatctggctcccggaagttccacgtcagtcagtctgacggtcagtggatcggtgggtttatctcaaggcctgagtagccggtaacaaacgagggttcccgggattggaccgacgcagccatgcctctgcgacttgatatcaaaagaaagctaactgctagatctgatcgagttaagagtgtggatctgcatcctacagagccatggatgttggcaagtctttacaatggcagtgtgtgtgtttggaatcatgaaacacaggtaggaatttttcaggactttattagaaataaaatactatgtgagactgtgttataatgaaagagaagaaatattataacagaatccagaatctatatgcaaactgctttctcaagttggtacaaagtattttaaatatgaaggaactaacatttatgaggggatagtttgtaggagaaactgtcctgggtatgttatatacaatatttaaatataacaactctgacttaggtagtattagctcttttttgaaattgagaaaactgatggtattatagaatcacttgctaaagtatttaatcgttagttttccattcagtgaatactctatcttaagaatgatatcgttaaactttatttttctcccagatgcccaatataatgatacacagataaatctttcactcagccatatagattatatcagcggac

SEQ ID NO: 613991 - DNA, 295 bp, Homo sapiens
gaataatcacccgatatgtagtaggagttgggataactgcttggacaaaaatggacatatataaattccagattgtactgaaatacctttaacatccagcaggtggaagcactgagtaacaataccatactaggtcatctaacagaaacataaatccattctgcacaaatcaagaattctgatacactccatgccttgatgattacttcaacagacatccagtgatgctgtcattaataatgaagcaacaacgcacaaacaactcaaacagtgatttaatctctgagtatacaga

SEQ ID NO: 613992 - DNA, 3110 bp, Homo sapiens
  misc_feature (8)..(8): n is a, c, g, or t
  misc_feature (11)..(11): n is a, c, g, or t
  misc_feature (32)..(32): n is a, c, g, or t
aagaatgnatntgctagtacgaggcgggtgtnaattcggccgaggatcggtgggtttatctcaaggcctgagtagccggtaacaaacgagggttcccgggattggaccgacgcagccatgcctctgcgacttgatatcaaaagaaagctaactgctagatctgatcgagttaagagtgtggatctgcatcctacagagccatggatgttggcaagtctttacaatggcagtgtgtgtgtttggaatcatgaaacacagacactggtgaagacatttgaagtatgtgatcttcctgttcgagctgcaaagtttgttgcaaggaagaattgggttgtgacaggagcggatgacatgcagattagagtgttcaattacaatactctggagagagttcatatgtttgaagcacactcagactacattcgctgtattgctgttcatccaacccagcctttcattctaactagcagtgatgacatgcttattaagctctgggactgggataaaaaatggtcttgctcacaagtgtttgaaggacacacccattatgttatgcagattgtgatcaaccccaaagataacaatcagtttgccagtgcctctttggacaggactatcaaggtgtggcagttgggctcttcgtcaccaaacttcactttggaaggacatgagaaaggcgtgaattgcattgattactacagtggtggggacaagccatacctcatttcaggtgcagatgaccgtcttgttaaaatatgggattatcagaataaaacatgtgtgcagacactggaaggacatgcccaaaatgtgtcttgtgccagctttcatcctgagttgccaatcattatcacaggttcagaagatggaacagtacgtatttggcattcaagcacctaccggcttgagagcacactgaattatggaatggagagggtatggtgcgtggccagtctaagagggtcaaacaatgtcgctttgggctatgatgaagggagcatcattgttaagcttggtcgggaggaacctgccatgtccatggatgccaatggaaagataatttgggccaagcattcagaagtccagcaggccaacctaaaagcaatgggagatgctgaaattaaagatggtgaaagattgccactggcagtaaaggatatgggcagttgtgaaatataccctcagactattcagcacaatcctaatgggcggtttgtggtggtgtgtggtgatggggagtatatcatctacacagcaatggcattgagaaacaagagctttggatctgctcaggagtttgcatgggcccacgattcttcagagtatgcaataagagagagcaacagcattgtaaagatatttaagaactttaaggaaaaaaaatcatttaaaccagattttggagcagaaagtatctacggcggcttcttattgggagtcagatctgtaaatggcttagccttctatgactgggacaatacagaactcatacgaagaattgaaattcagcccaaacatattttctggtctgactctggagagctagtctgtattgctactgaggaatcattttttatccttaagtatctgtcagaaaaagtcttggctgcacaggaaacacatgagggagttactgaagatggcattgaagatgcctttgaggttcttggtgagattcaggaaattgtgaaaacagggctttgggtaggcgattgcttcatttacacaagttctgtgaacagattaaattattatgttggaggagaaatagtcaccattgcccacttggacaggacgatgtatctcctaggctacattcctaaagacaacaggctttatctgggggataaagaattgaacatcattagctattccctgctggtttcagtcctggaataccagacagctgtcatgcggagggactttagcatggctgataaggtccttcctaccattccaaaagaacagaggaccagagttgcacactttttggaaaagcagggcttcaagcagcaagctcttacagtatccacagatcctgagcatcgttttgagcttgctcttcagcttggagagttaaaaattgcataccagttagcagtggaagcagagtcagaacagaagtggaaacaacttgctgaacttgccattagtaaatgtcagtttggcctagcccaggagtgcctgcatcatgcacaggattatgggggcctgctgcttttggccactgcctctggaaatgctaatatggtgaacaagctagcagagggtgcggagagagatggcaaaaataatgtggcattcatgagctactttttacagggcaaggttgatgcctgcctagagctcttaattagaactggacggctgccagaagctgccttcttggcccgaacttacttacccagtcaggtttcaagggtagtgaaactctggagagagaatctctcaaaagtcaatcagaaagcagcagaatcccttgctgacccaacagagtatgaaaacctgttccctggattaaaagaagcctttgttgttgaagaatgggtgaaggaaacacatgctgatctgtggccagccaaacaatacccacttgtcacgccaaatgaagagagaaatgtcatggaagagggaaaagactttcagccctcaagatctacagctcaacaggaacttgatgggaaacctgcttctcctactccggttattgtggcctcccacacagccaacaaagaagaaaagagtttactcgaactagaagtagatttggataatttggaattagaagatattgacacaacagatatcaatctggatgaagatattttggatgattgactgtaatgctttccatttacctgactaaacagatcattattatatataggtattgattgctaccctgaccacagtgctttggactatgagaaacttcttagatttttatatgtaaatgctgtggaccactgggagcacaatgcccacatcatcttaagaagagtttatgtgcagcatttaaatcactgtgttttccttgttaactaaaacagacatgggctttgatttttttcatactattagaccatatctcataaaaccttttgaattaa

SEQ ID NO: 613993 - DNA, 897 bp, Homo sapiens
tagggagccgggacctttagacctttcgttacgtcgctaactgtcggtaaacctatatgcggaacgcctggcaggccagagcttccttgggaagatttctacaaccccccagattgcttggtggcgtctcactgcggttcgtgactgaggcccctaggaggtgtcgcctgtccaatcgggccacgtatggcctgcctcgcaccttttcgcccttggggacctcggtggtggcacgcacgatcggcatctaggccaaccttagttccttcccccgtggactacagcattctggggaccctggcaaggtaatccttgacgccactgctcctatgatagcgaaacctacggtgtcacggcggtcccttgaatggaagctcggcttccagtccatccgcacacgtgaatgactgaagttttgcccaagacctctccggtgcatgtccctgggccgcgcgacgcctttcattccctctcctcgcagcctctgtggtgcaagcctgtctatgggagacacgcgtgccatcactgctgactggagggtccatgaacggtgatcccacggcgaacactggccactaggcataccagtattccttcccagagctaaggggctgccttaaaggaaattgtagcctaagtaggtcactggcaagggcctgaggcctgttcctgcacaggcttccaggttaggcactagtgaataggctcagctcctctagagagactgaagccatctggcttctctagattccatctcccagtcctcgtttcccattgttctgttgcatccaccttaatgtctccaaggcctgtaatctcatcaccgttgggacacttaatcatttcaactccttgtaagatttcccggtttggtttctcatacatgtctcgcagtaa

SEQ ID NO: 613994 - DNA, 188 bp, Homo sapiens
gtgaaagacggcgacttcgccctgcgaattatgccctcgtgagatcggcgacaacgctctgctcagtttggatactcggcgtgtgcaacgccgaggcaccataccgaaatcgccgatcttcacgcgtgaagatcggcgactacggtctggaccttcggcgtgtgcagtgtggactctcggcgtgtgca

SEQ ID NO: 613995 - DNA, 3055 bp, Homo sapiens
gatctggctcccggaagttccacgtcagtcagtctgacggtcagtggatcggtgggtttatctcaaggcctgagtagccggtaacaaacgagggttcccgggattggaccgacgcagccatgcctctgcgacttgatatcaaaagaaagctaactgctagatctgatcgagttaagagtgtggatctgcatcctacagagccatggatgttggcaagtctttacaatggcagtgtgtgtgtttggaatcatgaaacacagacactggtgaagacatttgaagtatgtgatcttcctgttcgagctgcaaagtttgttgcaaggaagaattgggttgtgacaggagcggatgacatgcagattagagtgttcaattacaatactctggagagagttcatatgtttgaagcacactcagactacattcgctgtattgctgttcatccaacccagcctttcattctaactagcagtgatgacatgcttattaagctctgggactgggataaaaaatggtcttgctcacaagtgtttgaaggacacacccattatgttatgcagattgtgatcaaccccaaagataacaatcagtttgccagtgcctctttggacaggactatcaaggtgtggcagttgggctcttcgtcaccaaacttcactttggaaggacatgagaaaggcgtgaattgcattgattactacagtggtggggacaagccatacctcatttcaggtgcagatgaccgtcttgttaaaatatgggattatcagaataaaacatgtgtgcagacactggaaggacatgcccaaaatgtgtcttgtgccagctttcatcctgagttgccaatcattatcacaggttcagaagatggaacagtacgtatttggcattcaagcacctaccggcttgagagcacactgaattatggaatggagagggtatggtgcgtggccagtctaagagggtcaaacaatgtcgctttgggctatgatgaagggagcatcattgttaagcttggtcgggaggaacctgccatgtccatggatgccaatggaaagataatttgggccaagcattcagaagtccagcaggccaacctaaaagcaatgggagatgctgaaattaaagatggtgaaagattgccactggcagtaaaggatatgggcagttgtgaaatataccctcagactattcagcacaatcctaatgggcggtttgtggtggtgtgtggtgatggggagtatatcatctacacagcaatggcattgagaaacaagagctttggatctgctcaggagtttgcatgggcccacgattcttcagagtatgcaataagagagagcaacagcattgtaaagatatttaagaactttaaggaaaaaaaatcatttaaaccagattttggagcagaaagtatctacggcggcttcttattgggagtcagatctgtaaatggcttagccttctatgactgggacaatacagaactcatacgaagaattgaaattcagcccaaacatattttctggtctgactctggagagctagtctgtattgctactgaggaatcattttttatccttaagtatctgtcagaaaaagtcttggctgcacaggaaacacatgagggagttactgaagatggcattgaagatgcctttgaggttcttggtgagattcaggaaattgtgaaaacagggctttgggtaggcgattgcttcatttacacaagttctgtgaacagattaaattattatgttggaggagaaatagtcaccattgcccacttggacaggacgatgtatctcctaggctacattctgctggtttcagtcctggaataccagacagctgtcatgcggagggactttagcatggctgataaggtccttcctaccattccaaaagaacagaggaccagagttgcacactttttggaaaagcagggcttcaagcagcaagctcttacagtatccacagatcctgagcatcgttttgagcttgctcttcagcttggagagttaaaaattgcataccagttagcagtggaagcagagtcagaacagaagtggaaacaacttgctgaacttgccattagtaaatgtcagtttggcctagcccaggagtgcctgcatcatgcacaggattatgggggcctgctgcttttggccactgcctctggaaatgctaatatggtgaacaagctagcagagggtgcggagagagatggcaaaaataatgtggcattcatgagctactttttacagggcaaggttgatgcctgcctagagctcttaattagaactggacggctgccagaagctgccttcttggcccgaacttacttacccagtcaggtttcaagggtagtgaaactctggagagagaatctctcaaaagtcaatcagaaagcagcagaatcccttgctgacccaacagagtatgaaaacctgttccctggattaaaagaagcctttgttgttgaagaatgggtgaaggaaacacatgctgatctgtggccagccaaacaatacccacttgtcacgccaaatgaagagagaaatgtcatggaagagggaaaagactttcagccctcaagatctacagctcaacaggaacttgatgggaaacctgcttctcctactccggttattgtggcctcccacacagccaacaaagaagaaaagagtttactcgaactagaagtagatttggataatttggaattagaagatattgacacaacagatatcaatctggatgaagatattttggatgattgactgtaatgctttccatttacctgactaaacagatcattattatatataggtattgattgctaccctgaccacagtgctttggactatgagaaacttcttagatttttatatgtaaatgctgtggaccactgggagcacaatgcccacatcatcttaagaagagtttatgtgcagcatttaaatcactgtgttttccttgttaactaaaacagacatgggctttgatttttttcatactattagaccatatctcataaaaccttttgaattaa

SEQ ID NO: 613996 - DNA, 3058 bp, Homo sapiens
gatctggctcccggaagttccacgtcagtcagtctgacggtcagtggatcggtgggtttatctcaaggcctgagtagccggtaacaaacgagggttcccgggattggaccgacgcagccatgcctctgcgacttgatatcaaaagaaagctaactgctagatctgatcgagttaagagtgtggatctgcatcctacagagccatggatgttggcaagtctttacaatggcagtgtgtgtgtttggaatcatgaaacacagacactggtgaagacatttgaagtatgtgatcttcctgttcgagctgcaaagtttgttgcaaggaagaattgggttgtgacaggagcggatgacatgcagattagagtgttcaattacaatactctggagagagttcatatgtttgaagcacactcagactacattcgctgtattgctgttcatccaacccagcctttcattctaactagcagtgatgacatgcttattaagctctgggactgggataaaaaatggtcttgctcacaagtgtttgaaggacacacccattatgttatgcagattgtgatcaaccccaaagataacaatcagtttgccagtgcctctttggacaggactatcaaggtgtggcagttgggctcttcgtcaccaaacttcactttggaaggacatgagaaaggcgtgaattgcattgattactacagtggtggggacaagccatacctcatttcaggtgcagatgaccgtcttgttaaaatatgggattatcagaataaaacatgtgtgcagacactggaaggacatgcccaaaatgtgtcttgtgccagctttcatcctgagttgccaatcattatcacaggttcagaagatggaacagtacgtatttggcattcaagcacctaccggcttgagagcacactgaattatggaatggagagggtatggtgcgtggccagtctaagagggtcaaacaatgtcgctttgggctatgatgaagggagcatcattgttaagcttggtcgggaggaacctgccatgtccatggatgccaatggaaagataatttgggccaagcattcagaagtccagcaggccaacctaaaagcaatgggagatgctgaaattaaagatggtgaaagattgccactggcagtaaaggatatgggcagttgtgaaatataccctcagactattcagcacaatcctaatgggcggtttgtggtggtgtgtggtgatggggagtatatcatctacacagcaatggcattgagaaacaagagctttggatctgctcaggagtttgcatgggcccacgattcttcagagtatgcaataagagagagcaacagcattgtaaagatatttaagaactttaaggaaaaaaaatcatttaaaccagattttggagcagaaagtatctacggcggcttcttattgggagtcagatctgtaaatggcttagccttctatgactgggacaatacagaactcatacgaagaattgaaattcagcccaaacatattttctggtctgactctggagagctagtctgtattgctactgaggaatcattttttatccttaagtatctgtcagaaaaagtcttggctgcacaggaaacacatgagggagttactgaagatggcattgaagatgcctttgaggttcttggtgagattcaggaaattgtgaaaacagggctttgggtaggcgattgcttcatttacacaagttctgtgaacagattaaattattatgttggaggagaaatagtcaccattgcccacttggacaggacgatgtatctcctaggctacattcctaaagacaacaggctttatctgggggataaagaattgaacatcattagctattccctgctggtttcagtcctggaataccagacagctgtcatgcggagggactttagcatggctgataaggtccttcctaccattccaaaagaacagaggaccagagttgcacactttttggaaaagcagggcttcaagcagcaagctcttacagtatccacagatcctgagcatcgttttgagcttgctcttcagcttggagagttacttgctgaacttgccattagtaaatgtcagtttggcctagcccaggagtgcctgcatcatgcacaggattatgggggcctgctgcttttggccactgcctctggaaatgctaatatggtgaacaagctagcagagggtgcggagagagatggcaaaaataatgtggcattcatgagctactttttacagggcaaggttgatgcctgcctagagctcttaattagaactggacggctgccagaagctgccttcttggcccgaacttacttacccagtcaggtttcaagggtagtgaaactctggagagagaatctctcaaaagtcaatcagaaagcagcagaatcccttgctgacccaacagagtatgaaaacctgttccctggattaaaagaagcctttgttgttgaagaatgggtgaaggaaacacatgctgatctgtggccagccaaacaatacccacttgtcacgccaaatgaagagagaaatgtcatggaagagggaaaagactttcagccctcaagatctacagctcaacaggaacttgatgggaaacctgcttctcctactccggttattgtggcctcccacacagccaacaaagaagaaaagagtttactcgaactagaagtagatttggataatttggaattagaagatattgacacaacagatatcaatctggatgaagatattttggatgattgactgtaatgctttccatttacctgactaaacagatcattattatatataggtattgattgctaccctgaccacagtgctttggactatgagaaacttcttagatttttatatgtaaatgctgtggaccactgggagcacaatgcccacatcatcttaagaagagtttatgtgcagcatttaaatcactgtgttttccttgttaactaaaacagacatgggctttgatttttttcatactattagaccatatctcataaaaccttttgaattaa

SEQ ID NO: 613997 - DNA, 2326 bp, Homo sapiens
gatctggctcccggaagttccacgtcagtcagtctgacggtcagtggatcggtgggtttatctcaaggcctgagtagccggtaacaaacgagggttcccgggattggaccgacgcagccatgcctctgcgacttgatatcaaaagaaagctaactgctagatctgatcgagttaagagtgtggatctgcatcctacagagccatggatgttggcaagtctttacaatggcagtgtgtgtgtttggaatcatgaaacacagacactggtgaagacatttgaagtatgtgatcttcctgttcgagctgcaaagtttgttgcaaggaagaattgggttgtgacaggagcggatgacatgcagattagagtgttcaattacaatactctggagagagttcatatgtttgaagcacactcagactacattcgctgtattgctgttcatccaacccagcctttcattctaactagcagtgatgacatgcttattaagctctgggactgggataaaaaatggtcttgctcacaagtgtttgaaggacacacccattatgttatgcagattgtgatcaaccccaaagataacaatcagtttgccagtgcctctttggacaggactatcaaggtgtggcagttgggctcttcgtcaccaaacttcactttggaaggacatgagaaaggcgtgaattgcattgattactacagtggtggggacaagccatacctcatttcaggtgcagatgaccgtcttgttaaaatatgggattatcagaataaaacatgtgtgcagacactggaaggacatgcccaaaatgtgtcttgtgccagctttcatcctgagttgccaatcattatcacaggttcagaagatgcctttgaggttcttggtgagattcaggaaattgtgaaaacagggctttgggtaggcgattgcttcatttacacaagttctgtgaacagattaaattattatgttggaggagaaatagtcaccattgcccacttggacaggacgatgtatctcctaggctacattcctaaagacaacaggctttatctgggggataaagaattgaacatcattagctattccctgctggtttcagtcctggaataccagacagctgtcatgcggagggactttagcatggctgataaggtccttcctaccattccaaaagaacagaggaccagagttgcacactttttggaaaagcagggcttcaagcagcaagctcttacagtatccacagatcctgagcatcgttttgagcttgctcttcagcttggagagttaaaaattgcataccagttagcagtggaagcagagtcagaacagaagtggaaacaacttgctgaacttgccattagtaaatgtcagtttggcctagcccaggagtgcctgcatcatgcacaggattatgggggcctgctgcttttggccactgcctctggaaatgctaatatggtgaacaagctagcagagggtgcggagagagatggcaaaaataatgtggcattcatgagctactttttacagggcaaggttgatgcctgcctagagctcttaattagaactggacggctgccagaagctgccttcttggcccgaacttacttacccagtcaggtttcaagggtagtgaaactctggagagagaatctctcaaaagtcaatcagaaagcagcagaatcccttgctgacccaacagagtatgaaaacctgttccctggattaaaagaagcctttgttgttgaagaatgggtgaaggaaacacatgctgatctgtggccagccaaacaatacccacttgtcacgccaaatgaagagagaaatgtcatggaagagggaaaagactttcagccctcaagatctacagctcaacaggaacttgatgggaaacctgcttctcctactccggttattgtggcctcccacacagccaacaaagaagaaaagagtttactcgaactagaagtagatttggataatttggaattagaagatattgacacaacagatatcaatctggatgaagatattttggatgattgactgtaatgctttccatttacctgactaaacagatcattattatatataggtattgattgctaccctgaccacagtgctttggactatgagaaacttcttagatttttatatgtaaatgctgtggaccactgggagcacaatgcccacatcatcttaagaagagtttatgtgcagcatttaaatcactgtgttttccttgttaactaaaacagacatgggctttgatttttttcatactattagaccatatctcataaaaccttttgaattaa

SEQ ID NO: 613998 - DNA, 866 bp, Homo sapiens
gtttacttaacagctgtagcgcttgagtttttgagcattaaaaaacgccactgcgcagttttccccacgggtaccccaagatgttattcctggccgagacctatatctgtggaggcccgccccttcatctgcccgccggcctgtgggaacgccgaaagtggctgcattttcactaactaaggcgtaaagcgttccccgcttccggtcacaagaactggcctctccaattcacagcggacttcactatgctcacgcacaaaccgccgccatatgggaccgttctatcccgaagagtatttatgtgaatctcctgccccgggacttgcgcggatatcttagaaagccccctccccaaccttgtagccccccccttagggctttacccctaagagcagttcagagtttggggccccggcaaaaccactagtattaaagggtacggaaagaatgtgtgttcacctcctctgtgaaagattcttttatatgtaaaaacgccgttcccaaaaataaagacgggtttgccaggcaagaaaaaaggatgacacagatggtagggcctacccgcaaccggcatgaaatgatgagtaaaaaaagcccgcatacccccgatgggcagtaaataagaacaccaacacaaataccggcccgctgttaccactcagcaccagaatgataacccaagcaggtattaccacacggcagggaaccacccaaaaaggtcaacagagatcatgtagggcccacaaaaaaccgcccccacgcgggaagtcaaaccaacaaattgggttaacaccaacgccccccgggaaaaaaaaagatccccagggggggtatttttaaaaaaacgtaagaaaaatccacaaaaa

SEQ ID NO: 613999 - DNA, 3051 bp, Homo sapiens
gatctggctcccggaagttccacgtcagtcagtctgacggtcagtggatcggtgggtttatctcaaggcctgagtagccggtaacaaacgagggttcccgggattggaccgacgcagccatgcctctgcgacttgatatcaaaagaaagctaactgctagatctgatcgagttaagagtgtggatctgcatcctacagagccatggatgttggcaagtctttacaatggcagtgtgtgtgtttggaatcatgaaacacagacactggtgaagacatttgaagtatgtgatcttcctgttcgagctgcaaagtttgttgcaaggaagaattgggttgtgacaggagcggatgacatgcagattagagtgttcaattacaatactctggagagagttcatatgtttgaagcacactcagactacattcgctgtattgctgttcatccaacccagcctttcattctaactagcagtgatgacatgcttattaagctctgggactgggataaaaaatggtcttgctcaatcagtttgccagtgcctctttggacaggactatcaaggtgtggcagttgggctcttcgtcaccaaacttcactttggaaggacatgagaaaggcgtgaattgcattgattactacagtggtggggacaagccatacctcatttcaggtgcagatgaccgtcttgttaaaatatgggattatcagaataaaacatgtgtgcagacactggaaggacatgcccaaaatgtgtcttgtgccagctttcatcctgagttgccaatcattatcacaggttcagaagatggaacagtacgtatttggcattcaagcacctaccggcttgagagcacactgaattatggaatggagagggtatggtgcgtggccagtctaagagggtcaaacaatgtcgctttgggctatgatgaagggagcatcattgttaagcttggtcgggaggaacctgccatgtccatggatgccaatggaaagataatttgggccaagcattcagaagtccagcaggccaacctaaaagcaatgggagatgctgaaattaaagatggtgaaagattgccactggcagtaaaggatatgggcagttgtgaaatataccctcagactattcagcacaatcctaatgggcggtttgtggtggtgtgtggtgatggggagtatatcatctacacagcaatggcattgagaaacaagagctttggatctgctcaggagtttgcatgggcccacgattcttcagagtatgcaataagagagagcaacagcattgtaaagatatttaagaactttaaggaaaaaaaatcatttaaaccagattttggagcagaaagtatctacggcggcttcttattgggagtcagatctgtaaatggcttagccttctatgactgggacaatacagaactcatacgaagaattgaaattcagcccaaacatattttctggtctgactctggagagctagtctgtattgctactgaggaatcattttttatccttaagtatctgtcagaaaaagtcttggctgcacaggaaacacatgagggagttactgaagatggcattgaagatgcctttgaggttcttggtgagattcaggaaattgtgaaaacagggctttgggtaggcgattgcttcatttacacaagttctgtgaacagattaaattattatgttggaggagaaatagtcaccattgcccacttggacaggacgatgtatctcctaggctacattcctaaagacaacaggctttatctgggggataaagaattgaacatcattagctattccctgctggtttcagtcctggaataccagacagctgtcatgcggagggactttagcatggctgataaggtccttcctaccattccaaaagaacagaggaccagagttgcacactttttggaaaagcagggcttcaagcagcaagctcttacagtatccacagatcctgagcatcgttttgagcttgctcttcagcttggagagttaaaaattgcataccagttagcagtggaagcagagtcagaacagaagtggaaacaacttgctgaacttgccattagtaaatgtcagtttggcctagcccaggagtgcctgcatcatgcacaggattatgggggcctgctgcttttggccactgcctctggaaatgctaatatggtgaacaagctagcagagggtgcggagagagatggcaaaaataatgtggcattcatgagctactttttacagggcaaggttgatgcctgcctagagctcttaattagaactggacggctgccagaagctgccttcttggcccgaacttacttacccagtcaggtttcaagggtagtgaaactctggagagagaatctctcaaaagtcaatcagaaagcagcagaatcccttgctgacccaacagagtatgaaaacctgttccctggattaaaagaagcctttgttgttgaagaatgggtgaaggaaacacatgctgatctgtggccagccaaacaatacccacttgtcacgccaaatgaagagagaaatgtcatggaagagggaaaagactttcagccctcaagatctacagctcaacaggaacttgatgggaaacctgcttctcctactccggttattgtggcctcccacacagccaacaaagaagaaaagagtttactcgaactagaagtagatttggataatttggaattagaagatattgacacaacagatatcaatctggatgaagatattttggatgattgactgtaatgctttccatttacctgactaaacagatcattattatatataggtattgattgctaccctgaccacagtgctttggactatgagaaacttcttagatttttatatgtaaatgctgtggaccactgggagcacaatgcccacatcatcttaagaagagtttatgtgcagcatttaaatcactgtgttttccttgttaactaaaacagacatgggctttgatttttttcatactattagaccatatctcataaaaccttttgaattaa

SEQ ID NO: 614000 - DNA, 3183 bp, Homo sapiens
  misc_feature (2239)..(2239): n is a, c, g, or t
  misc_feature (2266)..(2266): n is a, c, g, or t
gatctggctcccggaagttccacgtcagtcagtctgacggtcagtggatcggtgggtttatctcaaggcctgagtagccggtaacaaacgagggttcccgggattggaccgacgcagccatgcctctgcgacttgatatcaaaagaaagctaactgctagatctgatcgagttaagagtgtggatctgcatcctacagagccatggatgttggcaagtctttacaatggcagtgtgtgtgtttggaatcatgaaacacagacactggtgaagacatttgaagtatgtgatcttcctgttcgagctgcaaagtttgttgcaaggaagaattgggttgtgacaggagcggatgacatgcagattagagtgttcaattacaatactctggagagagttcatatgtttgaagcacactcagactacattcgctgtattgctgttcatccaacccagcctttcattctaactagcagtgatgacatgcttattaagctctgggactgggataaaaaatggtcttgctcacaagtgtttgaaggacacacccattatgttatgcagattgtgatcaaccccaaagataacaatcagtttgccagtgcctctttggacaggactatcaaggtgtggcagttgggctcttcgtcaccaaacttcactttggaaggacatgagaaaggcgtgaattgcattgattactacagtggtggggacaagccatacctcatttcaggtgcagatgaccgtcttgttaaaatatgggattatcagaataaaacatgtgtgcagacactggaaggacatgcccaaaatgtgtcttgtgccagctttcatcctgagttgccaatcattatcacaggttcagaagatggaacagtacgtatttggcattcaagcacctaccggcttgagagcacactgaattatggaatggagagggtatggtgcgtggccagtctaagagggtcaaacaatgtcgctttgggctatgatgaagggagcatcattgttaagcttggtcgggaggaacctgccatgtccatggatgccaatggaaagataatttgggccaagcattcagaagtccagcaggccaacctaaaagcaatgggagatgctgaaattaaagatggtgaaagattgccactggcagtaaaggatatgggcagttgtgaaatataccctcagactattcagcacaatcctaatgggcggtttgtggtggtgtgtggtgatggggagtatatcatctacacagcaatggcattgagaaacaagagctttggatctgctcaggagtttgcatgggcccacgattcttcagagtatgcaataagagagagcaacagcattgtaaagatatttaagaactttaaggaaaaaaaatcatttaaaccagattttggagcagaaagtatctacggcggcttcttattgggagtcagatctgtaaatggcttagccttctatgactgggacaatacagaactcatacgaagaattgaaattcagcccaaacatattttctggtctgactctggagagctagtctgtattgctactgaggaatcattttttatccttaagtatctgtcagaaaaagtcttggctgcacaggaaacacatgagggagttactgaagatggcattgaagatgcctttgaggttcttggtgagattcaggaaattgtgaaaacagggctttgggtaggcgattgcttcatttacacaagttctgtgaacagattaaattattatgttggaggagaaatagtcaccattgcccacttggacaggacgatgtatctcctaggctacattcctaaagacaacaggctttatctgggggataaagaattgaacatcattagctattccctgctggtttcagtcctggaataccagacagctgtcatgcggagggactttagcatggctgataaggtccttcctaccattccaaaagaacagaggaccagagttgcacactttttggaaaagcagggcttcaagcagcaagctcttacagtatccacagatcctgagcatcgttttgagcttgctcttcagcttggagagttaaaaattgcataccagttagcagtggaagcagagtcagaacagaagtggaaacaacttgctgaacttgccattagtaaatgtcagtttggcctagcccaggagtgcctgcatcatgcacaggattatgggggcctgctgcttttttggggccccaaacnttggggccctttttttccccccccccntttttttttttgtggggggggggaaaaaaacaatttggccttaaaactaattggcttggaaacaagctagcagagggtgcggagagagatggcaaaaataatgtggcattcatgagctactttttacagggcaaggttgatgcctgcctagagctcttaattagaactggacggctgccagaagctgccttcttggcccgaacttacttacccagtcaggtttcaagggtagtgaaactctggagagagaatctctcaaaagtcaatcagaaagcagcagaatcccttgctgacccaacagagtatgaaaacctgttccctggattaaaagaagcctttgttgttgaagaatgggtgaaggaaacacatgctgatctgtggccagccaaacaatacccacttgtcacgccaaatgaagagagaaatgtcatggaagagggaaaagactttcagccctcaagatctacagctcaacaggaacttgatgggaaacctgcttctcctactccggttattgtggcctcccacacagccaacaaagaagaaaagagtttactcgaactagaagtagatttggataatttggaattagaagatattgacacaacagatatcaatctggatgaagatattttggatgattgactgtaatgctttccatttacctgactaaacagatcattattatatataggtattgattgctaccctgaccacagtgctttggactatgagaaacttcttagatttttatatgtaaatgctgtggaccactgggagcacaatgcccacatcatcttaagaagagtttatgtgcagcatttaaatcactgtgttttccttgttaactaaaacagacatgggctttgatttttttcatactattagaccatatctcataaaaccttttgaattaa

SEQ ID NO: 614001 - DNA, 3388 bp, Homo sapiens
gatctggctcccggaagttccacgtcagtcagtctgacggtcagtggatcggtgggtttatctcaaggcctgagtagccggtaacaaacgagggttcccgggattggaccgacgcagccatggtaggtccagatcccgtagaagggagcggggtcccataggttacggccgattcctggagcttctggactgagggccgcgctgggcatggtagcatgcgcctgtagtcccagctacttgggaggctgaggcaggagaatcgcttgaacccgggaagcagaggtttcagtgagcagagatcagcgccactgcactccagcctggacgacagagcgagacttcgccactgcactccagcctggacgacagagcgagacttcgtctcaaaaagaaaaaaacctctgcgacttgatatcaaaagaaagctaactgctagatctgatcgagttaagagtgtggatctgcatcctacagagccatggatgttggcaagtctttacaatggcagtgtgtgtgtttggaatcatgaaacacagacactggtgaagacatttgaagtatgtgatcttcctgttcgagctgcaaagtttgttgcaaggaagaattgggttgtgacaggagcggatgacatgcagattagagtgttcaattacaatactctggagagagttcatatgtttgaagcacactcagactacattcgctgtattgctgttcatccaacccagcctttcattctaactagcagtgatgacatgcttattaagctctgggactgggataaaaaatggtcttgctcacaagtgtttgaaggacacacccattatgttatgcagattgtgatcaaccccaaagataacaatcagtttgccagtgcctctttggacaggactatcaaggtgtggcagttgggctcttcgtcaccaaacttcactttggaaggacatgagaaaggcgtgaattgcattgattactacagtggtggggacaagccatacctcatttcaggtgcagatgaccgtcttgttaaaatatgggattatcagaataaaacatgtgtgcagacactggaaggacatgcccaaaatgtgtcttgtgccagctttcatcctgagttgccaatcattatcacaggttcagaagatggaacagtacgtatttggcattcaagcacctaccggcttgagagcacactgaattatggaatggagagggtatggtgcgtggccagtctaagagggtcaaacaatgtcgctttgggctatgatgaagggagcatcattgttaagcttggtcgggaggaacctgccatgtccatggatgccaatggaaagataatttgggccaagcattcagaagtccagcaggccaacctaaaagcaatgggagatgctgaaattaaagatggtgaaagattgccactggcagtaaaggatatgggcagttgtgaaatataccctcagactattcagcacaatcctaatgggcggtttgtggtggtgtgtggtgatggggagtatatcatctacacagcaatggcattgagaaacaagagctttggatctgctcaggagtttgcatgggcccacgattcttcagagtatgcaataagagagagcaacagcattgtaaagatatttaagaactttaaggaaaaaaaatcatttaaaccagattttggagcagaaagtatctacggcggcttcttattgggagtcagatctgtaaatggcttagccttctatgactgggacaatacagaactcatacgaagaattgaaattcagcccaaacatattttctggtctgactctggagagctagtctgtattgctactgaggaatcattttttatccttaagtatctgtcagaaaaagtcttggctgcacaggaaacacatgagggagttactgaagatggcattgaagatgcctttgaggttcttggtgagattcaggaaattgtgaaaacagggctttgggtaggcgattgcttcatttacacaagttctgtgaacagattaaattattatgttggaggagaaatagtcaccattgcccacttggacaggacgatgtatctcctaggctacattcctaaagacaacaggctttatctgggggataaagaattgaacatcattagctattccctgctggtttcagtcctggaataccagacagctgtcatgcggagggactttagcatggctgataaggtccttcctaccattccaaaagaacagaggaccagagttgcacactttttggaaaagcagggcttcaagcagcaagctcttacagtatccacagatcctgagcatcgttttgagcttgctcttcagcttggagagttaaaaattgcataccagttagcagtggaagcagagtcagaacagaagtggaaacaacttgctgaacttgccattagtaaatgtcagtttggcctagcccaggagtgcctgcatcatgcacaggattatgggggcctgctgcttttggccactgcctctggaaatgctaatatggtgaacaagctagcagagggtgcggagagagatggcaaaaataatgtggcattcatgagctactttttacagggcaaggttgatgcctgcctagagctcttaattagaactggacggctgccagaagctgccttcttggcccgaacttacttacccagtcaggtttcaagggtagtgaaactctggagagagaatctctcaaaagtcaatcagaaagcagcagaatcccttgctgacccaacagagtatgaaaacctgttccctggattaaaagaagcctttgttgttgaagaatgggtgaaggaaacacatgctgatctgtggccagccaaacaatacccacttgtcacgccaaatgaagagagaaatgtcatggaagagggaaaagactttcagccctcaagatctacagctcaacaggaacttgatgggaaacctgcttctcctactccggttattgtggcctcccacacagccaacaaagaagaaaagagtttactcgaactagaagtagatttggataatttggaattagaagatattgacacaacagatatcaatctggatgaagatattttggatgattgactgtaatgctttccatttacctgactaaacagatcattattatatataggtattgattgctaccctgaccacagtgctttggactatgagaaacttcttagatttttatatgtaaatgctgtggaccactgggagcacaatgcccacatcatcttaagaagagtttatgtgcagcatttaaatcactgtgttttccttgttaactaaaacagacatgggctttgatttttttcatactattagaccatatctcataaaaccttttgaattaa

SEQ ID NO: 614002 - DNA, 1342 bp, Homo sapiens
  misc_feature (151)..(151): n is a, c, g, or t
  misc_feature (1145)..(1145): n is a, c, g, or t
atgacgattcatgcgcatgcctttatcatatcgtaataagctcatcgcacatgcaccgccttaacatggggcgctgtttcgatgcctcctcgcgtgaatgtatcatccgagccgtaggcccagtgctgactgttcgattgtctaaggtctnattaacgggtcactcatcatgtaggccattatgtaacgcattaaaacttaccgatgatacactaatggatgggaagctgcatcgtggaacggccgaggtaaaagcaactcatacgcgtaagggcccacacaagcaacaactcgaggcttccgtcctccaaaggcgcatgtgctaataacggaggcataagtcgcataagtttgattgacacatcgtcgaagaagttgattgaacgatacgactgatgatctatgtcgtagaacccatgtgttccagtccaattaccccatgcacgaaaaggaaccacgtgaaacgaaacgagcttgacttgcaagaggcatcagggaaacaaagaaaggaagggtcaagtttttccccccgacatcaaaaataaccacgggttacgacacgtttcgccaccatcacgtaaagacccacaagttaaaaggccaatgcttaggttcgaccttcttccaggggcagcaataatactggggctaccacacaacgatgaaaaggcaatccctcgccaccataaggaacaagttaaccatacggcgttataacaaagcccgaaggccggaaaaaatggggcaagggattttaacacgtagccaaaccgtgagcactagcaggcacaacgtgtgaacgccaccatactatcccacggggggcggcaacatgtgcaaatttggggtataaaggcccaatacagttccagtgggggttaaacgcaacaagggaggtttggccattggcccgaaagtgctcaccaacggccgataatcgagggcgggaggccaaaacacggacaaccttggggcaatacgacaacagtgggccataacgggaaacacgggaaaaggaacagcgataggacacactgaacaggaagacgcgtaagcggaaattcgagaatgcaatatgatggacatccgcaatgtgcgcaaatttgcaacgggaatagcaggaaattcttatcgcaacgtggcgnaaccgtaacgacgacatgtgcattggtgaatttcaccaccgccacttgaacaactatattttgttataccgcagccttaattcagtaaattttacccaagcgccaaagttcaagacatgttgtgtgggcttctccttggacacgtcccggcagggactgtgtaagtgtaacgtgaatgaaatggtttgtgatacgga

SEQ ID NO: 614003 - DNA, 360 bp, Homo sapiens
gagggttcccgggcattaattacactcacaatgttttacaaccatcaccactatccatttccagagccttttttaaaaatcatcccaaacagaaacttgggacccgttacacaatcattccccatttccactccccccagcctttgggaacctttggactactttttgttttgatgaatttgcctattttagttccctcatagaagcagaatcagaccatcccttgcccttttgcattgggcttatttcacttagcatgatgttttccacccttatccggggtgtagaatgggtcagaattttattccctttttttaagttaaaaaaaatttatccttatgacctggcagtcccatgaga

SEQ ID NO: 614004 - DNA, 251 bp, Homo sapiens
cccttggccccttaggctaatcctggttttatgtgaagtcagccattaagtgttccccctaaaactggcctaagccccttattaatttttaattagggaaggtaggggagaatctaccccttttttaatgcccaaaatctatatatgttttctgaagccctttttttgaagtaaccccccatgtggtcccccccccgttcccccgttaaccaatgacttttttagtgtaataaaatgtttttcctctttta

SEQ ID NO: 614005 - DNA, 106 bp, Homo sapiens
gtagcgctgtaccgcagcgtggcttgctgggccccctttgtctccagtcttgctcagctgccatcactcaggatttcaatggtgcccctgtatgcttgcttgctgg

SEQ ID NO: 614006 - DNA, 231 bp, Homo sapiens
ttcttctctccagaacactaggcaccatctgatctcctatgccttttccttattgtcagatactgaactctcagatacagttccccttcctccctccagggggcgccatggaacgcagggccctcactggccctggggactgggtgacgtcaggggtgagcctctggtgattggctccctcaccctgcgtaagatcaaagggcctaaaagtcagccccgacacccggagcc

SEQ ID NO: 614007 - DNA, 107 bp, Homo sapiens
tactgaaattacaggcgtgagccaccacatccagccttggctgattggtggttctaatggtttatggttgggtagttttataatagctcatgacagtttccggctcg

SEQ ID NO: 614008 - DNA, 144 bp, Homo sapiens
ccctggtctgaacttagtacctgatgaaggtgacagaatgcattctttctctccacttgcttgcaggaagaggaactgcaggatgacatttgcactaccagttagcatctgtgtggacacagacgatgccagggaacaccgtgg

SEQ ID NO: 614009 - DNA, 431 bp, Homo sapiens
  misc_feature (4)..(4): n is a, c, g, or t
  misc_feature (48)..(48): n is a, c, g, or t
  misc_feature (158)..(158): n is a, c, g, or t
aaanttgaaggcttcccccttttaaaaatgaaagggggacgttttgtnaaaaaaacattgtcaatttccctaagtgccccctttattcaaatttttttttcccccctaaactccttcttaaggctctttaaaagataaatcttggccccagccgtggntggtcacgccctgtaatccccagcactttgggaggctgaggtgggtggatcacgaggtcaggaaatccgtagccatccctggctaacacgatgaaaccccgtctctactaaaaatacaaaaaattagccaggcctggtggcgggcatctgtagtcccagctactggggaggctgaggcaggagaatggtgtcccgggaggcagagcttgcagtgagtcgagatcacgccactgcactccagcctgggcgacagagcgagactccctctcagat

SEQ ID NO: 614010 - DNA, 266 bp, Homo sapiens
  misc_feature (33)..(33): n is a, c, g, or t
  misc_feature (225)..(225): n is a, c, g, or t
tggttgataggtaaaaaaatacaattgataganggagtaagttctaatattggatagtatgtaagagaaattgtagttaacaataatttattgtgtatttcaaaataactagaagagaagaattgcaatgttcccaacataaagaaaagataaatgttttagatgatggatatccccattaccctgatttgatcattgtatatcacacacatgtatcaaagtatnacatgtactccaaatgtttgtacaactatgatatatcaata

SEQ ID NO: 614011 - DNA, 879 bp, Homo sapiens
  misc_feature (510)..(510): n is a, c, g, or t
gactactccatgacagacggtctttggaatccaccatgtctacatccatgctcctcgtgaaggcagatgttgatgaactgtgatgatgaactgttacactctcgcgtgatcatcctggagggctctgtggtggccgtgggattctgcccatgacatgatcctacgtgtccgacccataagcaggccacactatgtacgagggaagaaatctagtatcccaggacgataacgccaagaccagagggcgatcacagctgtaggaccctctgcgattaagcctccagtccaagccagtagtgactttcgctttcaggccgtagtagcaaggcagttgaggtcctggaaaggcccccttggagtaagcgaagttgtgcatcttgcttcgcaccaactttgagcaatctctcaccgtccttggcctttcctggtcctactgggtggctccataatagcaacctgacagagaattctcatgagggccatctagagttgcaatcgctcgacggaagnacttcgtgagcgtcgaagaagaattctagcatgagctttcgaagcacactcactgactgcaccactccaaatccagttcccagcggaatggaggcgtgacagcatgaaggtatggaggaagaatgcgactggtgggtcaacagtaggcaactcaagtcgtgcatggaccaggtttcacggcatggattgccaaagagggcctgaatgagcttccgtatagcctttttgggcactgagcatttcacggactcaggtgtcagctagatatagctcatgcaatgaactacgtgatcgacctggacccgtcggcggggaacattgcctgatcgtgagcccaggccttgagtccgcaggacaatgatgggcctg

SEQ ID NO: 614012 - DNA, 83 bp, Homo sapiens
  misc_feature (48)..(48): n is a, c, g, or t
  misc_feature (54)..(54): n is a, c, g, or t
ttgcaacttattactgtcaacagattaatacttatcctcctcctttcngcgganggaccaaggtggagatcaaacgaactgtg

SEQ ID NO: 614013 - DNA, 377 bp, Homo sapiens
gctcgctaccgttggggacgaaagggcgggggactacaggcacgtgccaccacacgcggctaatttgtgtttttagtagagacagtgtttcgccatgttggccaggctggtcttgaactcctgacctcaggtgatccacccacctcggcctcccaaagtgctgggattacaggcatgagccactgctcccggcccggaattttctttatttctatacattttacttccgttgttttttccttttttgagacagggtctagctcttttgcctaggctgaagtgcagtggtgtgatcacagctcactgtagctttgacctccagggctcaagcaatcctcccacctcagcctcctaagtagctgagattataggtgcac

SEQ ID NO: 614014 - DNA, 597 bp, Homo sapiens
  misc_feature (34)..(34): n is a, c, g, or t
  misc_feature (367)..(367): n is a, c, g, or t
gtacggttcgcatgttccaacatcatttattaanatagcggatcttccccactgctagttttgacaggtctgtcggagatcagatggttgcagatgtgtggcattatttctgaggcctctgttttgttccattggctctatataactgttttggtaccagtaccatgctgttttggttactgtagccttgtagtatagtttgaagtcaggtagcatgatgccgctagctttgttctttttgcttaggattgtcttggctatacaggctcttttttgggttccatatgaaatttaattctgtgaagaaagtcagtggtagcttgatggggatagcactgaatctataaattactttgggcagtatggncatttttacaatatttattcttcctatccatgagcatggaatgttcttccatttgtttgtatcctcttctatttcattgagcagtggtttgtagttctccttgaagaggtccttcacatcccttgtaagttggattcctaggtattttattctctttatagcaattgtgactgggagttcactcatgatttgggtctctgttggtctattattggtgttaagaatgttgt

SEQ ID NO: 614015 - DNA, 380 bp, Homo sapiens
ggggcccccggggggggccccccctttttttttaaaaaattgggccccccatagaggttggcccccccccggggaggcccaaaattaaaggcccgggtcccctttttttttttttttcccgggaaaaaggccccccagggggtaaaagcccctttttaggggcccaaaaattttgcctttttaaaccccggtgggctttggggcctctttttttaacgccaaaaaaaaaaaaattttgggggggtttaaaaggggtttcccgcccccggggggccccctatccccgggcccgggggccccctgggaatttgggtttttttttaaaaatgccccccccccctttttccccgggttttattatttaggggggggggttttga

SEQ ID NO: 614016 - DNA, 586 bp, Homo sapiens
  misc_feature (514)..(514): n is a, c, g, or t
  misc_feature (578)..(579): n is a, c, g, or t
aagccagagaaataaagatattccaaacatgttggacgttctaaaggatatgaataaggttaagcttcgtgcaattgagcggtcacctggcggtagacccattcataagaggaaaagacagaattcacattgggatccagtttctttaatatctcatgcacttaaacagaaatttgcatttcaagaagatgattcttttgagaaagagaatagatcttgggaatcttccccattttctagtccagaaacttcaagggtaagctacactaatgtaaaattaatttttcagtttttctcacgatgtgttgttatatgttacagcttgtgtgttcaaggttctctatgaacgtaagttgtgcagagatggggctaatataagttgttgtattgagtgctcgctaaatgtttcgtggggattattttatgcttgtgtaatgtttgatagtgctcagttgttccactttatagacgactataccactgagactcctcttatggaacagtacaagagtgnctatatatatgtgaaaaaaataaagagaacaacaaagaatataacaaagaaacacacccctatnngcgggcc

SEQ ID NO: 614017 - DNA, 472 bp, Homo sapiens
taatgatgggctcatattaactaattacatctggcatggactggtgtttcccaataaggtcacattttgaggtactagggcttggacttcaacatatggatttggcagggggcataattcaacccataatacacaatttagaaaataaaatcatagagcgtggggccagacatggtggctcacgcctgtaatctcaacacttggggaggctgaggtggttggatcacttgaggtcaggagttcgagaacagcctggccaacataatgaaaccccgtctctactaaaaatacaaaaattagctgggctggggggggcatgcctgtagtccgaactactaaggagactgaggcaggagaatggctggaacctgggaggtggaagtggcagtgagccacgatcacgccactgcactccagcctgggcgacagagctagactctgtctcaaaaaaaaagagtgccaaggtagagaa

SEQ ID NO: 614018 - DNA, 488 bp, Homo sapiens
ctaatgctttagaagaagctcacagagtgatgaacccaaacaacaaagaaaccatgtttaacactaggtatcttcatcagtataggtaggtgttcacaatttttgatggatcaaaaacttgctgtaatacaaatagagagtggaggtactaaaggccttgcttgtggaaactgaaagaggatacaccgctttatggtaaaactaaaagttaggggagaatgaaggaaatccgacatatgaaaaaattctacaggaaccccatcatcggggaactgaactgatgaaaacttggaacaccccagtaaattttgttggggaatgcactccggagcaagtgataaacatcccatcctgtgggtcccatgcaaaaaatcacgagcctccatctcataaagttctcccccccttcgattaaagaaagttagttctaatacacggacagctttgtactcaccaagctatattgccaagatctaattctaccccca

SEQ ID NO: 614019 - DNA, 296 bp, Homo sapiens
gcggggcatattccgtatctcaaactggcatctcagctgctggtgatgatggctatacattttcctcagtatacaatgtgcgtatttagcgttaacagtccacccattggctgaggcaggtggatcatctgaggtgacgagtttgagaccagcctggccaatatgtgaaactctgtctctactaaaaatacaaaaattagccaggcatggttgcagcacctgtaatcccagctactcgggaggccaagacaggggaattgcttgaatccaggagacagaatttgcagtgagccgag

SEQ ID NO: 614020 - DNA, 749 bp, Homo sapiens
  misc_feature (159)..(159): n is a, c, g, or t
cacagtgttcaaaattttatgaaaagtaattgatctaacgtgcctctgatactagatgtggtactgccttctccctggtctgttgatttatccttgaatctagactcaaaggatatcacctttgagaattaattggcgttaagccctttagctttaagntctaaagactcaaaataatgactttttttttttttggcgagggagttctccactcttgtgttccaccagttgtgtccacccaggctgaagtgcaagggcattgactcctcggctcacttgccaccctccacgttccgtgggttctcaagcaattttcctggcctcagcctcccaagtagctggggaatacgggtgcacaccaccacaccggggctaatttggtattttagtagaagatgggggttctcaccatgtgggccaggatggtcttgaactcctgatctcagggtgatcttgcccacctggggtccccaagtacggggattacagggcgtgagccaccgtgcccggcaaaataatgactttaaatgtgatatcagtgtggattaccatagtaaattaatcctattagaaataatagaatgcttatcacgtgggatggtgaaataaaatatatcgtatgcgagtaaatggtggggtgccctttcatggtggggacaacgtttcttgtggtttacactgtcggaatgtgcctgagaatcctttgctttcggaatacttaaggaatctttgcaacaaaggaatttagg

SEQ ID NO: 614021 - DNA, 1239 bp, Homo sapiens
  misc_feature (737)..(737): n is a, c, g, or t
  misc_feature (739)..(739): n is a, c, g, or t
  misc_feature (741)..(741): n is a, c, g, or t
  misc_feature (753)..(753): n is a, c, g, or t
  misc_feature (756)..(758): n is a, c, g, or t
  misc_feature (1008)..(1008): n is a, c, g, or t
  misc_feature (1017)..(1017): n is a, c, g, or t
  misc_feature (1089)..(1089): n is a, c, g, or t
  misc_feature (1108)..(1108): n is a, c, g, or t
  misc_feature (1171)..(1171): n is a, c, g, or t
  misc_feature (1173)..(1173): n is a, c, g, or t
  misc_feature (1222)..(1222): n is a, c, g, or t
aaataaacaatccaccgaagaaaatatcaatgggctagagatagatataatgttttagaatactgaatgggtggaggaagcatggggcaagataaaggaattgggcactccccacccccctcttactcttctcccgtgggacttggagtcgaatggggcgggacttgagtccctgaaccagcagagagaaaagagggagccccagaaatcacaggtgggcacgtcgctgctaccggccatctcccttctcacgggaattttcagggtaaactggccatccgaaaatagcaacaacccagactggctcctcactcccttttccatcactaaaaatcacagagcagtcagagggacccagtaagaccaaaggaggggaggacagagcatgaaaaccaaaatccatgcaaatgaaatgtaattggcacgaccctcacccccaaatcttacatctcaattcccatcctaaaaagcactcatactttatgcatccccgcagctacacacacacaacacacagcacacgcatgaacacagcacacacacgagcacagcacacacacgagcatacagcacacacacaaacgcacagcacacacagcacacagatgagcacacagcacacacacaaacgcacagcacacacacgcacacacatgcacacacagcacacaaacgcacggcacacacacgcacacacatgcacacacagcacacacgcaaacgcacagcacacacanangnaagcacacacgnaannnagcacacacacgagcacacagcacacaaacgcacagcacacgcacacacatgcacacacagcacactagcacacagcacacacacaaagacacagcacacacatgcacacacagcacaaacacgcgaacacagcacacacgaacacagcacaatcagcacacacacaaacacagcacacatgctcacagcacatgcacacacagcacacacatgaacacagcacacagcacacacatgcacacagcacanacgcatgcncagcacacatgaacacagcacacacaaacacacagcacacacatgcacacacagcacacacactcatgcgcnacaatacatgaacacagcncacagcacaaaaacacgcagcacacacgttgcacacgctagctcccacctgcacacacacatncncccacacacgcacacccccacaaaattggatgaaacaataagctatctnagcactacgatatctgt

SEQ ID NO: 614022 - DNA, 657 bp, Homo sapiens
gacgtgctggtgtcctctggtgcaagaattccaggaatatgccttgcgggtctgtctcggctagagagctgttaattcatagttgtgtctgacataccactaccgagcactacagaaaccgtgtaatatcatcgtgccgctgaaggggactcagaagggagcaggcatgagaccatgcactgtcccgactgactcggtgtgggttgactagtggtgatgggcaccggtcaatcagaggaggcagaatctagaggctcaagtccaggacaccgtgtcctatacctaggcaggtgggttccattctggacgagccggaacaggtcaaaccccgttagccatagaagcatgcgcggtagtgcacgtaagtcagtctgtctcgaaaggcatgacatgcgagtgacgttccacctaaagtaggagagcaacaattacaaaggaggcagcatggacttttacacaggtggtctccgtggccccaaggtggtcaacgagggggaagctctagtgttaccggccacagtagggggaagggtggctcgcacacaggcaagcgtaatgactgggggcccctcccgcggcaactttggagcattttacaacaggtgcgctttgagtcgacgtcagagttatgcactgctttgaccttgtcgtacagca

SEQ ID NO: 614023 - DNA, 1071 bp, Homo sapiens
  misc_feature (569)..(569): n is a, c, g, or t
  misc_feature (571)..(571): n is a, c, g, or t
  misc_feature (573)..(573): n is a, c, g, or t
  misc_feature (585)..(585): n is a, c, g, or t
  misc_feature (588)..(590): n is a, c, g, or t
  misc_feature (840)..(840): n is a, c, g, or t
  misc_feature (849)..(849): n is a, c, g, or t
  misc_feature (921)..(921): n is a, c, g, or t
  misc_feature (940)..(940): n is a, c, g, or t
  misc_feature (1003)..(1003): n is a, c, g, or t
  misc_feature (1005)..(1005): n is a, c, g, or t
  misc_feature (1054)..(1054): n is a, c, g, or t
tattggtaatgctgactgagtcctgacagaagagaagaaggccagaatcacaggtggacgtgtgtaggccatctcccttctcacgggaattttcagggtaaactggccatccgaaaatagcaacaacccagactggctcctcactcccttttccatcactaaaaatcacagagcagtcagagggacccagtaagaccaaaggaggggaggacagagcatgaaaaccaaaatccatgcaaatgaaatgtaattggcacgaccctcacccccaaatcttacatctcaattcccatcctaaaaagcactcatactttatgcatccccgcagctacacacacacaacacacagcacacgcatgaacacagcacacacacgagcacagcacacacacgagcatacagcacacacacaaacgcacagcacacacagcacacagatgagcacacagcacacacacaaacgcacagcacacacacgcacacacatgcacacacagcacacaaacgcacggcacacacacgcacacacatgcacacacagcacacacgcaaacgcacagcacacacanangnaagcacacacgnaannnagcacacacacgagcacacagcacacaaacgcacagcacacgcacacacatgcacacacagcacactagcacacagcacacacacaaagacacagcacacacatgcacacacagcacaaacacgcgaacacagcacacacgaacacagcacaatcagcacacacacaaacacagcacacatgctcacagcacatgcacacacagcacacacatgaacacagcacacagcacacacatgcacacagcacanacgcatgcncagcacacatgaacacagcacacacaaacacacagcacacacatgcacacacagcacacacactcatgcgcnacaatacatgaacacagcncacagcacaaaaacacgcagcacacacgttgcacacgctagctcccacctgcacacacacatncncccacacacgcacacccccacaaaattggatgaaacaataagctatctnagcactacgatatctgt

SEQ ID NO: 614024 - DNA, 102 bp, Homo sapiens
tctgactacccggagacataaaacaccccaaataggaactttagagggattgaaatctgttgcctgttccactaggaatattgtttgcaaggcacaaggtgt

SEQ ID NO: 614025 - DNA, 1085 bp, Homo sapiens
  misc_feature (583)..(583): n is a, c, g, or t
  misc_feature (585)..(585): n is a, c, g, or t
  misc_feature (587)..(587): n is a, c, g, or t
  misc_feature (599)..(599): n is a, c, g, or t
  misc_feature (602)..(604): n is a, c, g, or t
  misc_feature (854)..(854): n is a, c, g, or t
  misc_feature (863)..(863): n is a, c, g, or t
  misc_feature (935)..(935): n is a, c, g, or t
  misc_feature (954)..(954): n is a, c, g, or t
  misc_feature (1017)..(1017): n is a, c, g, or t
  misc_feature (1019)..(1019): n is a, c, g, or t
  misc_feature (1068)..(1068): n is a, c, g, or t
ccacacaccacaaaacaccacacacctcaaaacatcacacacaccacacacaataccacacgatatatacataccacacacacaacacacaccatacaaacacagcacgcaccacacacacaacacacaacaccatacatgatatatacatacctcactcccttttccatcactaaaaatcacagagcagtcagagggacccagtaagaccaaaggaggggaggacagagcatgaaaaccaaaatccatgcaaatgaaatgtaattggcacgaccctcacccccaaatcttacatctcaattcccatcctaaaaagcactcatactttatgcatccccgcagctacacacacacaacacacagcacacgcatgaacacagcacacacacgagcacagcacacacacgagcatacagcacacacacaaacgcacagcacacacagcacacagatgagcacacagcacacacacaaacgcacagcacacacacgcacacacatgcacacacagcacacaaacgcacggcacacacacgcacacacatgcacacacagcacacacgcaaacgcacagcacacacanangnaagcacacacgnaannnagcacacacacgagcacacagcacacaaacgcacagcacacgcacacacatgcacacacagcacactagcacacagcacacacacaaagacacagcacacacatgcacacacagcacaaacacgcgaacacagcacacacgaacacagcacaatcagcacacacacaaacacagcacacatgctcacagcacatgcacacacagcacacacatgaacacagcacacagcacacacatgcacacagcacanacgcatgcncagcacacatgaacacagcacacacaaacacacagcacacacatgcacacacagcacacacactcatgcgcnacaatacatgaacacagcncacagcacaaaaacacgcagcacacacgttgcacacgctagctcccacctgcacacacacatncncccacacacgcacacccccacaaaattggatgaaacaataagctatctnagcactacgatatctgt

SEQ ID NO: 614026 - DNA, 112 bp, Homo sapiens
ctcggcaccccagcgcgatgcgtacgaagtggtggcatggtgatcccctgtgcggtaggggccgggttctcgtgtcgggggactcacacggcccggtatttccgttcatgag

SEQ ID NO: 614027 - DNA, 1220 bp, Homo sapiens
  misc_feature (718)..(718): n is a, c, g, or t
  misc_feature (720)..(720): n is a, c, g, or t
  misc_feature (722)..(722): n is a, c, g, or t
  misc_feature (734)..(734): n is a, c, g, or t
  misc_feature (737)..(739): n is a, c, g, or t
  misc_feature (989)..(989): n is a, c, g, or t
  misc_feature (998)..(998): n is a, c, g, or t
  misc_feature (1070)..(1070): n is a, c, g, or t
  misc_feature (1089)..(1089): n is a, c, g, or t
  misc_feature (1152)..(1152): n is a, c, g, or t
  misc_feature (1154)..(1154): n is a, c, g, or t
  misc_feature (1203)..(1203): n is a, c, g, or t
aaataaacaatccaccgaagaaaatatcaatgggctagagatagatataatgttttagaatactgaatgggtggaggaagcatggggcaagataaaggaattgggcactccccacccccctcttactcttctcccgtgggacttggagtcgaatggggcgggacttgagtccctgaaccagcagagagaaaagagggagccccagaaatcacaggtgggcacgtcgctgctaccggccatctcccttctcacgggaattttcagggtaaactggccatccgaaaatagcaacaacccagactggctcctcactcccttttccatcactaaaaatcacagagcagtcagagggacccagtaagaccaaaggaggggaggacagagcatgaaaaccaaaatccatgcaaatgaaatgtaattggcacgaccctcacccccaaatcttacatctcaattcccatcctaaaaagcactcatactttatgcatccccgcagctacacacacacaacacacagcacacgcatgaacacagcacacacacgagcacagcacacacacaaacgcacagcacacacagcacacagatgagcacacagcacacacacaaacgcacagcacacacacgcacacacatgcacacacagcacacaaacgcacggcacacacacgcacacacatgcacacacagcacacacgcaaacgcacagcacacacanangnaagcacacacgnaannnagcacacacacgagcacacagcacacaaacgcacagcacacgcacacacatgcacacacagcacactagcacacagcacacacacaaagacacagcacacacatgcacacacagcacaaacacgcgaacacagcacacacgaacacagcacaatcagcacacacacaaacacagcacacatgctcacagcacatgcacacacagcacacacatgaacacagcacacagcacacacatgcacacagcacanacgcatgcncagcacacatgaacacagcacacacaaacacacagcacacacatgcacacacagcacacacactcatgcgcnacaatacatgaacacagcncacagcacaaaaacacgcagcacacacgttgcacacgctagctcccacctgcacacacacatncncccacacacgcacacccccacaaaattggatgaaacaataagctatctnagcactacgatatctgt

SEQ ID NO: 614028 - DNA, 143 bp, Homo sapiens
  misc_feature (40)..(40): n is a, c, g, or t
ggtcggcctgtgttagcacaaatatgtatatggtggtcanctaatggctcatgccagcaccttgagaggcaaggtgggaagatgacttgaggccaggaattcaagaccagccttgtgtaacatagcaagtcctcatctctacc

SEQ ID NO: 614029 - DNA, 239 bp, Homo sapiens
agccaaagggggaggatcccccttatcccccaagttcaagaccagcctaggcagcatagtgagaccccccatctctataagaaataaaaaaatcagctggatgtggtggtgtatgcctgtagtctcagctactcgaaaggctgagtcaaaaggattgcttgagcccaggattggaggctacagtgagccatcatcacacccctgcacacctgcctgggcaacaaagcgcaaccctgtca

SEQ ID NO: 614030 - DNA, 491 bp, Homo sapiens
ggggggcccccccggggggggggccctttaaaaaaagggggcccccccgggccccgaaatttggcccggggggggggggtccccccccaaaaaaaaaaaagggggccctttttttttttttttttaaaaaaagggggggttttttatgttttttccacccttaaaaaaatttgggggggggaaaaaaattttaaaaaaaaacccccccctttagggggttttgggggggggtttttttaaaaaaatttgttgggccccttttttttcccctttttccccccaaaaaagggggggggtttttttccccaaggggttcttttttttaaaaaaccccctttttttttccccccttcttttttttttttttccccgggccccccaaaaattttttttttgggggccccaaaaaaaatattgggcccccttttgggtttggggggggttttaaaaaattgggaaaaaaaaaaaaaaaaccgggttggggtttccca

SEQ ID NO: 614031 - DNA, 359 bp, Homo sapiens
aaacaggtgctggtcccagcgtgcaactctgatcacattatactgatcgttctgggtggatgttagcatagtactatttaccatgcatcctgagtactagttggaagcaacgttgtcatctataaacagcaggttttgatcacaatctgttctacatcttaatgatgtgatcttctcatcatgagaatagcctgaaagccatttacttaggactacattgtgctctgatgaactatcccctgcgctttgaacgtgccagcagcccttgtttatatgcccattcttttcacttcctctccacaggagcctctgcagtcgcttgccaaagcagattttcctaaggccactgttttaaaaga

SEQ ID NO: 614032 - DNA, 136 bp, Homo sapiens
  misc_feature (129)..(129): n is a, c, g, or t
gtggttgtgggtagagccatctgcgatctgcatcatcatgctcttttctccatccacctcaccagactgtttctcaagagatggctttccaggagtgagtcggtggaggaagagacgtatcagaggtgncccaggg

SEQ ID NO: 614033 - DNA, 537 bp, Homo sapiens
gtctacagctgtttagaagtgaagggggcagtgatgtgtgcaaggggaggagcggcaacaggatagcagcagggggaggcctgtgactcaaagaggtgtgaggctgagagtgcttgatcagatcatgttcggaaaagatactgtagttgtgggatagcagatgaattggagggaagagagcagaccaaggagagcatcacaagagtccatgaggagatactctacaggagtgctccggaggcagaggaattgccttgaaagacgtggcgtgtcaggaaacataagccaatcactcctggttatcacttcacacggcgacattggcgattactgattgctaactgctaccttcgctgtttgccctgtggctttctattttttagaggcagagctctctgttggcccaggtggagtgaagtgacgcgatctcggctcattggcacctccggcccccggtgcccagtgattctcaatgctcagcctcccaagtagcttggaccacatgcatgcacccgggggtaccgaagctcgaaatcg

SEQ ID NO: 614034 - DNA, 416 bp, Homo sapiens
agcgctcatttatggctagagtcctttcccctgtgacatgcgctacgccatgagggtcttgtacatgatgaaacagatttgggcgtgagagggcattcagaactgtagagcagcaggaggcattgggcaccttgccatcagggagcctggaccctggacactgagccaggtgccctacagaagatggctgtccctctcgacaggtagagacccctgagataacagcagcatctaccgaaagattggcgagaacagcacggtgagtggacagggtgaggcctcagactatgactgggatcagggttacgtctgtacccaaggacaggtctcagtgtgtgacccaggttggggctcactgtctgaccaggatcagcgctctgtgtgcccaggctcaggctccggtgtgtgtctgcgat

SEQ ID NO: 614035 - DNA, 287 bp, Homo sapiens
tcgtcagtgccttgacatgaaaagattttggtcaggctaattacagtaattgtatttagtcattctgacttggtataatttcctgtcttgtcggtaatgtatagttacacctaaacaaaacagagttaatctcttttaagtaagagatggcatggctcctttgtagtgtgcgtattaacctaaatgggaaagcctacataggactaggttctagttcaggaacactcctgccttggaataccccccgagggcctgcagagcgaatgaatgctccctgtgtgtgagtt

SEQ ID NO: 614036 - DNA, 111 bp, Homo sapiens
  misc_feature (78)..(78): n is a, c, g, or t
ggtgaaaaagcgaaacgaatgcggcaggcgcgcgctttatccgcacgcgaaaataatttccggagtaaacgccgaaanagtttggccgcaaaaagtaagttacccacccag

SEQ ID NO: 614037 - DNA, 748 bp, Homo sapiens
agcgggtggctgggtgccaccctcgtggaaggaagagtctgtcgcgagcgcgagcttctgagctcgacggtgcctgagctggcagctggttgtgtgcttacaacttgagacgagcatggacaggtccttccacgtgctttctggcggcagacatggagcatggaggagttgggggatccgagaggaatgtggcgtgtacgggatgcataagactcagagagagtgagaccaacgacaagcatgggatgtaaccgcactgtgatcaacatctggaggactcgtggtggctagcagacagcgagggtcacggagaagtgcttggtatcagtgactacgtgatgggagttcggtgcaaacattcaaatctacaccaagggaatgggtctagtaaaatcaacgtactattactgaagacaattagaacaaaagttatatgtattcacatcttgaaaattggaacacaaccagagtatgcacagcacaggaaacatgtgaagctaggaaaattgtcagaaccttcagttgtatgaaacacttcatggggaaccgaataagcattgatagcaacaatacacatgagacgaaactaaggataaaatgccttgactcgaatttaagtgaaaaaaagatttcttgaggtcataggtaatatgggtcctggtctaaaaaagttactgaattcgatgaacatggatatacccacaaataactggcaggtatacaccactcctacaagaacgaagaatga

SEQ ID NO: 614038 - DNA, 1042 bp, Homo sapiens
actccttaagtgctgggataataggtgtgagccatcatgggttgaccataaagccttactatttcttgtggagacatagctcgttgctcatgtccaagtctgaaatgcagtgatgtgatcatggctcactgcatgcttgaactcccaggcttaggagatcctcccatctcagcctcctgagtagctgagattataggtgcataccatcgagccttgctatgatcattaaagaatttctcttaattttcataccaacaaatgtagttcgctgtatgggagctgagggttagaagggaaagatgctggagaaaatgagaatcatacgcagggtgtatactgtcagtgaatacggcataagacgtagttaatatgaacgtttctgttctttggaagtactaatgttaggtttgaccaaaacgtaatttgctgaggggaaggagggttgtgtatatatgttactattctgaatgttttgcttccgatagatatctgtgtacgtaattacagcttgtcgtgtagtgctgtaattacgctatctgcgtgtgggctaactccttttatggagagctgtctttttattttgtacagggggcctgtgtccggttccacatagttgctctgaaatgtgtatataacgcatggactgaactggagaactagtagcgtgacactaaggtagatttaaaggatgtttagagacacagttataggataggcctgattgctccagataccctaaattgtattgccttcaggtttgtgtgaaaaaacagcgagaaggctatatattgctgagtgaggctaccatttgatacgtacattcacgtgatgtggcgtcaacataattgtagcgacgacttacaaagggggatccccatcctgataaatagacgggcaaagagtgaaggaagagacaattgtaatatagcaaagaggagtttgaaagagcatgcataagtgactaagaaaagatcatagaaaaagataggcgcctgaaagagagagcacaaaagacaaagagaaagtgagggaatactaagcg

SEQ ID NO: 614039 - DNA, 446 bp, Homo sapiens
gaaagaaacatttgggcttgagaatgagtttctaagaaggtagagtggatcagcactcttttcccagaaatttccatcttgatcttgattcctgactcttgtagcctgttcttcgtatattttacaataaggaatgccaacagtgtactaggagccagggctctcaggctagtgttacagagttgtagggaaattctaggatgaagtttttgctgggacaaagcagatgaaagagttgagtttttccagatctggagcttacctgttggggatgctgtagacatctagaggcagcagggatatcttcagtctttattgtgtagtgctggtttgtttattcagaccttctttaatcttactaataaaactcttcacttgaagacctttcagtccttgcctgtgaaaggcatgattgttcttcttgaagtcacatgcttttgatttct

SEQ ID NO: 614040 - DNA, 357 bp, Homo sapiens
atggaatggaatggaaaggaaaggacttgaatggaatggattggacccgaacggaatggaatggattggaatggaatgcaattgaatgttattgactggaatggaatggaataccatggaatggaatagaatggaatgtaatagaaaggaatggaatggaatagaatggaatggaatgaaatggaatggaattgagtggaatggaagggaatgtagtggaacggagatgagtggaattgaatgaagtgtatttgaatggaattgaatggaacggacttgaattgaatggaaaggaatggactcgaatggaatggaaaggactggaatggaatggaatggaatttaatggaatggact

SEQ ID NO: 614041 - DNA, 208 bp, Homo sapiens
atctcgcaggagaagtagaagccatcagaggggaccgtccttcaaagtacggggcaccaaacctcagcatgtacctggacccactctgtcgtcctctgtttccttggggattgaataagagaggtgccgctcgaagccggggccggggtgggagtcggggcgtctatcagttgtggcttcttttcggatgatgtgataatccgcgacc

SEQ ID NO: 614042 - DNA, 350 bp, Homo sapiens
  misc_feature (5)..(5): n is a, c, g, or t
  misc_feature (32)..(32): n is a, c, g, or t
  misc_feature (43)..(43): n is a, c, g, or t
  misc_feature (49)..(49): n is a, c, g, or t
  misc_feature (65)..(65): n is a, c, g, or t
  misc_feature (78)..(78): n is a, c, g, or t
  misc_feature (87)..(87): n is a, c, g, or t
  misc_feature (121)..(121): n is a, c, g, or t
  misc_feature (223)..(223): n is a, c, g, or t
ctgtnattctaaaactctgcttttaagtgctnaactgaagctnaccttntattcattttcaaaanacggtcctgctgnagaaatggngccattcacatcttaggaaactatcacatattanatgtgctgcactcaatttacaaatagaccacacatcatcaccggtttccaaatgacagcagatgggctgtattattcaaatactcatcacaccacacaatanggaaaaaaagattcatgacctggtcatggctcctggatgcttgaaagcatcagaaacagaagttgtggtctgggagttcatctcctttccttggctctgaatattaggaactttttttttttatttg

SEQ ID NO: 614043 - DNA, 169 bp, Homo sapiens
gcgcggatgagaatggcttctaaaagtggatcttggggatccgtgtgaatttgcacacctctgtcccctaggatggggaactaagggaaaacgtctgttgtatcacatgccgttttttagtttaagtttattataccgtgtctagaactaaaaattggcaagagttttt

SEQ ID NO: 614044 - DNA, 470 bp, Homo sapiens
  misc_feature (131)..(131): n is a, c, g, or t
  misc_feature (133)..(133): n is a, c, g, or t
gaagtgtgaggtgaccttgcaggtcccagagttgattgaagaccccatccagaaagaaggcaccctgtgggagagattgcaaggcctaggtctgaatccggaagcttccaccccatggagaaggggctggncnacgcctggggctggcattggagctgagctttggagccaaggactgtactgcagtgcagggagagtgaggccagaaaggctgagacaactcagggaaagaaaacctcccttctggctaatagtcaagcaccgcctgagtagaccaacactctcctgtccacaggggcagcagatgaagacacaaccagagaggactaacaggccccctcagctctcagtcagagggcagagcaacacagaatagacattaaaggaacagactttgaggccaggcagccttgggtgtgcatctgtccctactaagccatgtgacattaaacaagtgagtccacctcaaa

SEQ ID NO: 614045 - DNA, 378 bp, Homo sapiens
atacagtgtacaaaggaatcttacgaatgagaaatgagctgaactttaagataggtatagaactcctggcttcaaatgataccacccaactttggcctcccaaagtgctgggataacaggtgtgagccaccgggcccagatggatacatactattgatatactgcttttaattgggctattcgctcgaggtgaccccatggactggtagatcaaattggctttcaagctattagtttctaagggacatccttgcactatctgactgtttcctaagaagagcgttaggaaaaatttacaccagctaagaaacaaaattaagacataactctgaaatgtggctatggtaatctatactttaaatatgggaaatgaagatc

SEQ ID NO: 614046 - DNA, 101 bp, Homo sapiens
ggttggccaagaggagcggaagggccgaggaggaaggccaacgttaacttccggaggaagagaccaaggaccagggagagaggacacacagcgcgccccag

SEQ ID NO: 614047 - DNA, 1291 bp, Homo sapiens
  misc_feature (770)..(770): n is a, c, g, or t
taacaattttcctgggaaaatcatgcaaggctgtgccagaattgtggatgtgcaacccgggggccacaagttctgtgcaaacctcctttgtgcatacgtggctccgtgttaagtggcaaaaccttttaactcttcgcctttaatgtgtcacttagtaacctccgtgcatttatcttctcaaaatataaaagaaaccacgcgcccatctctttttctagcggatatgtgactcttctgcggtgtgtctcaaatgtgacccaccgtggcgtggatgtgttacccttttattctcgtgaagccctcgtggtgtatggccctttcttgttgaagcgtggtgggccccctttccacccgtgtggttttccccccaccaccccgagccgagcgcgggggcagagtcctgtgtgtctccagccgcgtgtcgcgttaccacgctgtgggcccggggggtttcaactcgcgtgagaggggggtgcgcgaactccctcgccgcggcgtatggggtgtgtcacccgccggttaccctcggggggccccccagcggtctcacgcgggagaagctcgtgtgctcccagagcacacatgtcggggttcccgccgaagcggggctctacaacactgtgtgggggcgcgccctgtgtgggagcgcgccctctgtggaggctcgtgtgtttgtgtgtgggcccccccgccgatattggggggcgagtgtagaaatacccgtcgggacatcgtgtgggttcaccctctttaaaccattaccaaagttnggcccacaaggctcttatcagcaagacgaggagacactacactcttcaacatctaacccaacaagaaaaccgtcttttctaacacgaggacattgtcggcttcctggggcgtgacccccctggggggggggcggcgcataaaggatctctcactttccccaaaccacctataaggaacaaccccgtgggttggtcgcacctcctgtgggtggaggcgaaagcgcacgcctaaaagacccctcttccagagacgaatggttgaccaccatcaggagtgagagaaataaccccccagcaagagggtactcaaaacgatatctacaggagggcaccttactctatatagatattcttctctccgtgcgaaacacacacgcgggctgttcagtagtactattattcaaaaggcgacgcacgcggtgtggactatttataaacacgcctacctttgaaaaccctgtggtcctcagggagccccgcggagattttgtaacaacacgcacaagggaaggaccaatgtc

SEQ ID NO: 614048 - DNA, 308 bp, Homo sapiens
caaagatccaggaaaatggtttttttgttttaaaaaacacaaacatttgaccaaacaagggaggcaggtcttttggcctaagggaacccaaggggttttgcggatgtggctcctccagggatttgggggttccccaccggctggttaggggtctaggttttggggaggaccttattttgggggggctccaggttttggggttgggggctttttaagggtttatggcctttatcccctaaattcctcccaattgggggctccaatttgtcgggttttccagggcctggttaaggggtcctggggggagg

SEQ ID NO: 614049 - DNA, 665 bp, Homo sapiens
ccagaccgtgtatcctgctctccccacatgaccccccactcccgtgggtaccaatcggccacagaagctccagaaccagttatccagatgctgaagaaaagttggacccggagcccatgaccagtcggacaggggcccatgaccagtcggacccgccagcccatgaggaactagaccggggccccgacaagtcagaccggggccacgacaagtctgacaagggatcgagagcgtggctatgaccaggtagacagagagagagagcgagacagggacgggatcgggaccccgggtatgaccaggcagaccccggaagagggccaagaacggcggccccaccaatcgccggggaggagctggctccctattcccagagcacagaaggccgtaagccgaaaggatgaagagttagaccccctggaccctagctcatactcagacgccccccggggcacgtggtcaacaggactcccccagcggaatgaggcccagactggcgctgacaccaccagcagctgggcccctcttccagcagcggccgtatccatccccaggggctgtgctccgggcccatcagaggccttccgacccagcagcaggattgaagcttcggcctcctggcctgggttaaaataaaagctttttggtgatcctgccccacacca

SEQ ID NO: 614050 - DNA, 972 bp, Homo sapiens
ctgccttctctttgagcgccgccgtttctgtgtaagagttgttccccggtgtagtctgctgaggaaactctttgtggccgcaatacctgtggtgtgccgggcctctttggagggggtgttgcccgccccccgtgggttaagaggacccccgtggctcagtaacagagcgccggacctgtcccccaacgacagtggccgaagctcctggtcgtgttatggcgccccacacgctccgggcaacaatttggggcaggcccctgcccctgctagcggggatctcttgccccgttcaccccgtgccgtgtgtccctcagcaggtgcttgtccttgagacacctggttcttacagccctgcgcgtaccatcgcaggctcgtggccccgctatgggccacatcccccaggggagtgttcttccttggttgccccctccccccaggggtagagggcgcttttatttttcccttccgagtggcgcagcaggcacctgtttattctattgaacgacggaccacgcgctcctcttttgtgactaaggtcgagccccaagtgctgcccgcgtcttgtaaaggcgcagagtcgacgcaccactgagcatgtctctataaaggcctctaaaatcatctccccgggtggtccgacagacactacatggcgaaaaaacaccttctctgtgaccccaaccaatagtgtacaattatatcaccttcagatggagtataaaaatatattatggcacctcagtatacttgaagtgagcaccacgtcttcgcagaagcctgtaactccccactggagtgacaaaagaaggtaacaattgtcaaactatacatcttgaactttctgattcaactttttgaattttctttcagatagaaaataaattcaaatttttccggtcccttttacaattcatttttaccaatagtagcgggccctttaaaaaaaattgctttctacccccccacataaca

SEQ ID NO: 614051 - DNA, 188 bp, Homo sapiens
ttcacaggatctccaaagatctttgagcatacctcaaaaaagaaaagcatccccattagcagtcattctccaacctccattccttgaatccctggcaaccactaatttactttctgtttctatggacttgccaatcccataccctgactttttttttttttttttttggaaacaaattctcattctgt

SEQ ID NO: 614052 - DNA, 730 bp, Homo sapiens
cgcagagaggatgagatgaaggtaagtgagggatttatattcaagaaatggtgtaggtagattgtggtagggtaggcgtaggttattataaaggagaacgatagaagagatggaattggcgaagatggttaaagacaagcattgagatctatgaagggctgatgctacgatgaatggcgtccttaaagaggttagcctggagtgatggcaattagggctccacttgggaaccagtcgtggacgacgggttctttcataaggactatcaggggttcgtgaaggttataatataagtagcagtgtgtaagagtctgttaaagattaccagttaagcagaattgagacaaaatgggccaaagaccaggtcttcagaaagacggctttgtcaagtctttgcaaaatatcttcacaagtccttcacgaggtgtttaggaattagtctctatgcaaagtctctagatgaaaccgcgtaagagtttggtagggtaataacgacagtgtataatggcttagataggtgaatggtaaatggaatcgtatatgcattaggtcacagtttagagcgggcgtagcactgcgattgtactgtttctgccacaagccaagcagtgaaccttcagatgttgtcctactcagttcagggcgaccagctatcatgtcatcagtacagctctacttgtattgcagatggaagatttcagaataccgcttggatcacatgcaaatgtcc

SEQ ID NO: 614053 - DNA, 746 bp, Homo sapiens
  misc_feature (496)..(496): n is a, c, g, or t
gccctttctttgcggaatcaccatggcggttgggaccctgtacacgtatcctgaaagactggagggccattgcaaggctctctatcgtctgtctcagtaccagcggggctcaggtccgctgtgctctccggcaccactcctcaacgttccaattttatggccaaaagctaactcagcagccccatgaacatttcgtccagtcgagaaatttcggtgcacggacaaaggtcgccagcaatttgagggctgatgatggattctggtgatgttctgagaagcgaacgcccaattgccgtacgtatggtgagcgaatgtaggacgctgcgagggtaagtgactccaagaggtcaggcagcgcacgaaggttggatgctaggtgtgagttgaagctattagtctagagtttcctgcatatgagtgcgcaccactaagcctagctaccataggggtgttgcccgcgaccattgggtcatcaatgcagcacaaagaacaaacnaggccactgagcacatgcgaaacggacggaaagtcgagcgcgacatgtctcggaggctagcaggatcgctatactttgtagagaccgaggacgtgtgaacgtggagtcgggcgcaaggagtgaccattaggctcgacatatcacagtttgtcttgcacccgtggttgtggctctaataagcaagggttctcagagcccttctttccggccaggccctttccacaatacccaaccgctttggtttcctcca

SEQ ID NO: 614054 - DNA, 701 bp, Homo sapiens
  misc_feature (172)..(172): n is a, c, g, or t
  misc_feature (177)..(177): n is a, c, g, or t
  misc_feature (179)..(179): n is a, c, g, or t
  misc_feature (182)..(182): n is a, c, g, or t
  misc_feature (187)..(188): n is a, c, g, or t
  misc_feature (190)..(191): n is a, c, g, or t
  misc_feature (213)..(213): n is a, c, g, or t
  misc_feature (229)..(230): n is a, c, g, or t
  misc_feature (237)..(237): n is a, c, g, or t
  misc_feature (241)..(241): n is a, c, g, or t
  misc_feature (259)..(259): n is a, c, g, or t
  misc_feature (273)..(273): n is a, c, g, or t
  misc_feature (321)..(321): n is a, c, g, or t
  misc_feature (337)..(337): n is a, c, g, or t
  misc_feature (345)..(345): n is a, c, g, or t
  misc_feature (350)..(350): n is a, c, g, or t
  misc_feature (375)..(375): n is a, c, g, or t
  misc_feature (400)..(400): n is a, c, g, or t
  misc_feature (449)..(449): n is a, c, g, or t
  misc_feature (451)..(451): n is a, c, g, or t
  misc_feature (464)..(464): n is a, c, g, or t
  misc_feature (468)..(468): n is a, c, g, or t
  misc_feature (481)..(481): n is a, c, g, or t
  misc_feature (487)..(487): n is a, c, g, or t
  misc_feature (498)..(498): n is a, c, g, or t
  misc_feature (517)..(517): n is a, c, g, or t
  misc_feature (519)..(519): n is a, c, g, or t
  misc_feature (525)..(525): n is a, c, g, or t
  misc_feature (559)..(559): n is a, c, g, or t
  misc_feature (582)..(582): n is a, c, g, or t
  misc_feature (599)..(599): n is a, c, g, or t
  misc_feature (609)..(609): n is a, c, g, or t
  misc_feature (618)..(618): n is a, c, g, or t
  misc_feature (631)..(632): n is a, c, g, or t
  misc_feature (690)..(690): n is a, c, g, or t
ggggcgtcctcctgcgcgcccccctccccagcgtcccacctcccggcggcggcggggaaagtctctccgaaagcgtgaagggggattggaggaggtttttatttccctttgtgcgggtggctggggccggatcgaggcggcgggggccgcgggattgggggctccccgctgngccgngnggngcgcnncnnaggatgcgtcccgccggggtcncagtctccgcggcccnnctttgcncgcngcgcccgccccctggggngcccgcccgctgcnctgagaacccaggcgtccgggctgggagaggggccgggagcgtccgcngtggcgctggcccggntctcccgnccccnggaagggatcccggagcttcctggnggcggcgggcggccgtgtcgctccngggaaccgcgctgcccgcggaaactccgcgcgcctccgcggatgccccncnccccccccccccncccncggggttcggggncctgcnaggtccccccntcccccgcggtgcttcccnanctgggntaaggcggggttctcttcctccctcctctgtcgnctccttttcctccccctcgttcnccttttccttccctctntccatccagngccccgccncagggggcacctnntctttctcatccttccctgctcttcccttcctctccacctcctcctcctccttggggncaggggcccgg

SEQ ID NO: 614055 - DNA, 693 bp, Homo sapiens
tgcgacctttctctggagaccttggcgcctttggcctgtggtcgcgactggcggcatggtaacctcactgccccgtcactcccttccaaggcgaacagtacccatgcccacgtccggagcagcgagcgtggggtcagctccagcatggctcgggtcagtgcctgtgtctggtgtgggccactcagcgagagttgggttttcaggccagagatgggcttgattccacctggtggggtggggtggaccctggagactctcatcgtgatgtggccagcctgccccaaggctctttactgatgtcagaactccattgtttgcgacctgctgggtatggcctttggggcggccggcccggtagggtcttagtctaattaggtgtgtccagcttcttggccacctttccctggggaccctaacaggcccgatagccagagcccacttatctcccaggtcagactatctgctcaggccctctccctcccatgcaggccgatgtacgaactgcagacctctctggacgtcgctagtccagactggggacaactgtgggttcctgtgggtcctcccgggtaccgttctgaccccatgccaccttggcgtggcatttagaatgcctcggggtaaccctggtccttggttaagcctccttggttagtcaccagctaattccgtcccgtgaacttttggcccgtc

SEQ ID NO: 614056 - DNA, 466 bp, Homo sapiens
gtttagaaatattgtttccatattacaagtttaaggaaaagtttatctgccaaaataataacatggatttctagagcaccccataccataaggaggagccagaatattttccagctgaattccagtcttactcattttccttgaatgatactgaaatctaaattatccttgaacacaaacaatgacaaagaaatacaaatgttcatgcagtgtaattttcaacaatcaaattggccaatctgattctaattttaagctttgctgaggatgccaagcagaagccacgtgagcacactgctgaacacccaggatctttccatgtatggcagccttcatgtgagttctcttctcaccatacaatgttgtggatacagaagggaaggaattggatttggatgagtactgagcaccgatcacaggacagagcctcaaagttgctttttggaataaatttcttatagtaaaa

SEQ ID NO: 614057 - DNA, 1174 bp, Homo sapiens
gcgaactgaccgtggtcgtgggcggacggcggctgcagcgcggaggagctggggtcgctgtgggtcgcgaagcagagcccgggacgtgcgcgcttgtgtgcacgatcctgaaggggagctcctgagtgggccctgtggtctccatgggcttgctgctggcctattccctgtgagccctggctgctgggggccctgctgatgatacttggtttagtgccgtccctagggctcctgtgtgcgcaccctgtgtggcctgctgctggcagcggaggggggagcgcggctggcggctggggcgctcgagaggacagggctgtttatcatccgcgtgaatgtcttctcccgtcgtgggcaatgcccaggttgcgcgacaggttggggacgccgggagcgggccaggcgtggtgcatggcgttttcttctccggcagggttcggggcacccattgcggccccttgccatgcgccatgactgcgggggggccccatggccttgtggccttggacacatcgtggaccttggtggccggtttggactttttggccttggggcctgtgtgcttggaacaaaggctgccttggcggttggaacaaccaatggacgtgggacacaaaaaacctaaacttaatgcgttccaggcaactgggccgttgaagaccagtatggcgaggaaacatttcaaaaaaacggactggttagaagaacccccttccgggaatttaactgggaacaaataacctttgtgacctattggggccccggattacaacaggtggacagggactggttaaattagaaatcggagtgaggccccttttcgaaatttaaggagaggaaggaatttaagaggggactcattttttgtggcgcaggaaaaagttggaggggggagattaagctgtgggacagtggagaggttaagattttcagcattccggatttacccgcacgagtcgggccaagggcacggcgatttcgttggggaacaggccaattttgacggttgcgcggaaaaccaactggccaatttggggggacccctatggacggcacgtgcgccaccaagggtagggacgttgcatggactctcaaagttccaccaaagcaaaggaaaaggttaacttttggggccgagaaaaggccgttgggggaacacttctgtaccagtggggga

SEQ ID NO: 614058 - DNA, 1329 bp, Homo sapiens
  misc_feature (338)..(338): n is a, c, g, or t
  misc_feature (487)..(487): n is a, c, g, or t
  misc_feature (626)..(626): n is a, c, g, or t
gaacccatggactgtcagactcctctgtgttcatgcgcttatcacactgggcaccactgataacacctatatcgtcggagctgcctgttgatcatcaccgcgactacgtctgatgagctgcgtaagccacactctacgatctctcaggacctaggcctgcattgtaggacgtgaccctgtgcacacaggaggcaaagtacagtatgtgcatcggcgctgattcgggcctggctcaggcacggcctaacgagaccacagactgttacgcacacgtgatagactgaacagggcgtagggtccaggcgtgaccacaaggactgatccgctgtaaccaccgngtactactacgatcgtccgtgaggaacgaggtttgcggtattgtcatgtactagcgcgcattgtatgctctctccctttgtgcttgttcccacgtggacggctttatgggcgccactcacaagggaagacccaccccaagaacgcatgntagctcatttgatcgtagtcacctcgttgttcactttgaggggaaaaatacgcggaggcagtgtgagagcctctttttctttgactttggctatcctaagtcgttcgcgaggccaccggccacgttgggctaccacttngttctcgagggagaaacgcccaagggcccttcaatcgaaggggtgggcaacgggcgttgacgccctttggtgtccatgcccacacgggggtcgtcgtggtccctatctcaattcggcgcaatcggaggctttccctgaacgccatcaagggcgcctatggggggcaccggggcgtacagggcaatatgcacgccacaaattgtgtctccccttaggggggcccaagttgtcgtgtcgcgtttgtgggagcccccagaaaacggaagagaaacccgcatgctaaagtccggcaatgtacggcgccgcggtattgcggtaacgcattaagcgggaggctcctggcgttccgcaaaaaaggcggtaaagcacatccgttgaacagaaaacaccgtcgccggcataaagaggttccgtggtggaaagcgccaacctgccgggtaatagaaatagaccggttgtggcgcaccaagtgggttcttgcaataggcgcaccattggaacaccgggcggcagacgacattagaaacacacacacgtaaggggcacgcccccttttttaccttttcccacccgggggttagaaacgtttaccccgctctccaaagtttctgtgtttccgctagaaccccacagaggtgtgtgcaccccgtacacaccgtactattggtccgagagacacccatattttggtaccattcaccgc

SEQ ID NO: 614059 - DNA, 642 bp, Homo sapiens
  misc_feature (73)..(73): n is a, c, g, or t
agtggttttgcttttatctcactccatcacagtcacagagtgacctcctcagaagctggtgttttgtgaaatnatttatgtgaagtagggaacatcctggcctaagtattagtgtaaggccagccaccagctgacagttgtgtgatgcctttttcttttcttaccaacaacatctgagggatggcctgtgtctacagattgtcattccttgagaagcacatgtgcactgggagtaactcagcatttctctaggggtagccaggagggtatccagaagtaagaacttcttctatcccagcagttgttgaagcttcctacactcaaagacagaagctccaagtcttcatgcacccaatgacttgggaagatgactaaatcacattaatatgcactgaattctaaaaatgttttcttgtgtttagaaaacatccttagttttggaaaaaataattattattctcagacttacatgagaaaaacttgcctgatatacttagggagggaattaaacagcatcataaaaaacagattttttctacaatatattgggtaatttttcttttacatattcattgttgcccaatgatatatgagggtgcaacattaacataactaggtaaatcacactatcatgctcatacc

SEQ ID NO: 614060 - DNA, 103 bp, Homo sapiens
tgcctgttatatactatcacaaacaatttctcaacaatttaccacaatctgtaaatctagaccttgcaataaatagtcactcaaacgttattttatatagggt

SEQ ID NO: 614061 - DNA, 934 bp, Homo sapiens
  misc_feature (2)..(2): n is a, c, g, or t
  misc_feature (179)..(179): n is a, c, g, or t
  misc_feature (318)..(318): n is a, c, g, or t
  misc_feature (322)..(322): n is a, c, g, or t
  misc_feature (376)..(376): n is a, c, g, or t
  misc_feature (391)..(391): n is a, c, g, or t
  misc_feature (459)..(459): n is a, c, g, or t
  misc_feature (461)..(461): n is a, c, g, or t
  misc_feature (478)..(478): n is a, c, g, or t
  misc_feature (518)..(518): n is a, c, g, or t
  misc_feature (531)..(531): n is a, c, g, or t
  misc_feature (589)..(589): n is a, c, g, or t
  misc_feature (615)..(615): n is a, c, g, or t
  misc_feature (627)..(627): n is a, c, g, or t
  misc_feature (673)..(673): n is a, c, g, or t
  misc_feature (739)..(739): n is a, c, g, or t
  misc_feature (746)..(746): n is a, c, g, or t
  misc_feature (797)..(797): n is a, c, g, or t
  misc_feature (812)..(812): n is a, c, g, or t
  misc_feature (829)..(829): n is a, c, g, or t
  misc_feature (863)..(863): n is a, c, g, or t
  misc_feature (904)..(904): n is a, c, g, or t
gnacacctcgagggtggagaactaacatccaagcccacctggatggtggatgggacccacttctgggtaacctgatgaggaagctctagtgaagaaattcaggacgcggtcttcagagcagagggcttggttcaagttcctgttctgccactaactaactgcatgatcttgagcaagcnacttaatttctctgctccttctctgttaaatgggtacaatgtggtcagcagtaaaggaactaatacatgttcagcacttagcacaaagcctggtacaaagcaggctctcaccaggtgccattttcagcacaactgcttngttnagctactgttgcagttgcaggttgtgccccaagggggtgggctcaggagccgtncagcaagagggagtnaccaaggaggcaggggacaatagccctatcttttcaggatctctgccttggacctggagaatggaganantttgctcctattacgtnccaagttgggaaaactaaggacgaagccggtgactgaaanctgaaatggaatnctctgcatctccaagtggccctatacctgaaaatatcattactagtgaaaaccaagtnacaaacacactcctcgacccccagtncttccacatgtnccattgaggagagcccagccaattacgcagagtgtatttatgcgcngggctggctaaacaggctggctacgagttcggaacagtgttaggatctggcttcccattggccganatgacanaatccttctcgcgttgctctctgatgttctggtccaacagggtggtcagcnggaggggctggtgcnggagccgggagttggtnttggctgttaaggaggttagggctcctacaagcnccccctgccccaggggcagggtggggagcttggagttgttnaaaaagccctgcctgccggaggatggtgta

SEQ ID NO: 614062 - DNA, 668 bp, Homo sapiens
aaggttcggtgattagcagaaattgacgtcttcaacgtggggactagtgcaactttgctaagtggattcggttcagtacagttatgcctggtcatggtcactctagacgacatggccatgtacgtcatcagtactttggggttgtctggatcttaaagcacattgtggtgagcgcaatctagggccaccacttaggtcagcatgtcatgcgtctcttggtctagcagtagacgctatggttcagtactacccgtcgatatgcttcattggtcacattggaatgccaattggccctctctcagctattaagccattgtttactatccaagacccatgatgggcgtaacaaggtttcggtcaaagattcagtcagagtcttccttagtcacgtccagaaaggggtccagtaggctacgactgcagttgttgactgtcaggagcgcgagtcacttgcaggtcagcgagcgtttgctggcagagcacagacccatgtccaggcacacgggttctatcacttggcgcctccaggactagcatgaccagatccagcctgagtggaggcgagcagcaactgatggggtgcgcaaatcgcgtgtagagctggggcgtcacgagaccgatacctccgccgttcaacagcaacagctggcccggaatttacagctccc

SEQ ID NO: 614063 - DNA, 295 bp, Homo sapiens
  misc_feature (74)..(74): n is a, c, g, or t
ccgtagaggatcccccacaggtcaatggcagtttttgttacttttaaatgacacaccaaaaagaaatatgatgnctattcagtcattcactggcagtttaaaaatggttttctaaaataattcccaggaaggctaattaagggatatgtatactggataatttccccttcaaattcctatttcttaagaatgggttatgttaccaaattccaggccaaaaacttgggaaaccaggaaaccaggggtaacggaaaggcacaataagcaaactggctttattccaaaccaaggtaaa

SEQ ID NO: 614064 - DNA, 354 bp, Homo sapiens
tggaacgaacaggatcaattttgtatcttcctcctagagttcgagtctcataagaaagaatcgtgttaatagcccccgttatgttttgctggagtttatcagtcggtagaaatctactgagcaataagaagatgtttcatagccttggtataggaatcattgcgagcttgcaggttcacccatacaaggaacttctaaggttacaagtatgtatgaaggagaatgcttcttctcttgagacataaactgtaagtaaatggcacagtcagaaggggactgtttagttattggaccttggagcaatactaagaagacataaggggccaaaatgtatatgtattgtcctgacagaga

SEQ ID NO: 614065 - DNA, 245 bp, Homo sapiens
aattcctaagtaattaagaataaataagttccaaaagaaattgtaggtggaattttaataacatttgtgaggggggtgtttgggttgccccccccatgtccttagatttaatttggggtccctttttaactcccagcgggcttattgaaggggttcttttcagatttagttgttttttcccccaaatgcatgtcatgttttttcaatagggtgtattccccccagtcaataaatgaccccccgta

SEQ ID NO: 614066 - DNA, 800 bp, Homo sapiens
gataggagcctctctccctactgctgctatacaagaccctgagagctgacctgcaggatgaaaccatgaagagcctgatccttcttgccatcctggccgccttaggcgggtagtaactggtgtgttgatgaagtcacatgaaagcatggaatcttagtgaacattggaactcgccgtatcattgaaacaggagtaaatgcagaataggcgttcgaggtatcccgctcgagcagagatggacgagcctaaagtccaagagaggatccgagaacgctctaagcctgtccacgagtctctagatagggaagcctgtgatgacgtacggacatttgcagaacgcatacgccagtggtttatggatactatgctgccctataatcgctacgttcaggaagcgccgaggggcctaacatgagactgagggaagaaacaaaaatctctgtgtctttctggaggctggcaccgtgattttgtatccccctgtagcagccttactgaaatacataggcttatatacatatgcttcttgcctgtatattctcttgtctggtgtgctccccttgttcccgccccagattgatacagtatgaagtgcactgccgtgagggtcacatggagagtcagatatgtgatgtccataataaacttctggtgtgataactttcatcttgtaatctgtttctgtgggaagaaatgggatattgaatcctgggccacttagccaaatttggagattctgccactccaattgggataatggaacacaaactacttaaagaagagaaaaaaaggccaactag

SEQ ID NO: 614067 - DNA, 146 bp, Homo sapiens
tcagtcctgcagttcctcttcatggatttgtagcctctcttccttcccctcatctggtatactcagactggtccttcagaactcagtttagggtctaattccccaaaaaatttcaattaggttcgctctctggatcccatccctca

SEQ ID NO: 614068 - DNA, 139 bp, Homo sapiens
agcatacatatggatagtggtaagccaggtagtacagatcagagccgcgtagtcgtatcgagccgcgtaggtcgatcaagccgcgtagatcagatcgagccgcgataaatcagatacgagccgcagatagctcagatcg

SEQ ID NO: 614069 - DNA, 579 bp, Homo sapiens
  misc_feature (255)..(255): n is a, c, g, or t
  misc_feature (301)..(301): n is a, c, g, or t
  misc_feature (396)..(396): n is a, c, g, or t
  misc_feature (415)..(415): n is a, c, g, or t
  misc_feature (490)..(490): n is a, c, g, or t
  misc_feature (504)..(506): n is a, c, g, or t
ggtgagggttcccagtggtctctcgatccaactagaccctgggagggcccattcactttttaaaaatggccaaaacctccatgcggtgatggcacacaacacagtgcattaacaagacaggaaacacttttgggcccaaagtgcactgaactggaagcacctcacgcagcctaaagtcagtttggaaggttccagaacatttcctaaacaccttcatctctgaatacactttaactccttgggtcccagcaaggnctctgcctggtggtgaggggcagccaggggattaagggcacggccngacctgacgctcactcatccttgggccacagtccccgcagagctgcagtgaggatcagaggtcagtgaacgtggagaaccttctgcaaacacccnatgtcagtcctgcataaanctttttgtgtgagtttcatctgcattcatacagcaaatagtggttatttttcagagtgtgctaagaatgtattantctctttagcaaannncagccataaattttgtttccaaaaatctatatcttacttgacaagtgggtggagactgcctcgccaaatgggg

SEQ ID NO: 614070 - DNA, 312 bp, Homo sapiens
tagtggtggtcatactgtgcacagtccagagttgagcacgtacgtctgtgccctggagcatgaggcatcctcgtataatgagttgtctcgagttgcttcatacgtcaggttgaagggcaggtgggtgatgcagcgttgactctcatactcctcagcatccaagtagagcatctcgagccgatcattgatggcaggaatccggcttggcccaatcaccctgccaaagtcatcagggagcttctctgccaagatatgaacggcactcatgtcacggatcggatcccgatgcaattgtgcatccacccatcatcc

SEQ ID NO: 614071 - DNA, 1254 bp, Homo sapiens
gatggagatcaggcttccagtggctcgcaagacctcttcagcgagagaggtgggccgcagagactaagacatacatctagttggtgccgggggataccatcactacggacacaggattctatgcggggccatggaacgtatagtgggatgaagagaaggctcattgcctctgttgctaggctctgtggagagagtaagcaagttgatctgtgtgaaagctttgaagaccagatccattcggtgaagtaggagacatcgtagctgggagcgacatctcacgagtagggttgcaatcgagacagaaggtcggcaaggttggcgtaggaaccaaatctacgcagtgcttcgggaataccgcgttgctgtcgcgtgtcgtctcagatgcccaatgatagctcgttcacttgagagggacgacgcatgatgcgacgatagtattctggcccgcatatgactgaggcttgcagactgaggaaggctttccttgaaccgtccacctgggggaccctttagtctggtgggcgtgacgagttcccatgggcccgttcgttttctctgcactcggtggggctgttgcatcgtaaggcgactatcgaagggagggtccctctcctgtcttgggatatgaacctcgggatctaaagaggcgagatgtcttgagttccccacgagggggtttcaccgcctcagtgccccccttggggctgcaaagagacgcggcaagcaaaagaaaaccgtcacatagggcagtgaaaatttgtacaactagtttgggatcgcgcgttacaaagctgcatttacatctagacaagcgcaggtggcctatacattgctcgggattgtcaaaacaccacaggatccctgagggcaagcataacgaaaaggtaggggaacttggcgtagagaagggtcgacacagaattggagaacaaccttcgcgtacgctcgtggtgctacttcacttcgtcgtgtactcacaggaagtagtcgtctggatagaatacccccggggggtcacgggaacacctgggcattccatccgtccgacaggaggttcagtatacacagaagggaatttaagtcgcctggataatgaacctacggcagactattgccatgggtaccgtgccatactgatagcgcaatcccccggttgcgagccttcaagaggttcgaaaggatacaccgtcattgaaagggccccagaacacttaccacgagcaaggaagcatactgcgagatcctggaaacgag

SEQ ID NO: 614072 - DNA, 223 bp, Homo sapiens
ggagctcggtacccatcgggactgaggtcacgtatccaattgatatcgcagacattgcggagcgtcttaaggtgcggttgtagacaaatccacacccatgtcgagctaaggtgaagatgacgctttggcgcgggtcttggcgtcaggcttcgactaccaccacagttggtctccatggttctcttgtgtaagtacattcaattataatattggtcaaacgacg

SEQ ID NO: 614073 - DNA, 204 bp, Homo sapiens
cttgcgcttctgcctccaggattcaagtgattctcctgcctcagcttcctgagtagctgggactgcaggcacgcaccacaacactcagctaatttttggttttttgttcgcttcctgcttctgcctgcttcctgcttctgcctgcttcctgcttctgcctgcttcctgcttctgcctccagacccttgcttcctgcttctgccc

SEQ ID NO: 614074 - DNA, 1029 bp, Homo sapiens
  misc_feature (68)..(68): n is a, c, g, or t
  misc_feature (72)..(73): n is a, c, g, or t
  misc_feature (75)..(75): n is a, c, g, or t
  misc_feature (81)..(81): n is a, c, g, or t
  misc_feature (92)..(92): n is a, c, g, or t
  misc_feature (95)..(95): n is a, c, g, or t
  misc_feature (104)..(105): n is a, c, g, or t
tcccgtctggcctttatgttcgttgtcgttaccataatcgcttcaggtgcatgccccagtctctttgnaaanncnaagctntgcctacatanaanacttttttnnttttaaccaaagttactgttgtttacagtgagtttggggaaaaaaaataaaataaaaatggctttcccagtccttgcatcaacgggatgccacatttcataactgtttttaatggtaaaaaaaaaaaaaaaaaaaaatacaaaaaaaatttctgagggcaaaaaaaggggcatcctgctgaacggtgtgtggtttattgttgtcctttcacaatcttgcaggagcgccaaaaagttcgccaagtggtgaaacagaccctgttcactgggaaaaggcctgtgcagtaaaagtgtagaccctttcatgtcactgtactgtacacctgatactgtaaaacatactggtaataatattgtctccacttggcacccgaaaacgctgggtcagaaagcaagcatgtagttttaaaactgtttcagttaaccgtttgaggggaagaaaaaaaagtaagggttttccccccaaaagataatcattgtggtaccctataaaacacctgtgaactcttttgtctccatctagtaattgtattgaaataaccccctgaaaataccttcttatagaaactgtggcttaaagctttaaggtagcagggactaacatgcaccgatagtaaacagaagtgacgtgtactgtgacaattccctggtgttcccaacatgaggtctcctcccagttacccttatatattgaacaggtccaggtggtaactgcaaagggaaccaccaattatcttggcgaatggccttggatggagtaaagggtctgcaaagctgcgctcaaccaacaaatgcataaaaggatgagtgactaaaaaagtaaatagctagcggtaagatgactgggacggtgtgacagcaatagtccttcgaaaacagaaatcatggaatactgaaaaaaaaggcgtgtgattatgtagtgacg

SEQ ID NO: 614075 - DNA, 464 bp, Homo sapiens
ctactactactaaattcgcggcagctcgaccaccggtgatgatcgtcgtcgtacccacgacatgaacaccgccaactggatcccagacctgttcatgaagcgtgtcttcgatgacggcccgtggaccctgttctcgccatccgaagtgcccgacctgcacgacctgaccggcaaggccttcgaagagcgttacgagtactacgaagccctgtcccagtacccgggcaagatcaagctgttcaagaccatccaggccaaagacctgtggcgcaaaatgctgtccatgctgtttgaaaccggccacccatggctgaccttcaaagacccgtgcaacctgcgcagccgcagcagcacgtgggcgtggtccacagctcgaacctgtacaccgagatcaccttgaacaccaacaaggacgagatcgccgtttgcaacctgggctcgatcaacctgcgtcgacgcggccg

SEQ ID NO: 614076 - DNA, 231 bp, Homo sapiens
gtgcagaggggcagggagaggcaagagaagcaaggaagaagctatgcagttgatcaagtaagatattcggatgtcatgaagaaagcagacttgagagagaatgaagtggaatagatgagttgtgacctcctggagattggagaggcactggggacccatgttgggagtccaggagggagagcaaggctgtcgggcgagtcggggcagtcggggctgtcgggctagtcgggg

SEQ ID NO: 614077 - DNA, 421 bp, Homo sapiens
cggcacgaggggtaaaagtagcaaacaaattcaagtgaccaccaattttccctcagaagtctcagaaacttttattcttctgatcatttttattctctcatcttgcatttaacaaatattcaagtagtctataagcctatagtcttgttgtaacacagcaacaaaatgtgaaataaatgattatgaaagatgacctggaaccagaaaaggattaaggatctttgtgcttcagttctgtagaatttctgtttctttaaaatccagttcatctatctctacttacctttattttgttcttctaggacaaaaccttgatctttgagtcagaatgaaattacagtaaacagactatttgtctccacataaacacataccaggtctatcaaaggctaggggatctactctgatgttggagcggccg

SEQ ID NO: 614078 - DNA, 156 bp, Homo sapiens
caaagggtatcatctctgcctctctgctgatccccatgttcgtcatgggtgtgaaccatgagaatgtatgacaacaggctcgatgatcatcagcaatgcgctcctgtcaccagcatactgttagcacccctggccaaggtcatccgatgtacaact

SEQ ID NO: 614079 - DNA, 619 bp, Homo sapiens
  misc_feature (180)..(180): n is a, c, g, or t
  misc_feature (182)..(182): n is a, c, g, or t
ggtgaatggaatcacaagcaactttgaagaattgctagagattgctcagctcactgagtcaggacaaaggtcgttcgtaaaatcatagattgttggctaaaactagcagatttggtactgaaccgatggcggaaatcacacagctttcttagcccaagtttgcagactaggttctgggtnanggcgcgcagccgcagtcttaatgggaagattctagaagtaagagaaccatggaagggctgagatatgctgcccacccctctctgcctgtctgccacactacactatgcaagtgtggggagacccaaggcattctgataaatgaaagccaacacagacttaaaaactgtatgcaaattcaaatgtgtttctcaacccgtgaacaactcaactggaaggttagaagccttacaaaataaaatatctgattgcaacccctgtccaaatcactggaactgatcatcaaaatctacagagatagaaacaaccccaaggacctaaggaaaaaaggaaaacaaaaaagggagcataacacatcaacagttgagcttcgtagaagagatgaggttttccagggaagcttcctaaaaatagtccaacagccctgaggaaaaaaaaa

SEQ ID NO: 614080 - DNA, 151 bp, Homo sapiens
cagatataacaagtagtacctactgggtacatgagagaggtgtctagtgaagttttagggcgctatactgctgtatatactgtgttttgtcccacaccgcaccgactaggcagtgacgagtaacgggacatcttatcaactgcagctcaca

SEQ ID NO: 614081 - DNA, 320 bp, Homo sapiens
gaggattccgagtttaaagcgggcacaggaggaggcgagcgcctaaaggctgaccgtatggctgtactgggggtctaaggagtgagctggagagacaggcgtgtggatcagataaggagcctggagtagctggctgcggagcttggagaatacactgtcaagattgccctcctggaataggcgcggtggcgcaaggaggatgaagttgaagagtggcagcacaggggcgaagaagcccaggatgagcatggtgaagatcacggaggagctgcccctggtgatgacagcatccctcgtccccaccaccccgcttaaactcg

SEQ ID NO: 614082 - DNA, 481 bp, Homo sapiens
aatctcaaggaaagagctttcaatatttcatcattaagtatgttgtttgctgtataatgtttataggtttttaaaatcaaaattaagaaaggtcttatctacttcttatttgctaaaaatgagaactgaagtttatcagagctttttctgcatctgttgggatgatcatattttttttcttttattctgttttgtggtgaattacatcgattgatttgcaaatagaaaaccaaccttccgctagataatgattaaattgctgaggatagaaagcattctgaagagcaaggatggcttcttgttcttggtaggggcaaagaacttattactggagaccgaagatataagatacccacagttttctgccactgtctaatacttagcaatctccagaggcaagaaatttaattatcacacctgcacttcatgtcagatgagcacctacccagccaagaaatcacaggggtagagtaactgcaga

SEQ ID NO: 614083 - DNA, 998 bp, Homo sapiens
aggctggtcctggtcatgggtttaatggatcgagctggtgagcgctgtgcctgtgatgcctgggatgcctgagcgcgccggtgctggggtcggggccggagcggatgctggagagtggagcgcgccctggcccagccccgagtcccgccgccttccctccctgccgcagctgcgggcccaccggccgcgccccagccatggagcaagacaacagccccctgaaagatccagttcacggtcccgctgctggagcctgcaccttgatccccgaggcggcggagcagattcggagagcgcctgcccaccgcctgccaccctcgttgctgaccagttgaccagtcatccccagagatagatgaagaccggatcccacaagaccagcatctcaagagctccagcatgatggttgaacagtcacactgtgtgtgcaaccagcaagcaaaggagaggaacctgtaggtgggccgctgagtagccacagtgaatccaatgagtcaccgaccaccctgtgagatcccagacacagaagtggagtcaaggctgggcacctcgtgggacagcaaaaaaaactgacagaactgcatccctaaaaactcacgagtagaggcagtaaggaaccacagcagcaaaaggaacccatcaagccaatagttacacaacccagatactgataacccaatggtgacagcccaactacgaggcaagaacaaacaagagaggacaggtaatctcagaggaataccaaagacattgcaagactactgagagaacatgcacaattgaggaacacaacaagagaaaatacatgaaatacattataattaccaaaatcagacaacaatataagcaggagacaaaaaatcagtcaatcaggtacattaaagaacagcacaggcaatacaatacaaaggaaagaataagactccacaacggaccaaccaaacacagaacaaatataccagcacatggagcacagcatccaccacaatcatccaatg

SEQ ID NO: 614084 - DNA, 399 bp, Homo sapiens
ttttccacatcctctccagcatctgttgtctcctgactttttaatgatcgccattctaactggcgtgagatgatatctcattgtggttttgatttgcatttctctaatggccaatgatgatgagctttttttcatatgttgttggctgtatgaatgccttcttttgagaagagtctgtccatgtccttcacccactttttgatgttttttttttttttttgtaaatttgcttaagttctttgtaggttctggatattagtcctttgtcagatagatagattgcagaaaatttctccaattctgtaggttgcctgttaactctgataatagttttattttatttatttattttttatgaaacagagtttctccctggttcccaagatcaagccattgtac

SEQ ID NO: 614085 - DNA, 1698 bp, Homo sapiens
aaaatttaagaagtcgaagtaaattcactttgttctccaaaatgccactgaatatatactatttaaaaattctatttaagacagtgagaaacgttttttttttttaagattctccttaaagagtctctattatagttacacaatatcaagacatgcatgtaggtctcgatcacaagttaaacattttaaactcatttttaattgacaatcttggaatgagaggtcacaaaagggcactaatttctatttttcaactgcagccaagcaaaataaacatgtgttgtggctctatataccccactctttaagctacctgccaggaagaagaatttcctcataaatactaagcaactttttcaatacaacagtttaggtttaagatgaccaatgacaatgaccacctttgcagaaagtaaactgattgaataaataaatctccgttttcttcaatttatttcagtgtaatgaaaaagttgcttagtatttatgaggaaattcttcttcctggcaggtagcttaaagagtggggtatatagagccacaacacatgtttattttgcttggctgcagttgaaaaatagaaattagtgcccttttgtgacctctcattccaagattgtcaattaaaaatgagtttaaaatgtttaacttgtgatcgagacctacatgcatgtcttgatattgtgtaactataatagagactctttaaggagaatcttaaaaaaaaaaaaacgtttctcactgtcttaaatagaatttttaaatagtatatattcagtggcattttggagaacaaagtgaatttacttcgacttcttaaatttttgtaaaagactataagtttagacatctttctcattcaaatttaaagatatctttctcctcttgatcaatctatcaatattgatagaagtcacactagtatataccatttaatacatttacactttcttatttaagaagatattgaatgcaaaataattgacatatagaactttacaaacatatgtccaaggactctaaattgagactcttccacatgtacaatctcatcatcctgaagcctataatgaagaaaaagatctagaaactgagttgtggagctgactctaatcaaatgtgatgattggaattagaccatttggcctttgaactttcataggaaaaatgacccaacatttcttagcatgagctacctcatctctagaagctgggatggacttactattcttgtttatattttagatactgaaaggtgctatgcttctgttattattccaagactggagataggcagggctaaaaaggtattattatttttcctttaatgatggtgctaaaattcttcctataaaattccttaaaaataaagatggtttaatcactaccattgtgaaaacataactgttagacttcccgtttctgaaagaaagagcatcgttccaatgcttgttcactgttcctctgtcatactgtatctggaatgctttgtaatacttgcatgcttcttagaccagaacatgtaggtccccttgtgtctcaatactttttttttcttaattgcatttgttggctctattttaatttttttcttttaaaataaacagctgggaccatcccaaaagacaagccatgcatacaactttggtcatgtatctctgcaaagcatcaaattaaatgcacgcttttgtcatgtca

SEQ ID NO: 614086 - DNA, 165 bp, Homo sapiens
ggatcacagatgaatctgtgccttagtgtgggattacagggtgagcatgtgtcggccatacttctttattattaaaggtatgatcctgtttggattctatcagtagtgaaggcccgggatactgaaatgaaaatgtatgcaggtgttatataaatgtctcattcc

SEQ ID NO: 614087 - DNA, 473 bp, Homo sapiens
  misc_feature (2)..(2): n is a, c, g, or t
  misc_feature (65)..(65): n is a, c, g, or t
  misc_feature (70)..(70): n is a, c, g, or t
  misc_feature (122)..(122): n is a, c, g, or t
  misc_feature (186)..(186): n is a, c, g, or t
  misc_feature (207)..(207): n is a, c, g, or t
  misc_feature (221)..(221): n is a, c, g, or t
  misc_feature (224)..(224): n is a, c, g, or t
  misc_feature (253)..(253): n is a, c, g, or t
  misc_feature (319)..(319): n is a, c, g, or t
  misc_feature (321)..(321): n is a, c, g, or t
  misc_feature (325)..(325): n is a, c, g, or t
  misc_feature (331)..(331): n is a, c, g, or t
  misc_feature (334)..(334): n is a, c, g, or t
  misc_feature (347)..(347): n is a, c, g, or t
  misc_feature (368)..(368): n is a, c, g, or t
  misc_feature (387)..(387): n is a, c, g, or t
  misc_feature (389)..(390): n is a, c, g, or t
  misc_feature (421)..(421): n is a, c, g, or t
  misc_feature (428)..(428): n is a, c, g, or t
  misc_feature (437)..(437): n is a, c, g, or t
  misc_feature (447)..(447): n is a, c, g, or t
  misc_feature (452)..(452): n is a, c, g, or t
  misc_feature (454)..(454): n is a, c, g, or t
cnggttgtagacacagacaaatattagttaaaccagaaccatgtctacacagaagtgggcaatgncatgngccattctatggcacacggtgtgcacttaatcatcatgttttagcattttgntcttctgcttatggcgctcaatttccttctgcagacgctcaatctccttcttatgatgaacganttcctcttcatggtgtttttncaaagctgccagtngtnctctactctgtgctctacaaggacacggnggctcagggtttaatttcaatccttcaccccaaagacatctcaaagcataacctgtaatgtctaancnaggnataggngtnccaattccatggnagtctagctggtcatcctctnctactcctcaactagtganannctaccccatcttaaattgacgtgtaggcatnttaagangaggaaagnccttattgcnttcanantcctctttaaaatagaaaa

SEQ ID NO: 614088 - DNA, 193 bp, Homo sapiens
ttacatagagggacagcaagaggatgcacggttgagtatttggaggtggtatatttggccagactttatcccgcatcgattatgctatttcttgctggacttgtttagacagctcttctgcagcagagtgagcccatttaaacaatatccggaggtaccaccattaagagtgcaacagagttggtagtcacaa

SEQ ID NO: 614089 - DNA, 171 bp, Homo sapiens
  misc_feature (84)..(84): n is a, c, g, or t
  misc_feature (112)..(112): n is a, c, g, or t
  misc_feature (143)..(143): n is a, c, g, or t
  misc_feature (151)..(151): n is a, c, g, or t
ccatatcattaaacagcctgttaagaccaccccatttttgtagggagtctttatctttatgtatcataaaggaaaggaatgccngggagttttaattcaagttcaaggccantcaacagcagtaggtacttaagagagagttncttggagntaaaggtggccacttcctct

SEQ ID NO: 614090 - DNA, 303 bp, Homo sapiens
aggatcctcgctgtcttctcccatcagagatcaacgaccttctagtagagtcgcgaatcaactgaattttccactaactgaaggaggatctacttttatatgaattgtagagctgcctacttaactggccgcaaaatcagaatggaaaacattatttctaaagatcaactttacttagctcttcagcatgcaggaagaaatccatcccaaaagaccattaataagtattggactcctcaaactgccaaactgaattatgatgatttttgtataattttaaggaaggaaaaacctacttcgaaa

SEQ ID NO: 614091 - DNA, 328 bp, Homo sapiens
aaaagccccccccccaagaaggggaaaccgtttgttttttacctaggggccttaggttctttctgcccaggattttttccggcaggttttccccctttaaaaatttaggcagggaggcccttccatttttatattaggcccaaatccggtctttttctttgggttttctctccttttaccctcccctttgggttttggggtcccctccaaaggttgggtttgggggaaggccccccctttcccggtttttaaccggtttgttttgtgctggggtttttaaaccggggccgggcccccggtagccccccattaattttttttggattga

SEQ ID NO: 614092 - DNA, 728 bp, Homo sapiens
ggagttgcaggttgtgggcgacaaagtgggtaaggtcgccgtggcggttcactgtgccttcgagctccaggggcactcggagatggtggcgcgggcggtccgtcgccgcgcggccggactcggcacatccctgtaggacgccggagccaactcggagcgaccatcgccttgcagtccacgtcgcaggcgtgcggcatgtccgtgaagacgggctggagaactgatgcggcctggctcgtagcattggcgctgcggcctgcacttgctcttcagatcggtgggtcgtatcgcgtctctcacgtggtcttggcatcgaagcaattcacatctcgcggccaggccgtggatcccaccgtctggactggggctgtgccgcatcccggggacggagggggctttggcgcgcatcttgggggcgcgagatggcccgggggtttgcttgctgtgagcccaggagaggtggaccacagggaagacgggttgcgagattgtcggtcctgagacgattccgagccagggacgacacccccctcacattggcgggggaatacctcgcggggagacccctctaagagaaacggacggaccggagacgcttcggggtctggtaccccaaaaactggaaaccttgaggtgggcgaccctttggaaatctggttttccacggggttttgaaccaggggaccccagggcaaaggtgggttgcaccggggtacattccagggggg

SEQ ID NO: 614093 - DNA, 826 bp, Homo sapiens
agcgggtgacgccgcgcgcgcgcgccgcaacacctatggagcagccgtgaaggcggctcgttgggggctggggcggaagcgccgggagtgggggcggaatgggcggcggggcggaaggcagaggctgccggggcgcgggctgctgcggagaaggggcttccgatgagtccgccgcgtggtctgtcgccggcgcgggattgggcgcgagccatgggcgcgctctcctaaggcggagtcgcgggcgggagtgggaggagggcctgagaaaggcttgcgtgcgaaggccgcggggaccgtgactgggcgcgaggagggccggcggcgggggtggcaccaggaccaccatgtagcgctcaggtgctgcagcccagtcaggaagaaagctggcgggagagagtcaccattgctcaaagaaccggggcggtaggcagttgtcagccgctcttagaggaatcaaaggaaggcattgtggaaccccgatgggaaaccagccaattaaatggaaaaaagcctgggaatcttgctgttcgacagcttccattagtccggaacaattccatgttgtagagaaccccggcaaagaagcgagtcagacggggttggcagcgaagtaaccggaaggaacgatgaggaggctatctgcagcagtgtggcgtttatattacacttacaacatagtgagagaatgttaactggacacaagcgggagccggaggggcagtggctggcgaacgatgagcgaaggccagcgtgaggaaggacgtgagagacagcaaggacgaagaaaaacaacataaaatacgcagagaacgaaagaaacttgtga

SEQ ID NO: 614094 - DNA, 283 bp, Homo sapiens
acggccgtcggacgaatcacttgaacacaggaggcagcggttgccgtgagcggagatccaccattgcactccagccccgggggatcagagtgattctcctgccttagcctcccgagtagctgggattacaggcatgtgctgccatgcccagctaatttttgtatttttagtagagacggagtttcactgtgtcggccaggctggtctcgaactcccgacctcaggtgatctgcctgcctaggcctcccaaagtgctgggattacaggtgtaagacatagcgcc

SEQ ID NO: 614095 - DNA, 175 bp, Homo sapiens
gcccccccggaaaaaaaaaaaaaaaaacagggtggggttaaagggggggtccggcccccccgggctttttttactgtttggcccccctttggcaaaaaaaggggccccccccccccctttttgtttttttgttttttgggctttttttaataaaaaacccccttggttcggccca

SEQ ID NO: 614096 - DNA, 109 bp, Homo sapiens
gttgactctagagtatccccacgttgacacttcaggatatagagtagagaagcagaatagaaattatttgctattgggagtttccacagcaggtaggtataaagataag

SEQ ID NO: 614097 - DNA, 113 bp, Homo sapiens
atcatacatattaaaccagcaagggtggagtccatctataaaactaacaggcatttggacacacatacttggcatagaacctggacacatttatcaacacggtagggaacgtc

SEQ ID NO: 614098 - DNA, 582 bp, Homo sapiens
  misc_feature (487)..(487): n is a, c, g, or t
tgagcccccccccccccccccccacaccccagaaaagccccaacccgaataatccacgaccaaaaacataccccacaaacaacccccttacagatccgaccgaggaccgccgtaaatcccataaaaagacatatcgtaataatagaccaaagaaaccataaaaaacacagtcacattttcacccaaaaacataataccacatactatatagtacccctcccgcgtaaaacgcccaagggaacgtcgcgccaggtacgctaagtacatccgtccagagggaagcaaatcccaacatagccatcccgtacaacagcacaggtacagtcaaaacaacggaccccctttttcagaagccaacacactccagagcctaataccccatccccaccccgcaggaccgaaagtcaaatccagtcccacataaacacacgcgcgcgcgcgcgcgcgcgcgcgcacacacacacacacacgcacgaaaataatcacncgaccctataccgaataaacttttaatgcccccattgcacccctagagaacggggctcttaaactagctcgggcatacccctctccccaaataat

SEQ ID NO: 614099 - DNA, 746 bp, Homo sapiens
  misc_feature (553)..(553): n is a, c, g, or t
  misc_feature (676)..(676): n is a, c, g, or t
tggaaatggagtctcactttggccgaggtgtagtgacaaggggccatctcggctcactgaaacctcgggcctcccaggttcaggcaattccccgcgttaagcctcccaaggtgggctggggatatacagggcacggcgcaaccatggcccagggtaatttttttatattttaagtaagagacgggggttccgccggtggttggcccagggtgtgtctccaactcttggagctcagggcagtccaccttggcttcaggctcccaagggtgctgggcattggcaggcttgtgagcacaccggtgccgtggccttacccattattatatttccagcactccagggggggctctggcacggcagcattatataacctacacgtctccaaagggtgattcgggcatttccctcatctccttggacggttacataaccggggaattccatctctaagaaagagcagtccctacagctttttccccttttttctttttgggaaacagggtctggctcccggagggccaacagggtctggacctgcgacgggcgtccaaancaagggctcaaggcgaaggcctcgacctccgggggcccaggtgggatcctcccaatcatacaacgactcttgataacccacgaaccacagtgtgtgctcacccatcaattgcccaggtgactntcggggaatcccgcgaccaatgggggttccccatgtgtgccacagggggctccaaaattgcagacccatg

SEQ ID NO: 614100 - DNA, 943 bp, Homo sapiens
  misc_feature (60)..(60): n is a, c, g, or t
  misc_feature (92)..(92): n is a, c, g, or t
  misc_feature (235)..(235): n is a, c, g, or t
  misc_feature (251)..(251): n is a, c, g, or t
  misc_feature (253)..(253): n is a, c, g, or t
ggtggccgtgtgtgtggagtgggctgcagcgtcaggcggggcgggctggtggcctggggnccccagaggctgctgtctggatcctgggctgntgcccaggatggggctcccgcgtgctcttgcgctgccctctggtggccgctctgggtccttgcaccccgacccagggccagcctgccctgtcctgtcctgataccgaggtgggagccctgccttggccagggtggccgtgttnacggttcttgggactntnacattggaaggcgaggcaggtcaccagcactgtcctctgcaggatgggctgggattcatttggcagcttctcagggcctgtgtccggctggttggtccctgtgctgcccaaaccaggtgtccacatttccggctccgaggcgcagagaagggggcaggtggtggcttgggtggaggaaggcaccatccatcagcccagggagggagggtaccacctgggcacctggggctggatgtgagaggcctggaccagggcccgccggagggcgtggaccagatgctcatgtgttcctgggtgcagtgtctgtgttgggggctggccccaccctgggccagggtgcatggagggcatggccccagcggggaggaaggtgggcctagggctggctccagggtgtggagagcctgggagtggtctccgtcctggggccccaggaggttcccgcaaggagcgactggggcaggtgctggaggaggtcagtggacaagatggggagatgtggaaaccccaaaagccccttttcaggcagccctgcctccaagaccgacagatggctaagggggccgcagacctggctcccccagctcctgtgtggagaaagggcaacagctgtcccggatggttattctctcctttcctcaaacacatttggaactcaagtaaatccgatgcatgttgggaaaaaaaaaa

SEQ ID NO: 614101 - DNA, 382 bp, Homo sapiens
gattcaggatcttcccgccgtacagttgcgggctaccaggtacacagtgcactgggaaggcgcaggactctgccaagaaagccgggtatcgtccaaggtttctctccactgagacatgctgagatatggcctcatgggaatggaaagacctgaccgtcccccagacacccataaagggtctgtgctgagaaggattagtgaaagaggaagtgctctttgcagttgagataagaggaaggcatctgtctcctgctagtccctgggaatggaatatctctgtataaaacccgattgtacattctatttactgagataggagaaaaccgccttatggctggaggttagacatgctggcggcaatactgctttcagtttttgggaa

SEQ ID NO: 614102 - DNA, 292 bp, Homo sapiens
agaatcgtggtgctgctgatgagaaacaggatgctgggggaggatggaggtagatggccgcctggctttagggggtctctggctgtacgaccatcatcttggataccgactatcatcacgcgtggtctaggtagagagctcctgtcacgacggaggtctctggggtccctgatcgggtcgctgactatgagtccatctacatctggtatggtgaaagtaaagtctgcatagtacacatcatatatctgtgctccgagctgagctcagagcccggagcaccacgaactcgccg

SEQ ID NO: 614103 - DNA, 978 bp, Homo sapiens
  misc_feature (32)..(32): n is a, c, g, or t
tgtcggctgtggcgccacctcgtttatgtctncgtctcctttgagtgagtttttggcgagcgcgttgcccctactctcgtgttgtccaccctagccggggtttggcgtgtgcccttagttggcgtgccgccgagttcgtggcggtgccgctgggtagacgcgcgacgtcccacgagggctgccgccccgtttttgaggggtgtggcctctcgtcggtagtttgtctgggacctcccgcgccgccgaggctgcccggtgtccgccccccaagggcggggtgcacgctctgcccaaacgtggggggtgttctacgccctcgtatacagtgccccaagcatggttggccatgtctactagaacaatgtagctaccccatacttgatgtcggcccccaggaattctgcgtcgtctggatatgtttttttcacgggcaaaagtgtgtcgcgagaagatgtcctgctggaaaaagtgtgcccccaaccacagtggcttcttggaatcgtagttaacaccaggagagccccaaatggggttgacatcggtaccacgcagtcttacctgatgatgaggtctccgtgttgcttcaaagtttgggaaaagcccatcatgaacgggtgatcagtcacaacaaaacgggggggaataatctccctggccccccaaatgatagacttggcaacttgtacgcccccacaggtgtttaattgcacgctgtctgttcaatccccgcctcctatgttggtcctcgcagtatgcagattgattcctagaatagcgtcgtgctcgaacaaattaaatcgccgcgagtgttaggccgccaacatatatacgagaaccaaacgaataggtatttctatgggatcgagatggtgagatgacaacccgcctccgtcttttcggaccacccccgcttcttgagaataggccgtgatgcaaaaaagtcccaaacttacaatttttttacaaaaaaccaaaaca

SEQ ID NO: 614104 - DNA, 371 bp, Homo sapiens
  misc_feature (48)..(48): n is a, c, g, or t
tacgaatactagtagctttgatttcattcctgaattatgaataatgtngaataatcgtgcatatgtttcctggattctttttgtgtgtgtcctaatcaatttctgactgtccacctagttaaagaggagctcttggagcctgtttgaggattctaggaaactcatggagtctctgttccatggattcgctcacccaggttcacagctgaagcaaagctattgtttcacctgcggcagctgctgaaggagctgaagggattgagtagcgtggttaaatatgatgaggaccttctgttcaaaggggtggacctgctgaaggcccaggtcacagagctgctacagcgcctgctccacaggtctagaggagtaat

SEQ ID NO: 614105 - DNA, 533 bp, Homo sapiens
atagggagctggctcccctgatagccatgctgagagtcatcagcccagtcttctggcaacagctctttgaccatctctttggacaggtggtcagcctgcagaatgggggtgcgacgatgggctacgagccctcctaagctgcttacaaattggaaaagtgtgggcggaagtgtggggctcacgccttggtaaatcccacctagttatgccccaggcccatatgggaggagggatcggtggaaacccaactatgtcgcaccaacaaccgaggacaacatgatagagcacccttgtatctagcaccacatagataattttgttaaactaattagcctagactgtattgtagcgctcactgccgttgttgtgtccccaggcttgtttgggcgcgcagggcttgcatagttagagagcgatccatttatggctgtagccagagtgtcgcaggctgcgagtccgagttcgctgcattgtgtaattgcactgcaacggtcctaggacttgggttgcacagactcgagtagcctgtttca

SEQ ID NO: 614106 - DNA, 872 bp, Homo sapiens
  misc_feature (872)..(872): n is a, c, g, or t
agaagttgtaagtacagtggcaaatgcttatacttacttcgaactgtttcccaaaataagtgcatgtatgttgacaataaaagcttaagggtgttcatgagaagggcttgaaaaggtactctagaggaaaaaggtctaaagaaaaaaaaaattcaagaaagtttacattagattattgccagtgtgtgagtaaataaagaatgtgtgcctcgtttaactgtgtaagtcattgtttaaagaatatgattatggaagcacgatttatttaaataggtacatgagactttgtggtctcaatgtcctgatacattaggatgacacgttaacatcttaaatcgttattagtcgaatggtcgtaaggccggtgaggtcgggtaccgagaggtgactttggggtagcagtgtgggggttcattcttttgcaaatctattttggtttaaaaagaatagcaagtgttagaaaacaaagcattagaaaaaaagcctatcagtatcaggggcaatgtgtagatgagtaagtgtagtatgacatcctttatttccaggtgaaagggtctggctgtcacgggtgtagtccgtgtgataacataatgacgttccgaatgtaagtgcatgtaactatctcgacggatttcaataactggtgaaaaatgccaaccgggtgtggtatgctcgggagaagcgtgaagggtaacgagttcatcggaaggaagagggtgtacgcctagggcgaagttggtgcccgtttgactaatttggcaaactgggagtggacattgtaggcttttatgacccggtgacaattgggccggtataaggtggtaaacgggagagggggggggcaccacgcacgaaaattggcaagcgccaan

SEQ ID NO: 614107 - DNA, 175 bp, Homo sapiens
  misc_feature (144)..(144): n is a, c, g, or t
cgggggtgactcaagtctcagtagtgggggtgacggactcatctctgtccgctggccgcagacctcgttactggtccccgattagatgccagttttctcacactctttccttatcatgcctcagtgccccacccccattctagngctgagaccgttttaggccgaaagtcaatag

SEQ ID NO: 614108 - DNA, 179 bp, Homo sapiens
atgagggcagcatgagagaagaaaaggagcccgaacgacaagagagaggggatcataggctcctcccacatcctcacccctacccgcttcctggacgacctcaagatgctggaccagaagctggaggacgtgcccctgccatgaccatgaccttgaccctgactctctccctgtccaga

SEQ ID NO: 614109 - DNA, 1463 bp, Homo sapiens
tggaaatggagtctgtgctcctgtgtgcccaggctgtggagttgcaggtggcattgactcggtggctcacgtgcaaccttcttaccttcccgggtttcaagcagttcttccgtgcctcagccttcccaagtatagcgtgggacatacaggcactttgccaccaacaccgggcataatttttttgtggagtatttttatagataaagcacggggttttccacccattgttgtggccgagtgccccacgctcgtagaaaaactcatgtgaacaacaaaaacgagatgaaaatcaaacaaaaaaacataggaaacacacaaaaaaaaacaaacagacaaaactacaaaagaacaatcaaaacaacacaagacaacaacaacacaaacaacgccacaaacacaaccaaaacacaaccacaaaaacatacataaacacacacacaaaaaaaacaaaaaaaaaaaaccaacaacaacacacacacaaaacaaaaacaaccaactactaaccaacaaactaacaacaaaaaaaataaatgacaacaataaaaaataaaaaataaataataacaagaaataaacaaaacaaaaaaacaaaaaaaaaaaagaaacaacaaaaaaaaaaacaataaaactataacaacaaaaaacaaaatgcaataccaaaataaaaaaacaaacataaaaatataacaaaaaacaaaaaaaaaaagattaaacaaaaagagagtaaacagaacataacacaattaataaaaaacaaaaaaaacacaaccataaatcaatacaaaacataaaaaaatataaacacaaatcaaacaagtaatacagcacacactacaacatcaaacacaaacacaacaactaaaaaaatatacaataaaaaaaaaatatcaacaacaatagaaacaaaaacacagagaagcgcacgaagctagacacaaaccaccgagcagtagatagacattacaacagaagcacacgagaggagagaagatgacacagatcagacagacgagccacgaacgaagacagagaacgatgtgaaacgaagacgacacaacgtaaacaccagtaaaaagcgaatgaaaaatgcacagaacagcgaacgacgtagccaagcaaggacggatcaatagaatacaaaaaaacaatacataaaataacaatccaacagaacataacaaacaaagaatactacaaaaaataaacaaacaaaaacacaacaaacacaaaaagaatagagaaaaatctaaaaatcacatacaacaaatcaaaaccataaataacgtgacaaacacagacagaacactagaagccaacactatacgcattagacaatacaacatcactaaaccatactacaatgactatagaatatatgacataaactaacaaaaaaagcaataataatctaagaacaaaacaataaacatcaaacacaaccatagcagaatacaacacaaaca

SEQ ID NO: 614110 - DNA, 568 bp, Homo sapiens
gcttgtctggtcacttgcctgttccaagcccaatgtgctcacttcgcatgttcacatgaacactcagctgtgttgtaggcatgctgggcatggaatgagaaggggaggccctgtgctgagttaactcggcgttgccacagaaaacactggtggtggtgagcgaatgagtagactggtgagagcccgaaggcgctgggcatagttctgtaggagaaagctgtccgtcaggaggtggctgacagggtgggtcacgtcttatatgttggccctccatcccaaggccaagggtggggttcctgaatcccaaagccaaggcggggtgacttagcacggaggtccccacagatatacaaacacacgttggtgcattcacagggacactcagatccatggtagggaaacatgcacacacagattcactgacaccaacacacgtgcaaagatgaaggcacgtgtactggccctgtggccccagcaccaacactcgcccagcctcccagtgcagagtgagggaagggagacatcgtccatcccctgtctctctggagagcaggtagagccgaggggg

SEQ ID NO: 614111 - DNA, 459 bp, Homo sapiens
cggccatctatcgatattagcgaattccctatgtgtatgcttctctttgcactgggaagcatagacagagacgcttaggagttggcctgtattcatgggcagtaggaagaaagatggttaaatagtgccaataggccgggcgtagtggcccacgcctgtaatcccagcactttggaaggccgaggcgggtggatcacgagggcaggagatcgagaccatcctggcttacatggtgaaacccggtctctactaaaaatacaaaagattagccgggcatggtggcgggctcctgtggtcccagcttgctcgggaaggctgaggcaaggagaatggcgtgaacccgggaggtagagcttgcagtgagccgagattgctccaatgcactccaagcctgggcgacagagcaagactcccgtctcaacaacactacattaatacataacatcaaatagcgccaat

SEQ ID NO: 614112 - DNA, 215 bp, Homo sapiens
ggtggtcccacgcacggagaaggtcctcacagcaaagaggctggcgctgggggcgccccagacctgatgcctgggtgtctctccctccacaggcaacatcatcggctcgggcatcttcatctcccctaagggggtcctggagcactcgggctccgtgggtctggccctcttcgtctgggtcctgggtgggggcatcccttctccggtggcgtggt

SEQ ID NO: 614113 - DNA, 736 bp, Homo sapiens
agagcatttgatcgcctacaagaagttccccatgagggtccaatgtgtgatttgctgtggtcagatccagatgaccgtgggtggatatgtgaagtgtatatcatccatcggagtggagctgtgtgtgacagcatattgggtcgagaagtatatgttacgtgagaacatattaaatcaattgcgcatagtgagcacgtcacggtgagagtgttcttagaagcatcgacacaatgcatatgtgatgggtagggatagtaatctgggtgccgaatgacgcgagaatgtaaggtaacagcattttcaagttgcatccaaaatagttatatgtttatccgctatgtaggggtgaaaccaaatgacttcgcaacatcattgggaaacttagtagggagacatcataacatagatgagtcattttggtgtgcaaaggtttgtggacactctaggaaaacgtcaggtaaaccaagggagaatgcgcatcaattgttgtaaccctccgattcggtaatcgcgccaaagaaacttaactatttttctcgtggtttacaattggaaaaaattttttctcataatatcgtgttgattgacctaggtttaatgtggatccgagtgggcatatcccgattagtttattcagtaccctaaaaggagtgtagcaccatgggtgagcaaggatggcgaaagttaggtagacttgctcgatagaaggtggtccaggaaaatagtaagattatgc

SEQ ID NO: 614114 - DNA, 945 bp, Homo sapiens
gagcggggacacactgtgactggctgcctgaagctagtgagtcgcggctgccgtgcactggtggttgggtcagtgccgcgcgcggattcggctcgttacctgcgatgccgccttggtggccttcaggctggacggcggcagggtcagcccgtggttcgccggctttctggggtcttttgaacagccgctgatgtccgatcttcacccccgaaccaaccaagatcctgcctaaccaattgtgcgccagtggtacggactgaaggctgtgccggtggcaagcgctttcggaaatctggcctgctaacaaaagacaaggtcgtcgtggcttgggctgccagcgggccgttgccacgcacaaggagccttcgaagtggaaacgttacatggcagtattcgcacatccagcgtgtacgtgtcacagtgcttctcttagcaagggctccaggtttgccccaaaacatatggacgagaattcgtccattcaagttgcgtctactgccgacaccagggacagtttgcaccccgaacaaccgtgcgccaaacctccgtggataacgtccgcggcacatacttcggatcggttactccgtgtgcacgcacacggctccccacgcggccttcttccacggtaatttgagaaggcgactaactgttacgcgagcatcgcaactatgactttgtgtcagcccagcgcagtgtgtttacagccgtgtgcaccccaatttgtgccccagaacttatatttggggttggcggcaagtgtaaccaataacagtgcgcgcgcttgcaatattccgctttgggaaatcctccctatacacggcaagctaacgcaatgttagccaatcccccggttagggaactgtcccgtttcataatttgtggcgccggtaacgggatatgtccctatattggcgaaagatgcgtgcagcaacattccgccga

SEQ ID NO: 614115 - DNA, 206 bp, Homo sapiens
agctgtcaggctagaggatcccttcctgacagcaggggtgctggttcctaggaaagtgtctgtctgccctcaaccagcgtaggaatcggaggagaaagccggagttttgacacttgccggaatgtactggagctgatttattggcagactctgacctggctgggggtgctcttctcgcacctactacccggcgtcccaagcacagg

SEQ ID NO: 614116 - DNA, 842 bp, Homo sapiens
gcaggagcgctcggacagcccgagatctgccattacgatgaagagctttcacaagcactcgtgcaaccccaagctaacacgcactgtggcctcttcggggacccacagctcaggactttcagccgacctgcttccagaactgcaaggtgcagtggcgcctgtgccgctcatcgacaactaattaccatgcacgtgcaggtcacacaaacacgaccttgtgcttgcccgtgctcaagcgtgcccactgggcaccaggcacagctcaccatcgatcttcacagaaccttccagtgacgtgtgctggaaccagaaacgggtggtaccaagtgctagaggactgcgacgacgcatccacgggccgacccttcggtgggacttgggctcctaacgaacacggggtgagcggaacacacgcgacagcgcggaccaaaacatggccatggacacgaatcgacactggacgcacacgggatggtaccaggggcacgagacacagcgcttgggcaagccacttcccaaggggacaccagcagcgtacccaattcggggaccagcccaacgacaaatcagcctgcgattggccgaccccaagaggctagagaggaccccgtgcgttcaacaccgtggaaccccattatatgggccacagggttcccagacaacattggagccccaaatggaaaaagtggaaacaaggggttggggggctcccgacaactgttgggcgagttggaatgagagaacagggtggaaacagatattaggggaggagaaacagagataggaggcgagccaaatgaggggggagtatcgcgttccctggttaacgcgacgcagttgag

SEQ ID NO: 614117 - DNA, 251 bp, Homo sapiens
agaaaatgtcatgtgatgtctctccccaaagtcatcatgggttttggatttgttttgaaaatttttttctttttttcttttccctcctttatgccctttggggccttgggaatacccagccaactctcccccctcaatgtaactccatgggcattgctgcttttgggggggttatttaatttttgtgatagggaaacaaatttttttgaataaaaataaatacccaaccaataaaagtttattgagcccca

SEQ ID NO: 614118 - DNA, 339 bp, Homo sapiens
caaataaccgatattccatctgtgcacactcatcccagaccaggccccttacctcttctgggagtcttagacctatggtcaaaatgttattgctcctatccccgatacacagaagaacggggaaagtctgtttccatgtgttccacctttacacacctgtaaatgtcagcactatcaggggcattgcactaagtaataggccgtgctacttgaggacaaactgcatattaagctatttaagacgatgtagaatcggatgtatatatacaggctgtgctacacgttaaaatatcatggtagtctatgtctatacagcaagaacatgtgtgtgcatacact

SEQ ID NO: 614119 - DNA, 178 bp, Homo sapiens
cagtcggtaggatacttgtgttagtagcagaaagtgagtacagtggggattgaagaggaagctggcacaagtctgtctggtggagggcccagctttccctgactagcgctgagacgtggggcaagtcacttaattctctgtgctttgtttgcctcatctatgggcacacattatggag

SEQ ID NO: 614120 - DNA, 110 bp, Homo sapiens
ccctttttttaaaagggaaaaggggaaacaaaaaaaaaaattaaaccttttttttgggttttttccccttccccgggaccttaagggaaaaaaaccccttttccaaggga

SEQ ID NO: 614121 - DNA, 237 bp, Homo sapiens
accaggcccagggattgcagcttgagctccccaaggcccagggcacccgggtgaggactttgtcctgtgtcccctctctccaggtgtccagctgtttcatccctttttgtcctgtcctcagctccccgtggggtcagcgaaaccattgttttttgttaggactcagttgcaagaacaaaacccctgcccccccttaataataaaaaaaaaagtttattgatgggtggttgcaaacca

SEQ ID NO: 614122 - DNA, 90 bp, Homo sapiens
ggatttgctggtgcagtacaactaggcttaatagggacatgcaaaagaatgaagttggactcctaccttccactatacacaaaaaaaaaa

SEQ ID NO: 614123 - DNA, 392 bp, Homo sapiens
gtgctctgtgaatcgtgccgcataaacatacgtgtgcatgtgtctttatagcagcatgatttatactacatttagggtatatacccagttaactgggatggctgggtcaaatggtatttctagttctagatccctgaggagtcgccacactgacttccacaatggttgacctagtttacagtcccaccaacagtgtaaaagtgttcctatttctccacatcctctccagcacctgtggtttcctgacattttaatgatcaccattctagctggtgtgagatggtatctcattgtggttttgatttgcatttgtctgatggcctaacactacttgctccactatggcaaacctgaatgtcattgagattgagaccaatctttgtatatgtctg

SEQ ID NO: 614124 - DNA, 519 bp, Homo sapiens
  misc_feature (244)..(244): n is a, c, g, or t
  misc_feature (250)..(250): n is a, c, g, or t
  misc_feature (261)..(263): n is a, c, g, or t
  misc_feature (318)..(318): n is a, c, g, or t
  misc_feature (338)..(338): n is a, c, g, or t
ggtggaatgaaagagaagctctgaagatggatcatggccgtgactgcatgtcaaggagagtctccttgatgacactgaggcctacgtcgagatagacaaaatgtggtccaattaaaaggtgtctattttaccacattttttaaaacaaaacaaaacaaaacaacaaaaaagatggaaaagaagacaggggtacaggcaccagtgtacatgtctgacggggaacatctattgttcaaagcttgcngctgtncaagtaggttnnngaatgtctgtcagcagtggacatgatcttagagtgggctgtgcagatagaccttnccaggtcatgtaattggatnaagttaattgcaattaaggtacaggtaactgattaggttagggtacgttccatgtcaggtgaccagaggcagtataaaaggcagcctggaaagcggaggtccctctctgccccttcctccgtcgtcctggatgctgcatcgcttccagccgagctgctgcagcacctgcccatctcagcgc

SEQ ID NO: 614125 - DNA, 453 bp, Homo sapiens
ggaacaggttcaccgtggatccacattcagtgtagagaggaccagccagagctagctcagtagacgcatttcagaatcatcagtgaggagcgcgtagcagaattatcccgttaacactgagaccacatttcacctgttacttatttttctaaatggagtaggagagaaagatgctaaaatgtgatcttgggaggagtcccccagtcccccgaaaaagaagaagaaaaaaaaaaggcagagctccaaacccctgtggtcatggcaatttcccatcaaaactgcccatgtaaaataaacacaagctgctaaaagtgaatgttaagaaggaaggcactgtttagtgggtgcccctgaccaatcccctggagctggagaggggtttccccacggcctttggtttaatgggtctgaaaactcaacaaacctccgtttccctgaggtaatctgcaaaaa

SEQ ID NO: 614126 - DNA, 137 bp, Homo sapiens
  misc_feature (33)..(33): n is a, c, g, or t
ccagtaggtgatctggtcaatgtcagcatatcntagcatcttcgttcttgaattcgttctggaactgcatccagcacttgcaaattcttcccatggtcctttgcgatcctcatcaccacttatataatactcagtaa

SEQ ID NO: 614127 - DNA, 267 bp, Homo sapiens
agcggatgtctcaatatttagatgattcatctttttaagtgagcctaattttgaacatagtgctaaagtcaatgcaggcagggtgcagtggcccacatccgtgaatcctaacactttgagaggctgaggcaggcagatcacttgagtccaggagttcaagaccagcctgggcgacatggcgaaaccccatctctacaaaaaattaaaaaatcagccaggtatggcagcgcatgcctgtggtcccagctacttgggaagctgagctgg

SEQ ID NO: 614128 - DNA, 611 bp, Homo sapiens
aagcggccagcgacatttgcagtgtgagaacagactaatacaataagttgataccagtagagtggggtgctgcatgtaaagatacccgaaaatgtggaagcaacatttggaaatgggtaagagggagaggctggaacagttgtggaaggctcagaagaggataggaaaatgtgggaaagtttggaactacctagagacttgtagaatggctttgagcaaaatgttaatagtgatatggactacaaggtccaggcgtaggtggtctcagaggcagatgaggaatttgtctgggaaatggagtaaagtcactcttactatgctaagacactgcaggcattgtgcacctgtattagaaacgggcattagataggcgggaaagagggaaaattagaattttctttctagagttccctacagatctgtggaactttgaacttgagagagatgatttaaggtatctgacagaagaaatttctaagcagcaaagcattcgagaagaagcagagcataacagttcagacaatttgtagcctgatgatgccacagaaaagaaaaatctattttctcaggagactgggttgtagaaatctgctaagtcatgaggagccaat

SEQ ID NO: 614129 - DNA, 120 bp, Homo sapiens
ggattacacttgttcgtgggctgatggagcagagtgcgcttggtgctgtctgtggtgtaaggagcaacaggcgatcaagttggctttgcagccgcgccaatacggcgtccaggtatgccc

SEQ ID NO: 614130 - DNA, 122 bp, Homo sapiens
ggaagggggggggggttttccccccgggttattttcccccccccttcccccccttgggaaaaccccccggggaaaggcttttttttcccgggggagagccaataaccttggggggttgggga

SEQ ID NO: 614131 - DNA, 138 bp, Homo sapiens
  misc_feature (84)..(84): n is a, c, g, or t
cccacgcgctcggaaacaaagcatacactcattattctacgcagcggactacaaccacggaccaagtgatatgaaatagaccantcgtctgtattgtcaactacaaggaacaacataccagaaatagaacaaaggggc

SEQ ID NO: 614132 - DNA, 190 bp, Homo sapiens
ctattaccgcggtcacattcctaaattcgctaaaaatttcctcgccgaaacgggcgacatccgcgcggctgtgcggcagtatatgtgctgacgtggagtccggcgttcatccgggcgaagaacacagttcccattaaggagtcacgttgtgttaattatcgaaaccctgccgctgcttgcgtcaggaggg

SEQ ID NO: 614133 - DNA, 239 bp, Homo sapiens
attttaagtgatagtagaaattaccaagcatatgaggtatttcattatgataggcttctaacattttattagttactcatctttgttccacggacccttgcctgatggtaggggaatggtaaagcatagattaccagccagttgggctctgattttgagttatttataataaagtttggggaataatcataacatctcatatctttgtgtatgttgttttaatgctcggcagagcacaa

SEQ ID NO: 614134 - DNA, 133 bp, Homo sapiens
gatctgcatactctttcctatatgatgctgtatctcacatacccgggactaagcacacgccctatcactgtctttctggggatatcatagctagggctgtaatcactccttctaaggagatccctcattgtag

SEQ ID NO: 614135 - DNA, 250 bp, Homo sapiens
catgtgatgtaacctgtgcgtctgtgatctcacaagggggacaccacgagacgatttgtgggcataccaaggatgtgctgagtgtggcttctcctctgacaaccgggagatagccgtctggatctcgagataaaaccatcaagctatggaataccctgggtgtgtgtgaatacactgtccaggatgcgagccactcagagtgtgtgtctagtgtccgcttctcgcgctttagcagcaagagagcagcagg

SEQ ID NO: 614136 - DNA, 933 bp, Homo sapiens
gccgactctgtggagtctagctgccagggtcgcggcaggctgcggggcagagatgactggggagcgacccacgcacggcgctcccggtacagacgctgtgggccgcggattctgggcttctggggaggctgtagtggtttgggtgttgtggcgcgatcttcctgctgctgtctctggcagcctcctggtccacaggctgagaacgacttcgttctggtgcagccgctggtgaccatggatcaacatgctgtggcgtgagcgggcagcacagatcggctcacgtggacaccttccgtcatcccgttcatcaggagccactccgccgtgggtcactcttctctgcctttgtctgagtgcgaggaataatgtgctcatccgatgagggggccaatgttcgtcgccctgcggaggtccctggaccagtggctagcgcatggctctcctacagcgttcaattgtcgatgattgtgggatgtccccgactgggctgaaccttggggcagatagtgagccacctgttgatgacctgagctcgtgatgtgttggctagtcccgatagttctttcaaggacggatgtgtggtcggccgcgttgaccgtggttggcctcagctgttggatgtcaaccatggaatgcatgtaccggcccagctgcccccgtaagatacccgagaactgcaacgtgttcaggcaccctggacccagggcctctgtggattccagagaataccacgtgcagccacggaaatggggccgccctccatcgcgtagtgtggacatgggaaagccagcgaaatggaaacggaacacactgagtctaccacaaccgaatgaaaatggtagcaaactgggagccaccgaaagaggagacatgggaacacgaacataagccacacaagaaaataatgaaccccaaacaaggagccaataaaac

SEQ ID NO: 614137 - DNA, 149 bp, Homo sapiens
cctaaaagtgccttgtaaggaaatttttgaatgttttaaaagataaatatttttggtacacagagttcaaggggaaatgcactctaaaatccaagaatggatgttctcgtgtggatgagaggtggttggtatctcaaagcaaaatgtat

SEQ ID NO: 614138 - DNA, 953 bp, Homo sapiens
  misc_feature (483)..(483): n is a, c, g, or t
cccacgcgtccgtgactattctctacaaaccacggaagacagtgggaacactatacctattatttcggcggcatgagcctggagtcctgaggtcaccagctctgaagcctccttattcgagtccgagctggggccagcccgaaggtcaaccttctgaggtaacgaaccacgatctacaagcgttatcgtgctagcagcgcccaggctatttgataagtaagctcatatcgtatcaataggtaagtacccaatcatataagtcggcagggcgttatggctaacgtgacatagatgtccccctaagtaatcgggtgcccccgaatagtgggcgtctatcgccccgcattaatactaagcatacagctttctgacgtcttgtaccatcccactctcgtcactacatcccctgctgcggatcgtgctgtaattagtggggtaggccaggagctagcggaacatggttcgaacaaggtgcctaccgcntccgcttaagctagggaaagctacctctcccacacacataggaagccctcctgtgaagaaccttgaaccaaatcattactcacttgtacgactctgagacaaggggtgtcatcacatcttagtctttaagtgtggcgcagttcgatattcccatacggacgaaactagatttcgatgcaaaatcagttaaaatatcgcgccacgtggcccatgataccacgaaaataacccaataacgaccgccgtactgtccgtcgttgaatcccgtgcgcatatattcagcagaccagtccgtacttctcactattctctactccagtggacctaggctgctgggcaatcactaatagctactaacaagaaccggaagagcctcaaagcaccaacgtttctttcggaacccccgagcgggaaggaagggaagaaccccatttctatatacaaagaactaattgcctggacttaacggg

SEQ ID NO: 614139 - DNA, 450 bp, Homo sapiens
gctgagctaccgggaaaaagaaatatttgacaaccagctccttgaagagcggaaccggcgccgtcggtgagggagcagccggctgtgctgtcagcggggctggcggtggaagcgcctccagtgtgcatgagcctttctgaagatggggggctcgagggggcacgtttgtgtttggaacctgtctgtgcgttcctctgcgtggccatcctgatttccatacttcgggagaaacccatttggtaaacacggaaacccagttctctttcccgggcatttttttccatttttttttggccttttttaaaaagaccccgtcgggaaaggcttttgaaaggaacgaaggctattcaactggtgcgcaataccccctggttgtgctgtggtttctcccgacgtgcacatcgatctcgtatgtgtggcatctgatattaaacgggaggttttaagaaa

SEQ ID NO: 614140 - DNA, 1213 bp, Homo sapiens
  misc_feature (1213)..(1213): n is a, c, g, or t
ggtcagcttccagtccgatatgtagcactctaggtacaagactcctgcgcgcggagtccacggcagacgacgatgctcatacacggacggcgtaccgaactgaccgcccgtcgacctactccaacatctcggagccgcagtgggtcattcgctggtgcgagctaggcttgaactccttcgccgctgcacggttggctaccagtcggttcaccgagtagcccacgagccagaagatgagcatgcagcgtgtgggagtgaatgagagcgacgactagtcgctacatcgcttcaaagcaacgaactatcgaaaatcgatctctcctcatgttgggtctggcatcacaatgcttgtgaacgcctcctatcaggcacatgacctgcgcgagagcctcacaaagagggtccctcgtgctaaggaagcggaggacgtagcatacgtgtgactgccaccacgtcgaattcgagacgtggaacgatgcgtggtacttctgcgtgcgaggaattgggtggatatcatgccaccatgcggggcaaggctgtgggaaggaatggcaccccgagagcagcaccgatggcctcgagaaggagctgaaggctgccttggtaggagtacctcacgcgcttgaaggtgctgtggtcgagtttttcgtcacttagattgctggttgaagtgtgcgtgagcgtgcgactgttacgaggctagtagccacaaatgacccttcattgtttggtttttaaggtcccatacgcgggtatgttggtagtgagccagctgaccatttggtgctaaccagaagaggtggtgctttcgttcccctttgatttcttccttttcctaaaatggttaatcccgaatcatcctttgacagatgggccacccgtcaggtgtgaagctgccgaaatagagtggccatttaccaaaccaaagcgccgagctaagtctaccgtaaatggtttgtagccctttctccgtgtggggcggagccatgggcgttgcggcaaggtatctttgcttccataccttgactttgcttaacattctcggtctttacacccctattcatgctaatggggaactacagtcaataaggggagcagccggcgcacgcgaatagccccttgctcttttgggcggcgaatttccccattgcattaatcggcggggacaaactgaagcaggtctaccccggacctgatgtgtcgtggacccacn

SEQ ID NO: 614141 - DNA, 135 bp, Homo sapiens
ttcggggcattctggactctcattcaagaaacgaagtgatttccagaggattacacttttgcttgacacggtcagtgctgcttgcccatttaataaagctggacagcatccaagtcagcatctcatcggtcttcg

SEQ ID NO: 614142 - DNA, 1260 bp, Homo sapiens
gtggctctggatgccgggctgagacggtgggaagcagtgggtagctggagccatgggggactgctcccagccctgaatgagaaactgcaccttatcaccctggaacctgcaggaggttctggtgggcaagagaagctgaagtgcagatactgaagtgagcgggaacttaaaatttacttggggaactggcaaccacgggcaaaccacatgtggcttacttttgtgcccatgtcaacagattgcatgacttcttaaaggcacgggttgtgaggtaacaattctgtttgcggacctccacgcatacctggataacatgaaagccccatgggcaacttctagcaactccagagtccagttcactcatgcagcacatgtagatcaaaagcaatgctggcagcagcattggttgtgcccttggcagaagctcaagtacatcaacagtgcactgattaccagctcaaccaaagagtacacactagcatagtagtacaggactctcctccgatggtcacacagcaccgattccacagacaggctggagctgaggtggtaaagcaggtggagcacccatttgcgtgagctggcctctctatatcccggactgcagggcataggattgacgagtcatctacacaggtaagatgcccaagtctggaggccattgactcagagacaatgatcattcaccttaggcccgacgcaggattccgtcccatgcggcgtatgggatatgcaacaacgtggacccagctctgtatggagtcctcaatggctcccaacgacataacatcgccgatacaatatgacaccccttctgacagcagacgcctcagcctatggaacctcaagtgaacggacattcttcgactttcacgaaacaccgtcacaccaaagggcctctctctttacacccttaatacagtttacacaaccacgtcactcttatcccatacaccaaccacttaccattacacccctacaacgccatctttcgaccacaccacagcacaaagatcatcaacaaatcatcattcacttttctgtctctcaccatctcactgactatccgatatcaacatctactcgtcactattttctacctctcacatctttactccacgtaccaaaccacacccactctaaataggatccacctaccagaccacctgcccaccccccctccccacacctacatccacactaatgtacacgataagaacgagaaccaatgactttctaaacaacacattattcattttc

SEQ ID NO: 614143 - DNA, 1187 bp, Homo sapiens
  misc_feature (1187)..(1187): n is a, c, g, or t
ggccgtcagatcacttcgattagtggcgtcagcggatgtgattttgcatcgtttcatgtgcgatgtctactgtcgtgagcatgccgtatatgcttcgcagctggtggagtcaggaagacagctggccttacataccttctacgcatttaggagtgccgcatgaaggactgcgactcgagatcccctgcatgactggcttctgtcatgatcctaaactggctgggaagtagtgtgcctgccaatactcgcgtgggctggtgaacatgccagcatgagagatacatatcctcatactcatctactcgggtggttcggtggaacgcactctcctctagtcggatctgcacgtgcctagtttgtacctctgttgtgcggcattctcacgcacgaattgctgacctgattaatcattaaacgtttagacaccgaagacttgcatcaatcctggaaagccttggaccctttccatgagggagttggtggtagaggtgagtgaaatccagctgccatcagacttttcgagaaagatctctggatccattgaagttgtctgtactagaaggaagcgggcattcgctcactccgtggctgctgcttgtcgaagatgatgtgcctacgtcggaaattctggtagcccctaggctgtgccgtcttggtttcagaaattgatactcaataatccccttgattgatcgccctatcaccactgcttagaagtattgagatcaactcgattccatgttgcgcgcgaaaaaggacgtagttccggagagttgagacattcgccccttgtggaatatccgtggggcaaagagggaggaagtcgtatagaaggtttggagaacggggtcaagatgatctttctcaacttggggcagttctttgctcggttaactttttgaccagaagttctcatggatgacagaaagaattacccctttgttggaggttttcctaaggatcctcgttgggtcggagcctgtgtttgttttgctctgtctttggaggaggagaaatttcccgcctggctagtttaagaccctaatttggattcggccaggtgttgtggggttacctcttatttagattttttcccccttataaccctcagtttgctcttttccaagtctttcgtttgtggaagcttcggaaattggcgaagaacttcgcaatgggtctggaaagtn

SEQ ID NO: 614144 - DNA, 196 bp, Homo sapiens
aagtggaggtggagcacagagaactacaggtcagtggaggtggagcacaggactacaggtcaatggaggtggagcacagggactacacatcagtggaggtggagtcacagggactacaggtcaatggaggtggggcacagggactacaggtcaatggagatggggcacaggaactacaggccggtgcaggtgtggg

SEQ ID NO: 614145 - DNA, 833 bp, Homo sapiens
tagtgctaggtaaggccggtgttattcggacgaggcacggctgtcaggcacgcatgcatgccagctaccggtgagcacgtgaatgtgagtgtgcagcagctgcatggcaagatccggactcttcagtgagcagctggagaatggccccaacacgcagctggccctgcctgcatgcaggatgaactccatcctgcgggatgccttgaaccatgtgccactgagccatggtggatgatgcaatgcagaactgcatgatgcttgtgccaatgcttcgtgcatgtgatgctcatgcaatggtcatgcaaatgatgcttgtgtgtgatgaatgtcatgatgtgcttgtgctgtgcaatgattgatgcatgcatgctgtgaaatgctctgtgaatgccaatggcatgcttgccttctgatgaatgcatgtgtccttgcatgcttgacatgtgctgtcccacatgtgggatgatgttgagtgatgtgccactgcatgaatgctgccttggagctgatgtgtcagtgcctggtgatgcttgtgccacagctgcaggatgcagcacacagccatgccctcctgtgtgctgtgaattgcctgatgaatgtgcccagtgatgcaacatgcatgcagacttgtgcctgaagtcttgccacatgcaatgttacatgtcccttcccgatgtgctgtgagtgtagcggcatgcaaattgctgagtgatgcttgaagtaggccttccatcgtggcaatgtctccaatgtgatgccatgggctggatgaactcccagtctcacatgagagaatcctgttccattttgagggccctgcttgagtgcgggca

SEQ ID NO: 614146 - DNA, 341 bp, Homo sapiens
  misc_feature (5)..(7): n is a, c, g, or t
  misc_feature (90)..(91): n is a, c, g, or t
  misc_feature (109)..(109): n is a, c, g, or t
  misc_feature (123)..(123): n is a, c, g, or t
  misc_feature (292)..(292): n is a, c, g, or t
  misc_feature (329)..(329): n is a, c, g, or t
aatgnnnagagcaatcgtcatgtgttgaggatgaaccatcatcagcatgcgacggttctccctgagagtggaattatgtatcagaagatnngtactctcacacccgagntctaatcactcatnccacactggaaacgactcctgactcggggacctggagaggaagcggcctgctagcatggcggtgatggaaggagacttggtgaagaaggaaagtcctcccaaaccgaaggaccctgtatctgcagctgtgccagcaccagggagaaacaacagtcagatagcatctggncaaaatcagccccaggcagctgctggctcccaccagnatctccatgggc

SEQ ID NO: 614147 - DNA, 1037 bp, Homo sapiens
gctcctactcctcatggtacccagttctaatcgcaagggcattgcctaatgcttaccgagatcgaaaaatttctaggctatatacaactacgtcacaaggtcccaaacgttgtaggccccgtatgggctactgaacaacccttcgcatgacgccataacaactcttacaccacagagagccccgtgaaaacctcgccactatctaccagttcaacctcgtcttacatcgagcggtcccggagcttgtagctcgtgcaatcaatcgcatcgttctactatgaaccctcggcctcccccaatgaccgcaagagccctcgtggttgcatagactcaactctgaggcactcactattttattctaacacgaactcgtaggcctagcctgtgttacgtcgaagtctcgtacgtgaatgcagggttgagcgatcaaacatcaaaactactgcctgtgtatctggcggacttgcgatgtagtaagcccaaacaaatctcatatttgaagggcacctctaatcgcagtctagttctacgtatccaacagttacgtaagtaggtggctcctttaagctcgtctccaccccgttatcacatggacacggaatgagcactcctgattagcgtccgtgcccatgcatgaaaccttgggcataagtatgatttatgctacacactaagcagaagagcaaccgaatcgccgcttcgatcttgccggagtggggagtccgaagtaggtctcagggcttaaatattcggaatacgacgggagggccccttggtcgctatactttgatagggcgaataaaggaaagtgttataataaatagctaagcataaggatttcctagaggacatatgacggaatgtgccctgaaatgtagagaaatattgggtaagcagacctattttaactccgttttatgaatgaaccggtagcccgatcgatagagcactataagtgtatgagaaattctacataacgagagtaggattaaagtcaacgtgaattcaaattcctggtgaagaaaaaagggtttggg

SEQ ID NO: 614148 - DNA, 361 bp, Homo sapiens
  misc_feature (41)..(41): n is a, c, g, or t
  misc_feature (51)..(51): n is a, c, g, or t
  misc_feature (287)..(287): n is a, c, g, or t
  misc_feature (297)..(297): n is a, c, g, or t
tacaccattatttctgcatatcagagacttttagtactttnactaattttntactgctatctaaaaggcagagccaggtgtacaggatggaacacgaaagcagactaggagcgtgaccactgaagcacagcatcacagggagacggttaggcccctggataactgcgggcaggcctgactgatgtcaggcccctccacaagaggtggaggactagagtcttctctaaactcccccagggaaagggacactccctttcccggtctgctaagtagccaggtattttttncttggcactnacggtactgctagaccacgggtctactttggcaaacaggcgtttttcccagattgttggcgtta

SEQ ID NO: 614149 - DNA, 656 bp, Homo sapiens
  misc_feature (1)..(1): n is a, c, g, or t
  misc_feature (344)..(344): n is a, c, g, or t
ngagatgtttaaccagcccccagttttcctgtgacggtattagtgcgcatttgcagggcgtactaaatatacccccccgccttacgccaacaaattggggcccccccaatagagcgggcgggcctaaaacaatagaagtaagagtgggtttacaaaggaggaccccttctgcgcccacggcccaaagaattttcttattgaagatttgatgcccccaaaaggggcgaagtacaatgtgagaaagagtttttggtgtctcttttctcgcccggcatgcattttctccacttaacagctctccacactgtgcataattcaccgatgtttctacagaagttctatgncgatacccccagatattaattatgttgtttacccctctcacccaactctgggagataatatttatcccacaaataataatatcactctctatacataatataagatacatctcacactgatatagtcctcctccccctcgtctatattttccaaaatatgtttttataataaaactaatagaaactttatttttccacactataatattgcaacaaattattactagtatattataacacactaccacacttcataattgcgttccctaaaaatacacaacttcttgcaccatcaccacgacaaaaatatac

SEQ ID NO: 614150 - DNA, 616 bp, Homo sapiens
gagagggctgtgcagcagcgatggccctaaggatgctctgggctggacaggccaaggggatcctaggaggctggtggagatcatctgtcttgtgtgatgtcttctacttctctccatgcactccaggatgtctagcagtcaagatgactacttgcctaagcttccatgcccccctgtctctcatgaggtggaagatattgttaccctgggctgagtccttggctccgcccacggagcctgtgttccatgtgcaccgtgtctgcggtcctgtttggcgttgttggcgtgcatgttgacatcggtcccagtcatccctagtcgtagcttccgctggcttgggtgtgaggtgtacgtcggcgaggcgggaacctgccatttctccttggtgctccattcgtcggcaccctcggctgcccgtgcataggggggaggaggccatgacgccagaatggggctcagcctatgacccctgttcctgcgggctcctgttccccattccagctcaaactccaattgatccatccatctagctgactgctctactgctcgcttggcacttccagggaaaccatctatgcagtctgcctaatgtattctggaacaaataaatcacatg

SEQ ID NO: 614151 - DNA, 489 bp, Homo sapiens
aacttcacatcacgtcagcaattatatatctcattagtggcgcggtgtagtgtgcatgtctgaatcatgtgtatcatactgtatctgtctcattaatgacagaacatatatatcccagccatatctatcacataagtaatagacaattagaagtgcctatgttttgatcaattataaagatagtaaagatatcattccggaaaacgactttctcttattcattcacccacattctcaactttatgtgcctgcaaagcactggtccccaataacaatactttataccctagatataatgtgaacaactaaatatcatttcatttacgttgtgctcgaacagaatacatagaaagtaccaagagaacacaccacaggggcgcataacataaatgaaacattagggtattgctaaaacaagttggaattaatcttacattaaactttgtacccacttaccttaaactattatgtacacagacaagatgcaaa

SEQ ID NO: 614152 - DNA, 90 bp, Homo sapiens
  misc_feature (47)..(47): n is a, c, g, or t
cgggcgtgccgcttgcttgctgctggtcgcctctcgacgagctaccncccggcccagtcgctagtccttcttggccccagccaactgccg

SEQ ID NO: 614153 - DNA, 1027 bp, Homo sapiens
  misc_feature (224)..(224): n is a, c, g, or t
atggagacggcggcggctgtagcggcgtgacaggagccccatggcacctggcccagccccagctcagcccatcttgaccaaatctaaggctccattggtagccactcacggggcccccctgtccaactgtggtgccgagtccatcccgggacagtgggcaccgtcaaagtatacctgcgccaagcaagtcaacgacacggtgcgtgacgtgtcctgtggatggncatgatgtgtctactgactctctatgacaaggtccctgaacggtgcggggatctaaactcaggactgctgtgtggtctacctgagctcactcaacggggtaactgagaaccagggaggagtgaaaccagcagataagggaggactactgtcagttcaaacgaaagacggtcactgtctgtggacactagccattgctacccctggatggcgaggagctcattgtctgcatggtccttgaacgatgtgcccgctgaccatgcacaatttggtacaggaagaccttcattcgagcctggcagttctgtgacttcatgccttacgttagctagttccatggcttccgtagccaaacctgtggcttacaagttccaccagcattgtgcctccaaggtccccacaggctgtgtgacatgagtgccaaacgcaacagttctaccacagtgtccaggatctgtccggagagctccagacagcatgaggctcccgccgaaaccgaccctgaatgatagcgaacccccgaggtccaagtagggatggctgagcgaacaccgctgggcgaaagaaagactgagggacaaggaaccaagagccatacgtatacatgaaactgacaacattatgagccaaaaagccccggacagatgtgacgagaaaaccatccggccccaagcccataagaggcgcaacaacagcaagaaagaagacggaacacaacagagcaaaaagaagaaagaagaacaggaaaaagacaggacaaacaggagcaacaacgccataagcaaacagaagacggcacaacaag

SEQ ID NO: 614154 - DNA, 366 bp, Homo sapiens
acggtgaccacgcttacctttacctggacacacgacacaacctacttgaacaccacgtgacaacgcacgtaagttgactactacgacatgtggtactctcgtttttacactaagactctcaacctttcacgtaacagtttacttctgtactcacccacgaccacgccctttatttggcaaccaagttgactgacgactttaaagactggggattataacctgtttccttctcttgtaaccaaagatgggagtagtcccgcatctctttgatcaatatgtgctcctttcaggtgtacctgggacctgccctattcagagtgtctagatatcatcccacctgagtccatgacactcagtctcttccct

SEQ ID NO: 614155 - DNA, 362 bp, Homo sapiens
cagcccgggtcgcagagcaagactccatctcaaaaaaaaaaaaaaggcttaagggactttggggacattttgggggacccaattttttttttaaggcccttaagggagggaaaaaattgtttttgtaagcggggagggggaaataaaattaaacccttggaggacttaggggttaaaattttttaaactgggtgaaaatttttaaccccacagttccagggggttaaacaaccccaaattttaaaaaccgggaaaaaacttagttttggggccgccttgtgggaaaagatttagggagaggcagttgctttttggaattggttggggggtttggttttggggtttgggggttggggggggaa

SEQ ID NO: 614156 - DNA, 851 bp, Homo sapiens
tgcccggcggtaaatactgggcgcttttaagaccacccccgtgtggtgagtgtcgccccttacccgccggactgtggtttctattattccgggtgcacacgaccaacaaataaagctggggcggttcctcacaccgcccccctgcgtgaggaaaccctcggggtgagacccatggagtgccgtgcgggctgccgcccacgaagaacagatgtaagataatagtagcgcccggtcgacgtccactgcggaatattcggtgccattctgattgccacaccacgccttgccatgtaaccaccggcccacaccctcgaaaaaggggtatgtcgagtatgaataaatgccatattgatgcaacaagctcgcaccggtcggcctttcgcctatcatccgccccggggcgagagacatgttccgccgtcgccccgaaagagcgttgttcgcccctctgtatttcgtaggataatctctgtcggagagacccactctctctccacagtttccaggagacatagtgagaaataaccaccacatcatgtgtatttatgtgagaaacgagactaactatgttttgtagggaatgacctgatctacccgccatgttgtggcggtatgattttgcacgtcaatcatgattatagagagcacgacacttgtttttttataacacgagtatacagtgttcacgtcgatttgtttgaacgaccacgacgaactttctgtggggacaaaaaagcacagcagaacaagggttaagagagtaggaggatagaataggtgcgaaaaaaatgagacagatggtagtaaaagaagtaagtaaataaaaaaagataaaagacccaacaataaca

SEQ ID NO: 614157 - DNA, 645 bp, Homo sapiens
  misc_feature (379)..(379): n is a, c, g, or t
ctggtgtcgaactcctgacctcacgtgatccatccgccttggcccccccaagtgctgggattacaggcgtgagccaccggcctgtagttttaaatttactaatgttaaaactaaagttttaaaacccggcctgtagttttaaatttactaatgtcatcatgtaccccctgtgtgtcaggagctattctgctatctgcttgtgtatacatcttgtatccttgtttgacgttcaaagaaacgcgagggagcttggaagacgtgtcccaggtgaaagagctgggaagcagcagagctcagatttgaccccaggctacctgactatctgaccttcagcctcccaagagctgtacttttctatactcctgctctctcctttccnggttccctctgcacctcacgcagctcagcacactcctcagtgtgtggcacttcatcaatattggtctatgcaaaccttttgtcttttagttttatttctttcccttcattcccagtcccctgcctactttcctttttcccaggggcacccatccaattttaatgttttgatacatatgctcgaaaagctaaagcattgttctgcatatgtgtgcattttaaatgtccataaatggcattgaagctgtgaatcagttaaaaaaaaaa

SEQ ID NO: 614158 - DNA, 309 bp, Homo sapiens
tcgaagtcgccgccgacctgcggaagacgttgaggaacgtcatcaggtctttctggtcggcgccctcgacgaagatgtcgcccttggtcgccagcgcggcgctcgcccagctggcggcctcgttgcggtcgttgatggcccggtgcgtgtagccgcggagggtcttcacgccctcgatgaagatgacgcggttcggctcgacggagacgatggcgcccatcttctgcaggatggcgatgaggtccatgatctcgggctcgatcgccgcgttgcggagctcggtcaccccgtcgtgtggagcgggtaccg

SEQ ID NO: 614159 - DNA, 122 bp, Homo sapiens
agttcaagaatataccatcactcccagtgagtgcaaggtttctaaggagcaagctggctctcctcactcactgctgcctggggggtcttgaactaggtgctattgaaacttctaaaactagg

SEQ ID NO: 614160 - DNA, 221 bp, Homo sapiens
agttaagcataaaatatgcatcacaatccctaatctcaagtaatcaggacacaaacactgcggaaggccgcagggtcctctgcctaggaaaaccagagaccttggttcactgtgtatatctgctgaccttccctccactattgtcccatgaccctgccaaatccccctctgtgagaatcacccaagaattatcaataaaaacataaattaaaaaacaatgt

SEQ ID NO: 614161 - DNA, 143 bp, Homo sapiens
cactctagcaggatctctggtcttagggagcctcatgatactttctcattcttccaaaatcaggctggatgcattctgtgaaatttttcccgggcttaggatgtatactgaggaataaggtaaggaagatgtcagcaagtcag

SEQ ID NO: 614162 - DNA, 136 bp, Homo sapiens
ttttggggccttccaaaagccctggcttttgtttttccttggtttaattggtttcccctcggattttttttcccaggatttttgccccttccccccccccgaaggggttgccttttttttccccccctttttccca

SEQ ID NO: 614163 - DNA, 494 bp, Homo sapiens
atccccgtcccaaggatgaggaagtgaacactgctagcatggcctataaaatcaagaaccaagttaattacttctaagatacaatgaaggtacaggcgttggatgaggatgctcccattctatataggagaactggacaaaacaaaggggctaaaggccccatgcaagtccagaatccagcagggtagtcattgaattttaaagctccaaaataatctcctttgaccctgtgtctcacattcaggtcacactggtgcaagaagtaggctctcatggtcttgggcagctctgcccctgtgcctttgcagggtacagccccattcaaagctgctttcataggctgccatagagtgtctgcagctattccagatgtacaatgcaagctgttggttgatctaccattctgggatttggagaatagtggctctcttctcacagctccactaggcagtgcctcagtggggactgtgtgtgaaggctctgacctcacattt

SEQ ID NO: 614164 - DNA, 858 bp, Homo sapiens
tggtgttccaacaaactttatttatgaccactaaatattcatgttaatttcaagtttcataaaagtctttaaaaaaaaactttaaaattataaacccaatccctaccctcacaggccattaaaaagcaggcagcaggcgggatttgatccacaggccatagtgggctgctctctaaaacaggcttttatccgtcatgcaaagtgtttcacattccagagacttgtggagactttctcgttttctagattctctcattttaaaacacacttattacaagctttctctttcgggatcaatatactcacgagagaaaataattcagaaaaaaaaaaataaaagacacaaacaacaccccaacaaaaaaacaaaacaacaccaacaacaaccaaacaaaggagcggggcgggggcgcgcgcacgagaagaatcatcacccccgcggagggcgcccccaacgactagcgcacccacccgccactttcgtgacaccacgaggaggccccataagagggaagcgcgtcgaaactaaaacacacgaaagaggaccgagcggcgcccaggataacaacacagcccctctggcgcgccgtaggacaaccggcagcacgtgagaaccctgctgtggagagagccaccccccacacctgctgcggggggggcgacaacacatgctgggcacaccacaccctccacagagaaaatctacgcccagacaggagacaaacaaacacctacccgggcccacagtgcggctgcaacacccacacgccgcaataaatcctcgcatgcagaacaacatggcaaccagaaaagcacgcaaaccactatccagacagcacaccaaaaacagcacagacc

SEQ ID NO: 614165 - DNA, 345 bp, Homo sapiens
gctccgactaatagtctgaagtgcagcatggctgtacaggggtccaagttctgttagctgaggatcgggtcctcgctcatctgtgtcacctgtcataggatacttcttgactataatccctgtcccaaaggttacgctgtacaccggagggacaagaacggttcatgtcgctccatattatgcagttccagcactcataagcatcatgcagcaaaggtaaactgttgcatagcatccgctcgtcgttgctcagtaagcacccatcgcttgggttaggacactcagctgctcgcggtgagtgtgcctttgtcaatcgtatcagtataaatcagacagactgtaccg

SEQ ID NO: 614166 - DNA, 112 bp, Homo sapiens
cagcacatctgccctctggccgcttatggtataccttttctgtccttcgcattagtcaccgaagtacaaaggttgtgtctagtagatcctagtaaggtaagcagattttccc

SEQ ID NO: 614167 - DNA, 664 bp, Homo sapiens
  misc_feature (118)..(118): n is a, c, g, or t
  misc_feature (154)..(154): n is a, c, g, or t
  misc_feature (156)..(156): n is a, c, g, or t
  misc_feature (275)..(275): n is a, c, g, or t
  misc_feature (285)..(285): n is a, c, g, or t
cccgtttttcaaaaaacccttttattaggcccccgaggagaaaaaaaaagaagagggtttttccccaaaaatttgaacagcgcaaacatgggctggtaaaaatgcaaaaggggggccnaaagcccattaagtaccaaggccaagtagaagatgncncgcgcgtttctcttttgttttttatatagcaatgaatgatctattgcgtgaaataggtatcacccttaactaaaatttaacgaatgtttatagtctccttccatgaactagcagcagcnagagatagcnagtgttcgcaagtctctccaatccatgttattctgatgactctttgaacaaagaacttgaacctgttcaggtgcttgatgacatgcagtcttgaatatatttagatgaaggtgtcttgaaatttgcaggcacaaagcactatagtatatcaccatatcaaatgaagaaatcgccagtgccatccatagaacaacatattcgtctataaagttattaaagtactggtctaaaaacaaaagacctggccccaaaaagacagtgtcttgaagatatagttcacttttggtcatgtgagctaccactaatttttgtgagtctttagcaaagacacatccaaaccttaggatataaagccaagtatgcttttcaaactctccag

SEQ ID NO: 614168 - DNA, 449 bp, Homo sapiens
caaaactccttccgtctacaaagaaaaagtggtgccgcttgagacattatcacgcccaaccagtttgaggccgagttactgagtggccggaagatccacagccaggagggagccttgggggtgatggacatgctgcgctctatgggccccgaaaccgtggtcatcaccagctccgacctgccctccccgcagggaagaaactacctgattgtgctggggagtcagaggaggaggaatccggtggctccgtggtgattggaacgcatccggatggacattcgcaaagtggacgccgtctttttgtgggcacttggggacctgtttgctgccatgttcctggcggtgacacacaagcaccccaataacctcaaggtggcctgtgagaagatcgtgtctaccttgcaccaggttctgcagaggaccatccagtgtgcaaaagcccaggccgc

SEQ ID NO: 614169 - DNA, 102 bp, Homo sapiens
ggtcgacggggaggtggtccttgagcccaggagcgcaagcctgccatgagtcaagatcatgtcactgcactccagcgtggctgacagagtgagcccgtctcc

SEQ ID NO: 614170 - DNA, 305 bp, Homo sapiens
gtttattagttaagtgacttagagaaggttacttaaggctgggcatggtagcacatgcctgtaatcccagcattttgggaggccgaggcgggcagatcacctgaggtcgggagttggagagcagcctgaccaacacggcgaaaccccatctctattaaaaatacaaaaaattagccaggggtggtagcgcgcacctgtaatcccagctacttgggtggctgaggcaggagaatcgcttgaacctgggaggcagaggttgcagtgagctgagaattgctattgcactcctgcctgggcaacggatg

SEQ ID NO: 614171 - DNA, 189 bp, Homo sapiens
cccccttttaaaaaaaaaacccccggggtatggttattccgggctccccccggggtttggcccaaaacaaaatgttttccccgggggcccctggggtaaaggcccccttgtttcctgaaaccagtcctaaaaatttttttgggttttttccccttttttttataaaaccaggaaaattttttccgttta

SEQ ID NO: 614172 - DNA, 1346 bp, Homo sapiens
aagacaggcatctcaaatcggcatgattctgcatctggaaactgccttcatcttgaaagaagaagctccaggtcccttctccagccaccacagccccaagatggtgatgctgctgcatgcatgctttccggcacatggcatggcctcttcggatgacggaagagggacatagaccataacaatatagaggcaagatgcccacaacatcacatccggagcaagagagaaatcaagacagtgaaatcagatatcatcaggaaagatggaacagaaacaacgcagcaagatcccacagcaaccataagagcaatggacagctgccaatccagggccaaacatcctccaactaaatgggaacacacgagacaagacatcacacagaagatacacacaccgagagcagctaagagcacgcatagaaggcaacatgacgccaatcccaaaatcgacaaaggctgaaagcacgaacacacaagaaaaagacatcaacaaagcacaacaatgagacaagactgaaaaagataaaaggataaaacacatgagaaacatagcccaacagagacaaccggaacataggcataccatgaaaacacacagacatcactagagacacataatgacacacaaccgatagacataaccacggaaccccatagacaatcaactacaacaaaacaaggaccacagatggcgaactcacagcaacgagacatccagaatgacacaaagaaaacaaccgatagagacacaccatacaagacacaagtggcacgcaacaacgaacacacataccaggaaccactacactaacaaactggacgcacaacacaaaacgaaagagacaaacgcaaccaggtgacaaaagcaccacagaacaccaataaacacgaaggtacaacaaggagaggaggcaagcaaacgcaggagaaacaaacaggacaacacgcacacccagagcaacaataccaagacaaacaagcacaaaccaaacaaacacagaacacagaaagaaacgaccaaccagagaacacaaggacaacacaggacacccggcgcaaacaggacaaaacagaacggaagagagcgggaaagcacaacaaacagaacacacagacgacaagaagccagcgaaacaaagaaagacaaaaacaacagaaacacaagaaatacacaaacaaacaacacaaccacaaccacacaacacaaagaaagaaacaaggaacgaaacaagacagaagaagcaaccagcagacaacatcagcaacccacgacacgcagacgagcaagccagcacacaacgagggcgacaggaacggaacgcagaggctaaagagaaaaacgcacac

SEQ ID NO: 614173 - DNA, 326 bp, Homo sapiens
  misc_feature (9)..(9): n is a, c, g, or t
  misc_feature (103)..(103): n is a, c, g, or t
  misc_feature (109)..(109): n is a, c, g, or t
  misc_feature (116)..(116): n is a, c, g, or t
  misc_feature (158)..(158): n is a, c, g, or t
  misc_feature (167)..(167): n is a, c, g, or t
  misc_feature (173)..(173): n is a, c, g, or t
  misc_feature (281)..(281): n is a, c, g, or t
  misc_feature (286)..(286): n is a, c, g, or t
ctggaagtnatccagggcccaaaacccccagggttttggagccggcaacttcaactcactgttcaaggctttcgaggaggagcagaacctgcggggtaacctnaccaanatggagnccaatggggtggtgcccggcatgtaagccccgcccaccccanggaggccanagccanacagccacgccccctgattctggaactcgcccaacttccctactggctgctccccttgggtcccgcccaccagcggactcggccccccaagtccgcccacactgaccncaacncctggcggggccgccctctgctccagccctcccgattaaa

SEQ ID NO: 614174 - DNA, 975 bp, Homo sapiens
tgaaactcattgagaatccttatgttgaggtatgtgtatggttatcagaagaattctaacatccaagcaaagggtgtccgttccagcggtcagaagatcactcatgtggtctcctccaccatgatggctggtctcctgcggtccctgcttacggacaggcttatgccaggagcctgggtgaggaagaaagagaaacttcagttccatagtgataccattgtctgctataaagtgcctgcttcgaaggtgacactgtaattgtttgtcctggccattatgtggtacatggcactattctccattgctgactcccattgagttggaaggatattggctaacagcatgacattgtgatcagaaacagaggggcaacaggcgacactataagtaggactgcacatggtgctgaatattaaaatctcaggcaatccaatttgttcagcatgatgctgtaagagggactcttaattgttcaccgtggtaagactacgctggccacctggtgtgctgcagtgtgagactgaccggaggtcaccagtgcggacatcagcagagttactaatgaagaactcggatttatatggcgccaagggtgcttaggtctacgaaatctacccttgagcagtcaagtgagacccttgaagttgaaatgggatcatcactggcagggacatgggtcctcattaaggaattcattcaattcacagtaatacactaccaatggtatttcagtggcgcacttaatacttcttccaatattacagagcgagttagtaagcggccgccatcgttgtgacaccacatcaggctctgtgtaacactgacacacatatctccgttcgaccatgagctcccataaaacgacctgtaatttactacccttgatagcccactctgtatgctctaggggccagatacctatatctcagttccgcgcaccatgctcttacatcgacataccaacatattcacgcg

SEQ ID NO: 614175 - DNA, 566 bp, Homo sapiens
ctagtactagatcgcgagggccgccttttatttatttttggtgtcattcttttatggtccgtggtttaaacctgactgaatacaagatcaacaaaagcactgtactcctggcaattatacatatgttaaaacatggatttggcactgtagacaacatttaaccccagtctatggggtactgaatggctttttataaagtgcaacaataaagatttatatccaaacaagtgacttgggtattatttcatacattccacactttttctgtgcagaaaaaaataaaatggtacacactgcttaaatatacaattcttccaccagtgaaaagggttaaaacattcataaagacacagcaccagaatgtgatgcctccagacagggaaaaagggaaaagtaacaacgaacaattgtttcaagcacaatatacttagccctgtcactagccaaagtgatgggacagatccagatctcaaacacagcttatacaacataccggaggacagggcaagagatgtcaagacagcattcaatacaagcatacacacaacccatcaccttataggagt

SEQ ID NO: 614176 - DNA, 1198 bp, Homo sapiens
  misc_feature (66)..(66): n is a, c, g, or t
  misc_feature (89)..(89): n is a, c, g, or t
  misc_feature (91)..(91): n is a, c, g, or t
  misc_feature (115)..(115): n is a, c, g, or t
  misc_feature (159)..(159): n is a, c, g, or t
  misc_feature (178)..(179): n is a, c, g, or t
  misc_feature (182)..(183): n is a, c, g, or t
  misc_feature (187)..(188): n is a, c, g, or t
  misc_feature (217)..(217): n is a, c, g, or t
  misc_feature (220)..(220): n is a, c, g, or t
  misc_feature (242)..(242): n is a, c, g, or t
  misc_feature (254)..(255): n is a, c, g, or t
  misc_feature (264)..(264): n is a, c, g, or t
  misc_feature (291)..(291): n is a, c, g, or t
  misc_feature (304)..(305): n is a, c, g, or t
  misc_feature (309)..(309): n is a, c, g, or t
  misc_feature (315)..(315): n is a, c, g, or t
  misc_feature (327)..(327): n is a, c, g, or t
  misc_feature (329)..(330): n is a, c, g, or t
  misc_feature (335)..(335): n is a, c, g, or t
  misc_feature (397)..(397): n is a, c, g, or t
  misc_feature (404)..(404): n is a, c, g, or t
  misc_feature (406)..(406): n is a, c, g, or t
  misc_feature (426)..(427): n is a, c, g, or t
  misc_feature (433)..(433): n is a, c, g, or t
  misc_feature (440)..(440): n is a, c, g, or t
  misc_feature (454)..(454): n is a, c, g, or t
  misc_feature (461)..(461): n is a, c, g, or t
  misc_feature (473)..(474): n is a, c, g, or t
  misc_feature (526)..(526): n is a, c, g, or t
  misc_feature (531)..(531): n is a, c, g, or t
  misc_feature (535)..(535): n is a, c, g, or t
  misc_feature (538)..(538): n is a, c, g, or t
  misc_feature (544)..(545): n is a, c, g, or t
  misc_feature (568)..(568): n is a, c, g, or t
  misc_feature (571)..(571): n is a, c, g, or t
  misc_feature (590)..(590): n is a, c, g, or t
gtttctctccgctccctgtgagtaacttgtgctccgggggctcctgctcgcctgcccgcacgccgnccgccacccaggaccgcgccgcngnctccgccgctagcaaacccttccngacggccctcgctgcgcaagccgggacgcctctcccccctccgnccccgccgcggaaagttanngtnngaannaggggggaagaggggaacatggacatganganggaggatccacctggagctgangaaccggacccnngcagctgtncgagaacttgtcttggacaattgcaantcaaatgatggannaatngagggnttaacagctgantnngtgancttagagttcctcagtttaataaatgtaggcttgatctcagtatcaaatctccccaagctgnctaaatngnacaagcttgaactcagtgannatagantcttggnggtctggacatgtnagctganaaacttccaaannctcacacatctaaacttaagtggaccataaactgaacagatatcagcacctnggaancttnganacagcnngaatgtctgaaaagcctggaccnctnaaactgtgaggttaccaanctgcaaatgcctaagcggagaagagtgtcttccaagacatcctaccccaactaagacaaacaaggaatggctacagcaccgaagaagcgaaccaggaagcacctgtactacagactgacgaagtatggaaaggcagtggcattgaaaaagaggaagacaacgaacagacgaagaatgaagcagagaccagaacgaaccaagcaacacaagagaaagaaaaaggcccgacgaccacccaaccaccgaacaccaacagcagagaccacaagggaatacgaaccaaacaacaacacaaaacgacagagacaaacacgcacatacgcgaaaacatatgcaacacatgaaaaggaaaaacaaacgaaaaagacagagaaagagaaaacagacaagacaacaagcacacacagccaaccagcacacacacaccagaacgacaccaacaaacaacaaaactgcgactagaacataaaaagaagaaaaaaaaggacgcaccaaacaacacaagacaccaaccacacataacactcgaagcgaaacacaagagaacacaagaccaaactgcatgatgccaaacataatcacggaactagccgcacgaacgcagcccg

SEQ ID NO: 614177 - DNA, 1046 bp, Homo sapiens
agcgggtgcactggcgggccctcccctcgggcgtgcctcccacacacgcccggcggcaccgcaccccgaggcgcttcacgtcacggagctgctaggagacgggcggggctccggttccggacggaatctcactctgtcacccaggctggagtgcagtggcacaatctcagctcactgcaacctcgacctcccaggtacaagcaattctcctgcctcagcctcccaagtagctgggattacagatggagtttggctcttgtcgccccggctggagtgcagtggtgcgacctcagcgatctcagcgatctcagcgatctcagctcactacaacctctgcctcttggggatttcgatgcgatgcgacgactaatccttcaagtccttctagattatcgtggtgattacagggcgcctgccaccacgcctgtgctagtagttggatgtttgtagtagatgatgggggtgttcaccaggttggtcagtctggtctcgaactcctgacctcaggtgatccatcaagtctcggtcctctcggataggatggtgtgtgatatacaggcggatagtccttctcatggccgctttccgatcagcaagttcaacgatagacacaagaaatcctttatgactccgcgcacctgcatctaacggattgggcaagatggcaacagatctaatttttacgcagctaagaatgaaaaggggagcgaaagcgaagctaagaataagcaggaggcgctgattgctaaaataaccatccttctctgattagggctcttgggcagcccatgggactcaactgggttgcgggttgggtgttgggtgaagttcctggtcacaacaaactttttcttctacggcatcgccgggtttcagaggattccgtgtcccgttaaaaagatcgcctagaatgccttcgtaacggtttatatcccatagatctctaactcggttagggccccttaagacatggcgcttttactgtcgcgaacgtggtttacatctgcggcccgtatacctggttgagccttgtgcccgaatgttca

SEQ ID NO: 614178 - DNA, 720 bp, Homo sapiens
atgaccaaacgcacagtcggtgctgcagtcaacatacgggatgtcacatctggactcacgtccgtgcacttgcagcacggtagaaaattgcgttttccgtgttactccttcgtatgacgctcttgccgtttcattggcctggtgttgagttgcataaatgaaaatgtctttgtgggtgaactgtgtggtgtacggtctgtagaaaattatggattggagttgtaagggtttaacaaaagggcaaggagagcccttgtggagttttcgttacctaatcacagagtggtgtagtgaatttaaaaggacccaaaaagtgttataagttggagcaagggagtatgtgttgcaaaggaatctccttcctttttgggtgtgttgatcctttgtcccaattggggaacctaaatctgttttaattgggagagacgacatggacaaaaagtcattgtattctggcaaggttgtggtacctttccttgggtcatggggctagcaaaacgttccggaaacgcacacaaggaacatgaacaacactgcttggggggcgggcacgcacctcagaaacattctgcgactccggtggggaggggcgcctgtcgcggggtcactggcacacggaggctccgaaaaaactcgggcaggaagacggaggccgcacaaataagcgcggaacggagggcgaaacccaagggtcgcgcaccgcctcaagccaggccgaaa

SEQ ID NO: 614179 - DNA, 429 bp, Homo sapiens
aattcaacttatccactgaaagtcaacagcatacaatctagatcttcaggaagtaggtagagccctggcattcttcctgagacccttggttaaggtcctaaaagtatctgccgctgctgcagttcgtgctgttcgtccatttgcaacttctccgtctcaaagacaatgggaagagccaggatcataaaggatgtgtcccaatccacaaggctgccctggaaaacctgtacatttcctgagccacaaagagggaaagatcaaaagtggctccggccgcggaccgggaccctctccggaaacatctccgtcaggccccatagtctctccgacagggtctcatctagctgtggtggagtagacgcgggtcttagccgaaaaagcgacatccattcctggccccgcttgcggactgggagccggcgagccccc

SEQ ID NO: 614180 - DNA, 120 bp, Homo sapiens
ccatctttaccatgtctgtggaggttgatggcaattcattcgaggcctcttgggccctccaaaaaggacgggccaagcttcacgttggcctttaagtgtttacaaggcatggctttccca

SEQ ID NO: 614181 - DNA, 292 bp, Homo sapiens
  misc_feature (41)..(41): n is a, c, g, or t
  misc_feature (57)..(57): n is a, c, g, or t
catataaaagcagtcatacaatatgcgaccttttgtgtctntcagctggcatagtantttcaaatttcatccaagttgtagcatgtatcagtactttggtcttttgtatggctaagtaatattccgtgtgtgtgtgtggcggatttcgccatccattcatttgttgatggacatttggttttgtttctaccatttggctattgtaatgatgctatggacatttataaacacaagtttttgtatggatgcatgttttcatttctcttgggtatatgcctaggagtggtttaca

SEQ ID NO: 614182 - DNA, 1288 bp, Homo sapiens
ctggtgcactccttccagcagctcggcgtatcgactccctgagcgagcagatttccttcctggaggagcagctggggtcctgctcctgcggagaaagactcgtgactgcccagtcgccccaggctggactgagccgcctcacagcctgccctgcggtcccctatgccctctgtcccaatgatgctgggggtcctatcaagcgcaccctcggggtgacgtgagcggaagggcccatggcgagggccgttcctccgtcttcctccgtcgcaccttcctcggcgtaggctcccctgacccctgggctctcgggactgggggcctgcgcgagtcgtatcgtctgttgagagtccggccgccgtgggctgaccctcgcacacctggtcgtaccccgatcgggcattccacatggctctagcgtggcggaccctcaagtgttgaccggaattggctactgagcttcctcctgcttgcgagcccgtggcgtgcccatgtggtcaacactgcgcccagtgctacggtccaggaccggcatggggctggcgcgtcgtcaccgatgtgcgcgtccctgccgttgtctcctgtagcacaccccgacgcctgccctgacgttagacatcatacttgtatacacaaactgggctgacacaatcgcactatactagaacacgccagctcacacttcacgacaaaggagactcccacctcgctgaaacgcactaccacccgtagcgctatcgcaactaacccttgcgcccctcaaaagattacactgaagcggacacggtgcagcacgccctatcctatggcatgcattccgtgtcgcgacgctgcccctatcttccgggccggcccgccggtgtgctgagctcatcctcgttatcatgcatcaggtgtgcacttcgacagagttgtgcccgctctatgcgcgcctttgttccgcgccccgcgctcaagcggcgctttgaccggcgggcaaatggccgatcgcccggcgcggcggtctcccctggactaagctcctttggacgccgaagctggttcgttggccatgtccacccactgtcctggacacattggcgggcggaacaactctaaatgcggtatggctgctaacccgcctttaccgctcgttttgtcggcccctacggcttgccgcaggttgtcattgtatcctcctttgcttgggtcggtgctctccttcgtgggctggttttgctctcttgtcctctcatcaaattcacctagccctctgcccccgctgctgggttgtactttatgctccccgcgt

SEQ ID NO: 614183 - DNA, 1215 bp, Homo sapiens
  misc_feature (344)..(344): n is a, c, g, or t
  misc_feature (513)..(513): n is a, c, g, or t
  misc_feature (521)..(521): n is a, c, g, or t
  misc_feature (937)..(937): n is a, c, g, or t
tggttattattatttatttattcgggtacacccagagctcctgctataagatcgttcagggaacacccgacagctattgctatcctcctcactcagttagctcacccaccgaggacgttcatgccacagctagccgaccatgattacatggagctttatgactctaagctagagtcatgattgtaaggtttattatgtacgctaacaagttcccatgcgaatcagtgcactggatcataggtatgcactagcaggcagtgctagtgcgtcttaatctagtagccatgcactttgataaagttatagtgttatgtctatgttattgccatgctatggcttgatangtaacatgtgtgaactatgtgcgcgcatcatattattccctaaataaaagtgttcgtttgatgttatatcgagttctagttgatcgcagtactcttatctaatgccactcactactcgacctggtcgtattttacttaggtggcatgttcatttatacgagtgattgcncgttggtntctatgcccagtgtcacattgtcacgttattacagtgaatgtagtctacatttatcgcgattatcgtcaccaatagtttagtatctatgtattctagaatactctcgttgtcatcgaataatttcgatatggatcgatagcgtgaagctccctccgcttgaagctgatagctatatgacactccggtccgcgctcatgagtggatcgtcgtgtttagctatattcgcgtgtgatataatttcagggcatttgctctattctttatgtcactcgctacatatattccattcatgtcatccctttgtatctattactaggtgatgatgttgtcgccgtaagtgtctatgggtagagagctaattgcttgctcttattttgcgttctattaggcgtctcgcttacctaggtgtgttgtntagctgtgtgacacaactattcgtacatggattcagtttccatttatgtgcgactcatcgtcatacgttgtgtatatttcagtatctacgtttgtctttgtgttctcctcccgtgcgcgaactatctgcgtatcgtggttaatcatgatgcgtatgttgtaggaacgtacgaagtgatatctagaagatgttgtatatccatgttgtagattatatattgtctgttctatcgaatcattatgtaaagtgtgatatgatactatatatatcacgataat

SEQ ID NO: 614184 - DNA, 190 bp, Homo sapiens
gtaccctcacaagatgcacagggtaacagaggacgtggctgcgctagagtcacgttttccagttcccttcgcaaactatatttctggaacgcgaaaggaagctttacctatttcatagaagacctggtctccaaggctttattcaggaaggtttgcatctgtttgacaggcactgtgcatgttgtgagcg

SEQ ID NO: 614185 - DNA, 972 bp, Homo sapiens
  misc_feature (1)..(1): n is a, c, g, or t
naagacgatgatgatcgcaaggaagaagcagtaaacagggagcccccccgcagttgaacccgcgcattacccacctgggcccacgggcgacgcgtgtgccgaaggttggacgccccagcttccctcccttgcgagcccccgtggacctctccgggaatggggaaagaccgagcccctcggggggcccagaaccccacgtgggggggccaccccaaaaccctcagaagcccggaacaatgggccctcctcgttcccccggatcaaaattgtcggggccctgttgacgccgcagcaactgtcggcggagagacccgcggtggttagaatcagaccgcggccgcccctctggtcgtaatcaccccgcgcgggggtccctacacgacgaaagcctcatgcagagcgggcccccccttaacgagcgcccaattcggaaatcttgatggaaacgggagggactcacattgtacataacagtcctcgaaaaaagatgctctctcaaaaatgagatgcccccacaaggtattgggcacccacggatggagggatcccccctaccagaccaggaaccaccattcgtgagaggaatcgcggaaaaaaaccaatgctcacaattgtcatggaccgatcaaagcccaaaattctcttgctcgccagatgaatgggtgcgcacacaaccaagcttgtacccacgactggtgcggaagactatttttattcgtccccccatcgtcttgggataatcacaaccccatggcgcgttcttcaaacagtcaagtggttatcttgtcttgcagaagccacagccaatctgcgaaacacacacaggttctggtaaatcagaacttcattgtcacaaatctctccgcccggcacctcgtcacctatctaatttctcggaggtctccaaaacagaaatacagaaaaaaaaacagagaaaaaatcccacaaaaaaaatttagagcccacataaca

SEQ ID NO: 614186 - DNA, 275 bp, Homo sapiens
tttcgtgtttatctacttgggggcgtgatcatttgaagtcatctttatctctcagagttaagctttattgtagaagaaaaaaaaaaaaagttaccaaagccatagataacacttaactcacagttcccaggaggacccttgatctcaaagctgatcttttggagtcagatcctacatcaaaccaattagggccagtttagggcatttccttcctggtgatggggggtaaacttcttggctctgtcggagttggcagataagggtctctgggcagg

SEQ ID NO: 614187 - DNA, 956 bp, Homo sapiens
gtgctcacggcttgcttcacatgagatagtatataatcatagaaaggcctaatgagtgtatagaatgtggaaagtacattagacaaccttgctcaagagtcactcattgtccggatgttcataatggaatgaaaactcttggagtgtgaggtaattgtggaatgatactctaattgaggtggatcaagatgctatacttagtatagtcacaagtatagtcgaatagtggtgagaaaccacttagtgaaaatgtaaggaactgtgggaaatgcctcttcaatggctggatgtcatgggattcaatcgagtatgagagaagtaacatgcaggagatggacaaggcgtgtattgaattctgaaaatgacatgcgtcgacaagggtcttttggtgtagctgggatcaagaattctcttctgaccttgcgatggttcatatctgctgccatacaagaactctgacactgtcctgtctggtcctgcaaggggctttagatcttgagttcaccacagattcttccagcaatcattagcatccctagtacatgtgtgatgaaactctctaccgacattgtcctgttgacccgtggaacatagggcgtttggttcctgcgcgcgtgcgcttgttatgaatcgtcgcgatgccctaccttactgggggatggaaacactgtgctggtggtcagagtcatggtggtgaaaggcgtacttgtgcagagtgagacatgtttatgaaggaatcatagaattcatgactatggtgtcgtgaaacgttatgacatatagtggaactgtgggagacgaattattgggtgaccataatattattggataaatagatggtacagaggagaaagggacggaagaggtgaaggaggttaagcctggatgtatgaagtgtgagttaaatacggaaaacacaagtttaagtgaatgggagagcgggaatgtggaaaata

SEQ ID NO: 614188 - DNA, 548 bp, Homo sapiens
  misc_feature (37)..(37): n is a, c, g, or t
  misc_feature (76)..(76): n is a, c, g, or t
  misc_feature (81)..(81): n is a, c, g, or t
  misc_feature (93)..(93): n is a, c, g, or t
  misc_feature (97)..(98): n is a, c, g, or t
  misc_feature (103)..(103): n is a, c, g, or t
  misc_feature (111)..(114): n is a, c, g, or t
  misc_feature (133)..(134): n is a, c, g, or t
  misc_feature (138)..(138): n is a, c, g, or t
  misc_feature (140)..(140): n is a, c, g, or t
  misc_feature (142)..(142): n is a, c, g, or t
  misc_feature (144)..(144): n is a, c, g, or t
  misc_feature (149)..(149): n is a, c, g, or t
  misc_feature (153)..(153): n is a, c, g, or t
  misc_feature (155)..(155): n is a, c, g, or t
  misc_feature (161)..(161): n is a, c, g, or t
  misc_feature (163)..(164): n is a, c, g, or t
  misc_feature (167)..(167): n is a, c, g, or t
  misc_feature (170)..(170): n is a, c, g, or t
  misc_feature (176)..(176): n is a, c, g, or t
  misc_feature (205)..(205): n is a, c, g, or t
  misc_feature (211)..(211): n is a, c, g, or t
  misc_feature (235)..(235): n is a, c, g, or t
  misc_feature (254)..(254): n is a, c, g, or t
  misc_feature (314)..(314): n is a, c, g, or t
  misc_feature (316)..(316): n is a, c, g, or t
  misc_feature (323)..(323): n is a, c, g, or t
  misc_feature (326)..(326): n is a, c, g, or t
  misc_feature (330)..(330): n is a, c, g, or t
  misc_feature (332)..(332): n is a, c, g, or t
  misc_feature (368)..(368): n is a, c, g, or t
  misc_feature (394)..(394): n is a, c, g, or t
  misc_feature (419)..(419): n is a, c, g, or t
  misc_feature (422)..(422): n is a, c, g, or t
  misc_feature (539)..(539): n is a, c, g, or t
tccgttccatgggccagcacaggcaggcgccattttnctgatatgaggacctggggtagctcagacatttgactanccaancccagaaagganatanntcaanctcttacnnnnaaatccattaattcccccnntccnantnanttctnactnanataatncnncanctntaaaantaggggtttggcttctggcccagatccangccctngtcctctgtcatcacctggaaggnagcaacactgacgtaatcntctgccactatctggaagagctcgtccacactctggcctgtattgctggatgtttcaaananctgagcnttnatantntctgcatagtcctggacgtcgtaggaagtacacacntcgacgcctccggtcttctcccagcnggtcactcttggtgccacaaaagtnganttggcagccctcctctaggctgcgcagtcccttcacccagaactttgctcgctcaaagctgccgccgtctgtaaggacatagcagaagatggcagccatggcaccccgatagttgantctactcat

SEQ ID NO: 614189 - DNA, 560 bp, Homo sapiens
aggactttcttacgcccaaactctctcccccccgtacaaccaattctccctccctctttttctgaatctggtcagaccagttctcagagtcactagactgctggtgatttgcatttctctccctctcagaagggaggaaccattattcacaggtcatagctcagctcaggagattgtgttgcgggccacagattgccttaccctgctggcatcctctccaagagacactcctgctgctctcacccacaaggaggctcaggcccaagcattttgtgtcgggctttagagtaatatgaacattaggtctgactttggcacttgacctgaaagaagatggggatgggatgactttgcgtcatcctctctctcgagacaacaaggtatactatgcagctagttgtagagaggcaaggcagatttaattctgttcttaatgtatgtgcatctgtaatgaaatgaaacatgggtaagactggataatatggttgtactagtcttctttattaagcccgcacctatgtttttaaggatgtgcgtatgaccacaaacgtttctgtaga

SEQ ID NO: 614190 - DNA, 132 bp, Homo sapiens
ttgtaatagtgtaatcagaacttttagcagaaaatgctcggtcttttatctaaggcttgaattgtaaagtgaaggcataaaagttaccaatgcattaagtaactcttaaaatggcacacaggttttaaagct

SEQ ID NO: 614191 - DNA, 228 bp, Homo sapiens
aacccgggaccctttgtctgggttggaaaggattctcaagaagaagaaaagacagaagccttacttctgctaaaccggtacatcgagacggacccgccaatcgggatcggcggacgcccctcaccgtgtgaagcaaggctctaagcctccctcctttgtgggctggttccttagctgggatgatgattactggtctgtggaccccttggacgcggccatggctgatgc

SEQ ID NO: 614192 - DNA, 223 bp, Homo sapiens
  misc_feature (42)..(42): n is a, c, g, or t
  misc_feature (139)..(139): n is a, c, g, or t
  misc_feature (141)..(141): n is a, c, g, or t
  misc_feature (181)..(181): n is a, c, g, or t
  misc_feature (218)..(218): n is a, c, g, or t
atttattaaaaaaatgttaataaacttagtgtagcccaagtntttatagtctacagtagtgtacagtaatgtcctaggccttcatattcactcactcaccactcacttactcaaagcaacttccagtcctgcaagcttngnttatagttagttccctatacaggtgtaccatttaaatttngtttttttgagacggcatctcgctctgttgcccaggntggag

SEQ ID NO: 614193 - DNA, 892 bp, Homo sapiens
gtatttcctcacgcaagcaacgatccataatccttctaatagctatcctcttcaacaatatactctcgggacaatgaaccataaccaatattaccaatcaatactcatcattaatactcataatggctatagcaataaacactaggaatagcccccttacacttctgagtcccagagtttacccaaggcaccccttctgacatcgggctggttctctcacatgaaaaaattagcccccatctcaatcatataccaaatctctccctcataaaggtaagccttctcctcatctctcaatcttatccatcatagcaggcagttgaggtgataaaaccaaacccatgctaacgcaaaaatcttagcatatctctctcatttccccacataggatgactaatagcagttcaaccggtaaaccttaacataaaccattcttattaacctatttatatatctaatataccgaatctataatcaatttaaatcgagcacaggacctatataaattcgcacctgaaaaagctacatgataacaccttatcatcacctctctcctaggggcctgccccgggtaacgcggttgttgccaaagtggcatatcgagactcaaaaaaatgcttattatcccacaatgatggcaatacctctagatttatttactagctattatcacttataaatatccatattacaggaaataaaggcgtgataaaaacaccatttccaataaacttagggatcagatttcctttttaaaaaagaaaaaaagtgtgggggcggaattaacatgggggcgaagaggaagtcgaaggtagggttcaagaggggtagtatgtagatatcggagcttgatgaaaaagagagaaaggaaaagactgctagcaagggaggg

SEQ ID NO: 614194 - DNA, 103 bp, Homo sapiens
aagctcaggacagacatgaggtggcagactggtctccaattcccggcctcacagtgatcacatgcctggccactctatgtcttgttccttgcttgttccgctg

SEQ ID NO: 614195 - DNA, 372 bp, Homo sapiens
  misc_feature (101)..(101): n is a, c, g, or t
  misc_feature (161)..(161): n is a, c, g, or t
ggtgactctagaggaccctgctgctcctcttcacagctctccgccggtggatatttggtgaggaggggagtacttgtcacatgttgttggtgactggtacntggtcactccccggccattaatacagcaatccttcttcacgatggccttgtcagtcaggncggacatgacactggctgcaccggctcctgcgacctcacttggagggggcagatgaaccacatatccatcgccaacatagatggcccagtgtctgtagaaagggcgaaaaatctcaatcaggtctccaggcttaggctctggaatgggcgcacgcatcttccctcgcggtgttggacctcaagggcaggctcgatttcgctgcgtatatat

SEQ ID NO: 614196 - DNA, 221 bp, Homo sapiens
ggcaacagagcaagactccgtctcaacaaaaaaaaaaaaaaaaaaaaaaaggaaaaaaaaaggttttttttccggggaaaaaaaaggggggcttattttttgggggcctttccggggggccaaaaccctggccaaccataaccaattaaaggcctttacccccggggggaaaggaaaaaactttggtaaaccctgggcaaaccaaggggtttttcccccag

SEQ ID NO: 614197 - DNA, 429 bp, Homo sapiens
ggaagggaaaggtgaagaaaggaaataaaaatggcacagagtgatataaaacatattctgctccatttatagaatctacattttctgcatctaccagcattagagaggaaagttggacattaacatggaaatgtttttcctcataaacccagtatccaatttgtattggctatagacattaagttaggtcatttattaatgctttattttcaattctcttttgttcttgcatctgcttttgtatgaacaaagcctgcactgtaatcagttctgtcctcagttttcttagtagactcataaacaataattctggaatactaaaataatactacatattttttaaaatcactaagtgccttccaaacagttgctttcagtgtattctcaggcacataacaacaacaaaaaaatacatttgatttactacca

SEQ ID NO: 614198 - DNA, 714 bp, Homo sapiens
gccgaggtggccctgggttagcagctgctgcatttccccgggtggctgcggtcactggtggcagtgctcaggcgcccgccgcccttgaccttcggcccgcgagctctaaccctacagcgcaggaagatcggcgccgcgggcaggctctgatgctggtgtctggtagaagaaggttagctcacagttctgctgcaggctcagaaggtgtgccctttcaaccctccagagacatgagactagtgcagttcccgggcaccccacctggtgtgggcctcacttgggcctggcagacacgggaatggtggaggggtgtatcaagcctcaaatgccttttgaaccctatcactacccgaagacgatgacgcgagtgtcctagagacagggtagaggccacgccctctcatgtggcaacgaagagccctggctgtccagttgccagtcctaccacggtcggaggtaaccttccggggtccagtcacacgagtcagataaggtggtgtgtgtgggcgctgaattatgtggagccactgcaaagaactagaacgtgcccgtgccaaggagcccatcatcttcagcaggtttgcagtccatcgtggggccctatgatgaggtggtcctcccgacactagagccaggcggtagattgcgaagtggagctggccggctcattggaaagagggcagctcatcaagggccagatgctatggccacggg

SEQ ID NO: 614199 - DNA, 112 bp, Homo sapiens
atgggctggtggacaatgacagggatcgtcataacacagaacttatattcgtgtacggaatgtgccagctgtacttaaaaataaaagaatcccagacccatctccatgtgca

SEQ ID NO: 614200 - DNA, 182 bp, Homo sapiens
  misc_feature (64)..(64): n is a, c, g, or t
  misc_feature (122)..(122): n is a, c, g, or t
  misc_feature (146)..(146): n is a, c, g, or t
ctggagtgcagtggcacagttctctgcaacctcagcctttgggctcaaatgaccctcctacctnagtctcctgagtagctgggactacaggctcatgccactatacctggctagtttttggnttttttgtatagatggggctttgncatgttgcccaggttgatcttgaattcctgggccca

SEQ ID NO: 614201 - DNA, 134 bp, Homo sapiens
  misc_feature (55)..(55): n is a, c, g, or t
cctgtgcgcgcggccgggacatcgagggtgtcatcaagcagtacaacaaggttgnctagccttgccgcccacaacccacgcgcgcacatttcacgcgcccacaacccacgcgcccacaacccacgcgcccacaa

SEQ ID NO: 614202 - DNA, 232 bp, Homo sapiens
cagcctggagctagatgaggcggactactactacaagagtgggaggagggcaagagcctggagtgtaagagggcagcctgggaacacctccgcttaataggctgtggttagagacgaacgagggactcgctaggcaacagacccagacctgaccgctacggagtgtacttaacctatgacatgcaaggctagaaggccaaggactacagatatagacaatactacctaccta

SEQ ID NO: 614203 - DNA, 839 bp, Homo sapiens
  misc_feature (393)..(393): n is a, c, g, or t
gggtgggactcggcgtcacgagcgggagacgtgaagctctcgaggctcctcccggcctgtgaggtcggtgctcgcccattcgtgctcctcgaccgctccgtccggaccccgggccggggctcgccactggagaagactgagctgatccagaaggccaagctggccgagacaggccgaggcgctacgaaaggaacactgggcactctgcagtgacatggcatgtgtagctcgatgtcaggagacggacgcgtatgcgtgtccacacagaaggggaggcgcagatcgtggcttctcacggtgtggccatacaatgaacgatggatcagggggtcgcggaggtacctggctggacgggtcactctctaggcattcgaagcagtaatacccgagacnctccgagtgacgaagtgtgcatgctgatttaagggacttactcgggagtacaatggtggaggttcgcggagctgaggagtctgatcatggacgcagcggtggtctgggaacattgtcggagtaacactaatgtgtaactaagccaaatggcaagctaagtcgcagaggagtagaggggtcttctattcctgaaaattgccccagggtgactttacctatcgctggtaaccttggctggaacggttgcgtgtgggtgactgatcgaggatagtagcccggatacgtataagtgttccccaaaggcagtgtttagcactgagggcccctttgactgctaaagcaagggcgctgattgcaagcccactggcactcgcacactcccggctggggggtgtggatcttaacattattgatgtacttggaccttatgagaactccttattaac

SEQ ID NO: 614204 - DNA, 955 bp, Homo sapiens
accctcttcattttaaattaaaaagcccccagttctgtgtggtgtagcaaaataaacagttgcggcgacgcacttcttcctggaggccttcgagtctccatgatttaaggagacgagaaaggtaaggaggaccggaacaattccttcgcggaacctttgaggtgaggcctcgcggagccatttgagaacggaccgcggcgggctggaaccagactagtaggcatggcggcggcggagccggatgcggacccgaaggccgccatccctgtggacctgcggcgggaacggcgcttggtgtgcgtggagtacccgggcgtagtacgtaacgaggccaagatgctacagaccctgggcggcgaggaaagcgtctctcgaatctacactgaccctaccaagaggctcgaactctacttccggcccaaggacccatactgccaccctgtgtgtgctaaccgtttcagtaccagcagcctgctgctccggatccggaaaagaacaaggcgtcggagaggtgtcctgggagacgaggcccacccccaggtcacgttcaacttggagatcattggcatcatctccacaatttacaaattccagggaatgtctgacttccagtacttggcagtgcacacagaagctggtggcaggcatgttccatgtgtgacagagtggtcatggcgccaggcgtgagaagggagtgagtcgttccatcggagctacctctaatcccccacccttttttcagggtgggacccgggggcatatttattggccgtgaaacagggcggagggtaaatccccctttcgggagcctcgtggtgtgggtggcggggccagcgttgacggtttggtctggtgtccctgtggggtccagtgaggggcccttagggggggggcgttcggggaagagtgcgcgtcttatacggggtgggcatttgttgtggcctctctgttgtgt

SEQ ID NO: 614205 - DNA, 202 bp, Homo sapiens
ccctgtcatagcagataggcactgttggcgcacgcctgtagatcccagcctactcgggaggctgaggcaggagaatggcttgaacctgcgaggcggaggttgcagtgagctaagatcatgccactggcactccagccttgagtgacagagcgaggctctgtatcaaaaaaaaaagttgcgggggggtgcccactttgcttag

SEQ ID NO: 614206 - DNA, 401 bp, Homo sapiens
  misc_feature (50)..(50): n is a, c, g, or t
  misc_feature (132)..(132): n is a, c, g, or t
acatttaaaaaaaacccagtgcatacacctgtgtaaaggaaatattgtcnccctagtattataagtgtattttcctatattatgtggtccttaaaatatcaaatgaatgcccattaaaaaagaaatattttncccaggcatggtggctcacacttgtaatcccagcactttgggaggacaaggcaagtggatcacctgaggtcaggagtttgagatcagcatggccaacacggcaaaaccctgtctctactaaaaatacaaaaattagctgggtgtggtagcgtgcgcctgtagtctcagttacttcaaaggctgaggcacaagaatcgcttgaacctgggaggtggaggttgtagtgagccgagacgggccactgcactccagccagggtgacagagcag

SEQ ID NO: 614207 - DNA, 700 bp, Homo sapiens
  misc_feature (61)..(61): n is a, c, g, or t
  misc_feature (81)..(81): n is a, c, g, or t
  misc_feature (137)..(137): n is a, c, g, or t
  misc_feature (146)..(146): n is a, c, g, or t
  misc_feature (168)..(168): n is a, c, g, or t
  misc_feature (177)..(177): n is a, c, g, or t
  misc_feature (388)..(389): n is a, c, g, or t
  misc_feature (396)..(396): n is a, c, g, or t
  misc_feature (431)..(431): n is a, c, g, or t
  misc_feature (467)..(467): n is a, c, g, or t
  misc_feature (515)..(516): n is a, c, g, or t
  misc_feature (532)..(533): n is a, c, g, or t
  misc_feature (537)..(537): n is a, c, g, or t
  misc_feature (539)..(539): n is a, c, g, or t
  misc_feature (550)..(551): n is a, c, g, or t
  misc_feature (590)..(590): n is a, c, g, or t
  misc_feature (607)..(607): n is a, c, g, or t
  misc_feature (620)..(620): n is a, c, g, or t
  misc_feature (628)..(628): n is a, c, g, or t
  misc_feature (666)..(666): n is a, c, g, or t
gctctcctgcctgtcgccatgttttcaggccgggtctggcttggtcttcccccgtaagganatggccggggagctccaggngacccaggcgccgtcgcttcggcggactgggctgaccagccaggacagcggggtanacccgaacnattctgcgcgaggtagggaggncatggcgtncggcagtaactggctctccggggtgaatgtcgtgctggtgatggcctacgggagcctggtgtatgtactgcaatttatttttgtgaagaggcaaaaaatgcgcattgcaatgaaatctcgaaggggacctcatgtccctgtgggacacaatgcccccaaggacttgaaagaggagattgaaatccgactctccggggttcaggaaaacaannatgaacnccagcaccttgcagaagaagaagcaagaatacaanaactggaaacccagggaaatcaaagtagcaacaacnatctgtataggatgaaagcactaaaaaaaaaaaaaaaaaaaaaaaacnnaatccaaaaaaaaggnngggntncccgttccttnntgggcaagaatttccgctcctacctgctggatctgcganacactagtacgcctttnaagggtgtacgcnaagcactnattgataccctttgtggatggctatgaaacagcccgcnatgggacaggggtctttggccagaatgagtacct

SEQ ID NO: 614208 - DNA, 113 bp, Homo sapiens
tttttttttttaaattctatggtaacaaaatcagttcaggggcttttctgaacaaatgatcatgatccctcagtatttccggttggctctgcgcctgcaatcccagccgacat

SEQ ID NO: 614209 - DNA, 606 bp, Homo sapiens
  misc_feature (42)..(43): n is a, c, g, or t
  misc_feature (47)..(47): n is a, c, g, or t
  misc_feature (52)..(52): n is a, c, g, or t
  misc_feature (54)..(54): n is a, c, g, or t
  misc_feature (56)..(56): n is a, c, g, or t
  misc_feature (60)..(60): n is a, c, g, or t
  misc_feature (65)..(65): n is a, c, g, or t
  misc_feature (67)..(68): n is a, c, g, or t
  misc_feature (72)..(72): n is a, c, g, or t
  misc_feature (81)..(81): n is a, c, g, or t
  misc_feature (93)..(93): n is a, c, g, or t
  misc_feature (100)..(100): n is a, c, g, or t
  misc_feature (103)..(103): n is a, c, g, or t
  misc_feature (119)..(119): n is a, c, g, or t
  misc_feature (122)..(122): n is a, c, g, or t
  misc_feature (124)..(124): n is a, c, g, or t
  misc_feature (143)..(143): n is a, c, g, or t
aagctccgtacaaaaatcaccaccttgaactacatgtactcnncgangaccngnantggnaatcnannggcntgacctgcnagccagcctggngccgctnggnatcaacctgaagatgnaananctggccaacgccaccatgngcgagcgcctgggcaagggtgacttcgacgtgtccatcggctcgtgggcgccgacttctccgatccctacatgtacatgaacttctggttcgactcctccctgcaagggctgccgggcaaccgctcgttctacagcaacccgatggtggacaagctgattcgcgacgcggcggccaacaacgacacggccaagcgcaccgagctgtaccaggaagcccagaagatcgtgctcaaggacagcgtgtacgcctacctgtatcagaagaactacaccctgccgatgcgtgattcggtgaagggttatgtattccatccgatgctggagcaggtgttcaacgtggctgagatcagcaagtaacacgcgatcaaatgtgggagcgggcttgtgtgggagctggcttgcctgcgatagcatcacctcagcctgcctgacagaccgagggtcgacgcggccgcgaattta

SEQ ID NO: 614210 - DNA, 137 bp, Homo sapiens
cgacgcccgtaactgagtgcagcagcggtgcagcggggctcggccgacatcgtgatgtggtgcggatagggcactgaggggtggcgcgcggcaggagcacgcatggtattgacttaaaaggttcattttttgtgtgt

SEQ ID NO: 614211 - DNA, 163 bp, Homo sapiens
aagaaaaaaataggaaagggtcataaaatctcagtctaattgaggtggtgaggcttgcgggggtaaactagtggagggagtgcatggcttcatgtgagtacaccacgaaccctcagggggggggaggaaaagcagcctcatcagtaggtagagagccgggcaa

SEQ ID NO: 614212 - DNA, 341 bp, Homo sapiens
atgagctcttagtgaatttctgtgtcaaggatgtgtgcatttaagttttgatctgctgggcacagtggctcgcacctgtaatcccagcactttgggaggccaaggcgggctgatcacttgaggtcaggagttcaggaccagcctggccggcatggtgaaaccccgtctccaccattaagcagggattacccgggcatggtggcttgtacatgaggtcccagttactcgttaccctcaggagggacacttgcttggacccaacaggcccaggttgcattcaaccaagattgaaccactgcactccaggtgtggttacaaaaaaaaactcccaatcaaaaaaa

SEQ ID NO: 614213 - DNA, 274 bp, Homo sapiens
atccgccacatgaatgcagaagggtttcctatggtttctctagaatttttatggtttttggttttagatttaagtatttaatccatcttgagttgatttttgtataaggtgggagctagggatccagtttcattcttctacgtatggctatccagttttcccagtaccatttattagataatgtgtcctttccccaattttgtttctgtatgctttgtcaaggatcagttggttgtaagtatttggccttatttctaggttctctattcttttc

SEQ ID NO: 614214 - DNA, 332 bp, Homo sapiens
agtatccactctggctctctcctccactgcaaggggaagagtggcgaggaggggctggcactgcccacccctaggcattcggaaaaaccctgcttccaaggcttccctctacccctgctttccaacaggctctgacctccagacagacggttcaaagttacaagtgctttatgccctcccttgattcccccaggcccattccttgcgctaaatttaaggggcacctgtcaaaacccttgcttttctaattcttgcatcctcattcatcctgaaagaggtccggggactgagagtgagtctatactgccaggggaagggggaaaggatgttgg

SEQ ID NO: 614215 - DNA, 121 bp, Homo sapiens
taagtttcttctttgtaaatttcctattgggtggggtaacgattttactatatctttgagtttaaaatctctgctgtgtagactctggcagctgcctctatggggacgaaccaagcttttt

SEQ ID NO: 614216 - DNA, 750 bp, Homo sapiens
tgggaaagtcatgtcaggggtagtaatataattgttggggacgattagtttaagcatgggagtaggttaaggtaatagtacgtagtcaaggccattatgtggttggagattgagactagtagggctaggcccaccgggtgcttcgcaggcggcaaagactaagttagggcaataggcacaattattggctaaaaagggagtagggttgtcgagggtctatgaaagtacgctataatgaacagcgattagtattaattcccttctaagggctataagttagggcgggcatatatgaggtggtggacgcgatatatcactaagttattccctaagaaatgtggagtatggtgtaaatggctcagttataaatatattttcccagccccggattggcccagtattggccaagtgagaaacaagagaacccactttgtgcggcggaggagacagatgagatctctctcttcacaaaaacactcttctctttcacagagtgagagagaaccgggtgctcgctgtggtgcaagatgcacaccttgttgtgccccccgcgagggtctgagtgggtattcggcgaaagcactcttgttgggaagaccaccccacaccatggtcccattgtgggtatgagaacagtgtatcccggcactttggggggcaactctaaaccctggcgcatgtctttctttaccacacccttggaaggccggtgtccatcacaacagggggcaatggggaaagaattggtcg

SEQ ID NO: 614217 - DNA, 1078 bp, Homo sapiens
ggccaatccggctcggctccggccctgatggggcacaggaaatcaagcggtatgtcttctactccagcatgagctggaataagctataccgtgcgtgagatcaagccaggctttcaagccagtcagtggctcagacctgatgacacctgtctactttgagacgcagagttctagcgtcccggacatcccagaggattgccccaggcaatccccacctcgagcagctgggtgcccatcagcgtgttccggaggcttcaggcttcggtggccaccggcctgatgtgatagacgactggcaagccgtcgtgccccgcaggcacccctgcagctcggtgcgttacaagcgaactccaatggaggacagaacctggtttctctagttgacggctgacgtggtagataggcagcacgaatcgcgtgtggggtgtccttactctgcatgtgccaagcgctgtgtcctacacaggcccaagccaagggatggaagtaatgctggtcgacaggtccattgatcccggatgcatacactgcggattcctctcaggaaggacgactgtgagagacttggttgctagcaaggtacagggggcaaatgccaccttcataaagcatccatcatcgtcgtttgagcgacgggagacgtggttatcgacttgactgggcatagctcaaccgtagtaaccctaggtgagaccgacgcatgcttgatcgccggggggtcgccgtgggccgctgcgctctgggagacatatcgcattgcttggaccgcagtacaggatccccaccggacgaagccgcggacaggaccccaagcggtctggagtccacatgggcaccaacggcaaacagcgagcagaaacactttgcgggcagggaaaatcatgggcaaggcgacacagcgggagggtaggtcgacacaagggggccagcccagccacacccacaaaccccacaacataacttggtactgcttgcatgaaacgacacacggggaacatacccggaagcatgcacatgacgctatacgggacgaacctcgcgggtagggccaaaagccagactgagcggatgacaacag

SEQ ID NO: 614218 - DNA, 219 bp, Homo sapiens
ttttcaccacattggccaggctggtctcgaactcctgacctcagtgtaatccgcccgccttggcctcccagagtgttgggattacaggcatgagccacggtgcctggtccttcctactattttatttcttttttttttttttttaggaaaaaaaatttttgccttgacacccaggttgaattcgggggcgatactctcagcatcactaaaacccccacc

SEQ ID NO: 614219 - DNA, 129 bp, Homo sapiens
gttccgtagatggtggctttctttggatccctgtgcctcaacctagttactatttggtatgaacttaagtcattccagtgcctctctcagatagcattggcagtttatgaatttctgtgcccatttcaa

SEQ ID NO: 614220 - DNA, 112 bp, Homo sapiens
  misc_feature (53)..(53): n is a, c, g, or t
tcgtagggagcgttaagttgtgtctcactgtggttcgttttgcatttccatantcctcatcctgtcttatatagctggaaaactaaaatgctttttacatgttttaattgtt

SEQ ID NO: 614221 - DNA, 768 bp, Homo sapiens
  misc_feature (447)..(448): n is a, c, g, or t
cttagtctgtactgctgtcactaacagaattacacaacactaagtatttgataatgaacagaagtttatttggttgacaggtgtggatgctaggcagtccaagaacatggtgccagcatctagtgagggtcttgccatggcagaaggcaccacatggtcaagtgagcatgagaaagatatatgtggtctaaacttagtccttttatcatgagcccactcccaagatagcagcactaattcattaagtgagggcaaagccctccttacctaattacttttaagaggtctcataagcacttttacaagtgtcaagtgtaaagtttccaagcagcttgagactttggcgggacactagtttaacaccccttacatcaggaggtgctccacttcacctgacataaggagctcagtacagtgggtacgctaatcactgtggctattgtgctnngcaaacacactggttatctatccatgggagctctaagacattctaggtacaatggtacgcgtacgaatggtacctacgtgacacagccccccagtaaaagaccctgggcactgtaatctctaacaagtttccctggtaaacaacattatctcacatgtagtcacaattcagttgctggtggcatgaaacaacagatatgtgtgactccactggtaaagaggactctggaagcttatacctggtttcccccagactttgcctctgtacctattctctttgctgttttgcttcatatgcttttgctgtaactaaatcatagc

SEQ ID NO: 614222 - DNA, 238 bp, Homo sapiens
  misc_feature (6)..(6): n is a, c, g, or t
cgcggnacccaaatattatccttccttcttatgtgtgaaatctgtgtctgttacttccatgtatactacacatattcatttacacacatttttgcacacacttattgtttaaacctataaaaaagaatatcatacaatacgtagtcttttggaattaattttttaatattaaattgccaagattcatctatactttatatgccactacactttgttctttttaacttttgtgaaatat

SEQ ID NO: 614223 - DNA, 315 bp, Homo sapiens
  misc_feature (84)..(84): n is a, c, g, or t
tcctcaaggcggtggtttgaaaaaaataaaaacaaggaatggaagctgggtctaagtcctcttcgtccccgcccaagtaacaanttgggaagccctttccagcttacccttcttgcgttgccccaaagcttgggaaggaggcccttattcagggtagccttgggaacaggaaaccccctttagggtaagccctagccctaagcccccctggggagttttttacctggggaccccccttgcccatgcctccaggtaaaaaaaaattcaattggtttttttttttggtccaaaaaaaaaccccagctagttttgcca

SEQ ID NO: 614224 - DNA, 111 bp, Homo sapiens
gagtattggtgctacattattgcgctcgatatcgaggtttctacgacagatgtcattcatgactctttgtctaccatgatggcaccatcagagtgctccacgttggtgtgg

SEQ ID NO: 614225 - DNA, 455 bp, Homo sapiens
agtgtagtcgaatgaaaatataaactgttgacagatttggtgaaatagtcacaatttggctatcaaattcatttggttttcctcaaattcgtgtaaaaaaaaaaacagacgcacaaactggccgtcactgatttctccaggactgggcagtctgccctcaaaagcttcagacaagattcatgagtataagcctgaaaaagagaaacctacaacaccgggaaatcggcctaggtccccatataaatccgcttaacacctcagtacgaaactcccccatggtattagaacataactaacaggttcccataagtaagttccagaaaaccaacatatggccgacctcagggatttttaccaaccactcgcttacccttgtggccttgggacatggcatgctggtctaggatcctctacgcaaaggccgtgtcgctcctcgtgggttgccaagcaagccg

SEQ ID NO: 614226 - DNA, 420 bp, Homo sapiens
  misc_feature (357)..(357): n is a, c, g, or t
  misc_feature (379)..(379): n is a, c, g, or t
aatggaaacgttcaacacacacacagcagcagtcacccaaacaatttgcaggtgaagcataagccaatacatatatacgtacagtttgtcaagagtctagtctcaatgtctccaaaacatgaatccttatatttctatcattacagttacatgcaggtgctaggaattcactaggagaaagatgattagtcttatagaacgtaaattcacatattgtgcatcctgcaacattattgttacacggtcagttggtagcttgtactctctgaaatgtaatctatccagagattgctgtgatagctattagagaacagttttgacgtacgagaattgaacttcacattcagattggactgntcctgctctttcacattggaantttaattacagcgctctctctagagttgtttcgtgtgtcat

SEQ ID NO: 614227 - DNA, 642 bp, Homo sapiens
  misc_feature (130)..(130): n is a, c, g, or t
tccaagtaaaaattacgctatctaggaatgtaccaaccaaaatctcgtatggcagatcttgacaggctggacctgcaagatgtggcttcgaattttaagccatgttattgacataagtctcatagtgatncgatgcatctagttatcataatgaagataatttaaagaggtttaatgttggcttgaaaagcagtaagttgggtttgcaagatagaagatacgtttacagctctcacttttcaaaatatggaaaagtggttttaattccttatcatgtggcaaggcacggtagagtttagaggacaaaccaattgggggggggacaaaaacacatgggacaatttgcgtagggaccactcttgttgcattcgggttaacgtaccgatattggggcccagaatcacaagccacaaaccaagcgacaacgtgggacgttgtgggcaccccccccatatttccggtggggcctctttggcctgtcaagggaaaaacgaagccctgttgttcgttcgtcatcccattcacagccgcatgtcttggatttcacaacagccctcgcttatgcaaacagtttttcacacaaaagagtatgcgatcagactacttactcatcttacacaagttttcattgcgggaattcgg

SEQ ID NO: 614228 - DNA, 168 bp, Homo sapiens
  misc_feature (17)..(17): n is a, c, g, or t
tcttcatatttacttanatacatttcagccttgaaatatcaattcaaaggccatgcgcggtggctcacgcctgtaatcccagcactttgggaggccgaggctgacagatcacctgaagtcaggagttcaaaacaagcctggccaagatggtgaaaccccgtctctata

SEQ ID NO: 614229 - DNA, 1003 bp, Homo sapiens
  misc_feature (19)..(19): n is a, c, g, or t
  misc_feature (65)..(65): n is a, c, g, or t
  misc_feature (69)..(69): n is a, c, g, or t
  misc_feature (73)..(73): n is a, c, g, or t
  misc_feature (90)..(90): n is a, c, g, or t
  misc_feature (98)..(99): n is a, c, g, or t
  misc_feature (103)..(103): n is a, c, g, or t
  misc_feature (150)..(150): n is a, c, g, or t
  misc_feature (166)..(166): n is a, c, g, or t
  misc_feature (169)..(169): n is a, c, g, or t
  misc_feature (203)..(203): n is a, c, g, or t
  misc_feature (348)..(348): n is a, c, g, or t
  misc_feature (380)..(380): n is a, c, g, or t
  misc_feature (462)..(462): n is a, c, g, or t
  misc_feature (550)..(550): n is a, c, g, or t
  misc_feature (586)..(586): n is a, c, g, or t
  misc_feature (591)..(591): n is a, c, g, or t
  misc_feature (609)..(609): n is a, c, g, or t
  misc_feature (999)..(1000): n is a, c, g, or t
acatccgttgaattttaanatttcttgtgggcccagatgtatacccatcatgcgttgcaccaccngacnacgntcagcaacgtcaagatngacatctnncccnacatgaggcggcaggcagccctgggctcaagaggaagtaactgaagnccgtctcatcccatgnccnccatgtaggggagggactttgttcaggaagaaanccgtgtctccaaccacactatctacccatgacagacccctttcctatcactcaaggccccagcctggcacaaatggatgcatacagttctgtgtactgccaggcatgtgggtgtgggtgcatgtgggtgtttacacacatgcctncaggtatgcgtgattgtctgtgtgtgcatgcntgtaccgccacatgtctacctatgtgtctttctgggaatgtgtaccatctgtgtgcctgcagctgtgtactcctggacagtnacaaccctttctctccagttctccactccaatgataatagttcacttacacctaaacccaaaggaaaaaccagctctaggtccaattnttctgctctaactgatacctcaaccttgcgggccancatcnccactgctccaaatatantactatgactgcgtcccagaagttttgggtttaccacactccccaaccccccactcctattttctgaagggccctcccaagggtacatcccccccccccagttttccctgagagagatcaacctccctgagatcaaccaaggcagatgtgtcagcaagggccacggacccccatggcaggggtggggtttttattagggaggggcccaaagcccttgtggggggacctcccctgagcctgtttgaggggccagcccttagtgcattcaggttaaggcccctgggcagggatgccccccctgctccttcggaggaggtgccctcacccctcactggtccactgggttgagactcaccccgtttgcccagtaaaagcctttttgcagcaaannaaa

SEQ ID NO: 614230 - DNA, 125 bp, Homo sapiens
cgcattgtggtctggagaaaacctatgcttgccaggacaaggcaggctctgagcttaggtctgccatgaaaatgactttgtgggttatcggtaaacagtataaggactacacagatgccagcatc

SEQ ID NO: 614231 - DNA, 553 bp, Homo sapiens
  misc_feature (549)..(550): n is a, c, g, or t
catgtctcatctgtctcagattgttgtcattggtacaaatcacagatctatggttttcatgtacacaattcacatttctctgatgtacattttctgagtgtatgtgaatacacttcttcattcactcatgtatgtactaactaacaaagaaacagttagtcatgttgcttactatactcaacttgggcagattccatcctcaaatatagtactatatagtcccagagtttggttacaactcccaaccccactctattctgaaggcctccaggtaatccacccacatttcctagagaataacctcctgaataaccaagcaattgacacaaggccacggaccatgcaggtggctcttatagggggcccaaagcccttgtggggggacctcccctgagcctgtttgaggggccagcccttagtgcattcaggttaaggcccctgggcagggatgccccccctgctccttcggaggaggtgccctcacccctcactggtccactgggttgagactcaccccgtttgcccagtaaaagcctttttgcagcaaannaaa

SEQ ID NO: 614232 - DNA, 122 bp, Homo sapiens
gtcaactgattctcgctgaagtctgttaattctactttttgagtactatgaataaccacgtgtctttaaaacccatctacccatggaggttaaaacaatacccatcaaccctatttttttta

SEQ ID NO: 614233 - DNA, 135 bp, Homo sapiens
tcccgaactgacgcctgtaggtgaagcatgtaggtacaggtatctgtatctgtgaatgtgtaaagatatatatgtataagtatatagtatatatcatacatgtatatgtgtgtatagatatatatcgtatatcta

SEQ ID NO: 614234 - DNA, 415 bp, Homo sapiens
  misc_feature (6)..(6): n is a, c, g, or t
  misc_feature (142)..(142): n is a, c, g, or t
  misc_feature (411)..(412): n is a, c, g, or t
ggatgngagagagaggggagcgaaagaaaggttcagaaaagatagagaaacggagtgacaaaggtattgagcgcgctatctagagaagaaaagaggggggcgactatcccacttttccatgagaaagatcaaacccttcccnttaaatcaacccaaggcgatgggaaaagcaaaggacccatggaacccccaaagcaggggatagcgtcttcataaaagagtgggcccaaagcccttgtggggggacctcccctgagcctgtttgaggggccagcccttagtgcattcaggttaaggcccctgggcagggatgccccccctgctccttcggaggaggtgccctcacccctcactggtccactgggttgagactcaccccgtttgcccagtaaaagcctttttgcagcaaannaaa

SEQ ID NO: 614235 - DNA, 282 bp, Homo sapiens
  misc_feature (278)..(279): n is a, c, g, or t
agagagattaattttttgagattaattaaggtagatgtgatagtaagggtatgggattttatggtaggggtggtgtctttatgagggaggggcccaaagcccttgtggggggacctcccctgagcctgtttgaggggccagcccttagtgcattcaggttaaggcccctgggcagggatgccccccctgctccttcggaggaggtgccctcacccctcactggtccactgggttgagactcaccccgtttgcccagtaaaagcctttttgcagcaaannaaa

SEQ ID NO: 614236 - DNA, 251 bp, Homo sapiens
agacacaggctcacgatggagacacatgctcaagactgggggcacgctcgctggttcttcttcaatgggcttttgcctgcgcaggatgacagctgtgcacttggcccacatccaggctaccccccagcccgcttctcccctgcttagcccaggtaggagacagtataggtgatgatctgccgaggtcgtccgtatcctgtcatgccggcctgggaggcccctctgttgctgcccatcttgaccctgtgtct

SEQ ID NO: 614237 - DNA, 449 bp, Homo sapiens
ggggaacgagttactgacgcgggggtcggggtagacctggggggagagatccatcgagtgggtcagatcacagggggctgcagataacctccgggagccgcctggaactgggaagattcgctgggtggctagacccagaagagagacaacaatcactgcaagtgtggctcataggaagccacatccataggaaaaggggcagagtactatatgaagagaacaccccatgggacaaaagaatctgaacagccttcagccctagaccttccctctgacagagcctacccaaatgaacaaaccctggtaatatgacaaaacaagacgcttcaacaccccccaaaaaacatactagttcactggcaatggatccaaaccaagaagaaatacctgatttacctgaaaaagaattcaggaggttagttattaatcagggaaggaccagagaaagg

SEQ ID NO: 614238 - DNA, 704 bp, Homo sapiens
  misc_feature (424)..(424): n is a, c, g, or t
aaaggtcccggagagctgagcagtcaagatggtggggcccaggtcttgggagacgggcaggattggggacgagaggcaggaagagacgggtggggggcgaggagaaggcaggggtaggaggcaatagggaatctgtaggacccgaaaggttgtgaggtggggttgggaaagacgtggggccctgccgcgggaatgcgagtcttgcgagccgtggaaacgaggagtttagtggcgtcagagtcttgatgggtcacgaagttatgtggtggcatggtgatagaaacatcgggggattggctgtactagaatgcttgacacacttcccctcttctcgtgagcagtcgtgacttcaccgcatagatcgaaaccgcagcagttcagagggaggcctctcgcagctagtttggacgcggatacaggtgantggccaagatccatgttacgagcctagtcgttcggggaatagtcgatgaaggggcccttggggccaagaaacccgtatgcaacgccgtagtgtgcatcacaaggtacctgggtgaatccccaaaggaagtgatgagatggaagtggtgaagggtgctgtgactttggacgcaactattcgtgcccatggcgtgcaatgacgagctggccaacgaacaacggacgcagggctagactaaggagcgattatcgtcgcaaatggacgtttcggggtggtcgga

SEQ ID NO: 614239 - DNA, 169 bp, Homo sapiens
cacacagctcggggttggggcaaaagaatcgcttgaacccaggaggcagggctgcagtgagccgagatcgtgccactgggtgacagagctcacctgcacttgctcattgcaagatgagcaccctcaaaccaacctcaaacctgatctttttgtttgtttttttgaggca

SEQ ID NO: 614240 - DNA, 228 bp, Homo sapiens
ggtatttacaaagcttgctatctgggcatccccttgcttgggcaagacctactgctactgaatcgtgacgcgggtactcagtatacagtctcaccctcagcacgattcgtttacctttcacttcagtcttacccttcattattgcggacctagcagcagtccaactcctattgcttgcacgaaacgggatcaaacaaccccctaggaatcacctcccattccgataaa

SEQ ID NO: 614241 - DNA, 1209 bp, Homo sapiens
cacatttgaagaaattcacattagacttcaaacctatattttttaaataaattgaatcaattgctcataaccttctaaaagagaaagtaccagacccaatgggtttactggtaaattctaccaaacatttaaggaaaaaatactaagactctacagtctctttcagaagacagaagcagagagaattcttcccaactcattctgtgagtttagcattgtcctaatacccaaattagacaaagatattacaagaaaactacagaccaatacctctcatgaatatagaggcaaattatcaacaaaatattaacaaatcaaatccaacattgtataaaaattacactttgaccaagtgggatatatcccaagtatgccatactggttcaacattcaaaaatcaagcaatgtggcctgcttgtgctgcgttggttcacgcttgtaatcccagcactttggaagcccgaggcgcgcagatcacgaggccaggagattgagaacatcctggttaacacggtgaagccccatctctgttaaaactccaaacgattgcttggccgtgctgccgcccccctgcagcctcagttactcaggaggccttgagcagcagaatggtgtagagcccgcaaggcagaccttggcgggggcccaagtattgtcccattgtacttcagcctggttgacagcgcgactcttcgtctcaaaccctaccacacacaaattcaacgcatgcaatcttacaccttcaacggtctacacaccgaaagacatccccctggttttcttcatacgcgcctgaaacgcttctactccaacccctctcttgataaatttttcacgatctggccttggcgaactttttataactggctaagatatcttcagtgactttgggctacctcaacttaaggtgcgaaaccggaccttccccattttcgccacagccacggtggcccttttcaccggttctaaaccacccggcctttggtcccccttctcgcggcgcgaaccgttcccctcctttcgcactatactttttggcaatacacgttctcttcacaactctgaactcacaattccttccgggacccctctcccgtctgtctctcctccactacacgacctgtgttcttacccctcctcgctctgtccggtcccctcttctctccccctctctcctctctctcatctcccgccttcttcgcttcccct

SEQ ID NO: 614242 - DNA, 201 bp, Homo sapiens
tgccatgcatgagctgacctagcttacccagacacatgtcattctgctttcgtcgctgaggcacatcgggctcccatgactgtctctctgccattccgtaccccagtcacaggtcaaggctttggtgattgggagcagggcgagctgcattgtagaaggttaaaaccaatgcacagtcagagaaagagccatcactccggc

SEQ ID NO: 614243 - DNA, 239 bp, Homo sapiens
cgaagagcaagtctattctccggactaccctttggtctgaggacccaggacagagtcaagaccttcccaccccccggtcgaaactaaatacggaagacgggaacgtattaatgattataacggaggacaaagtcttcaagggacgaaacccggcgccgcaccaccgagtgggccattagggtcgtgaaaccctccgctgcgtccacctggtggactccagtccttaagttctggtcgga

SEQ ID NO: 614244 - DNA, 1191 bp, Homo sapiens
agcgggctctcggggaggggcggcgcgcaggcgcggtgggggtgcgaggctgcgcaggcgcggacggcgctggtttgaagaccttcagcgttgccctggcggagcagagacaggccctcggggtggcaggctctttggttcataagagccctgaggagagattcttctaacaatatgtgtacacacaccaacgtactgtgacctaggaaaggctgctacacggatgtcttcaccaaaggcattatggaacttatcctaactactggtcatgcttacactgatacagggcaaagcatcaggcaaccctagaaacccaaatatacggctcggtacactaatgggaccttaccctttcaccccaagaaatgacaccaccagaccaatacctctagcgggacagaacactctcttgggcacacgaacaatccagttgcacctgacacggcgtgtgaaaacgtgaactacttgataccaatactttgttacccggacaccacagcgcacacgccgcaggtggcgacaaacttgaaagagccttcctaataacagcggcccaccggccacacacgctgtcgcccacgcaacatggtcggaagtaataccggaatttgatccttggggacccgaacccatttttatttggcatggcgccatcggcgtatcgagcgcctttccgaacagagtatgggcctacgctatggcgctacatcaagaattcgcgttttgggaacagacatgccaaagcatccaaaaacttggtccaccgaacatacatttatcgggccccttcggggttacaccacagggatatggctagaagcatacccgcagggcgacagagccgacccacaatttgttgaacacccaaattgggccacctggaaagtttcggcacagggcgtacctacgatcttaccccacgaaatgcggttgaaattgcagaaccgcgattcgcaacacttttccgtatacaacctttgtactggggacacacgcttgggcgaaggttaaccaattacccccggtacaggtaacttgggctgcaaatcgagacaacatgcgtgaaagaggcataaacacatcactatctacagtacaaaaactaagtataagtgccggctatgatgacgactagtgtatataatcaacgccccttcaccaacgttgaccactgaacatccacaacctaac

SEQ ID NO: 614245 - DNA, 334 bp, Homo sapiens
gtctcggactcctgacctcaagtgatctgtccgccttggcctcccaaagtgctgggattacaggcatgagccaccgcgcccagccttaatttttgtatttttggtagagacgcggtttcgccgtgttggcctggctggtctcgaacccctggcctcaggtgatatgcccgtctcggcctccaaaattgctaggattacaggcatgagcacttgcgcccagcacgtaaattttgtttaagggcaggccaatacctattgggaggatttatacacaattattaatagtcgcactcacacattcactgagtagtatcaatttatacagatgtctctc

SEQ ID NO: 614246 - DNA, 219 bp, Homo sapiens
cgggtgactctagaggaccccagccctcctctccggtcaccaaatcccaggccaggcacgccagggcaggtcgaatacctccggggggtcacagggggaacaaggagagattcctactaaccacacacggtctagccaggcagggcggggtccttatccggaggcacagtagacatcagggaggtcaaggccccccccggaagggagcccaaagggtac

SEQ ID NO: 614247 - DNA, 706 bp, Homo sapiens
agctccagtgcactgcagatggcggctgctgtaggacggctgatccgagcgccggctgccctacatgtgctttccatgagcttagggcattactgccactgcagtacccaggccctgccccatttacctagaactgtgcaggggcatcgttttccaggctttcagaatagcatgttacggggggagggttccactaacaaagcgcctcaagcctatagtttcctgtgacgcataaaaataaatttcgtttggcgtccgtttctaccaacttacatctaaaacacaaaagatatactagtctctagaaatatataataaacttctaaaactctactatcctatttgtttgtttatctaatatcaacgatcccgcgtcctcttctactttatattatcttcttgttccgctctcgtccattcttatttcgtcattttcttttctatttctttttctttctatatttctctctctcttccgctcacccctttgatatttgttaatttctattatatttctttgccttatattttttcccctctttacgctccctttattatgtactacttaccgttcttttatattattctttcaatatacttttaatatctctttcattaatgcgcattctcctatacaccagcttcacatcgccccttatgtttgtctctctcctctttactctcttcgtacttacttttatataat

SEQ ID NO: 614248 - DNA, 446 bp, Homo sapiens
tgctgctccctcttcaaaccaccacctgccggtggagtcaagtgccctgacggcgaggtcatgaagaagaacatgatgttcatcaagaactgtgcctgccattacaactgtcccggaaaaatgaaatttttgaattcgctgtactacaggaagatgtacggagacatggcatgaagccagagagtgagagacattaactcattagactggaacttgaactgattcacatctcatttttccgtaaaaatgatttcagtagcacaagttatttaaatctgtttttctaactgggggaaaagattcccacccaattcaaaacattgtgccatgtcaaacaaatagtctatcaaccccagacactggtttgaagaatgttaagacttgacagtggaactacattagtacacagcaccagaatgtatattaaggtgtggctttaggagcag

SEQ ID NO: 614249 - DNA, 637 bp, Homo sapiens
  misc_feature (502)..(502): n is a, c, g, or t
tgaggcagggtctcgcaccctcacccaggctggattgcagtggtgcaatcacggctcactgcaggctcaacctccgtgggctcaggcgatcttcctgccgcagcctcccaagtagctggggactacaggcacgtgccaccatgccaggctaatttttggtatttttggtagagatgaggtttcgctatgttgcccaggctggtcttaaactcctggactcaagcgatctgcctgcctcagcctctcaaagtgctgggattacaggtgtgagtcactgcacttggcctgtttggtttggtttaatttttttggaggcagagtctcgctctgtcacccaggctggagttcagtggtgcaatcttggctcactgcaggctcaacctcctgggctcaggcgatcttcctgccccagccttccaagtagctgggactacaggcacgtgccaccccaggctgtgagtgcagtagcgtgattataactcgattcactgtaaccttgaanctcgtgggcctcaagggattctcctggcttcagcctctcagtgctgggactaccggggttttgccatcattgcatgggtttcttatgacttggtggattccattttgggggaaaggggttgcttgtgcccagctc

SEQ ID NO: 614250 - DNA, 283 bp, Homo sapiens
  misc_feature (6)..(6): n is a, c, g, or t
  misc_feature (173)..(173): n is a, c, g, or t
cctagnatatacgggtcttgctgtgttgccctgactggtctcaaactgctggactcaagctatcctcccgacccggcttcccaaagtgttgggattacaggcatgagccaccacactcatctatttttttaaaaaatttaaaaggtttatagcctaacgtatttaaataatancatttaaacgtatgtcatgatttcaatagttgttatttaaaaatcctaaagttactaagctaagaggaacagaaattaaatggcaacaaattttaaataagtaatttatg

SEQ ID NO: 614251 - DNA, 1506 bp, Homo sapiens
  misc_feature (995)..(995): n is a, c, g, or t
taattggagtggagttatacattcggcaaacactagccacatgagtgtcttacggggcctcaagtgctcaccacctttccagaaaccggcggccagccacccacgtgagtgccattcaggaaggtgtccagtgggttgggacgtggtttcttccagcacctacaatctccagaaggaggtgattttcctacaggtgaggacgtgcagatagctcccttttctacacacgcgtggtacgcggcacaaggccgtgggctcccctttcttgggtgtgggcacgtgggctagtggggcggagaaaaatccacgttgggttctggggcggagtgacgccagaaagggtcaagtggtgggctatccggaaagaccacagggtcggtgtaaagaagtgcacagcgtggcgaagggggcttgcggctcacccagaaattcgtggggggcttccctcctcctaccagtgtgtcgtggggccctaaaagctatatcgtctcaaatatacgagccaatgtgggtgtggcccagagggagccccagaaaaccccgatggtggtggcacatatagaggggccaactataatcgaggtgtggactcacagtggaggggaatagacagtgccttgctacaaacgggctgtaagggcgtcccagctaaagccattctgtaagcatcgcgccgctttaaaaacctaggggggcttgccaccccaaagtgtttacacccgtgtagaatcacccttgacaacaggccaattcgtgggtttcaaggcaatcccggaaatggggcggtgggtccacccaaacttctgtggggggaacaagaaaccggggccccacagtcggggcaacaaacgaggggacatcgtctggaggggacgcctccccaacgaggttcgggcggacgaacgaacaaaccgcggaccgactcatggcgtattgtgcgcccgatgcggcgtccgcggggaggcttctcagaccagggttgggctccccaaggngagccaacagaaagaccaataacaacagactgcaccgaagcacacacatcaaccacagcacgacatacacgaacggacgacagcaataacaacacaagacgcgggcgggggggggcggccacataagaaagagaatcatcaccccgcgacgagggcgagcacaccacagacagaaaggcggagcacaaccggagctgtggtcggccaacaaagacgcggggcccaccaaaagcggacggcgcaaaataatcaaaacgacggagaccgccggcggcccgcggtcaaaaaaacagtagggcggtacggaacacacacacaaccaagagacacgtagatgagaagaacagccacaaccatgcgtggcggcagacaactagatgaggacacacacacccaacgagaagtaaaccgtcggcgagacaacaaaaaaaccagacgcatgacagagtacgacaccacacgctagcgccggcgccatgccgctgcgtactgataccccagccgccacgcg

SEQ ID NO: 614252 - DNA, 157 bp, Homo sapiens
tgtttcttctggggagacagtatatgggaaggagtggaggggaggcccaagggggtgtggagaaaggagcagaaagggcagcatatggggtttcataagccctaacgggcagacaagggacttacccccgacatgggctcttcatagcaagtaggac

SEQ ID NO: 614253 - DNA, 763 bp, Homo sapiens
agcggagtgggtcctgcctgtgacgcgcggggtggtcggtcctgcctgtaacggcggcggcggctgctgctccagacacctgcggcggcggcggcgaccgacgcggcgggcgcggagatgtggcccctggtagcggcgctgttgctgggctcgccgtgctgcggatcagctcagctactattgaagtaaaacaaaatctgtagaattcacgttgctgtaatgacactgtcgtcattccatgctttgttactacatatggagtgcacaaaacactactgaacgtatacgtcacatgtggaacatttaaaggaagagatatttacacctttgatggacgctctaaacaagtccaactgtgcccactgacgtttagatagtgcaaagaaattgaagtctcacaagttactaacaggagatgcctcttctgaagatggataagagctgatgctgtctcacacacaggaaactacacttgtgaagtaacagaattaaccagagaaggtgaaaccgatcatcgagctaaaatatcgtgttgttcatggtgtgctccaaatgagatctatcttatgtaatctcccaatttttgctatactcctgtactggggacagtttggtattaaaagacttaagatatagatccggtggtatggatgcagaacaccaattgctttactttgtcgctggaactagtgatcactgtcattgtcattgtggagccattcttttcgtcccaggtgatattcattaaaggaatgctactgcc

SEQ ID NO: 614254 - DNA, 1107 bp, Homo sapiens
  misc_feature (119)..(119): n is a, c, g, or t
  misc_feature (348)..(348): n is a, c, g, or t
  misc_feature (405)..(405): n is a, c, g, or t
tataaagaaaaagaacacattcacagataaagaaaggaggtcctcttttaaccgtggtcccggattcgtggtccccttttccttctttcaccctctcttcttctcagaaggcagtgggntcctcataggccatgcctgagtggattttaaccggggcggtacttttctatttttttacaacacttagtagtggtggactatagtctgtggtgtttttaaaccatttctagcgtaaaacattttaaacttttataaatctatcttaacaacataacatgggttgtggggtaccactattttggggcaacctataatttcctacaggtgtttggttctcgtggcgtggtntattctcccccaattagaactcgtggggatataatttccaattctcaagagcgggcncataaaataactcctcttaatagtgtgcggaacatattttctgtgggtaacccctatatatttttatccccatatttgggggaactacgacaccacttttcttcataactctcctctctttcaccagacacagattacccaaacggttgtgtttctccccgaggggcgttcctcttaaaacttagaggagaaaggtaaattcacggcttaagagggggagcggaacattgttgggcttaagagggaccagtgcgggaatgggcgcataaaatttgtcaactctttttcttcgttagaaaattttttggcgcccaagttcggcattggccccaaagaagggggccacaaattaaccctttttccccaccccaggctcccctcgtgttggcaagaagggggggcaagaatcttttctcccacaaggggtctccattccacccccactttggtggcgaacctgtgtgtcgtggtgggcacctcaactaaactcttcttggcggcccaatttgacgagcaaatctggggggactctcccacgtggggctctccatcctcctaacattttggggcgggtcaacgctggattttatactcctctttggcagacacttcgttgggagcgcgctcggcacacacacatcttttccttaaagactttatttggggcccacatcacaagatttctccctcccctcttatgaa

SEQ ID NO: 614255 - DNA, 422 bp, Homo sapiens
gcaagagaatctcttgaacccaggaggtggaggttgttgtaagtcaggatcacgccattgcactcaagcttgggcaataactgggaaactccatctcaaaaaaaaaaaagaatcccggtttgtccttaatgaaaaacactaacctgaccatctaagattcacagagatttccaggtatcctataaactcaaagggatccacccttaaacacattatagtcaaactgtgaatgacaaagagtgtcatgaaggcgccaataaggcaattcatcccatacaagggattccaactaaaattaactgctgacttcttaatcagaacctatgtaaaggccaggcacagtggctcaggcctataataaaaacactttgggagggagaggcaggaagaatgcttgaccccaggagttttagaccagcctg

SEQ ID NO: 614256 - DNA, 399 bp, Homo sapiens
  misc_feature (51)..(51): n is a, c, g, or t
aacctcaaggcccaaaaattcggcacgaaaagcatttggcaagcacatccngggtgccaggcccaagcaggctggtctcgaactcctgacctcgggtgatccgcccacctcggcctcccaaggtgccgggatgacagctgtgagccaccgcgccccgcccagaagcagaggtgttttaacgggaagacttcaggcttcatcggacggccgggaaggaatcagagcaggggtttcttccgagatggccagtggtcacctgagatggagcagagagcacctgtggcgggcatcttctctagaagccgcctgtgagccctacggaggccctgggcttcgtgccgtaagacagacggtgtcctgcaggcctcccatggagacaccatgtgtgattgtaccaaa

SEQ ID NO: 614257 - DNA, 879 bp, Homo sapiens
  misc_feature (571)..(572): n is a, c, g, or t
  misc_feature (651)..(651): n is a, c, g, or t
atccagcagcaagacgaaggggggcctgggctccccctagggcaggcgcctctgattctctccaccgagaggcacctcccatgccggcctcttcctggggtgactcccagaaccttcttggacccatgaacatttcaatctggggtggggccttccctgggcatccaagtggtgggaatctgtccctagcccctagaactcctggagggctgggcccacctctgtctgcatcccgtccccattccccgccccgggtggcaggggctggagaggaaggagcttcaggcttgaaaaccatcaaagcaggtttcttccgagatggccagtggtcacctgagatggagcagagagcacctgtggcgggcatcttctctagaagccgcctgtgagccctacggaggccctgggcttcgtgccgtaagacagacggtgtcctgcaggtacgtgggggaaccctgtaggcagggactttgcctgctttctcagaacaggacagaggagtttggctggggcagcccgaggtgaccggatgctgtcgccccagctctggtcttgctggtggaaggtaccnnggagggacagttacgggccaggctgacgtgggaagggagggaggagggaggtaggagggacagaggcctggctgctctncagggctgggctccgtggcatctcctggtggctgtcaggtcctgcctggccccacgctgaggccagtgtgatggaggggcctggaagcctcatccttcttgattgccacgcggtgagggccacaggcatgcgccaccgcactggactccccctttcatcatcaaagccaaattttcttcttgtttcatctaggcctcccatggagacaccatgtgtgattgtaccaaa

SEQ ID NO: 614258 - DNA, 731 bp, Homo sapiens
gcctcattgtgcccaggagttctccaaacctcgcgctgcggagatcttcctcgggaggcggcgaaaggcagtccacactgcgcgtgatcctttatgcccggacccgtgctccctccctccgtggtggcacttcctccctcgaacgccagacttaacgcgtgagagatcgtctggatctctggcggggtgcgagaactgagtcccaggccacagataccctattcacgctctgtgcgttgtgccaagtgcgggcaatggccggcttcctgtgttcatactgcatcactgggcagaagatgcctctgattaggtctgggtacctggaagagtgagcctggtcaggtaaacgcagctgtgaagtatgcccattagacgtaggctacgcgcacattgctcgtgctgctatctacgggcaatgagcctgagattggggaggccctgaaggaggacgtgggaccaggcaaggcggtgacttcgggaggagctgttagtgagatccaagctgtggaacacaagaatcaacctgaggatgtggagcctgcctcacggaagacatcgtggcttgaccgtccagacgtggaggtatcctgggacctgttaccctgagtgcagtgaccttaatgccctattgcagccggggcgacaaacaccttccccgcagacctgctgatgggactctatgctacagactccaaaccaattaacaagggacgacttggaaaagctcttga

SEQ ID NO: 614259 - DNA, 857 bp, Homo sapiens
  misc_feature (2)..(2): n is a, c, g, or t
  misc_feature (5)..(7): n is a, c, g, or t
  misc_feature (17)..(17): n is a, c, g, or t
  misc_feature (34)..(34): n is a, c, g, or t
  misc_feature (60)..(60): n is a, c, g, or t
  misc_feature (68)..(68): n is a, c, g, or t
  misc_feature (80)..(80): n is a, c, g, or t
  misc_feature (176)..(176): n is a, c, g, or t
  misc_feature (187)..(188): n is a, c, g, or t
  misc_feature (192)..(192): n is a, c, g, or t
  misc_feature (206)..(206): n is a, c, g, or t
  misc_feature (228)..(229): n is a, c, g, or t
  misc_feature (289)..(289): n is a, c, g, or t
  misc_feature (382)..(382): n is a, c, g, or t
  misc_feature (433)..(433): n is a, c, g, or t
  misc_feature (436)..(436): n is a, c, g, or t
  misc_feature (521)..(521): n is a, c, g, or t
  misc_feature (594)..(594): n is a, c, g, or t
  misc_feature (597)..(597): n is a, c, g, or t
  misc_feature (607)..(607): n is a, c, g, or t
  misc_feature (611)..(611): n is a, c, g, or t
  misc_feature (618)..(618): n is a, c, g, or t
  misc_feature (656)..(656): n is a, c, g, or t
  misc_feature (667)..(667): n is a, c, g, or t
  misc_feature (689)..(689): n is a, c, g, or t
  misc_feature (694)..(694): n is a, c, g, or t
  misc_feature (702)..(702): n is a, c, g, or t
  misc_feature (711)..(711): n is a, c, g, or t
  misc_feature (727)..(727): n is a, c, g, or t
  misc_feature (738)..(738): n is a, c, g, or t
  misc_feature (749)..(749): n is a, c, g, or t
  misc_feature (774)..(774): n is a, c, g, or t
  misc_feature (819)..(819): n is a, c, g, or t
tnctnnncttgtggccncgtatgccgacctccancagcagtcggcttctctacgcagcancccgggantaggagactcanaatcgaatctcttctccctccccttcttgttttcggctttgtagatgaaaccttacacatcaaacacgatgtgctctagcaacgttatccaacaanacagatcctcnntccntcgacactcccgtnatcacttcattggcgaatctcnncactcttgtggtcatcgaatgtcttactgtggatggcaactcttttctgaagtatggcanaacttgtgggctgctctgttcattaagggctttgccttcgttcatgtatgttaatgagagaaatgcccgcgcgctgctgtagcagcgagaggntggcagatatgatctgctggcgcaggcttttagatattaacctcggctgcnganccaacaagtgaaccgcaggacataagcaggtgctgaaacgagtctgcgagcggggtatgtacgcgctcctcttgttgactttggncctaatgacttttcaactgggactattcatctatagggatgtacacgttacccagcacagtgtacctcctccnccncctaattgcncggngctgtantgccctcgaaacgtcagcgtgtatcaggaaacacttcncgaaggggcanaaagtggcttcaattctaagantgganagcggggntcttccaantctggaaagttgaaangagatgacctncaggccattangaaggagctgacccagataaactanaagtggattctctcctggtaaacctggaaaaaattgaaaaggtanagagcatacaagcagtagagatgaagaatgataagtca

SEQ ID NO: 614260 - DNA, 792 bp, Homo sapiens
  misc_feature (25)..(25): n is a, c, g, or t
  misc_feature (64)..(64): n is a, c, g, or t
  misc_feature (92)..(92): n is a, c, g, or t
  misc_feature (124)..(124): n is a, c, g, or t
  misc_feature (143)..(143): n is a, c, g, or t
  misc_feature (484)..(485): n is a, c, g, or t
  misc_feature (564)..(564): n is a, c, g, or t
tggagggaacaacacagttgctatncctgactagggcatgacctggagcctttgggccacacancctccttgggaaaggaggatcaggtggncctcacacccaggaattggaagtgggagaganaacagctgctgggtagtgnggtagagctgtgtctctcactgccctgcccctccaaggaccaagaagaaaggaatgagccccgatccgcctgccaggtttcttccgagatggccagtggtcacctgagatggagcagagagcacctgtggcgggcatcttctctagaagccgcctgtgagccctacggaggccctgggcttcgtgccgtaagacagacggtgtcctgcaggtacgtgggggaaccctgtaggcagggactttgcctgctttctcagaacaggacagaggagtttggctggggcagcccgaggtgaccggatgctgtcgccccagctctggtcttgctggtggaaggtaccnnggagggacagttacgggccaggctgacgtgggaagggagggaggagggaggtaggagggacagaggcctggctgctctncagggctgggctccgtggcatctcctggtggctgtcaggtcctgcctggccccacgctgaggccagtgtgatggaggggcctggaagcctcatccttcttgattgccacgcggtgagggccacaggcatgcgccaccgcactggactccccctttcatcatcaaagccaaattttcttcttgtttcatctaggcctcccatggagacaccatgtgtgattgtaccaaa

SEQ ID NO: 614261 - DNA, 681 bp, Homo sapiens
  misc_feature (201)..(201): n is a, c, g, or t
gcaagttacccgtagagataacagcgcaatcctattctagagtccatatcaagcaatagggttgacgaactcggatgttggagtcaggagcagtcccgagtggtgacagtccgctattgataatggttcgtttgtaacaaacgataaagtcctacgtgatctgagtgcagacggagtatccagtcggtgactattatgcanatcctccctgtacgaaaggaaagaaaatgggctacttgtcacgtcgcacttccccgtggtgatatcattcaattagtatatactcacatccaccagaacaggtagtaagatggagagcaccggtatcgctaaacttatgacttgacaggcgaggtgcaattcctcttcttaacagatcatagccgtggacaactgctagtcctcattgtaccctattctagtcgcaatggcatgcctaatgcttaccgagggaaaaattcgtgaggctatatacgaaatacgcaggaggcccgcaacggtgtgatgcccctgagggctactactaaccgcttcgctgactgccagtaaaattcttcagcaagagagcctgcgtataaaccggcacatctagcatcaccctctaccatcacctggccggacgttagctctcagcatcgcttcttctacgtatgaaaccccctactcataccgaaagccctg

SEQ ID NO: 614262 - DNA, 802 bp, Homo sapiens
  misc_feature (51)..(51): n is a, c, g, or t
  misc_feature (494)..(495): n is a, c, g, or t
  misc_feature (574)..(574): n is a, c, g, or t
aacctcaaggcccaaaaattcggcacgaaaagcatttggcaagcacatccngggtgccaggcccaagcaggctggtctcgaactcctgacctcgggtgatccgcccacctcggcctcccaaggtgccgggatgacagctgtgagccaccgcgccccgcccagaagcagaggtgttttaacgggaagacttcaggcttcatcggacggccgggaaggaatcagagcaggggtttcttccgagatggccagtggtcacctgagatggagcagagagcacctgtggcgggcatcttctctagaagccgcctgtgagccctacggaggccctgggcttcgtgccgtaagacagacggtgtcctgcaggtacgtgggggaaccctgtaggcagggactttgcctgctttctcagaacaggacagaggagtttggctggggcagcccgaggtgaccggatgctgtcgccccagctctggtcttgctggtggaaggtaccnnggagggacagttacgggccaggctgacgtgggaagggagggaggagggaggtaggagggacagaggcctggctgctctncagggctgggctccgtggcatctcctggtggctgtcaggtcctgcctggccccacgctgaggccagtgtgatggaggggcctggaagcctcatccttcttgattgccacgcggtgagggccacaggcatgcgccaccgcactggactccccctttcatcatcaaagccaaattttcttcttgtttcatctaggcctcccatggagacaccatgtgtgattgtaccaaa

SEQ ID NO: 614263 - DNA, 225 bp, Homo sapiens
  misc_feature (3)..(3): n is a, c, g, or t
  misc_feature (31)..(31): n is a, c, g, or t
  misc_feature (47)..(47): n is a, c, g, or t
  misc_feature (51)..(53): n is a, c, g, or t
  misc_feature (74)..(74): n is a, c, g, or t
  misc_feature (143)..(143): n is a, c, g, or t
  misc_feature (191)..(191): n is a, c, g, or t
  misc_feature (198)..(198): n is a, c, g, or t
  misc_feature (216)..(216): n is a, c, g, or t
tgnggtgaccattatcatgacggtcatcggngcgattctcacctcgntggnnngtggcgcgagaatgggaacgnggcaccatggaggctctgctctctacggagattacccgcacggaactgctgctgtgtaagctgatcccntaattactttactagggatgctggcgatgtttgctgtgtatggctggngtcagtntttattctcggcgtgccntatcgcggg

SEQ ID NO: 614264 - DNA, 763 bp, Homo sapiens
tggggttgggaagggaaacttccctgattttggtctgatgtgaaaaagcctgggtattaacttttggaaattccaaaaaacgcttaatataaaatttggcttcctccccaggaaaaagcatcttttggtttttgtgtctaaattggttgtattttggtgcctcatatacaagaaatgttcttaaatgggatttaacagtcctggtaatggctggatggtttaaaaataatcaactaattttcatatttttaaaaaagacaaatcttcatattatcctggtgtcttcccggacgggtaatattgtggtggggattcacaggtgtaaaagtcagtaggatgggacacattaagttgatttaaactcctataaagaagcttaaaatccagtagtctttcccccctataaaagaaggggggacactctcattaaattcacaagggaatctcaagcggaccatttacggtatgtaacacacttttcgtgttaagtgctcccctttctttttcaagtgctcggtgggctggggaaacccatgagaatataccagtctcgaaatatacaggttctcttaaagccctctccttaggaacatcgaaactttggccccttttgaccagagttggtatgtgacactgtgtgctgctttgaaaaaattttcctagcgccaaataaccttttcaatcgctttccaaaaaaacaaaagaactaaaacatacagaacacgaaaaacgacgagacgaaacaacacactcaagaccccag

SEQ ID NO: 614265 - DNA, 145 bp, Homo sapiens
gaccttcttaagcgccggcgtccttttgtctaaacaaacaatctaaaaattattcttgtacctttagggttagtcgggaagttgttttaattttatgtctttcactttaattttcataagatgtaatttactgaaaataaatttt

SEQ ID NO: 614266 - DNA, 170 bp, Homo sapiens
ccccctttttaaaaaataacccccccatccaggatatggaatccagccccccagtgcacaggtcagggctcggaggaagcctctgtgcaaatgtgctttttttccaggggctgtaaaaagtttgtttttattatgtataaaatgttgaaaaataaaaaaaatggatttta

SEQ ID NO: 614267 - DNA, 355 bp, Homo sapiens
taccgctctcgtgagactggtcagctttcggaaaatctgcacttttttgattgaaaagtgcacaaaactttaggaattttctgctaatcagaaaaagttcaataagtttcacttatacttttatggtcaaaaaatcattaataatcattgggatatgtcgtgttggaaacttcttgttacaccatatgatgctttggacatcttatatcaggcagagtttcacactgctttttgttatattttcgtggtgaaggttacttttgtttcccatttgaggtggttgttatgaaaaaaattgcatgtctttccgcattagcttgcgtagtagcactgggcgcttctagcgcattcgcag

SEQ ID NO: 614268 - DNA, 697 bp, Homo sapiens
caattttttaatttttaaaaggttttaatttattctaacaagatatgtttttcatactgagttttagacttttaaccactttttactaagatttatatgtcagggactatcattactgttcatggtttatatctgagataaaagaacatttaacttgtaggaaaagaagaggcaaaacatttctgggcaagaggaaagcagctgcagtaccaaaatctaaacacttttggcatggcttttaaccagcaaatgaactaattatttatccaaaacaaatccattgaaaaatgccattttttgtttcatagacagagaataatggcatgctcatattagatattatatattatatccacatttatatgcggattaaatatggatattatcaatatggggatatttcgtatatcccaatatatacttggacaaatatatatatttttcccaaagctctttgtaatataaagccccaattaaatgggcccagaaaggtgaaaactaaatgtttcagactcttggaaatccgtccatgttcctttccctcttgaggaaaggtttcgtcgcttcaattagaccttgggaaacacagttatactggacacccacccagtgcgaaaaggggaatgctttttttttttatgttggggcaaaagacatatttagtttcttctccctcgggaaggctgggcgagaatcg

SEQ ID NO: 614269 - DNA, 366 bp, Homo sapiens
ttgtcgtgtatgtgtacaaaaaagcattccgtaagagttgcatatgcacatactatgtctccaataaggagaataaagtgttttgtcacaattgacagtgtactcatcagcatctcatgtttgcacaaagtctgtaactccattctcaactgttacatgctctcagaatgtacagtgtagaagagtagtgagcataggcaataatcaccaaggctcgcatttctcttctcgcgattttataatacgatgagcagcctcactttcgtgtgcatgcacagtatgcaccgcctctgtaataagccgagctaaagagaaaaagaaggagtatacaggttacccattacatgtgcaccaagtgcgtgtggg

SEQ ID NO: 614270 - DNA, 726 bp, Homo sapiens
gggtcatgctccagtcgctcgccactcacctcctgccatggcagtccagttcctaacaggcctcagaccagtaccggtctgtgggctgggggttgaggacccctgctctaggctggtactgctgatgcttaaaaagagagggtttgccagaaatcagatgggacaaaagggcaataggcgcgtgccacagagtgcccatataggggatgagcacgccgtggagccttcgagaggcatgccagagaagcctggagactgtcatttaccggagtctgctgcctgaggccaccctccaagtgtccccacagcgcaccacaagagcacaggagtgacctcctcactggcaggtattggggaaacgactgctgtctactctttcgggtaacacacgtgaaacaccaatagtttaagttgaggattctcagaacacttgaacatatgaacaaggccgaatacacagtactacgtaagttaagaacaccaaaatatgtccacggaagtatcgatgagaatgtccacgttcaacggtgctccaactgcggacttgctcacagcaagcgtcagaagccctaggttctcctcttgcacctattaacacgacacatctcagcgacatgcgctcgctgtggacgccaccgacttaagcctaggcagactaatgcgctccttcctaccaacgcaacgggcgttctctcagtgacactctatgcatccatgaccggcttg

SEQ ID NO: 614271 - DNA, 248 bp, Homo sapiens
ttcggcacggcacggttatcgaccattgtcctgcgcatcggcgccttcgagtttcccgacgatcatgtacctgcgcaacgcccgcgtcactgagtgcctggctcagcccacgcgtacgccgtgcagtatgttgcagtcaggccctcgcggtcaaaggcgtgcaacacctggtggcccacggtatttccaacaaccgcttcaagcgcctggacctgggggctcctctcacagtcgcacctgctcaggct

SEQ ID NO: 614272 - DNA, 169 bp, Homo sapiens
aattccctggaaaaaggggttttttttgggaaagggcggccttatttgtttcccccaaaggggggcccttccccttttttaaacccaaaggtccatttggttttcccttttcccgtttgggtggaaagggctttttttaaacccttaaatttttggtttccggtttcca

SEQ ID NO: 614273 - DNA, 1754 bp, Homo sapiens
aagacaagtttttgggctggatgtggtagcttacacctataatcccagcacttgggaggctgaggtgagagggtcacttgagcccaggagttctagacaagcctgggaaacatagcaagatctcatccttacaaaaaataataatggtgtgtgcctgcagtcctagctacttgggtggttgaggcaggaggatgtttgagcgagggaagttgaggctgcagtgaactatgattttaccactgcactccagcttgggcaacaaaatgagaccctgtctcaaaaaaaaaaaaaaaggtttcctagaaataagcgggatgatggttcaattggcacgatggaccgggaaacctagagggcttttaaaatactcggtcttcatttcacctgtcgacgggaataacggcatatcaccatgagttggtttggctttcatacagactggtatgtgtcattggaggggttcccaggagggagcgaggtaaccggatctaatgaccgcattttttccttacctcgtgcaccgggatcccactatggcaagccttagaatgcataactctgagaatggtttgccacacccctggattaaaaggctgtaattgacgttcagaatagattcgccgtaaacacgcggggacttcccgtagtagcgggacaagcgctacaatattttcaaaaatgcgcacgagaactcgtggtgtataaacgcgtcttacgcacactacggtggtatatagatactatatagttctgcaccataagcagcgggcgaaagcgcaggagggagagaaagaagggggggagggatgaggagaagggggcgcggcgggcggacggcaggcagcaaagcggaacacgaagcgtggacgaacaagaaaacgagacacacagaaccacgcccacgagccgacacagcgagacgcggagaacgcaggcaagagacagaaaggcacgcaggagcacgacagagcaacgaagcagccagcatccagcaccatgacgcacggagccgcgcaaccctcgcaacgccagccagccccgcgacctcgtccgcatgcgctcagtggcgaccagagcggcagccgagaggccagccgcgccgagcgccgccgcgacagcacgcgcgacgcggccgcacggccaccacagccacgagcggcggcacgtggacgcacccaggcgcccacgacagagctcgaagcaccgacagccgccggtggaggacgccacgacggcgcgcaccgccgcaccgcacgcagccgtcaacaccactacaccaacacacacaacaccaagaagcaagagcgccaggcacggggcacggggaaggactgcgcagccggacaagaactacgccacagccccgcccacacgcgccccgacactggcgctcggcaacgtcacaccgcgacaggcgagctgcgcagccggatcgacgcagggggaagtgggagggacgacaacgagtggacgaggatgagagcgagaggcgacacgagagcacgcggcacgcacagaaacggaagacagacagcacaggcagacgaagcagacgacacccgcgcccccaccacgccgcacgacgacagcccaccgcacaccgcggcagccacccacacgcacaccactcacgcgacacgacgcacagacgagcgcagacgcgagccgcaggcagggagacgacgagccggcagagaggcgccggctacagacggcgcgcaaccgacggacagcgcgagcgagcagagcacgaa

SEQ ID NO: 614274 - DNA, 139 bp, Homo sapiens
tgttttgggccccccccccggggggttggggtcggggtccaacccttttggcctgttttgattttgaaccttttgctttgacccccagtgaatttttttcctgggggcccaaataaaaggataattttttcccgcggga

SEQ ID NO: 614275 - DNA, 293 bp, Homo sapiens
ctaggttaccacacaccactttttgattgggaatgctcaaccatttgagaagagaaactcgtcttctgttttcgcacaggaacctgactcacgatagtcttcccttgtgcagagggagaaattagtgggtgaacaatccgacgctaggtgaagcccctgatacatccgcttattattcttggtactctacctgttactccatatgcgctgactgctgcttggccgccacaagccagttatccctgtggtaacttttctgacacctcctgcttaacacccactaggtcagtagg

SEQ ID NO: 614276 - DNA, 420 bp, Homo sapiens
  misc_feature (136)..(137): n is a, c, g, or t
  misc_feature (149)..(149): n is a, c, g, or t
tgtccccccgcggaagactggcggaaggcccgccaaggccaagtcgcgcccgtcgcgccggcctccagttcccagtggccgtgtacaccgcctgctgcggaagggccactacgccgagccgttggccgccgccagnntgtacctggggncagtgctggagtacctcaccgctgagatcctggagctggcgcgcaatgcgcccggagcaacaagaagacgcgaatcatcccccggcacctgcagctggccatccgcaacgacgaggagctcaacaagctgctgggcggcgtgacgatcgccagggatgcgtcctcgccaacatccaggccgtgctgctgccaagaagaccacccgcaccgtcgggccgaacgccttcgtgccggcaaagaagggccacccaggcctccccaggagtactaa

SEQ ID NO: 614277 - DNA, 92 bp, Homo sapiens
ggtgtactggtctggaagtgtttggatgggcgcgcgagcggtgccagctcggggctgcggaacccagagaagctgagggggcggtagcggcg

SEQ ID NO: 614278 - DNA, 291 bp, Homo sapiens
ggtcttttttccccctaagtttttttttttcccatcaaacccttcccggccccccttgttttttgttccccttttattaggaattcccaagtgaattttattaatgtgggagtggacccaatgctaaaagccatcccgggattttgtttctgtttgttttaaattttggggttccttccctttcccccccctcccatgggtaaaacgttttgggtaccccccattaaatttgggacaaaccccctccccaaagctggggggtcaaaaaaataaaatatattgttttttcca

SEQ ID NO: 614279 - DNA, 290 bp, Homo sapiens
  misc_feature (9)..(9): n is a, c, g, or t
  misc_feature (32)..(32): n is a, c, g, or t
  misc_feature (86)..(86): n is a, c, g, or t
  misc_feature (227)..(227): n is a, c, g, or t
  misc_feature (288)..(288): n is a, c, g, or t
caatctctncgacttcccgggaccacactggnagtaccacaattgtcttaggaccatagataaaatacactaacagtaacgatagnctgatgagactaaaaaaaaaaaaaaaaaaaaaaaaattctgaaaaaaatatcataacgttttaagtaaagtttatgaatttgtgttgggctgcattcaaagccatcctgggctgcacgtgggcctatgggcaccagttggnacaagcttgcccgaggactttaacctcacatcctatacaaaacccacctaaaattgaattnta

SEQ ID NO: 614280 - DNA, 178 bp, Homo sapiens
ccaagaatggaaacacaaaccagaaaggagcacaccccacagcagatggcagcgcagaggagagagggcaacggaggccgggggcttctctgccaaggagaagatggagaagcctgtgggccccactgccaccatctgccccagcctctcatatcccttctgcctgggtgcctgcctc

SEQ ID NO: 614281 - DNA, 1024 bp, Homo sapiens
ggtgtgcagtagcagcagtgggctagacactggactgtcaggtggcaatcatagctgttggcagtgagctgtggcagtgatgaatgggacagctttctagccccctaggtgatgcacttgggtgggcactggtgttaggtggtgcaggcctgttcaggccttgggattgtgtgcgtgggcaccagtgtgtgttggatggggttgggccgagtctgtcagggatgccttacagagcatatatggtcagcagtagtgtgccattagtggaaaagatagcgctggagaacagttgggtgacgatgtggggtggatgctatgtgacttgtctttagagtgcattggatggcaatatatggtcatacatggtcctcagggcaccctggaggtgcacacatggaatggtgtttgccatgtgagaggggcaagagttctgttggtgggtattgggagtaggcgtacagtacttgttcgcaagcctgtgggagacgtgtcacggtcaacgtttgaccatggtgatgaggatagccgaggttgtgggtataatggctgttccgtggggatataagacacttcatggggtcagagtacgtggggaactgggtgactggtgggtgatttgtgatactggaacttctggatggatgtgggaggatgttcttggggggtccggggaatgtggaatgcaggggttattggacccaggtgggcaggatatatctgtcgggggtaatgctacttaaatgggggcggggggacaggaggaagttcttggcgatgtgagaggatccagtggagtcgctttggaagagggattggatggaataaggagcgattatgacatagagggtacgcagagactgggggcacatggtggaatgtctattgaggttggttatggcaaagggtccttgtgagaaaaaaggggaattgatgacagcaaaagcagaacagtggagcaaggagaatagagcagagatgaagaagaaagtgcagagaaaatagtggagtataggaatagtagtgt

SEQ ID NO: 614282 - DNA, 330 bp, Homo sapiens
tcaaagataggaaacaaagttagtggtttataccataatattaggcatgaattcttactgcttacattttctgccagttcatctctaaagatgggtgactataagacagaggaagaaagtagtaaagaatcaatgtcatggagcaatcgaattgtgtagaagtcacttaagaggaaatacgtacaccatttccccaccacagctactttaatttagttgatgtgtttttgttttttttttcctacagggaatgcctctataacattactattttattttaagttctgggatgcatgtgcaggatatgtaggtttgctacatagtcgacgc

SEQ ID NO: 614283 - DNA, 957 bp, Homo sapiens
  misc_feature (24)..(24): n is a, c, g, or t
  misc_feature (209)..(209): n is a, c, g, or t
  misc_feature (228)..(228): n is a, c, g, or t
  misc_feature (237)..(237): n is a, c, g, or t
  misc_feature (249)..(249): n is a, c, g, or t
  misc_feature (262)..(262): n is a, c, g, or t
  misc_feature (290)..(290): n is a, c, g, or t
  misc_feature (299)..(299): n is a, c, g, or t
  misc_feature (379)..(379): n is a, c, g, or t
  misc_feature (424)..(424): n is a, c, g, or t
  misc_feature (436)..(436): n is a, c, g, or t
  misc_feature (445)..(445): n is a, c, g, or t
  misc_feature (455)..(455): n is a, c, g, or t
  misc_feature (488)..(488): n is a, c, g, or t
  misc_feature (557)..(557): n is a, c, g, or t
  misc_feature (563)..(563): n is a, c, g, or t
  misc_feature (571)..(571): n is a, c, g, or t
  misc_feature (576)..(576): n is a, c, g, or t
  misc_feature (578)..(578): n is a, c, g, or t
  misc_feature (582)..(582): n is a, c, g, or t
  misc_feature (597)..(598): n is a, c, g, or t
  misc_feature (604)..(604): n is a, c, g, or t
  misc_feature (606)..(606): n is a, c, g, or t
  misc_feature (622)..(622): n is a, c, g, or t
  misc_feature (687)..(687): n is a, c, g, or t
  misc_feature (739)..(739): n is a, c, g, or t
  misc_feature (904)..(904): n is a, c, g, or t
  misc_feature (906)..(906): n is a, c, g, or t
  misc_feature (926)..(926): n is a, c, g, or t
  misc_feature (936)..(936): n is a, c, g, or t
  misc_feature (939)..(939): n is a, c, g, or t
gcagaggcagccttggagagcccnaggccagccctggtgagatccgcctcccagtgacaccagcgaggagctgaattcccaagacagccccccaaaacaggactccacagcgccctcgtctacctcctcctccgaccccatcctagacttcaacatctccctggccatggccaaagagagggcccaccagaaacgcagcagcaaacggnccccgcagatggactggancaataattnctaacttttcantaacctctgagcnccctgctgccacccagttactgtcaggncctatccancattccaccccacctttttccttctccccaattactccccttaatcaatgtacaaatcagcacccatatccctttttttnacaaatgatttctctagagaactatgttcttccctaactttaggnaaagtgaatttnttcccgtcntcccgcattnagaaaggagactcttcctccctcctcctcactnagtgcctcatcctaccgtttttcccttttccacccttcctgggacatcgctggaacttgcaccattccnttattnttttactnaggcnanaggncaccctcccttcctnncccatntnataaatgggtccaggnctgatcaaagaactctgactgcagaactgccgctctcagtggacagggcatctgttatcctgagncgtgtggcagacacgtcttgttttcatttgatttttgttaagagtgcagtantgcagagtctagaggaatttttgtttccttgattaacatgattttcctggttgttacatccagggcatggcagtggcctcagccttaaacttttgttcctactcccaccctcagcgaactgggcagcacggggagggtttggctacccctgcccatccctgagcncngtaccaccattgtaaggaancccttcaganatncagctggttcctccaaaa

SEQ ID NO: 614284 - DNA, 402 bp, Homo sapiens
  misc_feature (290)..(290): n is a, c, g, or t
cacgaggggcgggcatcgagcgcgcgcgcctgtaccggctgcgcgatgaatcgctgggtgccggacttgatccagacgatcgtttcgttattcggcccgcgcacgaccgcctcgctcggcagtgcaatgcccttgacggtatcggtcagccgggccaggacggtgacaggctgcccgaccgccagcggcacggcggccccatcggcgagccggaacgtcagcggtacggcgccgttgcgtagactgcggcccgcgccgacgaactgcagcgccccgccgtcgacattggncaatgcgccgtcccggatccgggtggccaaggatgcgtcggcgctttgcgcctcgaccagcaaccgcgcggaatcgacgatctcgtaaagcacgtccgttccctcgacgaac

SEQ ID NO: 614285 - DNA, 115 bp, Homo sapiens
tgtagaatactcctcggaccgggccccgcgggtatctcccatcggcgcataccactgcgaacaacgcgggcggcgcgcggaggagggaagagaaaagaggagagtgttgcggccg

SEQ ID NO: 614286 - DNA, 101 bp, Homo sapiens
  misc_feature (96)..(96): n is a, c, g, or t
ggataaataaacagttattttataagctgcacaacctctacacacatattatggaggacagaagagcgcgtcttttttttgcgaagaagaggaagncacag

SEQ ID NO: 614287 - DNA, 242 bp, Homo sapiens
ccctgatctgcacccgctagtgggcgtctcatcccatagtccctggtcttcccacgccgctgtgggcgtctcagcccattgtccctgctcttcccacccgctgtgggggtcccagcccattgtacctgctctgcccacctgctagtggggatctgagcccattgtccctgctcttccgaaccgggcagtgggggtctcgagcccttagtccctgctcttcccaccgcggtagtgggggtctc

SEQ ID NO: 614288 - DNA, 184 bp, Homo sapiens
agtcccgtatacttgaggctgaggcaggataatcacttgaacccaggaggctgaggttgcagtgagctgagatcataccactgcattccagcctgggcgacaggatgagacaagtgagactccatctcaaaaaaataaaataaaggccatatgtttaatcacattccccaaaaggagaacttca

SEQ ID NO: 614289 - DNA, 112 bp, Homo sapiens
gacccactccaccttaccaccagacaaccttagccaaaccatttacccaattaaggtataggcgatagaacttgaaacctggcgcattagagtttagtaccgcaagggaaag

SEQ ID NO: 614290 - DNA, 175 bp, Homo sapiens
atgatctaatggcagggaaactaaataataaacacagcagcatccttctgattgtagaaatgcttattgactctctcaagggacgttggaggaacatctcaggtggttgtagttatcaaggcccactctgctttacttaaactacctaactcattctaaaacaagactatagcta

SEQ ID NO: 614291 - DNA, 339 bp, Homo sapiens
  misc_feature (72)..(72): n is a, c, g, or t
  misc_feature (206)..(206): n is a, c, g, or t
  misc_feature (222)..(222): n is a, c, g, or t
  misc_feature (225)..(225): n is a, c, g, or t
  misc_feature (235)..(235): n is a, c, g, or t
  misc_feature (280)..(280): n is a, c, g, or t
  misc_feature (292)..(292): n is a, c, g, or t
gctgagtgtgatgcctacctgacctctccatgttacctggagtgctcacaacgtggtagtttgtcccaaganacacaggcaaatactacaaagcttcttaggacctagccttggaggtcctagaatacgacttctgctgcatcctattggaaaagcaagtcattgtgaccagcacagattcaagaaatgggagattcgactctacntgtcaatgtaaacagnagnatgtgcatgnagggaggaaagaaattgagggcatcatcttgaagactatcatatnacaccattattncaactagtgaacattatgttttagatgggtagtactagctactcata

SEQ ID NO: 614292 - DNA, 460 bp, Homo sapiens
gctactcaggaggcagacaggaagataagagtcaaaaacgatcattggaagaggcttttcactggagataaagagtgagggaggggacgctggggaaagaagtaagtttgagggaagaatttgttttttttttttaatcagggtctcactctgtcgcccaggctggagtgcaaaggcaccgatctcggttcaccaaaacctccgcctcccgggttcaagtgattctcctgcctcagcctgccgagtagctggaattacaggtgcgcaccaccatgcctggctaattttggtattttaagtagagacgggatttcaccatgttggccaggctgttctcaaactcctaaccccaagtgatccacccgccttggcttcctgagtagctggggcctcctgagtagctggggcctcctgagtagctggggcctcctgagtagctggggcctcctgagtagctggg

SEQ ID NO: 614293 - DNA, 424 bp, Homo sapiens
ggctgaagttcctatgatgttgtttggattaaagagtgtgtgtgccgaggccttccccttcctttattttcttactccacttatccttcctcttcttcactttatcccaatcctctctcttattatttttctctacagtttttctctttcctctttccttcctaatcctacattccctcctcccctacatccccctccctttcttttcacctctccaaccttcaacttttttcatctaattttaaccacttgtttcatctcctttctttcttctcacactcccctacatcctttctttttccctaccttccctccctctccctacacccctctcatttccttttccctccttcattctcacccttcctccccctcaccccccctcttcatttctcctcttttctccttccttctcttccacttc

SEQ ID NO: 614294 - DNA, 289 bp, Homo sapiens
ccccccgccccccccccgataggaaccgggggccagtttttttttggtccggccttggggggtttccccaaccggggggttttggccccctttggaccccccgggcccggccgggttttttaaattttccttttttcccgggcagggggggaacttttttaaatttccccccgggggggtggggaattttgtctttttcccgggggttgccccggtagggtttttccccagggtttctggggtttccccattttttttttggtttaaatttttcgggttcttcccccca

SEQ ID NO: 614295 - DNA, 697 bp, Homo sapiens
  misc_feature (326)..(326): n is a, c, g, or t
  misc_feature (335)..(335): n is a, c, g, or t
  misc_feature (337)..(337): n is a, c, g, or t
caggaattcggctcgagagtatcattagacatctttgccaagagactgtagcagccagctgccccccgtggattaaggtttaaagacaaaattaaatggcacctctccttaagatctgcttgtgtaaacaagactcgtttggggaaaacgacccgggaggagagcatctgtgatcaaaatctctcattgtaagcacaaattgttccgtgtctggttattaaaatcgctttgggtctataacagccactcttgtccccccttttaatagaaaattgtcattctagcctggatttctccccactggaggtggagggtgggaagagaanggagtcagntntgacagcttacaaactgggaagttctgtgcatctccagggattccagagttgaagatctggttgttggaagctgggcgcccagtgcttctatgtttttatttttctaagcccagatccggcaggacccactgaacaagggtgaactcggctgtgggctcggctggccaaggctgattggaccgctaaggcacaaccccagatggaaggggcaatggggtcttaaccatgatgcaggagatccaattacaggagttttaacaggggctctattaaccgggaagagctacggtccctttgaacgcaatatttattattaacgcgctggggattgtaccttatactccccgttgaggcgctcc

SEQ ID NO: 614296 - DNA, 160 bp, Homo sapiens
cgctctccgatctctctatacaccatgctatacaccctataccctctttaccaccataccaccatatccactctataccaccataccacactccccaccttcaccattttacagtataagaaaagcactacctccatgagaatacgtgggtggtatagct

SEQ ID NO: 614297 - DNA, 184 bp, Homo sapiens
atgaggcgcccccgaggttcacagtaatcaagcagtcaggtgttgatgcaacttttcaaggtccagccaccgggagttgcctagtccgctcttggaaccttgtaaggcataactgctgggactcaacttggctgagaaatgcacaagatgccaaaggaggaaggattatagggggcctcatgtg

SEQ ID NO: 614298 - DNA, 352 bp, Homo sapiens
  misc_feature (174)..(174): n is a, c, g, or t
ggtcgaccacccatttcattctgggcttagtgaaagtgaccccgtggctgggcacagtggttcacgcctgtaatcctagcactttgggaggccaacgcgggtagatcacctgaggtcaggagttcaagaccagcctggccaacatggtgaaacccatcactactaaaaatacanaaaattaaccgggcgtggtgacgggtgcctataatcccagctactcgggaggctgaggcaggagaatcgcttgaacccaggaggcagaggttgcggtgagccaagatcacgccattgcactctagcctgggtgacaagaacaaaactccatatctaaaaaaaaaaaagaaagtcgacg

SEQ ID NO: 614299 - DNA, 661 bp, Homo sapiens
aggtgttctagaggatcccgggatgacgacatattcagacatggaggtacccacgtacagatgtccgtataatacagtatacaagaaccgtaaaggagtatcatcaagagatggagagaatttcggcaaacaggtcacatctgtgcttcagacacagggcaaatcctggaaattagatatgccagagtacttcagtagactgggcggcgagctgaaccaagcattacagaacacgagaaaaagttgtgttagcagtgcctgggcctgggcctcagagggaatgaaatccacagcggacctgcatcaaaaacttggcaaagcaattgaattggaagcaataaaaccgacttatcaagtcctaaatgtacaagagaagaagagaaaatcacttgacaatgaagttgaaaagacagcaaatcttgtcattagcaactggaatcagcaaattaaggccaagaagaaattaatggttagtaccaagaaacatgaagcacttttccagcttgtagaaagctccaagcaatctatgactgagaaggagaagcggaagctcctcaataaactgacaaaatcaactgaaaagttggaaaaggcagatgaaaattactaccaaaaaaaacatggcgggttattctaccagattgaaatggtcgccaatcgg

SEQ ID NO: 614300 - DNA, 1240 bp, Homo sapiens
  misc_feature (959)..(959): n is a, c, g, or t
ggttagactgccactaccgacatgctgtcgtggacacaggaccccatggatgccaacctatggataacggatactgactcataattgagacagtggtcggacgagaggagcatagtactattgcgggaacagaatctcactcacctaactgcgcacactcgtgtatctaataacactggcgagttggacattctgaccacctaagaaagcactatgtgccaaacatccagacgacacggagagcttgcttaaagtcatgagagaacatagggcgatcgtccgtgtcgacacttcatggccatgaaggtcctagtgggatttagaactgacagacatggtagcagctgctggaccggtggttcatccacgcaatggaagtaatcctccttatgcgtggtgccaacatgtaatgaacacaacgggcacgagtcatcccgtctatgcacagatgtgttgaattccataccacttcacgttctgacagtgacccaccacagtcagaaaccactactagcgaaaggaacaccctcgtaatacatccagactaaagaaaccacggtggaaagtgagcataggaaggcaatgccacattgcgtacaattgacgaacattcgacccattgatggggccgtcgggcatcggcagtagaaaattcatgtcctcatgagtccctatactcgatgagggcaatagccatagtggatgggctagtaccacaattaatatagaccaatagggtctgtggaggagtaggaatttcctgtacaccggtgagcacgcaccaaccattggaagatcgtcgccgcagagtcgaaccactctcttgtagcaagtttgcaacatcccggaattgtgcgcttgcacccaaatatatcacctcggtggctgtccaaattatactcacagagatccacacattattggagccgaagagttatagtggatggtcgcatcaaaancttgaacactggcaaataaggccacctatatggcatgctggcagttactgagactgtacaaaagcacaggaaggactcgccattgcggacacattattctcccacactgtgtggagacagaattcctcgagccccaacatattaaacacaacgccgtgccacggggataccaggcgagtgccacttaacatgagactcgcggcaaaccaacatgctggcatagtcataccggtgtcacattagcctaccagcgtcaacaaacagcaaccaccgccgacatt

SEQ ID NO: 614301 - DNA, 1000 bp, Homo sapiens
gagggcgctcttggttttgttgggtgagctctgtttgtgtccctgatggcgatgatcgtgattggtgatcggccatgcgtaatcctggtattctgcctcatacagagtctacaacttgcatgatcttcgttgcaaaacccttacaccaggaaatgatcaattctatattcttgtacttggagcccagtagattatcatcgaaataggtgtaatggtcaagatgccagagataaggaagggcatacccgcctgaacagaagaggctcatctttgttcgacagcctatggaacatgcgtctgcactcatttcatgactataatatacagaaagagtcagacctatgctcatggtccttttgtatgagacgtgctactgtaggactctgtcagattgatgcaacctgccatggggccagaacattacatcatgggaactatggttgacccaatgagcttttatctggataatgtagtaacggtctatagactgccacgtgcacttacttgatagagcttccttcccgggacatgtagaggctcctattggtgggtcaacagttgttgcatggggcgactctctttctgactgaccgatatgcgagataagaggtgccatcctgtccttgctttctgccccttggagaaggtggataggacttatctctcttgatgtaacttttacctgggtgaaggcattcatttattaaggagggtggcaatcctggcgaacgacatacgagaactgttgaatcggtacatttgcatgattttgaaaggaggcccatccgactccgtagtgagcgcatttgcatgcaagaacccctgaagattgacgggggcgtcgtcttctaatgcgcaggggtgcccctcccttgtgtcctgccagcaagtcgcgtcagacaccagggcgttagcccctcgcggggaactctctcacccaacgtgtgagtaaacacctcttacgcaaaaatggggtgtgtgccacacaaaattgggggcg

SEQ ID NO: 614302 - DNA, 438 bp, Homo sapiens
  misc_feature (5)..(5): n is a, c, g, or t
cattntgttaatcttttgatttgctttcttctggtgtttttgttatgtatattattacttgttactttttttatactagtctcatagctttttcagtattgccctatagactttataagcttcatttttaaatattatataacatttcaagatgtgtctattttgctgttactgaatacttaatttgcttataattttaaaattgttatggttaggatccacacagataagatcatggaattcctgtatttcaagttatttctttagaaaaaaaattgctgaaggatgcccactgctagcaatattaacattttatgtcttttattatcagttgtcaaatttctttctaaatggttgtagaaatgtatgtcattcattttaatattattaaaatattagcaaagtattacataaatattaaaaatattaataaaaatc

SEQ ID NO: 614303 - DNA, 124 bp, Homo sapiens
ctgctctgaggatccctcagatagcggaccccctctgctgaagcctattaggagtcaccgcgtattgcgctgcccgggttccttggaggcctcagaaccctgagctgagggggtccgcacaagg

SEQ ID NO: 614304 - DNA, 794 bp, Homo sapiens
tgagtgttcaaaactagctttagtataggctccatagatgggggtgtattagtccgttctcatgctgctcatgctaagtaatttataaaggaaagaggattaattaactcacagttctacatagctggagagacctcaggaaacttacaatcatgtcaaaaggggaaccaaacacattcttctttatgtggcatcaagagagagaaatgctgagcaaagggggaaaagccccttataaaaccatcagatctcatgagaacttagtcactgtcatgaaaatagcatgagggaaactgccctcatgattcgattacctcctactgggtccctcccacgacacatggggattatgggaactacagtacaagctgagattggatggggagttcatgtaaagagtgtgtaatctgcatatattaggtatgaagtgacacataattttggtaaaaggtgggtgggaaaattatattcatttaggagcctatttggaaagatatttaaaaaacaacacttttggaaaagaggttaatggatggtaggacactgtcgtcaatcagttcatctaggaccattacctgtcatttaaagtgctgaattgagactgtgattaaaaaagcacaacacaacacacaaaaacaaaacaacacacaaaaatcttgtggccgcgcgcaccaaaaattataacaatagtgggggcgggcccaggacggacggccaagtccagaaccggccgacggggggtccccaaaaagcgggcacgggttcaaccgggtgggccggtcacaggacggcta

SEQ ID NO: 614305 - DNA, 351 bp, Homo sapiens
tgggtgaggtacaggctcgaagcacagtcaggccacccgcgctgctcggtccccgctcaggtgcaggaggtaatacctaggtgggctggagtcaggcgtggagcggtagctgtgcgtggtgcgagcgcgccgggagcccgtgcgttggcgagcccgggagactatcggagtatgacagggagcggttcagcgacgacggatatgcggatagtatgcatcaggttcgactgcttcgtgatcttcgcggaagagggagctgtgctgcttgctgcgggacagggagggggccaagcgtccttgacctggacgccagagctcagggctcctcccatttcacggcctcacaacggt

SEQ ID NO: 614306 - DNA, 144 bp, Homo sapiens
gttccccggcagtgcgagagaatcgagacacattaactcagatttgcaaaccaggtttctgaaactttgggtaaggtgtatgcttttaacttttgataatgtataatcacccagctgtaaacgtatacctttcacgtgcatagc

SEQ ID NO: 614307 - DNA, 205 bp, Homo sapiens
gctattggagcacggccgttgtctcggcccggtcgccgaggcctgatcttcggttaaccgcttgggttctaggtgagcctttccataatcgaatgctccgttttcagtacatggcatattcggcacaattccctgggccttcactcttttaagtttgcacataggacatgtacaatgtacactaagccaggtatccatgctagat

SEQ ID NO: 614308 - DNA, 557 bp, Homo sapiens
ggtcagagaatggcgctgagaggcgagcggtgagcccagctgacatggagagtgagctcaccacgcgcagcgccatgatcagcaatggtcccgaggaggagcacccatcgtgtgacgctcttccgcacagtacctgcgtatccgcactgtccagcccaagccatgactatgtgaagtctgctgatggctttgctttgagtgagacagaccctgccatgactgggacctgggctgtcatgacaagtacgaggatggtcaccttggcttatgtgtgtgacctgtgttagacccttggccatggctatcgcatagcccgtacatctcctcgctcctatcgttgtcatcaatgtcgccaacagcaggattgtgtgtgccgtgttctttcatatggacacgattggaggtctagctgaccccttttagaggtccttcaagggagttcctgaggggcgtacgagtctattgccacggggatgccccaggacgatgaacgatggcgtcaggcgatccaagtacactggtaagcatgtgaaggagtggctgacaggttggaaggg

SEQ ID NO: 614309 - DNA, 806 bp, Homo sapiens
  misc_feature (408)..(408): n is a, c, g, or t
agcggcttctccgcccgctcccccctccccccgagcgccggtccggctgcaccgcgctcgctccgagtttcaggctcgtgctgagctagcgccgtcgtctgtctcccttcaggtcgccatcatgattagtctaccgggaacctcatcagccacgcatgcagatgttctccgcacatctacaacgatccggtgagatcgcggccgggattgtgcctggaggtggcaggggaagactggtcagtacggcacacgaacggtgaacattgatttactcgtcgtcagttgggtggaagatgcctgcccgctgagaggctcccgagggctgaacggtacctgacatggcacgacgtacatcagctcgagtgatcgatacttgtcagtgagaccatcagcctgcacggaaacaangtttcatcaaaacgagagcctatcaagaagttacagtcgctaggattaccagtgaaagtcagatcataagggaactcttgaacgaacaggacgaccaggaagatgacgtgaagaccttttatgagcagggggcttgcagaaccagtgttcacagcatcatccttgcttaattttcaagaatagcttaccacgtgctctgtactgtgcgtgagaaactattgacatccgagatggacatgagttggctctattgggacgtacctgtgagcgagtggtgtgacccccatatactgattgtctttaaggactggttaagagatggaaccatgttaatcaaatgtggcaatcactttaggatctatcacctgtcatcataactgggcttctgcttgtcatcc

SEQ ID NO: 614310 - DNA, 377 bp, Homo sapiens
gatccccctgctatccacgcatgtcaaggattgttcatgtgtgggctgtgctacggacattgcatgactaaggaagccactacggagctgttcctccaaagacgtaacacatgcaggataataacaaaggacaggatggtcatgccagtggatgaaagcattaacgaagcggatcaattcccctgtctactgttgctttcttaaagttctctccctcctgtggaatgctcagatgacttcaaaactttggaatcctggagaatccctttgttcacttgaagtgagttttcaagctctgtaaaataaaattcggtcttcggatacttacttctggctggggatgtgtatggaaaatacaagcagattgaaagttctcc

SEQ ID NO: 614311 - DNA, 183 bp, Homo sapiens
ggtgctgggtaccaaaagtgctggggagggctcagcacactggatcttgcagtcaggtgggagaagccgaatgtgagacagtgggatgcgtcctgtgtccccatcatcaaactctactgtgatgagatcgccatcttcctccagatccagggttcctcggacaactgtccctggggtcgacgc

SEQ ID NO: 614312 - DNA, 360 bp, Homo sapiens
  misc_feature (1)..(1): n is a, c, g, or t
ngccaaatcagcatggcattggtaaaaaacaaaacaaacaaaccaacaaaacaacccagacacaaagaccaatggaacagaacccagaacccaggtgtaaatccacacatttacggccaacccatttttaacaaaggcaccaagaacatccaatgggcaaaggacagtctcttcaataaatggtgctgggaaaaccggataaccatacgcagaagaatgaaactggacctctatctctcactatatacaaaaaaatcaaatcaagatggattacagacttaagtctaagacctgaaattatgaaactactagaataaacattggaaaccaggtgtggtggctcatacctgtaattccagc

SEQ ID NO: 614313 - DNA, 198 bp, Homo sapiens
agagacgtagaaactccagacccaatcaattaatattacagcactgattatgacattgatccaaatgctggaccatttgctttgatcttcctttatctccagtgactattaagagaaatggaccatcactcggcttaatggtgattttgctcagcttaatttaaagataaaatttcttgaagaacactcgggtaccga

SEQ ID NO: 614314 - DNA, 113 bp, Homo sapiens
acgcgtgggcttgcatggacactactgctgaccatatgcccaatcaatgaagtgaagaaaaagcttgatgatgcatttccataagcttccaagccttctctcgtgtgatgatg

SEQ ID NO: 614315 - DNA, 815 bp, Homo sapiens
tttctgcggactgggtagaagaagggtgggtgtgggatggggagggcgcagagtggattttgccctgtggcagaccctggcagaaggggcacggggcagtgatgtgagttccccactagcagtgccagtgtgagctatgtgtgctgcacctactgctcttcttgctgctgaccccacagggtgggcacagctgccagtgtgctggatgctggccctgggaacttgttctggccaatggtgagggccctgttcttggatgccttgtgggcccccctgtgtgtgaccagtggaagtgtggggaccactgtgagtcatggctgtgctgccccgaagacatgccctgtggtggtgcttcacacacaggggctctgacccgaggaagaggaggatgtctcccaagccatccttttaccagccaacagatgccagctgtgaggacaagtcatgctgccagagggctggcccatgtgaaggctatgagagaagggagcctctttcaagattacaattgtacacagagccatccacaggacattacaacagcaagaacatgacacagtgttgactctcatagcaccaaagctagtgaggtatccaaaaaagcctgggagctttgtggaacaaagagccacatcgagagcaacacaagtaaatggccaatcacaaaattaacgcatccattgaagaaccacaatggcttaaaggacctttggctagtgcaacatatggtacagcacgagtgaaagaaccaccatgatagtaattgtagtcgccaaaagtgtacatattgagtgacacaatacgtatccccccaa

SEQ ID NO: 614316 - DNA, 928 bp, Homo sapiens
  misc_feature (74)..(74): n is a, c, g, or t
  misc_feature (88)..(88): n is a, c, g, or t
  misc_feature (113)..(113): n is a, c, g, or t
  misc_feature (116)..(116): n is a, c, g, or t
  misc_feature (118)..(118): n is a, c, g, or t
  misc_feature (123)..(123): n is a, c, g, or t
  misc_feature (132)..(132): n is a, c, g, or t
  misc_feature (135)..(135): n is a, c, g, or t
  misc_feature (139)..(139): n is a, c, g, or t
  misc_feature (152)..(152): n is a, c, g, or t
  misc_feature (162)..(162): n is a, c, g, or t
  misc_feature (172)..(172): n is a, c, g, or t
  misc_feature (177)..(177): n is a, c, g, or t
  misc_feature (185)..(186): n is a, c, g, or t
  misc_feature (211)..(211): n is a, c, g, or t
  misc_feature (216)..(216): n is a, c, g, or t
  misc_feature (230)..(230): n is a, c, g, or t
  misc_feature (237)..(237): n is a, c, g, or t
  misc_feature (240)..(240): n is a, c, g, or t
  misc_feature (287)..(287): n is a, c, g, or t
  misc_feature (296)..(296): n is a, c, g, or t
  misc_feature (309)..(309): n is a, c, g, or t
  misc_feature (319)..(319): n is a, c, g, or t
  misc_feature (321)..(321): n is a, c, g, or t
  misc_feature (353)..(354): n is a, c, g, or t
  misc_feature (362)..(362): n is a, c, g, or t
  misc_feature (365)..(365): n is a, c, g, or t
  misc_feature (368)..(368): n is a, c, g, or t
  misc_feature (372)..(372): n is a, c, g, or t
  misc_feature (378)..(378): n is a, c, g, or t
  misc_feature (407)..(408): n is a, c, g, or t
  misc_feature (423)..(423): n is a, c, g, or t
  misc_feature (427)..(427): n is a, c, g, or t
  misc_feature (443)..(443): n is a, c, g, or t
  misc_feature (496)..(497): n is a, c, g, or t
  misc_feature (501)..(501): n is a, c, g, or t
  misc_feature (537)..(537): n is a, c, g, or t
  misc_feature (542)..(542): n is a, c, g, or t
  misc_feature (545)..(545): n is a, c, g, or t
  misc_feature (554)..(554): n is a, c, g, or t
  misc_feature (566)..(566): n is a, c, g, or t
  misc_feature (584)..(584): n is a, c, g, or t
  misc_feature (767)..(767): n is a, c, g, or t
  misc_feature (810)..(810): n is a, c, g, or t
  misc_feature (821)..(821): n is a, c, g, or t
  misc_feature (920)..(920): n is a, c, g, or t
gggtgatcgtgcaccggcagctggacggccgcgtgctgctgaacacgacggtggcgcccctgttctttgcggancagttccttcagcngtccacctcgctgccctcgcagtanatnanaggcntcgccgagnacntcantcccctgatgctnagcaccagcnggaccagganaaccntgtggaanngggaccttgcgcccacgcccggtgngaacntctacgggtctaancctttcnacntggcgctggaggacggcgggtcggctcacggggtgttcctgctaaanagcaatgcnatggatgtggtcntgcagcagancnctgcccttagatggaggtcgaaaggtgggatnntggatgtntanatnttcntgggcncagagcccaagagcgtggtgcagcagtanntggacgttgtggganaaangttcatgccgccatantggggcctgggcttccacctgtgccgctggggctactcctccaacgctatcanncgcnaggtggtggagaacatgaacagggaacacttccccntggangtnaaatggaangaaatggaatanatggactcccggaggacnttcacgttcaacaaggatggcttccgggacttcccggccatggtgcaggagctgcaccagggcggccggcgctacatgatgatcgtggatcctgccatcagcagctcgggccctgccgggagctacaggccctatgacgagggtctgcggaggggggttttcatcaccaacgagaccggccanccgctgattgggaaggtatggcccgggtccactgccttccccnacttcaccaancccacagccctggcctggtgggaggacatggtggctgagttccatgaccaggtgcccttcgacggcatgtggattgacatgaacgagccttccaacttnatcagggg

SEQ ID NO: 614317 - DNA, 468 bp, Homo sapiens
ccagcgcatttcgcagggcggccatttgcgccacgcccctgacgaaatccttgaatgcagccttccactggtgtagctgcaaggcttcggccgagcgcttgaacaaggtgtagctgcgccataccaccagcgggtaggcgagtttgccggccatgaactgcaccgccgtcggtatgtccttgccgaacagacgcgttgcgtgatcccacagggtcttggcgccttcttcgaattggctgcccagcaccttgagcaacatcaatgtgttttcactgaacaggtaatgcagcacattgcccgtcactgccgaagcggccaggcggatatcgggcgggctatgctggttgtttttcagcaagtggcggtaagtggcctgatgcggatcttccaggtgcataagcacccagtcctgcagggcgcctggcccttgtatctcatccagtaagcccgtttcatccgcgtattcct

SEQ ID NO: 614318 - DNA, 767 bp, Homo sapiens
  misc_feature (13)..(14): n is a, c, g, or t
  misc_feature (129)..(129): n is a, c, g, or t
  misc_feature (144)..(144): n is a, c, g, or t
  misc_feature (165)..(165): n is a, c, g, or t
  misc_feature (189)..(189): n is a, c, g, or t
  misc_feature (193)..(193): n is a, c, g, or t
  misc_feature (197)..(197): n is a, c, g, or t
  misc_feature (277)..(277): n is a, c, g, or t
  misc_feature (284)..(284): n is a, c, g, or t
  misc_feature (327)..(327): n is a, c, g, or t
  misc_feature (356)..(356): n is a, c, g, or t
  misc_feature (364)..(364): n is a, c, g, or t
  misc_feature (373)..(373): n is a, c, g, or t
  misc_feature (379)..(379): n is a, c, g, or t
  misc_feature (407)..(407): n is a, c, g, or t
  misc_feature (463)..(463): n is a, c, g, or t
  misc_feature (476)..(476): n is a, c, g, or t
  misc_feature (506)..(506): n is a, c, g, or t
  misc_feature (509)..(509): n is a, c, g, or t
  misc_feature (533)..(533): n is a, c, g, or t
  misc_feature (594)..(594): n is a, c, g, or t
  misc_feature (664)..(664): n is a, c, g, or t
  misc_feature (681)..(681): n is a, c, g, or t
  misc_feature (693)..(693): n is a, c, g, or t
  misc_feature (703)..(704): n is a, c, g, or t
  misc_feature (754)..(754): n is a, c, g, or t
tctttgctcacanntaatttttattttgattttttttaatgctgcacaacacaatatttatttcatttgtttcttttatttcattttatttgtttgctgctgctgttttatttatttttactgaaagtnagagggaacttgtgnggccttttttcctttttctgnaggccgccttaagctttctaaatntggnacanctaagcaagcggaagggaaaagggggtttcgcaaaaacactcgggggaagggaaagggtgctttgttaatcatgccctanggggggngattaactgcttgtacaattacgtttcacttttaattaattgngcttaaggctttaattaaatttggggggncccttctnagagcagcncgtacngacgaaggggcatgcgctgaatgatgtnacggcagtggttgaacacacggcggatgttctcagtgtccacagcgcaggtgaaangagggtagcagtngtgacgcccatctccactggcagtgctganccncagaaactcatctcgaatgaagtncttggcccgggtcacgcgtgggtcctctccgggctcgggagttgcatcctcaggagttgtntagcgagcaaattctggaaagtagttctcaatcttcgatttcccagcaaggactttctcagcgagcagancttgcttgttgaggaanaggatcacaganatggtgcgcnncattctgttgttccagaagctcttgaagaggttcagagcctcctgcaggnggttggtctggtt

SEQ ID NO: 614319 - DNA, 230 bp, Homo sapiens
  misc_feature (20)..(20): n is a, c, g, or t
  misc_feature (106)..(106): n is a, c, g, or t
gaaaagatgggaagggccangcgcgatggctcatgcctgtaatcctagcattttgggaagctgaggcgggcaggttattgagcccaggagtttgagaccagcctgngcaacacggcaagaccgtctacaaaaacatacaaaaatttacttggtgtggtggtgcgcatttgtagtcccagctactcaggaggctgaggtgggaagtcagggttttgggggaaattccctac

SEQ ID NO: 614320 - DNA, 107 bp, Homo sapiens
gtgatctgaggaaagtacgagacctttctgagtctcagtcaccctctatagtaagtgacaggaatgaagtggagcgtatttcctgaggttgtagaggggaataaagg

SEQ ID NO: 614321 - DNA, 459 bp, Homo sapiens
  misc_feature (27)..(27): n is a, c, g, or t
  misc_feature (376)..(376): n is a, c, g, or t
  misc_feature (387)..(387): n is a, c, g, or t
  misc_feature (443)..(443): n is a, c, g, or t
ctctaaactgaaaaggcccttgtggtnggcgcacagtagctcaagtttgtaattccaccactttgggaggctgaggagggtggatcacttgaggtcaggagttcgagaccagcctgaccaacatggtgaaaacccgtctctactaaaaatacaaaaattagctgggcacggtggtgggcgcctgtaatcccagctactagggaggctgaggcaggagaatcgcttgaactcgggaggcggaggttgcagtgagcctcctgagtactccagcctggggtgacagagtgagaccctgtctccaaaacaaaacaaaacagaacagaaggcccttgttgaaggttcagattgagagagtcttgttaaatccctttaggcntgttaagttanttattggttttaccctaagtttttccaagcattattttagtttttttttgtctttnaaaattttatttttaa

SEQ ID NO: 614322 - DNA, 145 bp, Homo sapiens
ggggacttatgacagtggatccgtcgggatcgccatcgtagggaaaggcaggcaagtggttcagcgagagtccggggggacgttgagaagttcctggttgggggcagatggtatacccatcatgcgctggcaccaccggaccacg

SEQ ID NO: 614323 - DNA, 525 bp, Homo sapiens
  misc_feature (10)..(10): n is a, c, g, or t
  misc_feature (39)..(39): n is a, c, g, or t
  misc_feature (72)..(72): n is a, c, g, or t
  misc_feature (74)..(74): n is a, c, g, or t
  misc_feature (104)..(104): n is a, c, g, or t
  misc_feature (108)..(108): n is a, c, g, or t
  misc_feature (140)..(140): n is a, c, g, or t
  misc_feature (156)..(156): n is a, c, g, or t
  misc_feature (217)..(217): n is a, c, g, or t
  misc_feature (225)..(225): n is a, c, g, or t
  misc_feature (391)..(391): n is a, c, g, or t
ctccaattancccaaaagttcttgggggcaggtccaggntgccacccctatggccacagggccctttgaggnanggttaattttgttgccggtcttacgttgtncttnctcatacctggcaggccagattgaaccacaancccgctggaagccaancggggaaggcacatcctagaagggcagtgacctctggaatgctacaggcacgtgtggatgnatgaggcnccatggcggccaaggagatatctgctcctgagtaaggtcacctgaccacagacagcaccaggggctggggggctaagaaggagatcttgagaaggatggacctgagctaaagatgtaacttagatggtgatctgaaaaaaggaaaaaagaataaacgctggaactnaaatccactgtttagggtacaggagtacacagctaagttccaggtatccagaatcttgtgtccaaatcatagcacaaggagaacaggaattctcttgagttaaggcaaaatcaatcttcactcgtgccgaattc

SEQ ID NO: 614324 - DNA, 621 bp, Homo sapiens
actaaaaaaaaaaaaaaaaagcttcttatctgggcatggtggtgcacgcctgtagtcccagctacttgggaggctgaggcaggagaatcgctggagcccaggagtttgaggctgcggtgtgtcatgattgcaccactgcactccagcctgggtgacagagtgagaccctgtctcttaaaatttaaagcagccgggcatggtggctcgcgcctgttgtcccaacatgttgggaggccgaggggggcggatcacgaggtcaggagatggagaccatgctggccaacatgaaaccccgtctctactaaagatacaaagatcagttgggcgtggtggcacacgcctataatcctagctactcgggaggttgaggcaggataattgcttgaactggggaggtggaggttgcagtgagccgagatcacaccactgcccttcagccttggaacagagtgagactccattttcaaagaaaaaaaaataaggctgggcatggtgggtacatccataatcccagcattttgagagcccgagacgggcagatcacttgaggtcaagaagttgaaggcaggctgacccatgtggacccctgcctttactagtccatgcgggaggatccctgct

SEQ ID NO: 614325 - DNA, 220 bp, Homo sapiens
tctctagcaggatcccgcatatggctttgacagacaccatgccatcgcgggccagcccgctcccacacaagcgttattcgtgatcagctacgcctttgagatacggcgctggcgccgcgcccacgttgtcgagcttccgctcgctgtaccaatccacaatattcaccacgccaaactcatacgtctcggagatacgtcctggctggatatgccacagtac

SEQ ID NO: 614326 - DNA, 708 bp, Homo sapiens
  misc_feature (13)..(13): n is a, c, g, or t
  misc_feature (82)..(82): n is a, c, g, or t
  misc_feature (86)..(86): n is a, c, g, or t
  misc_feature (91)..(94): n is a, c, g, or t
  misc_feature (108)..(108): n is a, c, g, or t
  misc_feature (113)..(113): n is a, c, g, or t
  misc_feature (124)..(124): n is a, c, g, or t
  misc_feature (147)..(147): n is a, c, g, or t
  misc_feature (210)..(210): n is a, c, g, or t
  misc_feature (215)..(215): n is a, c, g, or t
  misc_feature (218)..(218): n is a, c, g, or t
  misc_feature (233)..(233): n is a, c, g, or t
  misc_feature (237)..(237): n is a, c, g, or t
  misc_feature (299)..(299): n is a, c, g, or t
  misc_feature (310)..(310): n is a, c, g, or t
  misc_feature (322)..(322): n is a, c, g, or t
  misc_feature (330)..(330): n is a, c, g, or t
  misc_feature (338)..(338): n is a, c, g, or t
  misc_feature (355)..(355): n is a, c, g, or t
  misc_feature (360)..(360): n is a, c, g, or t
  misc_feature (369)..(369): n is a, c, g, or t
  misc_feature (374)..(374): n is a, c, g, or t
  misc_feature (395)..(395): n is a, c, g, or t
  misc_feature (415)..(415): n is a, c, g, or t
  misc_feature (418)..(418): n is a, c, g, or t
  misc_feature (425)..(425): n is a, c, g, or t
  misc_feature (427)..(427): n is a, c, g, or t
  misc_feature (432)..(432): n is a, c, g, or t
  misc_feature (448)..(448): n is a, c, g, or t
  misc_feature (498)..(499): n is a, c, g, or t
  misc_feature (561)..(561): n is a, c, g, or t
  misc_feature (563)..(563): n is a, c, g, or t
  misc_feature (571)..(571): n is a, c, g, or t
  misc_feature (576)..(576): n is a, c, g, or t
  misc_feature (583)..(583): n is a, c, g, or t
  misc_feature (601)..(601): n is a, c, g, or t
  misc_feature (607)..(607): n is a, c, g, or t
  misc_feature (627)..(627): n is a, c, g, or t
  misc_feature (631)..(631): n is a, c, g, or t
  misc_feature (639)..(639): n is a, c, g, or t
  misc_feature (642)..(643): n is a, c, g, or t
  misc_feature (646)..(647): n is a, c, g, or t
  misc_feature (704)..(704): n is a, c, g, or t
ctttatgaatttnctcatggagatagcatttacatcacagagctgttgtgaaaataaaataagaatgtacagcacacctggnatanaaaannnntcccaataacttanttggngcgccgcggcnatccatccctcacatataaatanaatggaccagatgaagatccgtgtccgtgtccatgacagcaatccattcagaagatcaaaganaaatngtntagtacaccaatttntganatttgcttagcactgcagggctcatgaggggctgccactcatattatctcatttaatccctncaacagaaacntaggctctgggnggtgagtncttgcagnaagaacagtaacaagantccantggtttgcnaaaantgccatatgtgagagggctgngggggcctttgatagtgggntgngggagcncngctgnagctgcagctatgagngtgttctagcagcacgactgtggcctggaggggacattcttcctccgggnnagggaagggagctctcatggtgactgggcccctcctgggcaatggcaatgccactggagaanangctggaanccatntgctacngggatgtcttttatttgnatattnatatttcttcacagaaaatnaagnaagtggcnatnntgnnctggattaatccatttggacttggtcccattggtgtccgtggcagcttctgctttgnctgt

SEQ ID NO: 614327 - DNA, 372 bp, Homo sapiens
gtgatctaccatcgctaacgtagcccactgtacttcccacagggtagtttgttttccacttccgcactgaatattattattattcgattctaaaatggatgccactcatatatatcgtagaagtgcatgagataaagtccctgtgctcaacagctgccatgaagtacttctagactttactgcacacatggcaacacatatatgcacactggtacacagacctatatatatgtaaatcttttaccctaactagaatattatacagatggacctatgcgacatcacttattttctccttaagaacacccttatgggatatctttccatgctcaggacaatctatataagagtactaccttccttttggggcgt

SEQ ID NO: 614328 - DNA, 501 bp, Homo sapiens
  misc_feature (12)..(12): n is a, c, g, or t
aaaagttgctancccagcgtcccattctctttcctccgtactaacagaaccccgtgcctctgccccagttccaatagcgggcagacgagagccatgtcctgggctcccttgcagcccggggtgtgcagctgtggcgtggaggtgggtggtgctgggagagacttgcagggaagctcctgtgaaggggactcagctgccacatgcaggacccttcccctttgccttcttcctgcctggaacatggatgtgatggctggtgctgggacagctgtcctgagagcgtgaggaaagggtcacaccctaaggacagtggagcagaacacaggaaggaccctgggcctttgctgacgcagaacgcgggaaggacgctgggcctttgctgacgcagaacgcgggaaggaccctgggcctttgctgacataccagccccagactacttaaattcagctttttttttaatgtgagaaaataaatgcacccctctctggtttaagaaaaaaa

SEQ ID NO: 614329 - DNA, 112 bp, Homo sapiens
ggcccgaattgaaactttatcactaaataattccatcgctttttttctactgttgttggtttaaaatctgttacatacgatacaaaaagagtatcccttgttcttctttttg

SEQ ID NO: 614330 - DNA, 493 bp, Homo sapiens
tctgtgatcatgggagcggggcggaggtcctcatcgtcctctccatgctgctcctgcgccgggaagaagccctacggggctatcagccatggcgtggtggaggtggaccccatgctgaccctggaggagcagcagctccgcgaactgcagcggacggtatgagaaccccatttaccgcttcctggaggaacgaccctgacccggatcgtttaccccttcagcgagaccagacctcccctctttctggaggcgcagaagcccgaatccctagtcgtaggggagcagggatgtcttgaagtgatcatttctagcaccacttttgtgagacggttggaaatacttatatcccctcctttccaattcgcaaatatttccgatctctctaaagaattgccctaggatagtcgacagggaagcttccgccatgtgggaacctcctcaccgttaagtttcagtgccaagaggttatatttgatggctcgtctagggggga

SEQ ID NO: 614331 - DNA, 115 bp, Homo sapiens
  misc_feature (10)..(10): n is a, c, g, or t
  misc_feature (69)..(69): n is a, c, g, or t
  misc_feature (84)..(84): n is a, c, g, or t
ctcaaagcanaggtgttggacatttgatcactgagtagatctctaggtatagggcccaagtatctgcanttttcacaggttctngtaggtgactttctgcaacctaaagtatgag

SEQ ID NO: 614332 - DNA, 269 bp, Homo sapiens
gtgctgctcgaattcctgagcgcttctttcctggaaaatccgacatatggttccagtctcatcagattttccatgtcctcggtggtggcagcagctttggtccacttctatggagtctccaaccttcaggaattccgttcacggcctagaaggcggctgtactgatgacaccattctctgagccttcccacctccggggtggagcgaggagctaccaagtgcttttaaaaataactactctactgagtgagagaagatctgagttgtct

SEQ ID NO: 614333 - DNA, 659 bp, Homo sapiens
  misc_feature (3)..(3): n is a, c, g, or t
tgngttgatacccgcgaatgcggccattatggccgggtgcgaggacacatgcctgatatgggagcagtcagggaggcgaaggggggcagggcacttgagatgaggagcccgagacccaccaggacaacaaagcgaaacccgaacgctacgaaaaagacacaaaactagccaggcatggaggcacacacctggaggccgaggtactcaggaggctgaggcaggataacgacttgaacctgggaggcacaggctgcagtgagccgaaaccatgccactgcactccaggctgggagacagagagatctgagactccatctcagaaagaaatagcaagaactcgccaagctagaaaagtaaacggactccacattaactaaataccgaaagcgaagattaccaaaacagggaagatagcgacaatctcacagcacgcaactacagaacacggagtcgtcaggacgccgccaagaaggcccctcgaggacggcccctagccaacgaccaccacaacaaacgacaactaaaacggagcgcaaaccaagcctgggccaacgggcggcactccggccgccaaacagcacggacgcaagctagggcgcggaggaccaggcccacaagcgccagccgcgcaaccaggccggacgcgccacgcgcggccc

SEQ ID NO: 614334 - DNA, 288 bp, Homo sapiens
ctcctcctagacggcaaactagtgagaagatttataggtgaggcgacacacctaccgcatcctggtgatagcttggttgttcaatgatagatctcttagttcaacttttcatttgcccacagaaccctctaaagtccccttgtatatttaactgattagtccatagtaggaacagctctcttggacactagtgcaaaaaccttgtagagagagataacacatttgacaccctttgtaggcctactagcagccaccaattaagaaagcgttcaagctcaacacccacta

SEQ ID NO: 614335 - DNA, 197 bp, Homo sapiens
ttcttagcccatcttcatcatattccgctataatatctaagtattatcacagacctttcggatttcattattcttatcagcattaggtctatgagatatgcggagccgtgtttcctgattatgacgtctcttgtggctcggtggaaaaccatctggtagaagacataaattatctgacacacaaattcatcatcttc

SEQ ID NO: 614336 - DNA, 766 bp, Homo sapiens
gatgcattttcccaatgttttcgccgtgctgaaactttccctcaggcccagcctcatgtagactctcagttgtttcgatgctatctctgcacaggtctaaaccttaccgcctacttatcaatatctctcctcgggacctggcgcctcgaagtattgcacgcgttgttggagaccctattccgtctggcatgggtatcctgctcagaatcatcggcctttgggctgcccctgctcaatcgactgcaagtaatcggcgcgtctatgtgagaggcatgcagtcctacagcctcgtaccgctcttgcgggctgcctaaagccccggacgcttatctgtttaacatcggggcgcccacgagtttcacctatgcacctgactgccgcatcaagggcccccagcccagccgcccgccaccctcatggacgctgcgattttccgtcgtcttcacctcgcggtcgtagttggagaccgtcaatgcaggctggagatgcagccctccagcgccgctcgctggtcctgaggccgtgatatgaggccccacggcagccacgtggactgctggctgcactcgtcgctgccggttcaggaggccatcctctagcagatctctatggagcgaccagaccctgctggccacttgacccttcagggacaaccagcctgaagctacaccttttctcccttccaagtgctgtccctgttgctccgtggttcagcctaccgccacactgagtacctgcggctggggtttcgtctgtcgaaggctca

SEQ ID NO: 614337 - DNA, 153 bp, Homo sapiens
atgtctgagatgagcagtcttgagaacagactcccaactcatgtacagaaaacttactttcaagtcttcctgacatcaaattttccatgggccagaaccagtgtaggtgacaagaaaatagccttgaaaacccagaccctcatgtcatacatg

SEQ ID NO: 614338 - DNA, 115 bp, Homo sapiens
ccgcacatagaatcatgctgatgagagacagtgtccaagcccaggagaccaccatgagttccagaaaaagtgagagcagagcggccacttttcctgtctcggagatacctcctac

SEQ ID NO: 614339 - DNA, 331 bp, Homo sapiens
aactagagtgttagttaaacaacatatcttgagactcaacaccaaataaatgcagatcatctcattatttgtatatagtatatagatatattgatttacccaatacataattacagttaatttcatctattttgattaatcttttttaaatgtggctactgtgaacatttaaattatgtgtacagcttacaatatatttctactgaacagtacagtttgttagtatagttttgtttgagatggagtctagctctattgttcaggctggagtgtaatggtgtgatcttggctcactgcagtctccgctacccgggttcaagtgattctcctg

SEQ ID NO: 614340 - DNA, 1135 bp, Homo sapiens
aagctcactgcgacgctgcggtcgtggcgtcgcggaggggcaggaggtgtacacgtgaactttgggtcgtagaagtggtggtcctgtaggacatgattcgtggctgaatgtactgagctgggttgagactatgcttcaaggaggatatgataagacgtgcaggagagtggaacggtatctgtgatttgtgtatacctaacattcactagtactcgagtacgctctccattgcggggttcactcttacttgggaaatcataaatccacagcgaggcgcatggtcgccatagacggaaggcattcgggagtaaagcaaagatttgactggctgcgcggccctcgtgggggcctccaaccccctggtatccacccttggtgggcccccccaacaattttggccaattaccgtccatgagattcatcacaagtcgccttcgggtgaacccccctgtggtggcccgcgttccaatttttcacggggccgccaaggacccccaatgccattggtttgcacggcccatgtgcacccaggttggagacgtttcacagggtacccatggcaagttctgggaccccccaagaaagtgaacaggcgaacacattgcggccatccaacggcgcgtttttcaacgggccgacaggggtgggagaccacccagaaccgcaatagggaggggcgattggtataggccacctagaacaaggtttggccaccaatccacccattgggactcggggacggaccaaagattccagaggacgtaagcagagggtctttaacagtgtggccttaaccaggttggggggacactcctaaattgcaaccacaagaagggccccgggagtgacagtataccgcaggggcataaagccagggcaaccctttacaccatgggggaacctttggggctttgggcaaagccaaggcacacaatttagcccccccgagggaggccaaaggtaggccaccaacggcacttaggcggggggcacccacgtaggcgttaggatagcactagtgatagccccttgtgggcacccaggaagacacccactgaagtatccatattccagaagaaccagtcggccagttggattaacccaatgggcaggcacatcaccatatcattaccaa

SEQ ID NO: 614341 - DNA, 126 bp, Homo sapiens
cagaagcagaaaattaaaaggagccgtgctgtaacacaaaaaaattgtctgtccactaaacaattattcaatgtgagaagggagaaaaatcctctgtttccacttgtctccactaactttccccca

SEQ ID NO: 614342 - DNA, 219 bp, Homo sapiens
  misc_feature (29)..(29): n is a, c, g, or t
  misc_feature (145)..(145): n is a, c, g, or t
gagacaggatcttactctgttacccaggnaggcatgcagtggcacaatcatggctcactgcagccctgacctccggtgctcctttcatctcagtcttgtgccacacccaactaattttttgtagaggtgggattttgccatgttncccaggctggtctccaactcctggggctcaagcagtctccctaccatgggactaccaaagtgggtgggatgcac

SEQ ID NO: 614343 - DNA, 1275 bp, Homo sapiens
gtcgcgtgcggcttaggtgttgtgttgtggtggtggtcgcgctattgtgtggtgtcccgtcgtgtgtgcggtgcgtgtagtgttgggagtgtgtggaggttgtgtggtcgtgtgtggtggtgcgtgtggtgggtagtggtgtgtgtcggtgtgtccgtctctgtgttgggagttgggtgacgttagatgttgttttgtgtgtgtggctgtttcccagagggacagtggtgtgcgtttacagtgtagtttgtgtgtggttgtttgtgtggatggtgccctttgtgtgttgtgactcctgctttgttgtgtgtggtgtcgtgtggtggtggtttttgttgtttgctcgtcttcttttttatgtcctgtcgtgtgttgttgggtctcttgttgttgtgtcctgtgttgctttttttttgtgtgtttgatttgtgtgccgcatgtgttgctgtgggggtattgtgttgcgtgtttggtgtggtgggttggttgttcttgtgtattaggtgtcctacttggtgggtggcctctgtggtttgtggtctgtgtattggtgtttgtaggtgtggttgtgtgtgggtcgctgtgtattgtcgtttcttgggggggtggtgcctgtgtaggtgcgcccggtgtgttttgggatggtggtccgcggtgaggtggtagggttgtttgtggtgtataggtgggtgtcgttttggggttatgtgcctcttgcgggttggcgggggtcttccgctggtgtagtttgttcgttttcgtcgtttgttggtttttcgtcatgttgtgggagttgggctgggctaggctcttgttgtggtggcttgggccatgtggtcatgttgctttattcatcgtgtgggatgctgttttgatggtgtttgtgagtgcgcactggtgtggtggttgttatgcatgtctgtttgtatctcgtcgagaggagctaggtgggtatcctgcgtctggagcggaagtgtggtgtgtgagtcgcgccgtgtctgttgtgctgccagtgatgagtgatgaagagagctgtgtgagtatttgctcaagccctctgtccacggttgtggacagcgttctcacacgcgagtaagtagcacgctgacacacgtttctgtcgcctggttccttttatggggaaagaggcagtagaaagttcgtgggaacatatacagtgttagcccttttctatgccatttattttgtaaaatatcgctattgtacagttattttattataccatatttttagaaactaaatgaaatataaaat

SEQ ID NO: 614344 - DNA, 1644 bp, Homo sapiens
  misc_feature (102)..(102): n is a, c, g, or t
  misc_feature (117)..(117): n is a, c, g, or t
gggggaggcgcccagcgagccagagtgtggctggtcccgcgcgaaaattctgagctgtacacctctaggaaatgaaacactagttcagaagaagctgtaaantctcttacaaataanttggttattcaccatgaggttagcaaagcctaaagcgggtatttctcggagctcaagccaaggaaaggcctatgcagcacaccacagcgccacacacaccaggcccggccagctggccagcaagttggggccatgcactcattctgcattctgcactccaagcttcaagtcagcactccagcacagcaagcttgcgcatgcacaacacccctcataacacatgtccctagccacatgtcgcacacagcaggtttcccaggtccagcaggttccaaaatactctatatacaacaacacaacacagcacagcatcccatcacctgcgcacccaggccaaatcgcaccatcacccatcgtcgcctgagttgtaggggcaaacacaggtgacgccatatactccagcagactatcataaaattcatcaaatttcccagccgatcagcacggcattcgcgcattaccgcgcggccgccaaaaaagcgcctaacacacatggtagcatcggcagataagtagggcaagcacaacaagccttctcacaaaaaccagaccagcattcgagaaaaatacgatcagaatataccaacgcgtagccacaggaagcgaaatgacacaatcaactgggcgacaggcaactaagacacgcacacttcaataagcaagatgggtaggcaatagccacgctaggtagggagaccagcggatggtatcacaccaacagcgcacaatggcaaggcattccagcgcaacacagtatcaattaaccacaaacactacccacaggacaggcgaacgagccaccgacaagcacacatgaggagaggccagacaaagacaccgccgtatacgccgaaggagtgagcacagcggccaaacactgtggatggggggcccaccagacatgggatcgcagccacagagcatccaacaggcagagaccgcaccgtcacacagccatgggaccaggggaaccagcggccagcccttgacacgacggctcgacgagttcaacccggacccagcgagcgcacagaacacacaggaagaacaccaccacccggggcgcgagggcacccaaccacagatgacctaaccaggcgggcgggacaaagacatcaaagcaaacatagtaaacacaccaatacgttgggaggccaaacaagcgccgctcgcgtaccacggagacaccgcgggaacacgcaacaaggcatgaggacagggagaccaccaggacacaagcgaatataagagggaggcaccagcagcacgcacagcatacacgcacaacccacttcgagaagagagacaacagatacaaaaagcggtacacacccagatgaccagaggggcaacctcggacgaactaagaaacacaaaccaacgagaagttctatagtacactacacaagacaagccgacacgagacgaccaggcagaccaccagcaacagacgacagacgaaacaagacgccggtgcacaacataccggagcagacgagcaacggagaaaagcaacaaaaagaagag

SEQ ID NO: 614345 - DNA, 455 bp, Homo sapiens
agagcaaacattcttggaagaagcaaaaatataaagagtcttacagaaaaacagaaggtataaaaaagagaacaaattggaaattttagaactgaaaaatacaataacagaaattttaaaaatccattgatggactcaatagcaaaagagatgatagaggagttgatttgaagatagaacaatagaaattatgctttataaacaacagagaataaaataagagcctcagagaactgtggagcaaggttaaaaggtttactatttatgccagagtcccaaatggacagaagaaaaatgccccatagacttcttttttcatttgatgaaatcataggtaaaaacatccaattttggtgaaagacataaacatacaaattcaagaaatggagcaaaccttaaacaggacaaaataaggaaatccactcccagatacatcataatcaaactttaaatct

SEQ ID NO: 614346 - DNA, 853 bp, Homo sapiens
  misc_feature (102)..(102): n is a, c, g, or t
  misc_feature (117)..(117): n is a, c, g, or t
  misc_feature (375)..(375): n is a, c, g, or t
gggggaggcgcccagcgagccagagtgtggctggtcccgcgcgaaaattctgagctgtacacctctaggaaatgaaacactagttcagaagaagctgtaaantctcttacaaataanttggttattcaccatgaggttagcaaagcctaaagcgggtatttctcggagctcaagccaaggaaaggcctatgagaacaagcgcaaaacaggcggcagcggcaagaaagtggggcatgactattcgattgtgactcaaagcttcagtaagactcaagaagaaagtgtggatgaacaaaccctattaatgtactggaatgtggacaaagagtttcagtcagagttcaactcttttttcaaaccagaagatccatatgnaaagaaatcccataaaatgtgctgatgtgtgggaaaagtttctttcagagttctaatctcattcagcatcgaggatccatacgggggaaaagccctacaaatgtgatgagtgtggagaaagtttcaaaagagtcaaatctcattcagcaccagagaattccatactggggaaaaatcccaatcagtgtgatgcagtggggccgggttcagccagagtcccatctttttgcagcattcgaagacccccactgggcggaaaccctaacagtggcgctgaatgtggcaacatgtttcaccagaggacccaactgggggagacatgaaggcgggtcaaaaaaagaccgtaaacacggggacaatcaggggggactcaccctcggaaaggacaggcaaagcacggtcggcgcacataaagtagacagcggactctctcagaaaaaacaaaaaatagctgggggacacaaaattgggcggaaaa

SEQ ID NO: 614347 - DNA, 193 bp, Homo sapiens
  misc_feature (94)..(94): n is a, c, g, or t
  misc_feature (190)..(190): n is a, c, g, or t
cagagctgggccgtgacactggccgctttgatcgccaggcagccagcgaggcctgcttctacaactccgactacgtggcagcccgtgggcctgngcggcactccaggaacaagaagaggagctgctggagagcctggatgtgtacgagctgttcctccacttctccagtctgcatgtgctgcgggcggtngag

SEQ ID NO: 614348 - DNA, 688 bp, Homo sapiens
cttgaaattggaaattaggccaggcgtggtgactcatgcctgtgatcctagcactttgggaggcggaggcgggtggatcacctgaggtcaggagttccagaccagcctggccggcatggtgaaaccctatctttactaaaaatacaaaaattagctgggcatgttggcgcacgcctgtggtcccagctactcgggaagctgaggcaggagaatcatttgaacccaggaggcgggggttgcagtgagccgagatcgcaccactgcactccagcctgggcgacagagtgagactccgtctcaaaaaaaaaaaaaaaaaaaaaaatggaatgaattttttaaattaaaattttacaggattggggtttatattcttttatatttaaaagcaaaatttacttttgtcatatgagactatgttgcagctctaaaccaccttatgctaaatttatcacttatttagctgaactcttttttgttttaacgctctaatatacatgaaagattgggaaaatgttttcttttctttaacgctgggaaactatccggagagttttgagcaatttaatccacgccattaaaatatgacagtggggacctttaaaatggaggaagggcgcatatcaagactatatttaaaacccacattttcctggggaaatagaggctgaggatttctggaacgaggcag

SEQ ID NO: 614349 - DNA, 209 bp, Homo sapiens
cctggaaccagtgaccaaaagtgtgggtgtggaaggttttcaaaaggaatttagctgaaggatggcttatatggactacatttttcttatctctccttataagaatttttgattagatcatttccagcatcctttttgctctaaaatttcatggttttgtgtattacatgtcatccccgactctgctttaaatagaaaagtcagaatta

SEQ ID NO: 614350 - DNA, 151 bp, Homo sapiens
cagaacattaatgagctatcactgtctttatcggttgagtgcggattagatgaactccattagcagagtattgcgttgcacactgcgattacagctaaataacccgaatatgagtgacatgtttgcatttctgacaagtgaaacaggatct

SEQ ID NO: 614351 - DNA, 88 bp, Homo sapiens
cccaggacactcccaggttgggttttttttataggtttggcggggggccacagggaggggaccctgccaataaaaagattggatccca

SEQ ID NO: 614352 - DNA, 220 bp, Homo sapiens
tctacaagggacatggtactaacgggcggacccaggcctccctgcagactccgaagggggccagcactgggaggggcccacccacatgaattttccaatggaccagcccttgagcacccgggcctgggagacagcagagtcccacggatcgccctcaagacacatggaaacccaaggggctctgggttccctggtgcccttctctcccggcttcctccaa

SEQ ID NO: 614353 - DNA, 164 bp, Homo sapiens
agacctgtctcaaaaaaatttttaatttaaatttaaaaaagtaggacagaacagcatagtgtgtgtgtgtatgtgtgtgtgtatgtgttgggggctggggcccaggacgaggggttgtggattacaggaagcctcttttttaaatttaaattaaaaatcttttt

SEQ ID NO: 614354 - DNA, 751 bp, Homo sapiens
cgtcgggctgggtggacggcactagagggagtggagctgagctgatcagtgagataagccagcaagggcggtcgggtcccgaggtcagcctgagatttctcaggtccctccgtgccccctccctggagtccacagtcgcctccggtgtccagaggatcggacacgggtccggcccggacatgagctcgtatgctgagaggtggagtcagtgaatgtgaagtctcagaggttggattctatatcgagggagcggactcacaatgtgaggcagagagaccttgcgtggcacacatttaatgtcccaacagaagtatattacgaactctgatagtctttctcgaagtgaaccagatccttaaagcagtccagtgaccctaagctcgagatccactactgagcatgaagtcgtccgcaggtcccgtgaaccgccattcgttctcgaccgaatacgcccatgagtgcgacttggcatggctcccagcgttatagagacagctgaacggtctggcatgaggtgtgagagaatgcgcttccaagggaacccaaggttgttatgtagactgccgcaagtgggactgctcgaaaatgcagaccagcagcttggttggaccattcattgagcacaagtgacaacgctgacgatcccggctgcttgattcgagacaattgtaacacgtgtcaacaatgttgggtacaggctccttgaattcccagggatagaacgatgtgaaacacacctttgggggtgtac

SEQ ID NO: 614355 - DNA, 157 bp, Homo sapiens
ccaccttgattagccacctacccaggccacttcgaagagcactgcgttctacaggtcgaatacatcctcccagtcctccagtcctggcagtgaggacatggacaaagtgcggtttaaaggcatgaccgacgcaagaaggggaggcaccgggagaatc

SEQ ID NO: 614356 - DNA, 791 bp, Homo sapiens
  misc_feature (267)..(267): n is a, c, g, or t
gtgtaaaaccatgcgtcgggtggacccagtctacatccacttggctgagcgattatggggaccccaaagctaaagtcaacatcctgatgcggaaggagttggatgaacaagttgagaggatgctgggatggaacttcctaagttcccattgtacccatcagaggtagccggtgccagctttgcatggacttgcgacgatgacacctcagggccggacagtgcgagtgagcaagggctggttgatctcagctggaatcatcacgtggntattgcgcacaaacaccatccccgctcaccctctcgttgctactgtggaccggtcgtgtaggccggtcgtacctggctgcggaggtaacctggatcgaaagaatcacatcaatccgccaactgccaatcccgtgatgcatgcaactgaattgtgcccaagactgtcgaagacctattggtctacgagcagccctagaggtgtagatagggacaggtggcgtaacgggacaccacgcttggagaaagggttctgaatgctatggagggactgagtcaaacagagcgatcctcgcgccgcgtacgtttgcgtcttagggaaggaaaaagcaaggcttagcacaggcatgggacccggattgggtcgctatgcgatctactgcgatccaattatggaggggaaagaacgactgcgatatctcggcggtgtacccgagaagggacttcattgtttccccacgacacgtctacacattcccgctggggttagtggacatcgtgtcgcacggtcctcgcaaggtagaacc

SEQ ID NO: 614357 - DNA, 469 bp, Homo sapiens
  misc_feature (51)..(51): n is a, c, g, or t
  misc_feature (123)..(123): n is a, c, g, or t
  misc_feature (129)..(129): n is a, c, g, or t
  misc_feature (152)..(152): n is a, c, g, or t
  misc_feature (156)..(156): n is a, c, g, or t
  misc_feature (167)..(167): n is a, c, g, or t
  misc_feature (209)..(209): n is a, c, g, or t
  misc_feature (216)..(216): n is a, c, g, or t
  misc_feature (226)..(226): n is a, c, g, or t
  misc_feature (234)..(234): n is a, c, g, or t
  misc_feature (258)..(258): n is a, c, g, or t
  misc_feature (319)..(319): n is a, c, g, or t
  misc_feature (335)..(335): n is a, c, g, or t
  misc_feature (384)..(384): n is a, c, g, or t
  misc_feature (429)..(429): n is a, c, g, or t
  misc_feature (452)..(452): n is a, c, g, or t
  misc_feature (455)..(455): n is a, c, g, or t
  misc_feature (458)..(458): n is a, c, g, or t
ccaccaaacctccccagggcaacccttgccaccccccaaataggccgtagnccaatcccctgccctttgcacagggccttagctgtagaccaaaaagggcaggaggggtttgctggcataacnccccanaaccaagggaaatggatgggccnctgntcagttttccnccatcctcaggttctggcctcatcccctcctagaatgagtcncccgtanatcagggttnggggaaanggctgatccctggcgctgcccggntccctcgctgccctttggagctcagggcagcccggaatagggcttttttaaaaggaagtanaagccccagggtaatnaggcaaagacccctcctggcagtggttaggtgggggcatgccccctccnttttgtaccgtgtgtgctggctccatagtttttttttttggacanataagcatgcttgttttgaaatnaanaanatttgaagtga

SEQ ID NO: 614358 - DNA, 167 bp, Homo sapiens
gtcgatctcttacaggatccccgcgttcctggacttgggtggccgtgacctcacggatctacctcatgaagatcctcacagagagaggctattcctttgtgaccactgccttaaagagaaattgtgcgagacatcgaggagaagctgtgcggccggtggtaccagag

SEQ ID NO: 614359 - DNA, 160 bp, Homo sapiens
  misc_feature (139)..(139): n is a, c, g, or t
caggtctgggggctgagttgcattcaaagactcaaggagtgaatcgtacacatcaatcatggggttggcttggccgccaccctgctggaacactaccctgggccttctaacctcatggagagcctgacaggcctgcacnagactgagcaagcagggggat

SEQ ID NO: 614360 - DNA, 141 bp, Homo sapiens
acttgctggtgtcccataggtgtctgaggcttgttcatttttattcatcactattgttatatctcttttattagttctggaagctgaaagtacaacaggaaggtgttggcagggttggttccttctgacagctgtaaggca

SEQ ID NO: 614361 - DNA, 266 bp, Homo sapiens
aacttcgaggatccccgacgagttgtccgagttagggtgctactgcctatcagattgacttgtagatctgggcctaatggccctcgaaacagtgacaggtagtgccagcttgtaagtgaaaatgtgatccattctttcctaaactctactttgttgaacgcccagcgaatggtgggggctgacgtggactgaaatgaggtacccctcaaggaattcactatcactgcgatcttggtctcagtcatagtgaatctatgctacaaaga

SEQ ID NO: 614362 - DNA, 112 bp, Homo sapiens
gcctgaccagcatcagatttacactgcatggtcattaccattgagtccccaaacactagagaaagacattatttctttctatataaacttaattacgcagagattatcaacg

SEQ ID NO: 614363 - DNA, 131 bp, Homo sapiens
acagaggaggacagaggagtacacaatgctgtggtacactggctcacagaggagggggggggaatgtatcataagcggggagggggcttcgcggaggtgaccggttgagtaggggtcctcctctgtgctgt

SEQ ID NO: 614364 - DNA, 727 bp, Homo sapiens
gtgcagcgggggggcccggggtgccctggtggccctggtgattgggaaccgcggtggcgtccgcggagtgtttcggcagtggcatccggggccgtgggtcgctggcctgtggacggggccggggccgaggccgcggagctcgcgtgagtgcaaggccgaggataagtgagtggatgcccgtcaccaagttggtgcctgcttggtcaaggacatgaatgatcaagtccctggaggagatctatcttcttctcgcctgcccattaaggaatcagagatcattgatttcattcctgggggcctctctcacaggatagaggtatttggagagattaatagcgcagtgcaggaagcagaccctgtgccggtccagtctgcatccatgtgttcaaggcattttgtttgctaatctgtgaggtacttacaataggcacacgtcggtactaggagtgttaaaagtgctccaatggaggtggccacctgcataccgtggtggccatcatcctggccaagctctccatcgtccccgtgcgcagaggctacttggttgtgaacaagatcggcaagccccacactgtcccttgcaaggtgacaggccgatgcggctctgtgctggtacgcctcatccctgcacccaggtgcacttggaatcgtctctgactgtgcttagacgctgccatgatggctggtatcgatgattgtaacctcagccgggttgaatgccacctgg

SEQ ID NO: 614365 - DNA, 724 bp, Homo sapiens
  misc_feature (194)..(194): n is a, c, g, or t
  misc_feature (724)..(724): n is a, c, g, or t
ggcgacttgcccagaccctacaaaaaattggaaattttcaaaaaaaaaaaaaaaaagggaaaaggagggaaaagaaaaaaggaatttggcccttctgcccaaagaatttgaaaagagtggtctttcaatgtgaaattccaggctttgaaccttagttccctttcaagaattgagttaagaacttctccacaagncttaaacttattgttgtcaacaggaagagggttggaacacgaaggacacagtctcaagcaagcaattcttattctcgagaaaaagggggagatatataccagggggaacacacaatatgtcagagacacacacacacacacacacactttgtgtgtcgcccccagtttgtgcgacacaaaatatattatgcaacagtgtgttttgaaaattatatccccctatgtgccaactgtcttgttttgtgcgcacaaaggaagacacaactcatccaggcgcatctattacgtcgtgacacttgttgaacccgccacacaaggggtcttgtggggaaagcacttttttgttatctcctcccaacaccgcccctgttagaacaacagagcgttcttatgcggcggaattttcctctccactataaacgtgttgtttcgtggcgccacaacggccccagagagaagcgctctatatttacacacaaaagcggcttttttttccaacccctgttgcgggagaaaaacgtggtggcgan

SEQ ID NO: 614366 - DNA, 239 bp, Homo sapiens
tcttgaggatccactgcttacttacagtgtgatcattccaatcatcacaaccgcatctgagtctgtttctgatacttgatctgtctgtttaaacagtgtttctgtctgatatgcattgtgatgttgtgttgaaagccagatataatataccaaagttaaaatgaacagaggtaattaggcctttattatgaagttatgtttatctggctaagagttatgctctatttactgattgctat

SEQ ID NO: 614367 - DNA, 232 bp, Homo sapiens
acacctgacagaccttgcgattcggagcaaggcttcatcactgaagatctcaaatgctgtatctggtggagatgccgggcaattgtggcaccagggacccacatgtcccatgctcactgctgctggacaactcggctcctgtggattagacaagttcagacgcagatgaagggctgtgaggtcacggtggcaactataatgataggactttgatcgggaaacagacccctgg

SEQ ID NO: 614368 - DNA, 623 bp, Homo sapiens
agacagcaacgtgtcggatccgcaggcgcagccgtgcgatgtttgtcctctacagccatgtattacggctgctggcagagacttggggatggaacccgcacagagccgcgggccctttgcagctgcgatttacgccctagcttttcaacggagggtactatactggcaattgctggagaagattttgcaatcgttgccttctgattactcgattgagctgaagggttaccaagttcatacgcgggatagccccaaatgttacaaattaacagacaaaacagtcattggcctgcagcggttcccagtggagacttgtccttacgctgacaaagattcatggaagcaagactaaagatgtataagcattccaataataaggccatgactacggcgggccatggctggcaatgctgtctacaatcctgtatccaaggcgcttctttccatacctatgtttacaacatcatcggtggacttgattgaagacgcaacagggggctgtatccagctttgcacacacgtagggtctaaccagagagactccttcacggatgggaggtcagcatgtgcatgtacagacctgttgacaaccagggtcgtttaagaactgcacgatggcgagg

SEQ ID NO: 614369 - DNA, 207 bp, Homo sapiens
ggagagagcttgcctgaagaaatggagaacacttgtacagaaagggtcagcaaacacagcacactctgagccacgtgcacttcattcttccatgcattagccagtcaaatcaagattcaaaagcatcacagttcatacttaatctcatttaaagcacagtcacagcaggagcccaggcagtgtgtttcagcagacaagtttttccat

SEQ ID NO: 614370 - DNA, 169 bp, Homo sapiens
cagaaatactccagtgtcctctcttgctatctactacctccttcaattgattattcaggcccacaacctttctctacacttcaattctggaaggatttgcccccacccaggactggcaaattagctttactcaacatgccccgagtcacaaaaactaagatacctctaa

SEQ ID NO: 614371 - DNA, 115 bp, Homo sapiens
cctgggccgtgtctgcgagatagctgcgatagatgatgcgcgacaggcggtccttcttttctgcagaggggaggccaggcgggtagtccacggcgccggtctcgatgcgcgccag

SEQ ID NO: 614372 - DNA, 428 bp, Homo sapiens
  misc_feature (354)..(354): n is a, c, g, or t
cacgaggggtttccaggtgcagtattcgggcgatgccggcgaggttgatgccctggccgaccaattcgctgatccgcttgaggcgctcgagatcgtcgtcgctgtagcgacgggtgccgccgtcggtgcgcgacggcgtcagcagtccccgtcgttcgtacagccgcagcgtttgcggcggggtggcggacagctcggcggccaccgaaatgccgtagacgccgcgcgcggatcgagcggtcgcatcgccggtcaactggtttctccctgtcgaaatgacccggtattcctggctcggaaagaatacctgcgcaggtggcacaaaatctatgtcaactgaagcacatcaatggncagcccaccgaccggccgatcccgctggatgcaaatgcgtgccgctgacccgggtcggcccgccgagggcagcc

SEQ ID NO: 614373 - DNA, 255 bp, Homo sapiens
gacgcatccctaaccagctccaacccctgtgttggctccatcatcaactcaaactatgctaccagacccggttccgtcacctctcccgaggccgggttctacgcagacactgtgccttgccccaggtttaggaccccctcttggagggctcttctccattctcagacactctctttgggaacggggaacccccagggaccctttccaactcagacattgtcattaactccagcatcatcccttgttagggatgct

SEQ ID NO: 614374 - DNA, 164 bp, Homo sapiens
gtttttaaaacccccccttttgtaaaggagcttgggagccccatggctgctcccttccccctggggaacagtgtagtatcctgtgaaaaaataaatgtattcctttatgtgtttttccaaagccttttgggatgtggggaaattaatttcccttaagccgttta

SEQ ID NO: 614375 - DNA, 103 bp, Homo sapiens
tacagtatcagatgttgtactcagagtcttgtttccagaatatatacgaatcctacaactaattctacaaccctataaaaattaccaaaataggaagatgggt

SEQ ID NO: 614376 - DNA, 374 bp, Homo sapiens
tttttctgttttctttttaagacggagtaccattctgtcgcccaggccagagtgcagtagcgtgatcttggctcactgcaacctccgcctcccaagttcaagcaattctcttgcctcagcctcccgagtagctgggatgacaggcatgcaccaccgcgcccggctaacttctttgtatttttagtagagacagggcttcatcatgttggccaggatggtctcaaactcctgtcctcaggtgatccgtccgccttggcctcccaaagtgctgggattacaggcatgagccaccacgcccggctatgcccttttccatcttaggaacgttatgctatcacttatcgtcgacgcggccgcaatttagtagtagtagg

SEQ ID NO: 614377 - DNA, 138 bp, Homo sapiens
tccccggcttactacctcccactctattcaaagttatctctctgctcactgagatagatacatatctgattgcctcctttggaaaggctaatcagaaactcaaaagaatgcaactgtttgtgtctcacctatctgtga

SEQ ID NO: 614378 - DNA, 375 bp, Homo sapiens
ccaaaatcacacacacacattgatgtccccatagctttccataatactaaataattttggtaaatgaacattattgtgactatttacataagtttatatatgtaaagctgtagcaagcacttacatgttagttctttatttgtgtaatgctcttcataggtcagcctgggcaacagagcaaatccgtctcagaacacaaaacaaaacaaaacacaaaaacaaaaatcagccggatgtggtggcgcacacctgtaatccactcgggtggctgaggcaggagaatctcttaagcccaggaggcggaggctgcagtgagccaagatggcgccactgcactccagcctgggcaacagagtgagactctgtgtcaaaaaa

SEQ ID NO: 614379 - DNA, 250 bp, Homo sapiens
atctccaggatcttatccccggttctgggtactccgccgccgtataggggtagtggctgctcactctatctgagattccagtactctttagagtttcttttactcttataataccctatatggttaataagtctgtatgttgtatttaatctttccctagttctatattaaccatctatatttcttgtttccttggtttggagcctgtatgaatacaactaaggaattaggaaaactaaataatggtatt

SEQ ID NO: 614380 - DNA, 482 bp, Homo sapiens
  misc_feature (5)..(5): n is a, c, g, or t
  misc_feature (482)..(482): n is a, c, g, or t
actgngaaggttcctttgatttcacctagattcacctactctaactccctctaactgactgggggaaatgaaatgataaggtctgtagtaaactaaatggtattcacaattaacaaaataaaaccccagggaaaagctccaacacctccactattaaattgggatttgctatgaaataaatattataaacaaagaacaaaagctaacaatacaaaaaaactaggtcctttaaagaaacaagaaaaatcaagtggaaagacaagagcacatctatatagacttcaaaacatgaaataatgtttacactaaatgaactaacatctcattttggtggacctaagagaactattctaattccctaagtattacaaatccatggcacaacaaataactggtcattaacacaagctcttgttctctccatgggaaataatagctctacattttatttttggaaaaacagtaacaagtctggaaataan

SEQ ID NO: 614381 - DNA, 113 bp, Homo sapiens
ctcggtacctatcgaagcggtgtcacggtccagcaccttgtccttggtgttgtccatcatgtagcgatagttgacttctcaccgtttggattgagcactgggacgaggtaggt

SEQ ID NO: 614382 - DNA, 142 bp, Homo sapiens
caaaggcctgggggacccctggttttgggccgggcctggggctccaaaattccaaggcccaacctttcggggggggggggggtttccaaaattggttgtaaaaactttgcattttgttttttttaaccccacccgcccccca

SEQ ID NO: 614383 - DNA, 178 bp, Homo sapiens
tgagaagcatctgaggtggacagtgcagaaggtcttttctggaaaactcttaaaatgtactgtgatgtccaaggaagagctgaacttgatgcaagaagatcagatagcaaaccaattggataatgccatttcagtggtgtgccttcatattcaaaccataactcaggatgcttcttga

SEQ ID NO: 614384 - DNA, 806 bp, Homo sapiens
tggcctgcatccactgtctggcactccctagtgagatgaacccggtacctcagatggaaatgcagaaatcacccgtcttctgcgtcgctcacgctgggagctgtagaccggagctgttcctattcggccatctgggtctggattcggcattacatgtcttaacggaaaaatcaactcaagatggattaaggacttaaacctaagacttgaaactataaaaattctagaagataacatggaaaaacccttctagacatgacttagataagtatttcatgaccaagaacccaaaagcaaatgcaataaaagcaaagataaataactaggacctaactgaactaagagctttgtgcgcaaaaagaacagtcagcagagtaaacagacaacctacagagtgggagaaaatcttcacaatctatacatctgacaaaggactaatattcagaatccaaacaaacacaaatcagtgaaaaaatcctatcaaaaaagtgggctaacggacctccatagaccattctcaaacagaagatatccaacgtccataacatgcaaaaaatgctccaccatcactaatgatcaggcaaatgcaattcaaaaccacaagtgatattactttggtcctggcagattggcataatcaccacattgaaaccggcgatgtggcgtggtggggtgacagcgaccctctacctgcgggggattgtatagtcccgcacgggcaagggggcatcctaaaagacagtcatcccttgtccaccctatggttaccaggaagctttaaacatacgcccttatcaccccgaccg

SEQ ID NO: 614385 - DNA, 709 bp, Homo sapiens
tttccactaatgaaccgttcttcttattcaacgtccccgcacgattatgattctcgataaggagggagtaatcccctcgtccctagagccatttgtttggagaaagtcctctaatcgctgccgccgcatgtgtactcttggaatgactcctctgcgtcacccgtgcatatccggtcttccttttggtctactctccttacacttcggcaacgcggcttaacagaatgtgtgtgctgtcctcattctattgacaacattccacaatgtctaaaggtgttgttatgatcatcatgctctcttaaaccatacgtgtttcctaacgcatacgctagccgtgtgcttcgcagtacactcgcactctctcgcgtatctcttgctctcgaacaccaatctaatccacggttatacccactcatctctctcttcacgctctaaatcttatctcaccacacgctctccattttactcaatcttccaccacatactaccaacaatctctgtacagtgaaaccaacagcttgctcgaagcgccctcctccaactcatcattgaattgctacccttactgagattctccacacacacactccactatacacctctcgctacttttagatgacacaacagaatccttcctcaacataaaattaatataacataaaataaaacaaaaacaaaaaataaaaaatataatcaatataccacaaaa

SEQ ID NO: 614386 - DNA, 143 bp, Homo sapiens
cccgcgggcggggaccaggattgacagattgatatctccttgtctcgaattccgtgaggtcgtggtgcattgccgattcttagttgtgtggagctgactttgttctggttaagttctcgaataagcgatatcgcacgactctg

SEQ ID NO: 614387 - DNA, 804 bp, Homo sapiens
cacagcggcttgcacctgtaattccagcgctttgggaggccaaggcaagaggatcagcagtccaggagtttgagaccagcctaagcaacatagttagactttgtctctatttaaaaaaaaaaaaaatgtggttgggtgcggtggctcatcccagtgcccgtcattccagcacttggggaggtcaaggcgggcagatcacttgaggtcaggagttcgaaaccagctgtggccaacatggtgaaaccccatctccacaaaaaatacaaatattacctgggcatggtggcatgcacctgtaatcccagccactggggaaactgagcgcaggagaatcgctgtgagccaggaggcagaggttgcagttgagccaagatcatgccactgcactccagccagggcgaaagagcaacactctgtttcaaaacataattaacttacttaactttaacctaaattacacaactaaaaattttttttaaaaagcatagaccaggccgggcgcggggcctcacgcctgtaatcccagcactttggaggccgaggcgggtggatcattggagatcaggagcttcgagaccatccctggccaacaccggtgaaagccccatctcttactaaaaattccaaaaaattagctgggcatggcctgtgggaaccttgtagtcccaactacatgggaggctgaggcaggagaatgggccgacccggaggccaaaccttggagtgagccagaacatgccattgactccagctcgggagaaagaaagttcctttcaaaaaaatcaaaaacaacaaaaatttggc

SEQ ID NO: 614388 - DNA, 1016 bp, Homo sapiens
gctgtcatttgtgccaggcaatgactttgagatgtccaaacacccaggctgctgctcatcctgggcaagctgatcctgctgcaccacaagcacccagaacggaagcaggcaccactaacttatgagaaggaggaggacacaggaccaaggggtgagctgcaacaaccagtggagtggtggtgcgcgactgcttggagcatgctccgggaaaacaccttggattacactcgccaacatctcgccggcactctggacctatctccataccccgcgcgcatttgcctgcctgtcctggacggactccatacactgggccagttctgcccttcagctgacgccccggaccccttctcccaccctgggcccccactgccgctcctttccccgcacgaagcactggctccttgcgaacaccctcagccacaacctcagccatccaggacaacaactgtggacctgacttctggccccaccccccttcagccgcctggcgaacgttcgtcactagcactatggtgcgcttcctcagtgaccgaaagcaaccccggttgtgcccgggagattggccttgtggctactgcctgcccaacgctgtgtctcagtgcggacatccctggcacgctctttgccacttgcacgcgcaccaacggcgcacgcatcagcggaacctccctgccgcttcctacgaggacagcccttgacccgcacacaagttgccagccagaaggccacgcccacgcatcctcacatcgcagaaccgaccccttagaacccactcagtgtggcaccctgatgcaggccggctgcccgcgagatgcatgcccttggcacaaacggtgaggacgaagcaaccacatccgaacgatcacatctggaacgcaaatcacccgtgcatagaccactctaccgtctaaaccctggcatgaagccaatgacatacccaagatcacactcagactatcctgccttcggaaacagaccacctaccaccagccgtagcaaacctccaccccacc

SEQ ID NO: 614389 - DNA, 226 bp, Homo sapiens
ccctgcctatcatcggcaccccagcttcttccacgttacgcggtccaacattgggctggcagcagtcaccaagcagaatgtcaacgctgccagggtcttcgaattctgtgggtagccaaagtctagaatctcatccagcagctcatatatgagcacaaagtggttcttgatgttttcctcgctgatcgtgccaaagtaggcagccatcacgtcacacatcttatag

SEQ ID NO: 614390 - DNA, 183 bp, Homo sapiens
aggtggtgtgatggggttgaggagaggtggtgtgatggggttgaagagaggtggtgtggtggggttgaggtggtgtgacggggttgaggagaggtggtgtgatggggttgaagagaggtggtgtgatggggttgaagagaggtggtgtgatggggttgaggtggtgtgatggggttgagggtc

SEQ ID NO: 614391 - DNA, 774 bp, Homo sapiens
  misc_feature (266)..(266): n is a, c, g, or t
tcaatgaaaagcttagtaagtttttcctttaaaattaaaaaagcttgttcatcaaaaaacatgtcaaaatccaagcccttgtcaaaatacaacccccaagcggggggacgatgatgaaaaatgttctttcctcaacaaaaaaaaagaactctttttataatcccctccaaattaatgaacaaatgcaatagaaaaccacccatttcttagaagaggaaacccaaatgggtaataatcacaaaaaacatgttcagctccactaatcnggggaattcaatttaaaacaataatgacctattccatacctatcagactgacaatatttttaatgtataatgttaatgagtggcatgataggaacctagtgcactgttgctgagaacaacacagtggagaggaattaagcaatatctagcagagttgaagacgcatataccctatgacccaacaaatctacttgtaagtattatagaaacttgcaggccaggcgcagtggctcacacctgtaatcccagcactttgggaggccgaggcaagcggatcacctgaggtcagaagttcgagaccagcctggccaacatgtagtaaaaccccatgtctactaaaaaaaaaaaatacaaaaattagccaggtgtggtggtgcacgcctgcagtccagctacttgggaagctgaggcaggagaattgcttgaacccaggaggcagacgttgcagtgagccgagatcgcaccagtacactccagcctgggtgacagagcaagactctgtctctca

SEQ ID NO: 614392 - DNA, 388 bp, Homo sapiens
taaggatccttggggctccagtcagggacacactaccttcatattggtcaggggggtggagtagccgggtgccgggaaaggccaggctgcacgaagggcaggggcgggagagggtacatcaaagacggcgtcaccctgctcctcacagggggtctccggcagggggaccaccactctgggggtgagggcacgggcctccagttcggtggagaagaccacagcatcctccacctggaccgggtaaatgccagagtcctcaggcctcaggtctggagtcgggaactcatagcgcttccccagccggcgcagacggggctgggttgggtggtcgaagccataggggatcatctcaccatccttatacaggtaaatctggctctgagaatcc

SEQ ID NO: 614393 - DNA, 1108 bp, Homo sapiens
gattttaatgaagctatgctaacctaagatattgctagaagctttcccagcctcgtagcccagcacgttctcaaacttggaaagtgcactgcgaagtcacccggggcttcgtgattaaaatgcagagttctgactcagcaggtctgagtgggtccaggattcgtgtggtttctcacatgttcctgggtgatgctgatggggtcagtctattgaaccactagcgtggaggcaaccaggttctaggacgtttctcaagtattctagtacgtttctgaagcattctggaatcgctccccacattctagaattctcccgaaggattattttgttcttgagacagaggtcttgctctgttgcccaggctagagtgcagtggtgcaatctcagttcactgcaacctctgcctcccgggttcaagcgattcttctgcctcagcctccctagtggctgggattacaggcgcctgctaccatgcctggctaattattagtatttttagtagagatggggtttcaccatattggccaggctggtcttgaactcctgacttcaggtgacccacccgcctcggactctcaaaatgctgggattacaggtgtgagccaccgtgcctggccaattccaacattcttaaattctctcatccctccaagggtccccgtgctatgtactctttagcacattccacctcttactcttgctcaggcctgcaccactgcagccagcgttcatatattcattcattaaacaactgaagcactcactctgtagctgaggtccgggaacaggtgaggggggtcaagaaccacgcaccagcccctggccgtcaagtgaactggccaggtcaagcaccaaggacgggaacgacgatgtgcgacccagaggcttcaaaggcagaaaccagagacaatggaggagccaggagtacagcagagtgcacagggacagcgggccactaagagacccacaggaccacaagccgggggaaggggtcccgcggacacggacaggatcccaacgagaagacacaaagcagaagagacaataacacacacacgaggacggacagagcaaggttgtgagacagccgatcgttgggaaggagcaa

SEQ ID NO: 614394 - DNA, 877 bp, Homo sapiens
agcggactttcgccggggctgctcagtgcgtccgggtcagctgctgccggcgatgccgtaccgctgcggccgggggtattgggccgggtgtctccatcgccgatcgcaggaggagcagcggctccgcgtcggtccatgctttttgcagacctggtcagtctagctccgcacgatctgccggccgtggtagggtgcgaatgaggactgatgggggccatggcgttcctcctgggtgggacatttggctcccgtgaattatcacggagttctgtacgttgagcattggaatccaaggctagtaggctgcgcacaggtgctggacacttttacagacatgaactgggcaaagatgaccagattttccagtatacctgttatgcgagaagaatgcataggtagttgcaagcagagttagtactagcgtaatagaactgggactaagagggaccatgtccttggcttgactatagagcttacttgtgaagataattgggacgaagatgaagactatatggactactaggagatttatggctgagcacttgtgagtacctagtgaatggggatcatagtaatttgtcaggatgaatttggcataggtgatgtggcgggagaatttgccattatgatgggatttaggacgaaatccggtccagaaggaataaggtcactgagtgtccggaggtgggaaagactgaatcatgcccaagaacccaatgggactaacgtgaacgtcactttgagggaaagccggcatcgaatgtacgtggacatacgaccagcagcaaagggaacacaagagggactgtccggacgccatggccgtaatgtccccgcggattgcacggacagggaccacagggggaagaaaatgaca

SEQ ID NO: 614395 - DNA, 621 bp, Homo sapiens
gctgcgcgccgcctctcactcacagcctcccttccttctattctccctccgactcccgagcaccagcgcgctctgagctgaccccaggatccctcccccgaacgccagcagcccatatggagggaggaagtaaggggaagcggagcaggcacaggggagccgagaccgagtacccagcacagaagccggtgcaatgggtacgtggtgcacagaagacaaacagacacaaaaaacaaaacaagaaaaaacaaaacaaaaacaagacaaaagaaagacacaaaaaacaaaaaaaaaagaaacaaaagaaaagaccaacaaaacaaaaaagaaaagaaaaaagagaatcaaagaaaaaacacaaaaaaaaagaaaagaaaaaacaaaaaacaacagaaaaaaaaaaaaaagaaaaaaaacaaaaagaaaaacaaaaaaaaaaaaaaaaacagaaaagaaaacaaaaagcaaaagcacaagaagaaacacaaaagaagacaaaagacagcaagaaaaagaaaagaaagatgacggaagagagagaaacaaaaacaaaacaacagaagagaaagaagaaaaagacagagaaaaaaacaaaaaaaagacgaaaaaatagaagaagag

SEQ ID NO: 614396 - DNA, 344 bp, Homo sapiens
  misc_feature (4)..(4): n is a, c, g, or t
gganatctagaggcccagcgggtttgcacatggcagctgccttgctcagatgcaggaaactgtgagttcctttctcaccataatgttctcttggctgattctggcggggccccccactgtgtgtggctgaccctgatagctgtcctgtttcaatttttttccctaaattattcctgactcaagggcagggcagagacctactgcctagacctgagcccaggtctgggctgctatctagtacaagcagatggtgagaggcagagagagcacagggcagctagagagagtgctagaggaaaggagggtgagggcatgcttcttctttgataggttttctgaagact

SEQ ID NO: 614397 - DNA, 390 bp, Homo sapiens
ataaggacacgtggactcgattccaaattcatagcagtaacctgggcgacagtcggtaccagaagaaaaactaggaggttgattggtttgtttttgagatggggtctcgccctgtcacccaggctggagtgcagtggtacaatcacagctcacagcagcctcgacctgctggactgaagcgatcaccccacctccacctcccgagtagctgggactacacgaatccaccagcatgcctggctaattttttaaaattttttggtagacacgaggtcttgctatgtactccagccgggtctccagctcctagccccaagcgatcctcctgctgtggcctcccaaagtgttgggattatgatttgtgcatttataaagatgagaggtcagatt

SEQ ID NO: 614398 - DNA, 844 bp, Homo sapiens
ggcatatatggattctagacacaagaaagctcctttcaatatatttgaaagagacactaatattttggatggtgcatcattaaggttttcatcacagagaaattaaaatgcaggagtgcagtggtgtgatctgtggctcactgcaacctccgcctcccggattcaagcgattctcctgccttagccttccgagtgactggaattacaggcgtgccgccgccatgcctggtaattttgtatttagtagagatggggtttcacccgtgttggccagatctgtctcgaattcctgacttcaggggtctcactctgtcctgacttcaggtgatccacctgcctcggcccccaaatcaaggaagcacttcattggcttctctggcatatctaactggccagcatcactaactctgtgcttgggggccattcttaagtaaaataagcattactgtgaaaagcaaacaaaaaatgacattcacacacacacggaaactttaaaaaacaaacaaaaaagaacgagaaataaggccttactttaacaccaggcccttcgataaggacgaccaaagggcttgattcttgacaaagaagacgctactaagtgactaacagggtgcttcgtgccgacagtgttggttccctgggataaagagataattcactttctggatacaggagcaagaggggtgacattcatcatgccacttccaaatgggttgcggttaacacctacgaggttttattctggacacttcgggtccggttcacaatacgtggccccggttgaacccgcagaaactcggttcgggcctctctttccccctttactgggcatcaccgggccgcc

SEQ ID NO: 614399 - DNA, 139 bp, Homo sapiens
  misc_feature (14)..(14): n is a, c, g, or t
ccctgctacgctgncccgaaggcgccgggcatgtaggcaaagctgaagtccagcagagcatcttgtcccagtctcactcgaggagcaggcgtgtggatcacgacagtcagtaccactgccacagtgggcctgatcacag

SEQ ID NO: 614400 - DNA, 1435 bp, Homo sapiens
  misc_feature (890)..(891): n is a, c, g, or t
aggaatgctattttctttccgttgtcgcttaaaacacacaccctcatatgatctatggtgtcgtcccccattgaagagatgttcattatcccaatactgtcgcccgtctgtggttcaacaactaggaaaaatggttgttgtataacccgtttttgtagagcatccgtatatatagtgataaacaatacaatggggtgtccccccttataaatggcatgtgggtggaacaaccactgtcgctgggtttatttggacccccccgcttcccgacatacatggccccgccaaataattggcggccactgtgtcgttcgataaaatagttagtatccgtgtccccataagggaggtgccccccccctttgtggtgtcaaacatcttgtggtggggcccctattctgtgcattagcgtcttttcgtctttttactatactactttgtttcgtaataacagggagcgggagggggaacaggacattttgcgtggagtagcaatagttgaacgcgccctccgcttatgcgttatattttggtgcgaagttttgtgggctgtttctcttcatgcgggggaaaaaataggcgcccacaatatttcgctggagatgtttccccggataaacggcgctttgaacaacgggactgcccctttctcgcaaatagctccttactatggtagaagaagtgtggcataaatgggtctccccccgcccatattacggttaggggggccttctcccctatggtaccccctcacacaatcgccgtgtagacccgggtcgtcacacattcggggacaatgtatggtaacatatagatagatatgtacttgttggccttttcgaatggtctcgcacggcaaaacgtaacgagaaagccttatacacccttgnngggctctttggtgttaaagagttctctgtgacagacacgcctggtccgccaaggggaggcccgataggtgatccctcccctggtgtgtctttgttgattattacgcccttgctttctccctacggcgttcacctccgcctactgtgaatctggctagacctcagagtgcaccaagtaaacgtgctagttgacagcgtatgatgactaggtggtttctaagacacaggggacacctgcacacgaccgtgcggtgaatggatgggtccatcccaggcactaagtatcttgcccgccttgttctgtatcgccctttgcacgttgccttgccattccaacaaatccctaggcccttgagaagcgtgatacttctcctatttgctcacagctgccttggccccaccctgggagatgtagcaaattgagtatgggtttaggagtctgagccatcaggctcaaatccaggcgaagtgatctgggcaagttaatctctggaactttggtttctatcctcaacaaagcattatacgggtggaagtataagagc

SEQ ID NO: 614401 - DNA, 530 bp, Homo sapiens
  misc_feature (115)..(115): n is a, c, g, or t
ggcgggcgcggtggctcacgcctgtaatcccagctctcagggaggctaagaggcgggaggatagcttgagcccaggagttcgagacctgcctgggcaatatagcgagaaccccgntttcctccagaacaaagggaaccacaaaaaaacaaaccaaagggaccaaaaaaaacaaaaaaaaaaaaaaaaaaaaaatttggtttggggggcgcgccctggcgcccccgggaaagagaaggtttacaacacccacttctgtggggcggggggcggacccccatatgaggatatggtgcaacccgtggcggcaaaaagcggggcgtccccagaggagcagccgcggggcaacacgaacatgtgggcgtggggtttcctcccccaaagtaaaaaaaccgccgggggggacacacgggggtgtgctgtggacaaccccagaggtggagcgcgccggggggccctaggggggcttcatacccaaaggggcgcccaaggagcagaccagaaaataaaatttaacgccgcgagcggggat

SEQ ID NO: 614402 - DNA, 222 bp, Homo sapiens
  misc_feature (49)..(49): n is a, c, g, or t
  misc_feature (51)..(51): n is a, c, g, or t
  misc_feature (60)..(60): n is a, c, g, or t
  misc_feature (68)..(69): n is a, c, g, or t
  misc_feature (85)..(85): n is a, c, g, or t
  misc_feature (111)..(112): n is a, c, g, or t
  misc_feature (144)..(144): n is a, c, g, or t
  misc_feature (150)..(150): n is a, c, g, or t
  misc_feature (177)..(177): n is a, c, g, or t
  misc_feature (222)..(222): n is a, c, g, or t
ctgtagtacgcgggaaggatattactagtgccgaatattgagtatgagntnctgcgtgtncgcatcgnngtggaagtgcggtaantgttataaaattaatcagtgcagcgnncgttatttatgaatcacgtcgttgaaactgtncggtancgtatccgtatatatttttaaataacntttttcacagttttccggagttactgttgaaatctgcatcacggn

SEQ ID NO: 614403 - DNA, 190 bp, Homo sapiens
cttcctaaaaattttataaacccttgatacttttccctgataatgggtcgctccaataaacatatattgtgaaaatgcatccccaataaatggaattccttcctgcaaaatgtttttttttcccttatttttatggccaatattgatagtgaaaggtatgttttttataataaaaattatggccccgtta

SEQ ID NO: 614404 - DNA, 188 bp, Homo sapiens
  misc_feature (113)..(113): n is a, c, g, or t
  misc_feature (158)..(158): n is a, c, g, or t
tgctctagagtatccccctcacatgacctgctcacatgacctgaaaagtagcagcactcatgctggcgacagaggagactccttaaaaaaaaataaaataattcatctttganagttaacaataggaataggcatggaaatgctggcagtgagtgggntcagggccccctgggcagaagcaggaaggg

SEQ ID NO: 614405 - DNA, 202 bp, Homo sapiens
tatggatgaaatggctgtactacgagggctatgtggctgattgaagagtatgcatgagcgatttaggtctgttgtcgtaggcagatggagcttgttataattatgcctcataggcgatagtacaaggaaggggtaaggctatgtgtatagtcacgggggttaggcgctcgtaggaggggtaaccgacggcctcgaattcgta

SEQ ID NO: 614406 - DNA, 148 bp, Homo sapiens
caagagaagtaggaagcatatcaagcgtttaacttgatgtaaaaagtataatgtgaaaacttaaaatttattagaacttttatattgttttctttccctttcacagtaactttatgtaaaataagccattttcaaaagagctagaata

SEQ ID NO: 614407 - DNA, 154 bp, Homo sapiens
gatgcggcaggcacagagtgagctgggttattgatcagacggaactcaccggccggatgcgaagatagacgattgatactcttctcgatcgtggtggtgtgctgccgtcttagtgtcgagcgaccggtacgagtcgattcgaatcatgtcatag

SEQ ID NO: 614408 - DNA, 1070 bp, Homo sapiens
  misc_feature (1070)..(1070): n is a, c, g, or t
agcggagactccgtgcggggcgtgggattggtctgtggtcctctctcggttcctcgcgggtcgctgcggtcgaaggttcctgggactcacctgcttgcttgtgcccgtccgagtgggtcgcgtgcttctatgtctgcggcatgccctgtgttcgctggacggggaacgagaggggctgtgggcgcgttgcctgtcccgcgtgcctcccagtctggataggcccgagggtcgctgcctgtttgatgcctgttcgcacgggtgcggattgcacttgatgccggccggggacttgcaagtctgtggacccgagagggctggcgaccccgttgacttgccgtgtatccttggcgtagcaccttgcgcaacggagatgtgagctctcagaatacgtgggtcatagcagtgctgtacctagctttgacgctcggggggaacgcaaacgtgagacacggcgtttagcggtgcccaattataaggagttcagcgagccttgtgatgtgtagcacccatggggcagtttcacgccactgcgatcctggacgcaaatggaggttctggagggcgtttaagcatggtgcaatgtgtgttccggaacactagcgcctttagcagcggggtccaccgtggttgaaccaaccgaggagttggaaagcaaaccggctttgtggagagcacaactgctgaacggatagcctcccgacatctcatgtgccatgacagttgcgaggttgcaacttgcgacaactataatattccacgcatgccgctggatagcggatcctaaggcacacggcactagagtagcactagcaccctaagagcacaatgggagtaggaggtacggaaccgcgctcatgaatagccaacctcggcgaactaggaagtcacaccgcctatatgaccaagtaaacatcccggtccgggaggacgagacaccaaaggaagactacccaacgaatggaacggaacagccgataagggttgggcaacgcccgcacaccacaaacgagaacacagagcgtggcccacgagagggggtaccaaagcagcacggcaggaacaggcaaccn

SEQ ID NO: 614409 - DNA, 477 bp, Homo sapiens
  misc_feature (199)..(199): n is a, c, g, or t
  misc_feature (205)..(205): n is a, c, g, or t
  misc_feature (209)..(211): n is a, c, g, or t
  misc_feature (229)..(229): n is a, c, g, or t
  misc_feature (241)..(241): n is a, c, g, or t
  misc_feature (397)..(397): n is a, c, g, or t
  misc_feature (412)..(412): n is a, c, g, or t
  misc_feature (437)..(437): n is a, c, g, or t
  misc_feature (443)..(443): n is a, c, g, or t
  misc_feature (467)..(467): n is a, c, g, or t
taataccctgttgggtatcagttactaccatcatccaagtaacatagtccctgaaaactgttttctcacctgctttctctctctgagggatttcttttctgcttactcttttcccattgggtggcttggggcagaaattcctagtttttaactaaaacccaaatcattctggcagactctgtcaagcaagtcttacctntggggncagnnnggggaaggtgagccatcnggaggggaattnatgtcaataaaaccttggagaaggtgacgagaaactgaaactcctaaagccaggccttggatgctggtccctggctaagcagttatctcacagtgtgaccttggacaagccccgaactcctttttggctcagttttttcatctgtcaaatggggangactccttgcttccntcccacatgatcacaaaactccaanaaagantaaccagcaagatggcctgagacngggaacagta

SEQ ID NO: 614410 - DNA, 409 bp, Homo sapiens
tggttttggtttttcttaactttctcaaagggatgccaagacttccataatccttaaattccagtgaatttttctcgggtgataggggctatagattcaagtaccttcattggcgattcttccaatacgaagcagggagaaaatgtgtagcacaaaatatacaggatgtaagaaagcattgaaaaaattcctataagatacgtatatagcattgacaacaattcacacatttgtaacctactaaatacccacctggcaagttaaacttctcccggtagatgggggaatcataggttataccatggtgctgggcaaaacaaggactttttaacatctcagagcctagcaaagaacgtgggggctcctgtgaaagacaaaaaaacatttccaaaagttgcctatagtatcc

SEQ ID NO: 614411 - DNA, 135 bp, Homo sapiens
atcacaggttaggggtttttttaaatgggggttttaaaatttccagtgtttgctcctggaaggcagcaccaaaaagggcactaaaatgtactagctggatgtgacccatttttaataaacaggttttttaatcca

SEQ ID NO: 614412 - DNA, 730 bp, Homo sapiens
  misc_feature (308)..(308): n is a, c, g, or t
  misc_feature (335)..(335): n is a, c, g, or t
  misc_feature (353)..(353): n is a, c, g, or t
  misc_feature (520)..(520): n is a, c, g, or t
  misc_feature (560)..(560): n is a, c, g, or t
  misc_feature (643)..(643): n is a, c, g, or t
  misc_feature (668)..(668): n is a, c, g, or t
  misc_feature (685)..(685): n is a, c, g, or t
  misc_feature (699)..(699): n is a, c, g, or t
  misc_feature (703)..(703): n is a, c, g, or t
  misc_feature (707)..(707): n is a, c, g, or t
cacgctggttttccggggccgctccatcgcgccttcctcctgcgcctcgcttctccggtccagccgccatcttcctttccgcacaggggccgccgagcggggccatgcagccaacgctgcttctcagcctcctgggagccgtggggctggcggctgttaattccatgccagttgataacaggaaccacaatgaaggaatggtgactcgctgcatcattgaggtcctctcaaatgccttgtcgaagtccagcgctccacccatcacccctgagtgccgccaagtcctgaagacgagtagaaaagacgtnaaagacaaagagacaactgaaaatganaacacaaagtttgaagtnagattgttaagagacccagctgatgcctcggaagcccacgagtcctccagcaggggagaggcaggagccccaggggaggaggacatccaaggcccaacaaaggcagacacagagaaatgggcagagggaggcgggcacagccgagagcgagcggatgagccccagtngagcctctatccctccgacagccaagtctctgaagaagtnaagacacgccattctgagaagagccagagagaggatgaggaggaggaggagggagagaactatcaaaaaggggagcgaggggnagatagcagtgagagaacatcttgnagagcaggagagacacnatacgcttttctcnatgntatnaagcatgcttcagctatataaaa

SEQ ID NO: 614413 - DNA, 181 bp, Homo sapiens
cctgacaagcgcatcgccatggtcgtctataccgccgataccaaccgcgccacgggtcagatatcgccggtcgatcgcaccatccttgccaaagcgctcgcccagatcgaccgcatcggggtgaaaggcgtgggcatctacatcctgttggattcgccgcaggacgatgacccactgctcc

SEQ ID NO: 614414 - DNA, 351 bp, Homo sapiens
ctactactactaaattatcggccgctcgacacggagtcttgctctgtcgcccaggctgaggtgcagtggcgggatctcggctcactgcaagctccgcctcccgggttcacgccattctcctgcctcagcctcccaagtagctgggactacaggcggccgcactacgcccggctaatttggtgtatttttagtagagatggagtttcaccgtgttagtcaggatggtctcgataccctgacctcgtgatctgcctgcttcggcctcccaaagtgctgggattacaggcgtgacgaccgcgcctggcctaataccattttttaaaatggacaattctgggtcgacgcggccgc

SEQ ID NO: 614415 - DNA, 748 bp, Homo sapiens
tgagtgaggcatgtcttgtacctccatcatcaagatgtgtcggtgactacccccagtcttgtgctgcccaatttctgacatgcttatataaccatgtgaagcaactcctctccaatgagctactcctgacacaaatggagaagtgtgccctcatggaagccctgggttctcatttagcaaccaagttctaagaactacgagcgatcagacaggtgttccatagcaggagctgatggcaccaggtggccacgcagtcgtggccttgtcctcaagacactgcacagacgtgctggtcagactgtgtgactgcgttacacttgcggtatgtgcggtacagatcagaagagctgtgacccaggcctggaggcactccgtgtggcttaacaccggtgcacgaatgcagcttctagtgtatacagcatgctcgggtgttggtgcacagacgaacttgctggcccagctgacctagaagaggccaaaggctgggcggcatttgtcggtggcgttataccatccagcggcaacatccaatcttccgtaacccctgcgacaaagcgatgatgctgtacacttcttgatcagttcgcgttgcgccttataagaagccctacagatcacttttatatgcaccagcaaatgcttagccaaaatggcagagaccttttcagcaagggtctggatatgcttgacgcggcaaaatctgcaaattaggaatactcaaactctcttggaactccagaaccccagg

SEQ ID NO: 614416 - DNA, 264 bp, Homo sapiens
  misc_feature (9)..(9): n is a, c, g, or t
atgactttncagatactgtgctgagaacagtgatacaggcttagaggctctgaggcatggaacgctcatttgttcctaaaataaatgctcttccagttgcttggttttattttttcgtcaacataatcatttcttgggggcccttctcttggcctcgaagctaagcgcttttcccgccctggccttgttttgcctcctttaagcttctttccccatttgttcttcccgcggttcaacttaacccccggtggcgcaccacaagac

SEQ ID NO: 614417 - DNA, 1703 bp, Homo sapiens
ggttcccccctgcaggtcggggcctgagctccagtcccgcattctttgcctcccagggctgctgcccagagtaccattccaggcctgcgccgtgcgcccccgaccacagcacaccaagggcgcacggcggacgagaccccctccaggtaggactatgaatacaccggtgcacgaccgccgacacaggagtaccgccgcggctgcatgcggccagactgacacgcacgcaagcagcacgaacagacgagctaggacagagccacgccagagaacccactgaacagacccgaccatataccgagaagaacaccacacctaagagcacatcgacacccagcacaccaagcgacacgccaaaaaaaacacccagaaaaacaacaaaacacacaagagcacacaacacacaaaaaacacaaaccccaacccccgacgcagccgcgagcacaaccacacacagcgccaacgagcagccccaggagccaccagacacactcaccgaccagcagcagacgacacggacaaccacacgagcacacaacagaactacaagaacgaggcgagacaacacgacgaaaccagaccaaaccgagcgcccacaaacaccaacaacaccacacaagaagacaggaagcaggaaacgagacagaaggcacacacagagcgcgccggccagaggaccagacgccggcagccacagcaagcgccgcgaaccgcagcacgacacgcccacccgcccgagacgccacgccgacccaccccacggcagcacggcgagcgaggcacagccggaccgcacaaccggtgcaccgacgccgacccagcaacaccacgagaccggacacgcagacaaacgacgaacgacacaccgcgggcgaagacgagagaaggcaaacggcaggagacaggagggaagcgagaggacgaagacggagcgcgcacgaaaagcgaacgggaggcgagcagagaagggaggacagcagaggaagacggcgaccgaggcgacgggacggcggcgccgcactgcctgggccacgaggggagcgaagacgagggcggggagagcggcgggaggcaggccagggggaggagcggacgggggcgcgcgagccacggccgagcgcaacgacggcaacccgggacgacagcacgacgccacaacgggagacagagcacaccgacagagagcagagcacggagcgcagaccgcgacgagacagcgcgcacagcacaagcggcacaacacgcgcagccaccagggcgcagagacaggcagccgaagcaaacgcgccaagcacaccacagacggcggcaggcgaccgcacggcagcgacagccgcacaccaccgacagccaccgagagcgacgacacgaacaacacaaacaaaaaaacgcgacaggaaagacaaccacagcaacaacgcaacagacaaacaaacaacgacacaacacgcaacacacaacgaccacaacaacacagcaaacacccccgggcccacaccacacaggacccccccacgagacaacacaatacgacagaacacaacagaaccaaaccacacgacgccaccacacgcaccaccacaaccacacacagaccacgaagcagaacgacatcaaaccagccaccacgccagccacacacacgcacgcacgccaaccacaccagaccacaccgccctgccgtcgcaacgacgcccgcacct

SEQ ID NO: 614418 - DNA, 189 bp, Homo sapiens
  misc_feature (122)..(122): n is a, c, g, or t
tgtatctagcggatcctttttgcggtgctttcctacatcaagaactttccaaatgtgggcctggggcctagcaaaacagtggcttggcacaggctctgggcctctgggaggctcccatctgncatcaggtggcggcacagagcagggctgtcagcactgggcatgagaggctgggcacaaatgagtagc

SEQ ID NO: 614419 - DNA, 155 bp, Homo sapiens
tgaggctctccaagaggtcttagaggtggaagaggaggcacgtggacggaatcagggacctccctcacggggaggacacatggatgacggtggatcttccatgaattataacctgagttcttccaggggaaccactcccatgtaaaacgaggacc

SEQ ID NO: 614420 - DNA, 138 bp, Homo sapiens
taaagttaggtagtttgttttcttattattgagtttacaagtatcttgtatattttggataaagtgtgccttttgcgaataatttctccctgcctgtggctagtcttcttatactcttgaggttgagattcatttttg

SEQ ID NO: 614421 - DNA, 904 bp, Homo sapiens
ggcgatgagcagcaaagtctctcgggacaccctgtacgaggtcggtgcggctaagtcctgactgggaaccaggcaagctgcgaaagttcctggatgacggtggagttgcagatcagccttgaatgacacgtatgatccccgcagaaggagaaggcgcttctcagggcaccgatcaggctatacaggttcagtccccgccctaatgttctctgtgtagtggatccttgggggatacagcagtcattgtgacgaggctaacggccgttggtatatcccccacatggaaccatcgaggcgctgaaaaaagctcaacacagagatacataagacacatggtcacgaaagcttgggcacaagaagtatgatcgctgtttttggcctcagagtcgtcttgatcacagcacgacttccaggaactctcggcccaccggtataaactaccggcaggaccccgttcccatatccctgctccaccacaagcgaacaacatggttggaacaacacgtggatgaggtgaagttcacaaagtcaaggttccaactgacagaaggtgtactgtctggcatgtacgctgttggatcacgtgacgattgacagacgctgacgcgtcgtggtactcccacttacaacctgtctggtcacaaggttctgggaagcacaatatgcttcaattaaaaacactggggaagaaactgtcccggggcctaaatatcttgcaggacgcaacaatgagtgaagcgcccaagcagctataattcaaggcaccctttagaacataaatctaattagccagtttgacaatctacccaacacaaacaaacactagcagaattgattcacgagcgagcaaaaaaaccacttacaaagacacctcacagaactatcccttcccggacattagaga

SEQ ID NO: 614422 - DNA, 87 bp, Homo sapiens
cctctcgcttctgcgagcaactaatcgtcgaccacgcgtcgcccacgcgtcgctgaaaatccgaagtgccgcggaaagtggaggtga

SEQ ID NO: 614423 - DNA, 597 bp, Homo sapiens
ggctgtagtttagtctatgctattctctcctatctgtgaggatacatgcatcctggaaggacataccctggacagatttgactgtgggctgctcctattccgctatcccgtaggtggatctctcttgctccaacttgaaaagtgaatctggcttgttgcctccatgaccctattgatactcacgttgatgtaattctccatacttgaggtgctcttgctacaagaccttctgagactggtccaactagctgccgctccgtccctggttgaagcccgcagccacatcttcgaatgacaatgacccctcccctgaagaactgccttgctctctcctcacagacattacaatcgtggcatttttcatgtgtttcctgttatttcagctgggccttgcccatttcgttcaactcttaggggctagcaactctagtatgttctctctcttctgtctattctgggccttcccagaagtggtggtcaggtatcatctcaggtcaagctaccactggaaatgatgatcttccccagcctggaagctccttcttccattactgaaaatgtcttgtttctataggccagaaccacaaatatcggggg

SEQ ID NO: 614424 - DNA, 157 bp, Homo sapiens
ttgcttgtgctgacaagagcctttcattgcagcagtatggatggaattaaccatcacgttagtgatgtatcagtatagaaatgagaactattgcatgtgttcactcatatggcagaagcaggaagcagtagaagcaggatgcggcagaagcaggaag

SEQ ID NO: 614425 - DNA, 1440 bp, Homo sapiens
cgtcttgtgtcctgtttcgtgttccgtctctttgtcctctctctgtaccatctcgggacgcctgcccccctgttttagcacctcacgtctatggttgatcgttcactccgctgctgcctgtgtgcttgcggctcgtcgctacttccctggtcctcatgctcttgttggggacacttcctgtgttcacttgctggtgctctgcttcctgtcgcccaggtattctgtcgctgcttattttgcctctttgccgcgcccactgagcgtacgttcgtgcccctgcctgtttcgttgggtccttccccctgttcagagtttgcttcttagttgacctttcgcttcccgtgtccatcacgtgtcgttcggttcctttttctgattggtggttggctttggctctctgttatattttgtgttctcgtagccccttggttgggcaccgtgcctctcgggctcattggtcttgtgccgctttcttcggggccatatatgctgtgcctgacttttgtcgcgttcttgtctgtttccagctgttgctcttttatgtatcatggtctctcgggtgttgtcttaagggcgataccgggcgctgttcatcgtggtgttactccttcctttggctctcaaactatcttgggtcttctctggctcactgttgccctttccccatgctctcttttgctctactggtactgtgttctgcgcttgtcctgtcattgtctggctggcgtcccccggtccggattgtcgactctccacgtctctctcacgaggcctgctagtcacgccctagcctctgtcagtcttgtgtatcatggtccagtcttcgggtttcacctcttagtactccactaagctgctcctctctctgtggccccggcccctgcccaggtgtggatggttctggccagggaaggcacaatggtagtctgtgggccaagacaccaggccctgtcgctagccccgtctagtaatgacctttgcccaggagaggagaaggatgcctgggtgtccatggcaagacttagcccctcagcaggagaagaggcccagaggcttccatgtctggccaccgtgccccactgagatggcccctgtgtggttccctttaccgttggcttcctggcccagtccctgcctctcctacctgcaccctgcttcctggcccagtctcaggttggagtccctcggcatagctgactactcatgctattgctcttaagcttggcttttcacattaagtcaacaccaaacgtggttgccacatttcagtcagactagacacctccctgctggagatgcagttgtagtgacaaccttgttacattgtagcctagagccaattctgtgtggatatttaagtgaacaatgtttacaatttctttgtatatatcactctctccctctcctgaaagaccagagaataatgtcggggcagtgtcc

SEQ ID NO: 614426 - DNA, 127 bp, Homo sapiens
atgggtacgatctagaggatccagccatttctcccatttctacaaaaatgagctatgcacctgtagtcccagctactccagaggctgaggtgggactacaggtgcatgctcattgtggtagaattgg

SEQ ID NO: 614427 - DNA, 574 bp, Homo sapiens
tagcacgtacagatttcctaactgaaataaatctttagttattattcattccaaaacattcagattaaaggtttcctaccatatcttagggtagttaacatgcagcaattgagggtgatattcacagttggttctgactagttattatttccgatcatttatcatttatacttaaggattccctattcatgtctctcttctctagttcttaccactcctctctcaaaagttctcctccatgtattccttcccaagtgcttaatttttaattgcctccctagttcagattctcttcagccattcactcccaactcagcaagcatcacacccaagttttttagtccccttgccctcaatattcaacaaacctgagttcccgagacccatggactctttctcacttctgccgcaaaagcagaaacagtagggatgtataacacttcacagggatacctaaaggtgttcagaactgctgccatttttgttaaacctcacatccagtctgtcatctacatcagcagtccccaaccttttcgggaccagggactggtctcatagagcaacattcctccag

SEQ ID NO: 614428 - DNA, 616 bp, Homo sapiens
aatgaacaattgtatgatcaggaagtatgtgcgagaagtgaataccataatataatggaaagtactgaggaaggacaaccagacaaaacacaagaatactcagacagatcaagctctggtatgtacggtggaagcagaccacctttaaccggattctccttaaactatcctaacctcctgcaaagattgtcttgttaactccaggaccctactgctatagtttgaagaaaactgctctaccctgtttaacatgtcagcctttactactttggctgatccagcgagaatgtcaggatatctcttaactgtactccttagaatatcaacttattctttagctagtctccggtaggaaaaggttgacaatcatgaaaactgtgcttaacaaggactaaatggtctataccaggaccggctgcaaaagtcatggccgtctttataaacagtgggaaccagaccacacattgatattctgcagccagtgtctcagcatgtgattctagtgatttgtgagtagtgatcactataggtcctgtctccattttcttaaagactttgtgattcctccagactatgagtgttgtaacatttatggcagacaggtgcagcgtagaat

SEQ ID NO: 614429 - DNA, 361 bp, Homo sapiens
gctatttcttcttatcgtatttgtacccattaaccaacccctttttttaatctccttccgcctatatcctaacatctattacaggttcaggacgtacatgtgtgggttgttacatgagtaaatgtgtgtcatgggggactggtgtatagattatttcatcacccaagtaaaaaacacagtatccagtaagtagatttttttgatcctcaccctcctcccaccctccacccacaagtaggccccagtgtctattgttcccttctttgtgtccatgtgtacttaatgtttagctcctacttataagtgacaacatgcagtatttggttttccgttcctgagttaacttgtttaggataatggc

SEQ ID NO: 614430 - DNA, 270 bp, Homo sapiens
aagctccaacaagacatcaagctgtacacctggcccacccaccgtggtgcctcacagcattgtctcacctcccgaggataggacagtcaaagacagcacccaagttctctggactcagatactctgatggcatgctgctgaaacttcaagaagctgcaactacattgagtctccagatcgagaaaccatcctgggaccccaaccttcaggcaacactttaagggtacggcaatcactgtaatccccggaccgcagaacgctgggcatcag

SEQ ID NO: 614431 - DNA, 376 bp, Homo sapiens
gcgatactggttgggggcaggatcattttgccccttgtccacgcaccccccccagccctttcgcttttaacacagggcccctgctggggctcagggatgttaaggacgagttccagccccgcccctgccctggggagacccctccctgttcctgcctccctggttttgccgcccctctttctggacccccagtggctgtcccatgggtacatcctgtgggtgggggccccccacaggacagcaggacggtttgttttcagtggaatcccctccctggggtcccctggttccccctctttcccagccccccggggctggggcatgtttgccataaaggaaaggtttgtggcgcccgtcctggccggcctttcatgga

SEQ ID NO: 614432 - DNA, 1078 bp, Homo sapiens
tttactgaaaatagtctttttttctttgctttccagttttacacttttgtggttgaacacaaaaaagtgtggacaagaatcaaattaactagatgtggtaaaacacgtgatttttttaaaaattcacttcttttaaacccggtgagaatcacaatttcaaagtttgtggcccactgtggggggcaacctgtgtgtaaacctttacaaaccttttttctttaacaactgtgaccacttatgtgttgcacgtgaattttctctttaaaacaacaaatagtgccatttaagaaaagtgatttttgtgtggttgaacaccatttctgtggcacaaaaaaaaaaacaaaaaaaaaaaacaaaaaaaaacaacaaacaacaacaaaaaaaaacaaaaaaaaagagagaaagagagagaggaagagagaacaacgagagagaacaaagaaaagagagagaccgaggagagagagaggagagaggagagggagaggaagagcggcggagcgcgggggggggcggggggtgcgaggggcggaggagagacggaccgcgagcggagagcgagcagggagggacgcaggacgagaaacagacaggaaagaaagcggcgcacggcagcgaggcgggcacgccaaggaggcgggggcagacggaggcggcgacgcgaggggcgcgggcgaggcgtgcaagagacagggagagagacgacgacggcgcgcggaggagggagaagacggagagagagccaagagcggggcagaagaagaagagcacgggaggccgctagaagaggagcgagagcgagacaagaaagcaagaagcacaaggaggcaacaagagcagaacgaggacgcggagagggcagcgaagaaaaaaggcgaggagaaaaaaaaaaagacgtaagagaaaaagcgaggcacaaacaaaaggacgagcagcaacgcaccaaactgacgagacaaagacaaagaagaagagagcacgacggccaaaagccacgggagggagagcagacagaagctgatggaacgaaaagcacggagacagggagacgcacacaagacgaagagagaagacagat

SEQ ID NO: 614433 - DNA, 252 bp, Homo sapiens
  misc_feature (105)..(105): n is a, c, g, or t
tttttttgggggggggggggccccccttttttttggggggttttttggggccccccgggggcccccccctttgggggggggggatttttttttccttttttctcnttttttgggggggggggggggcccccccccccccccttttctttttttggggggttggggcccccccctttttgggggttttttttttgggccccccgggggcccccccccccccccctttgggtttaggggggcccctttttttta

SEQ ID NO: 614434 - DNA, 111 bp, Homo sapiens
attaagtgggtgatacatgtgaattgttacgacattgctttgcccatatctgcatgctgtatgccatattttcatcattgatgattacttcatgggaaatatttcgttatc

SEQ ID NO: 614435 - DNA, 1352 bp, Homo sapiens
atcttccgagctcgatttccagaccgacagcaggagctgagtgcttcaagatcaccaatgccatccttgtgggctgcgcttcgcggagacagctgctctactggttcttctagtgatgggggctacagtcaagcgcctcagctgagggtgtgtccatccgcactggtctggagctctcccgggatcccggctggacggatgaaagtgtccaagtgtcgtccgtgccaggtgctcgtgtcgtccagaatgcagcgcggccattcgggggaaccttcgaagaaggtgtatgattattctgctaccacgttgcatcgacctcaggggatgcgcttcctcctcaagccagcagatctgccctgtcctctaccacgcaggggacggtcctgctcaactgccgctcctggacaccgtgcctagtgcgcagtgtactgtggacgagcttgtaggcattagagtattccctcatgaaggatcctgtggcttccaccagcaacctggacatggacttcccggggggccttcgttcccccgtgactgagaggaactggagcctccccaaacgggcagtggagccccagctgcaggaggaagagcggatggtgtatgtggccttctctgagttcttcttcgatctgccatggagagctacttccggggcgggggccctgaagctgttgctggttgggggacaaggtgcccaggaactggacatgcttgctgagggccaactactatgggaagcatgggtcttgttgagcccaagaagtgattgactcacacatagaaggctggagctgcagggtcatgggcccaccggcttcgacagtcatgccctctggaccaccaactctggcacatggtagcgtcaccatggccgggtacaaccagaacagctgaggtcagctgcagcgctgacaacaaggaagcacgaggcaaaggcaaagaggggtccagggagagaagccagcggaacacaaaaggacacgacggcccaacattacacaaaaagtacgagagcgagaccaaccacaacagagcgtgaacacgatagcaaaagtggggagaccaaaacaaggacagaagggggagcacccacaaggcaggacccaagtaggagagacaagaaaaccagaagagaacgcaacgggagggaaaacaggggaccaacaaacttagggtgccgcgtcgccacccagctctccacgagagccaacaaaccgaacaaacgagaagaccagcacacagaaaccgcaccagcaaagcgaccagacacgacgaggacgcaaaccacacaaggaccagcaccagcaacaacgacgaagcggcacgcagacagcacgagcaagagagag

SEQ ID NO: 614436 - DNA, 132 bp, Homo sapiens
tagcccgatcgtttggctcgcggctgcagatcccagatttcaggtggtcttagatgtgtcctagtagatcgctgcccattgagtacgtgctctgtgcttgtcaccatatagaagaaagctcgtgctccagca

SEQ ID NO: 614437 - DNA, 370 bp, Homo sapiens
cttagaagttgtggtggatatgtgtgtgtgtattaccaatattctaatttaaaggaatgacttaacacaggggtgcaggttaagctaaagtgtagtatgaccacctaaacttggggatacactcactgaactaaataaaaactgctttaactgtgtcaactggaacaccaattaatgatcaatgacgagaggtattcatctaacactttatcaatataactcttgtttgagtgaatgcaatcttaatgggcacaatcaatactcttttttaggtcacagtcaaaattctttattgataaagacctctcatgtttatctcaaaaaaagctttaagaattgtccaggaatcaccacaacttctaagggtaag

SEQ ID NO: 614438 - DNA, 578 bp, Homo sapiens
cacagcactcaccgaccccaggcgtgactacgtttgaggcaaccatgaaggcttcagacattcaaacttcttaatagaccaggcgtggtggctcacgcctggaatcccagcactttgggaggctgagctttcctcattggccgtcatgccttggatcattaaggacactttggaacggagctttgctattctctgaagatacacaaaatcctccactgctcacgtcataatctatttaccaactgtggaaaattccgcggtgcctgtggtttttaaagtgatgctgaagcgagcacctttgtgcatatgtcttgatccacgcctgattttaaaatttcagataaaatcctagaagtgaaatggctggagagagagttacagcagagccaggttctccgtcctgcgcggtttctaagtgaaatggctggagagagagtcacagcagagccaggggctccatcctgcgcggtttctgcatttggtgttgagttgtcctttctgcatcggaattctgactcctgaaatcacatttctcaccgtgtctaggtcatactttcaataatctttcaataaccaaa

SEQ ID NO: 614439 - DNA, 147 bp, Homo sapiens
ctggacgatctcatagcacggatcccccgttctatctactgtaaatatattgtgtgctccctacgattaaccctaggcaagccaattgatatcatagctcagaccatacctatttatcccaatggttcttttcttccggagtagtaa

SEQ ID NO: 614440 - DNA, 219 bp, Homo sapiens
gttgtgcacatctgctgagggcccgtatcactatgcgcgtgggtcatacagatcgtaatgtacagttgttgcagatcacggtggacgaagttgttgcgcaagaacttcgtccattcagacctgcggcggtctggatcttcggcgtgtgcaaacaacttcgtccaccctgatctgcggcggtctgttggctcggcgtgtgcaacacgccgaccgcccaga

SEQ ID NO: 614441 - DNA, 899 bp, Homo sapiens
  misc_feature (615)..(615): n is a, c, g, or t
  misc_feature (634)..(634): n is a, c, g, or t
  misc_feature (651)..(651): n is a, c, g, or t
  misc_feature (899)..(899): n is a, c, g, or t
ggaaccttctggtgacttcttttgaaaaaccgagattcctctgtcatgtcccataatgtctctactttttttagtgcaaactttgtatttggtgtttatttaaaagtagggtacaacccaaccaatattagctttcccagagtctactttagccttcccttcttaatctttatgagaaattttcagactgttaaatgctcatgagatatttagttgtgttctagaaatttcacctggcttgatattctgtcaatccctgggctcaaattccagctccatcttatcaaacaataacagaattccctaatcagtactaagctccgcatgcagtctcttttccagaacattctttgcctaatgttccttagtgtggctctctctttagttggggcctccttccttagtacatgcataccttactattctgtggaattgcaagccatgcatcttttagagccacactagtcaaattgatggcatttccatttattttccattgttccctgtttctcctggacttcctctcgtttctcttttcgaggatgcttagaggcttctcaccagagatggtgaggtttcccccatcatctagatgggagattgacaaattctgtnaaggtaagacagtactatnttaggcttgtgggctanatgtggtctctgtagcacattcttcttgtgtgctgtgtcatcgttgttgcactggttatgtaacactctcttttttgcagagtctctctcgtgccagtggggcattgtcaattcgggtccataaactcactatggagggggggaaaggctcccgggggttacgaaccctttccgtggaagaccttaaaaaaaaaggggatcggcgacctaactgtaaacgcaaggtttccacatattattaatactgn

SEQ ID NO: 614442 - DNA, 625 bp, Homo sapiens
  misc_feature (473)..(473): n is a, c, g, or t
ccctacattggaatattaatcggtggagactcattttctcttttgttaactttggaggggttaaatatttgcatggcaggggccttaaaatattcctttttaccctgaccggccagttaaaccctaaccctgtgggtgaagaaaacatctgtttggatttgaagagctaaagagtctccagcaggattggagactaacttgtgactgcgggctgggggggcattcccagtaggaatgtgaagccagaggtttgggatttgtgacatccaccccctgggcaagtgagagcatttgcaaaatgcaaagagaactccctcatatgcaggatgagccaatggcagtttcaaaaaatgtactcgggcgaccccttacctgtggaaagcaaattttttcaaaataagcccctgggactcggtaggtggagccccagctgtttttttagggacctatgggcccttcgtggcatttttgtnctgtgtgctggggaggaggttaatgtaatggggacttttttttgatcagccccttgcccgtgattcccaaggtcccagccaaagcaaagggccagttgtttcagtttaaacaaacatgtttttagtttaataaaattagttaactcccagta

SEQ ID NO: 614443 - DNA, 505 bp, Homo sapiens
  misc_feature (505)..(505): n is a, c, g, or t
ggcggggcgcggggtcacgcctgtaatcccagctctcagggaggctaagaggcgggaggatagcttgagcccaggagttcgagacctgcctgggaatatagcgagaccccgttctccagaaaacggaaaaaacaacaacaacccaaaaaatacaaaaacaaacaacaaaaaaaaaaacatgggtggggggaggcgcgcctggacccaggaaaaaggtttttcacacacccactgccggtggggggcgggcgggacccccaggtggagttatagtggaaacaacggggccccagagcggcgctgccagaagaaacactcggcgccacgaacacaaggcgggcgggttttctccaccaacaatataaaaaaagcccgcgccgggggacacccgcggagcggtttgcgaaacaaacccgaggagcgctctcggggaggccacaaacgggcctctcacacaggggggccacagcggagccaaataaaatacgccgcgggggggagggan

SEQ ID NO: 614444 - DNA, 831 bp, Homo sapiens
  misc_feature (615)..(615): n is a, c, g, or t
  misc_feature (634)..(634): n is a, c, g, or t
  misc_feature (651)..(651): n is a, c, g, or t
ggaaccttctggtgacttcttttgaaaaaccgagattcctctgtcatgtcccataatgtctctactttttttagtgcaaactttgtatttggtgtttatttaaaagtagggtacaacccaaccaatattagctttcccagagtctactttagccttcccttcttaatctttatgagaaattttcagactgttaaatgctcatgagatatttagttgtgttctagaaatttcacctggcttgatattctgtcaatccctgggctcaaattccagctccatcttatcaaacaataacagaattccctaatcagtactaagctccgcatgcagtctcttttccagaacattctttgcctaatgttccttagtgtggctctctctttagttggggcctccttccttagtacatgcataccttactattctgtggaattgcaagccatgcatcttttagagccacactagtcaaattgatggcatttccatttattttccattgttccctgtttctcctggacttcctctcgtttctcttttcgaggatgcttagaggcttctcaccagagatggtgaggtttcccccatcatctagatgggagattgacaaattctgtnaaggtaagacagtactatnttaggcttgtgggctanatgtggtctctgtagcacattcttctttgttgttgctgtttgttcattcgtttgttttgcaacctttggataatgtaaaccactctctttttttttgacagagtctctctctgtagccaggctggagggcaattgtacaatctcggctcattacaacctccaccttccgggttcaggcaa

SEQ ID NO: 614445 - DNA, 126 bp, Homo sapiens
atcgccgaccaggtgaggtccagcttgaagagaaagaaacaagaagttcctgtgtttaaggccgtgtattcaagagccaggtggtcgcggggcaaactacttcatcaaggtgcacgtcggcgcgag

SEQ ID NO: 614446 - DNA, 726 bp, Homo sapiens
  misc_feature (325)..(325): n is a, c, g, or t
  misc_feature (329)..(329): n is a, c, g, or t
  misc_feature (332)..(332): n is a, c, g, or t
  misc_feature (337)..(337): n is a, c, g, or t
  misc_feature (340)..(340): n is a, c, g, or t
  misc_feature (354)..(354): n is a, c, g, or t
  misc_feature (360)..(360): n is a, c, g, or t
  misc_feature (368)..(368): n is a, c, g, or t
  misc_feature (375)..(375): n is a, c, g, or t
  misc_feature (428)..(428): n is a, c, g, or t
  misc_feature (432)..(432): n is a, c, g, or t
  misc_feature (508)..(508): n is a, c, g, or t
gtgatgagccgagatcgcaccattgcactccagcatgggtgacagggcgggactctgtctcaaaaaaaaaaaaatagtaaaatgtttatggtcatcaatatagctgtgactagaaaagatacttgatacagaggcacatgctttaaaaagcttccttatggaaaatgttaaatacaaggtgaacattccttatccgaaattctggggaccagaaaccacgtgtttctgatctcagaatttggggggttgggaatatttgcattggtacccagttgagcattctaaatccagaaatccaaaatccgatatactccaggagtttttncttngtnatgtnggngctcgggaagtttnggattnggattttnggattanggaaactcaatctgtacacctacaaatagaatagcataataaactcacatgtntgtnttatgcagcttcagttactaggatataagcagtgctgtgttgttcatactcatctctaatgtgctctaccctctanacagtttgagaccagtctgggaaacacagtgagacctcatctttacaaaaaaatttaaaaagtagctgagtgtggtgtacaccagtagtccaagctacttgggaggatgagttaggaggatcacttgagtccagatggtcgaggccgcagtgagctatgattacaccactgcactccagcctgggcaacagagttagaccctgtctcaaaaaaaaaaa

SEQ ID NO: 614447 - DNA, 145 bp, Homo sapiens
acggcgcccttttccctccttccgctcagcggggctcttcgtgaaccttctctttccgtggtgtgtccctttttaggtcctgcaaatttagcatcaaactgggccatcttctcacacagtttcacttcccccaagacagcccgga

SEQ ID NO: 614448 - DNA, 907 bp, Homo sapiens
gattgacagaagcgtcaattcctgggagtagtacgttggttttcttgcccctcatccttttgcctgctcccggcgaggggtggctttgatttcggcgatgagctcccagaaaggctacgtggctcgttccagacctcagaagcaccagaatacgtttagcttcaaaaatgacaagttcgataaaagtgtgcagaccaagaaaattaatgcaaaacttcatgatggacgtatgtcagcgctgtacacgaagttcttgagtggcgtgtccacatacagcacatacaaaccattatcaaaacctaacacagtgtcgtcgcctgtattacacaaagcaccagtgaaggattcttatcacactactgtgcacggccatgtgcctgtgaacttgaagttctgcgcacaaatgtggcaacgaaagaagacattgtattccatggagtctccctctgtagcccaggcctggagtgcaatggcaggatcttgagatcacacaagctcgactcccttgtacaagtgattctcctgcctcagactctcgaagtagctgggaactacaggcggcacacaacaatggccccagttaatcctgagataataagtaccaatggggtatacactaatgttggccaggccggcttggaactcctaggacctcattgatccgcctgactcaagcgtcccaaagtctgccatccaggtgtgaaccatcatgccttgaccctaaattgggacaacatgcctacatgactacatgcacggtttgacactgagcactacagacgacagcgtcatgagacgtagtaaataaatacctctagttcaaatcgacacatggacatcttgacgaaattagccggaactgatctaccagtggagccaactaaggcaaacgcacaccgttggaccg

SEQ ID NO: 614449 - DNA, 181 bp, Homo sapiens
cctcaggatatagggagttattgtttaatgggtacgagtatcaattttggcaagatggaaacagctgcacacagtgtgaatatcttgatgccaccgaactgtatgcttaaacagtggttaaaatgggctggtgtgcagctgtctcactgcctagttataaccaacacttctgggacggtca

SEQ ID NO: 614450 - DNA, 146 bp, Homo sapiens
cttaagcgggctcatctacttaatgtatatctcgaaggctttgcatagctctggaatacagctggcatcattaaatatcaaataatgaatagctagattagacctttctcatccttttcctatgtctttctaccttctctctcagt

SEQ ID NO: 614451 - DNA, 644 bp, Homo sapiens
cagtcttctttctgcgtcgccaggccgagcccacatctgctcagacaccatggcgcgcataggtgaaggtcggagtcgacggatttggtcgtgttgggcgcctggtcaccagtgcctgcttttaagctctggttaagagtggatattagttgccatcagatgaccccttcattgacctcaactacagtggctttacatgttccaatactgattccacccatggccacattccatggcaccgtcaaggctgagcaacgggaagcttgtcatcaactggaaatcccactcaccatcttccagtgatgcgatgatccctccagagagactcaacgtgtggcgcgatgtctggcagctgagctacgtccgctcggagtccacttgggcgtcttcaccatccagtggtagaaggctggggcgtcattttgcagtggcgggagccccctacgggtcatcatctctgcgcccctcttgctgattgcccccgagtgttctcgtcatgggttgttgaccatgtagaagttttgacaacatgcctcgagatcgtcagcgatggctcctgtgtcagcgactgcttatggatcccctgtggccaggtgcctccatgaccaactttggcatcggggaaggagtccttttgcccctgt

SEQ ID NO: 614452 - DNA, 85 bp, Homo sapiens
ggcaagagatgttcacttgccatcacctagctgcctgcacctgcccttcagggagatgggggtcattaaaggaaactgaacattg

SEQ ID NO: 614453 - DNA, 425 bp, Homo sapiens
acccctcacggatactcacgatacagtatagcaactatacatagcactgtattgggtattataaatacagatgatttaaagaatacagaagatatgcataggttatatgcaaattctatacaccattttatataagaaacttaagctgggcacagtggctcatgcctgtaataccagcactttgggagcccgcggcaggcggctcacctgaagtcaggagttcgagaccagcctggccaatatggtgaaacctcacctctactaaaaatacaaaaatcagccaggcgtggtggtgcacacctgtaatcccagctactcgggaggccgaggcaggagaatcacctgaacccgggaggtggagattgcagtgagccgaaatcgtaccactgcactccagcctgggtgacagtgcaagactccgtctc

SEQ ID NO: 614454 - DNA, 449 bp, Homo sapiens
gcactgagttctggattccacatacataggctcttgcatcattacttgtgacatagaatagagtgagggtcctgtagacattggacagctagcagcctgggactgactgggaggctctgaccattagcccaccacaggtaagttgtgtgcgtgagcctcaggtacacaggtgaaggccacagaatccttgtcctccacgggattagaaatagttgctgaagatggagggcttgggcagctccgtcaagactgtgattgtcttgactgtagtcctgctgatggccactggctgagttattggcctggcaggtatagagtccgctgttcttctcagtgatgtaggagataaagagctcttgtgtgtgtagctggatgtccccatcaatcagccaagaatactgtgccggtgggttcgaggctgcatggcaggagaggctgaggttcaccca

SEQ ID NO: 614455 - DNA, 781 bp, Homo sapiens
tcaaactaggcagagtgaccgtcatgaatcaatgttgcgagcacaactggggagaggcgagacttatagacgttcatgccggcctgtgaaagtatgaagatgtggagcacaacggtgactacacgtatttggacaacctcttgatctacattacgtgaacaatgagctctccatcctgcgtgagaagacaccaagatgagtctctgcactgtaaagcaagtatgacgacttatctcatgaataagacagctcaagcgaatgcaacaagccgttatgagtatattcgctgttagtcgccaggactagaaaaccataacagttcctctccccagtctggggtgatccaggatcgaggttgccggattcataggctctctccaggtcacgcaggggagatatagaactacataatctacctagtaccctccgagtctgctagaatgcaaggtgccttctctgtcaggagtcccagaacctcttgtgccgaaacttcaccttcccctcgttgctagtgtgctctgagcggtaagcagcaaattggaccggtagagggtcctaacaccagcatcaaacggggacgggggacgttcatccccatgagatccagagatgccagtgcatgctgggatccccttgtgacagtggcagaagattccttgtatggacgtttgccaatgccttggtcgggtcatgcagacagtcgatccttccggatatgagaattgtccgcgtgccatgaattcctgtacagcgaggaagtctcagattgggaacacagtat

SEQ ID NO: 614456 - DNA, 378 bp, Homo sapiens
tagaatgtcaagtgctggggaatgatgccaggtgttccgctccccacctatcagaggttccaatgccccccagggcaacacagcccaacatctacgttcctgaagagaagtgtggtgactctcagtgtcacacttctgccatcgaaaaaagtgccagaagccatcagctccaggaaagttgtatctcagttccccccaagtccaggtggtgatgagagaggggccctggagctccctgggagcaggaggccccagttctcgatatttcagtgaaatacttccctctccccgtgcatgcggcctggccttgcgcatctttggaggcatgccacaggcctggaaggtgtgtaggcctgccggagagccagggtgcggaca

SEQ ID NO: 614457 - DNA, 546 bp, Homo sapiens
atcatttttagcattgcagaatatttgcaagctttatgtaagcatgtatgtatgtgtgtatgtatttttatttagtgttattttttctccttttttggcatttttttttttgtgatgtctttttacatgtctttaaaaaatttgttttacattgttaagaatcccactgtgcccggccaatgtttccattttcaaataagaaagtagatacaggtgagcattagattatgacagcgatctgatggctatgttcaggatggatttaactttgaagagagttttggatgtcataagtttgggtatatgtcatttgctttatagatgagcagatggagtttgtccttaactggcttttcttccatttttgtttgttgtctgtttctacagctcagggtcttcaagttagccaaagcctggccaactttgaacacactaattaagataatcggcgactctgtcggagcccttggaagcctgactgtggtcctggtcattgtgatctttattttctcagtagttggcatgcagcattttggccgcagcttc

SEQ ID NO: 614458 - DNA, 157 bp, Homo sapiens
aggtaatgatgttgactagtagtgagagctgcagaatgaagagaacatagatctgattcagctagaaattgggtgccattcatccacttcagttcatactttcttagtccaacatccctatggtcttgtcaggacagaccatgaccatcatcagtct

SEQ ID NO: 614459 - DNA, 321 bp, Homo sapiens
ctcaatttagtacggctgacgtttcactttcatcattagctcaaactcgaccacactattgcacctacctgattgtttcatatatctatcaaaaaattgctcatatcttttctacaattgtcctctatgacatatcgaactgctaaaatcaaatccgagtgtcagtcattcgacttgccctctagaatcttttaataactgatatgatcctttcttagtttcactttaccagcaatctggttgttggcattgtgtgacagtctgggtcagggtggctatgaatttacgattggtccaactggattgcgttgacatgggcgc

SEQ ID NO: 614460 - DNA, 488 bp, Homo sapiens
ttattcttaatctcttactatgcctagtttataaattaaaatttataaggggtatgtattattggaaaaaacatatatagggtaggtaccgtccgcagttttaggcatccacttacataatgggggaccttggaatgtatcccctgtgaataatgggggctactgtacatctaccatatattacaaaacaccccccgtggagactggggctgtactatgtaacagtgatatttttgtagtgaaatatatgacagctgtgctgtgtagctgtgtacactaaatgggtcaagttttgctgccatctgagtttttagagctttttgggtttcagatttgcaaacaagggagtgtgaattgatggctgtagaaaaaggacctgtgatatagaacaaaatgtaaaaactattgccaagttgttttggatcaaatagggaatttacttttcctgatttaaatcactttttatgcagcagacactgtgatggtaa

SEQ ID NO: 614461 - DNA, 467 bp, Homo sapiens
ttattcttaatctcttactatgcctagtttataaattaaaatttataaggggtatgtattattggaaaaaacatatatagggtaggtaccgtccgcagttttaggcatccacttacataatgggggaccttggaatgtatcccctgtgaataatgggggctactgtacatctaccatatattacaaaacaccccccgtggagactggggctgtactatgtaacagtgatatttttgtagtgaaatatatgacagctgtgctgtgtagctgtgtacactaaatgggtcaagtctgctctactaaaaatacaaaaattagccttagccgggcatgaagccggcgcctgtgatcccagctacttaggaggctgaggcagaagaactcagaaggcggaggttgcagtgaccgagttttctccatcaaatagggaccttgcctttccgtaagtgaaactccttctcaaaaaa

SEQ ID NO: 614462 - DNA, 415 bp, Homo sapiens
ttgtgctacaggccaagccccatatgctgcatgagtgctccacagatgagacttcctgggtggcctctcctcagcatagcctagcaccatgtacactagagagaggtctagtctaatgtgtgtcccatgggcacaatgtaggcctctgcgtgagcctggtgtcctggtagctgggaacaaggtagatatgtgctgctcacaggtccagcttaaggacaagtgggacagttagggcaggtatccttgcctgtgtatgacaagtcagccaagtttcaagcagatagcagacctagagactgctcaggtcctgtgggagcgtacagtcttcccagtcagtcatatgcaagtgtgactctctcctcagtacgtctcaagagtgtgtggacgcacatgaggctagcatcgcctatttccc

SEQ ID NO: 614463 - DNA, 325 bp, Homo sapiens
tgcgagttgtcagtacaatgaaatcaaactgtgtgagatggcagcagattcatctctgggaggtggtccagtgtctatgagttagcacgtcggatctgtggctgatcaccccagacttgttgagcctggctgtgaggttcacaaaaagattcccagcgtctggtggtcctcaatgatttcacattcggcaatgtaaccagtgcttcatcatcgggggtgagaacacggacgatgactttggagcacgggctaataagcacctggcgtttggctctcttttcggcattgttgatactcttgagagcatctgccacgacattcatgc

SEQ ID NO: 614464 - DNA, 550 bp, Homo sapiens
agctgctgacagtggtggtaataggatagtatccctatatccatagacccgacctgtgtctatagaggggtccgaggaataccagcgtaagcctctagcagcccatggttaaacggatgctgtatgagcacttggccacaattaacaggcttgatttaacggcattgtgtggtttttcacatcacttgggaagtggatgtcccccttcaggagagattataataccctacgggaagccctagttattagggatgataatgacaaaccctgcttggggtctgcataagtgggggttggcaatatcgtccagcaagaatgggttggtgcaatcccttgccaggtggccctgttgacagacggctgtctgggcatgggtagagggcacactgcgacattccctagccattcaaattcacggaagggggagcaacaggttcccactaccttttcctttcccatctaagtgatatatcaggtgcatgcggaatttggaggagctcagagaaccgataccttgaatgcctttacggtctcatagattaaacaatgg

SEQ ID NO: 614465 - DNA, 275 bp, Homo sapiens
tgtccaggtggtactttggctctttggctaaactaaccttctctgtccaactgtgccacactagaacctgaaggggaacgaaatagcttggcttgcgcactcttcatggggacactcgaggtcgggcatcacaagtgtaatgaataccttactgcatttatttgctttctgttccagttcttacactgtcgctatcttttcgagaaagtcagattcttgcatccctgactgggatccaccacgtcttaaatacaattttttgattggacaaaatg

SEQ ID NO: 614466 - DNA, 376 bp, Homo sapiens
ctagaggatccccccgcagctgggctctggcccggcagctgggcttggccatagtagctattgaaggatttgagtgtttatcctaatgattgcagctaatactcacatgcgcaacagctgctctaacatgccttccagtgatgttatcgcatgtaatccttccagcatcactaaggtagggacgatttttatccccattttacagatgagaaaactgaggcacaggaagtcttagaaatataccaagatcatattattaataagctatagaagccgaatttagacctgggcggtctagttccattatccacactcatccatcacaccacactggctttcagagcactcatgtgcccttgaagtgctgcgatggaaa

SEQ ID NO: 614467 - DNA, 274 bp, Homo sapiens
atgcccttccctgccctgtctccgccgttcttcccccacccctgccccatggaccaagttcgtgcagtgcccacatggggagctccagaaacgcaaggaggtggtgcacaccgcgtccctgcacaagatcggcgacatcagctcttgcgcccatggcttactggcgctcttctcatgtgacacaggggagatcaagtgagaagtccgtgagcatatcaatgcctaggtggctgactggctgcgaggagggcacggcggagaccatccctggagt

SEQ ID NO: 614468 - DNA, 472 bp, Homo sapiens
gtctggagccagaatgttatcaattttgataacataatgtcatatgagatcctggaacagtaaaatacattaggcaaaactaaggcaatctgaataaactatagactttagttaatactaatggatcgatattatttcattaattgtgacaaacgtaccaccccaatgtcagatgtcattaatattaggagtaactgagcgtggggtatacagcagctctctgcactatcttctcaattttttctgcaactctaaaactattctaaggccaggtgtggtggctcatgcctgcaatcccaacattttgggaggctgaggtgagtacatcgcttgagctcaggaatctgagaccagctagggcaatatagcgagacctcgtctctacaagaaaaaaaacaactggccgggcatggtggctcacgcctgcaatcccagcatagggcacatagtgagacctcgtctccataaaata

SEQ ID NO: 614469 - DNA, 991 bp, Homo sapiens
  misc_feature (425)..(425): n is a, c, g, or t
ggctccgatgtacctggtatcctgactgcttctggcgttgaaacccgtggcgccgctcagatgccgtgctaaccactcttctctcatggatcctgatagactaaaactacatatgtgaaacatgtggaactgatttgcctgatgcaagcaagtcaatgcaagggacctgcccccagagagacaaagtgatacagatattgtggatgaagccatctataacgtatcaaggaccgaagtagtcttcattcaaggaactatgaaattcaagaatgagagctagatcgtgaccttgtctatatataactctctacatttctgattgtctgagtgaaactgctaaaagtgcaatgccgaaaagccacaggtgagaatagaccatgtatcacgctgtgaatcactaattttcccattcctggagagcctgngttttccacttaagcgcaatttatgccaatggctgcaatcgaacaggaagatgaagtgatgagagcctatttacaacagctaatggcaagagactgggactgagagctttgtgatgaaagttttcgaccctcaaggaatgatgaatctcgcatcaagtggtggacttgcttgtgaagagacagttccatgaacaagagtctttcaggacctggacatgtgaagggagccgggggaccgaacgtctccggagccgtggtgtcagccagttttcccagcatgatgtacacctagtcttcggccttgatgtcgtagagttaattccgcacatagaagagctgtttttacttgcacactctgaacagaattggtcggggacacgaacgtggtttcagggtggtgaatttcggaaatataggcgggctatccaaacgtggctaccacttctctcccgaaaaaaaaagccgcgcgccttttcggcggcaacggtcaagcctggatcacgctgccccctcgcaagggatccgcccagcgcaacgacgccgtagaaacacccactgtcgtctga

SEQ ID NO: 614470 - DNA, 366 bp, Homo sapiens
agagtcaaggctagcagctgcgctatgatcttaaaagaaaaaaaaaaaagaaagaaaaaaaaacaaagccgagaagtagtcaaacaaaagttaagaaaatcctggtaaaataaagttaccatttatgatttgccaaactttccagcaaataatggatggtcaaatcctaaaggggggatatagtcataaaattatccaaccttgtcggggagaatcctttattcacaagagcagcctgaggaacttcactcggggacagctcgcactaacggtgtcatttgtagggctgggataacccacgatggctacgctcttacgcagtttgtccaagttcttgtacccccacgctccgacttacccatgtat

SEQ ID NO: 614471 - DNA, 552 bp, Homo sapiens
  misc_feature (36)..(36): n is a, c, g, or t
  misc_feature (190)..(190): n is a, c, g, or t
  misc_feature (220)..(220): n is a, c, g, or t
  misc_feature (254)..(254): n is a, c, g, or t
  misc_feature (258)..(258): n is a, c, g, or t
  misc_feature (269)..(269): n is a, c, g, or t
  misc_feature (277)..(277): n is a, c, g, or t
  misc_feature (282)..(282): n is a, c, g, or t
  misc_feature (294)..(295): n is a, c, g, or t
  misc_feature (297)..(297): n is a, c, g, or t
  misc_feature (303)..(303): n is a, c, g, or t
  misc_feature (309)..(309): n is a, c, g, or t
  misc_feature (313)..(313): n is a, c, g, or t
  misc_feature (316)..(317): n is a, c, g, or t
  misc_feature (323)..(323): n is a, c, g, or t
  misc_feature (326)..(327): n is a, c, g, or t
  misc_feature (330)..(330): n is a, c, g, or t
  misc_feature (338)..(338): n is a, c, g, or t
  misc_feature (341)..(342): n is a, c, g, or t
  misc_feature (344)..(344): n is a, c, g, or t
  misc_feature (346)..(348): n is a, c, g, or t
  misc_feature (354)..(354): n is a, c, g, or t
  misc_feature (356)..(358): n is a, c, g, or t
  misc_feature (362)..(363): n is a, c, g, or t
  misc_feature (369)..(369): n is a, c, g, or t
  misc_feature (373)..(373): n is a, c, g, or t
  misc_feature (375)..(379): n is a, c, g, or t
  misc_feature (382)..(382): n is a, c, g, or t
  misc_feature (385)..(385): n is a, c, g, or t
  misc_feature (398)..(398): n is a, c, g, or t
  misc_feature (403)..(403): n is a, c, g, or t
  misc_feature (406)..(406): n is a, c, g, or t
  misc_feature (426)..(426): n is a, c, g, or t
  misc_feature (430)..(430): n is a, c, g, or t
  misc_feature (434)..(434): n is a, c, g, or t
  misc_feature (436)..(436): n is a, c, g, or t
  misc_feature (441)..(441): n is a, c, g, or t
  misc_feature (459)..(461): n is a, c, g, or t
  misc_feature (467)..(467): n is a, c, g, or t
  misc_feature (486)..(486): n is a, c, g, or t
  misc_feature (488)..(488): n is a, c, g, or t
  misc_feature (494)..(495): n is a, c, g, or t
  misc_feature (497)..(497): n is a, c, g, or t
  misc_feature (503)..(504): n is a, c, g, or t
  misc_feature (508)..(508): n is a, c, g, or t
  misc_feature (530)..(531): n is a, c, g, or t
  misc_feature (545)..(545): n is a, c, g, or t
  misc_feature (549)..(549): n is a, c, g, or t
acaccatggctctgttacaatagggaaatctaagcnctacataccattgcttttctacctggacagggccccataaaagcctccaagccacgtgtagatgtgagagacatttgactatgtaacatttctatactcatagcttataatgatgccattgctccagctgtgctagggctttacaaaaactgtnccaggacttcccatgaggctggattgcttnatttatgttttatgagccccacaatactgaagcncctnttccagggacntggcatangcagngaattccacatnngngagagntcctcnctgntanntaatgntanncantgacatcnaanngncnnnatgcangnnngtannacccancggnannnnntanatnagggaaaaactanagtgngantaagaagaaaaaatatatcnaatncgcntnaaagngcatgaggcgcgccgccnnntgcgtntggtaagcgtgcagaaggncngggctnntntggatnnatcnagagcgtccccgagccctcctnngccaccccccagcnacgncgc

SEQ ID NO: 614472 - DNA, 375 bp, Homo sapiens
ctgcaggaatcggcacgagctctctctctctctctctctctctctctctctctctctctctctctctctatatctatctcactctaccactagacatctctagctatatcattcacccaaataaagtatacgcgatagacattgagacctgacgcaatagatatagcaccgcacgggaaagatgaataagcataaccaagcataatatagcaaggactaacccctataccttcggcatagagaattaactagaaataactatgcaaggagagccacagctaagacccccgaaaccagacgagctacctaagaacagctcgacccgaccgagcctggcgatagctggatgtccaagatagaatcttagatcactct

SEQ ID NO: 614473 - DNA, 131 bp, Homo sapiens
tgtgcatgcatgatacatagcaacagttcaagccaacaatccagcacacttcaccttttcttccccggtatctctttgtaaactatatcttttttgcatggaaaccgggaggctacatcgtctcaaggatt

SEQ ID NO: 614474 - DNA, 684 bp, Homo sapiens
ctttacgagaatttttatcgatcactcctgtttttacttgtcacccttttaaatttaaactagacctgcctagaagtagtcctatcgtcctcattggcaagggtccacagactcctgttggacttttttgtgggggttccccaggcagaaggctcacagcttttgtgcagcataaatctactgcagcactaccagctgtggcaggggacagacattgtacaggggtgagggaatggcctgatctggaaatgccccagtttggaatgggtcccaggacgggcccctcatggcgtttcccgaaatgaggttcccatctttatcagacttagagtgacactgattagcccagtgttttccttttttacattttggacatatttcaggcttagcagttttcttttttcccctacctggtggcctgactcgctgattttttctacattcttttttagtatgaccatgcttcccatagttcaagctccaggaaaccgagtatttcctttactcactttcagtcctgctatagcctgtgccaacaaagtagctttatgcagattgcctctgatactgtcacaggccttgatataatcaactaaatgtgcttttcttttaataggtcgcaaagcagcccttgcaattgggattagccatgttgggttattatgggcacgatttctgagcgtt

SEQ ID NO: 614475 - DNA, 605 bp, Homo sapiens
gggtgttctagaggatcccgtctgccagttatgccaagatactttccagatattaacaggacgtcagtaactgtgtaaaagttaaccaccaaaaccgatgtgttaaagaaaataatgtgtagatgtaagactaatgtcttggggacattactaaatgtatttctaaaaaaacccttctcaaatgtagaagtattggcaattctaatttaaaaattttaaatttttaattataggaaatttaagtagcaatagtttcaagagctaagaatcagatgcttttaaaacagaattttttttttttcccgtgagggaccatactgacaactccagtaaacataatacccacccaaatcccgaataaaatgctttatgtaacccgggaatagtaaaattataaaagggtattcctaaattataatatatatacataaggcaccattttaacggtcacatttaccagcagaataatgaaatcaaaaacaaatcctacatccaggggacaaacgataaaggctctttcatggtgtaaagagtccataccattcttggtggtgttctactcccatattttaaatttatgaccaagggagcctgagggccaagtc

SEQ ID NO: 614476 - DNA, 343 bp, Homo sapiens
  misc_feature (70)..(70): n is a, c, g, or t
  misc_feature (103)..(103): n is a, c, g, or t
  misc_feature (114)..(114): n is a, c, g, or t
  misc_feature (228)..(228): n is a, c, g, or t
aaaaaccccaatggaaaggtccccaaaaccttccctaaggcggtaaatagatatcctgacttgtgtccanaggttatagtagccccccttttatctgcagggnaatacattccnaagaaccccaagtggacgcttgaaacccatggatagtactgaaccctatggatactgttttttttccctatcccatacctacgataaaggtatgataaataatacactttaagncctggcacggtgctcatgcctgtaatcctagcactttgggaggccgaggcaggcggatcatgaggtaggagtttgagaccaccctggccaacatggtgaaaccccatctctacta

SEQ ID NO: 614477 - DNA, 315 bp, Homo sapiens
gcgtcgacccagtgtctatagtaggtctcctaatgtttctaagggccagacatggtggctcatgcctgtaatcccagcactttgggaggctgaggcaagccaatcgcttgagcccaggagtttgagacctgactgggcaacatggcgaaatcccacctctaccaaaaatacaaaaatcagctgggcatgatggggctgcatctgtagtcccagctgttcagaggctgaggtaggaggatcctgtgggtccagacattgaggcttcagtgagccatgattgcgcctctgcgctccagcccaggtgacagagcgaga

SEQ ID NO: 614478 - DNA, 438 bp, Homo sapiens
ctctttcccttcggcgtgccactgaagatcctggtgtcgccatggtccgccgcgctgcccgttgttaccggaattgtaagaacaagccgtacccaaagtctcacttatgccgaggagtccctgatgccaagattcacatttttgacctggagcggaaaaaggcataagtggatgactatccgctttgtggccacatggtgtcagatgaatataagcagctgtcctctgaagccctggaggatgcccgaatatgtgccaataagtacatggtagctgtggcaaagatggctatcatatccggtggcggctccaccccttgcacgtgatgcgcattaacaagatgttgaactgtgctggcgctgacaggcgtcagacaggcatgcgaggtgcctatgtgtcccagggcactagtgacagggttcacattggacgatatct

SEQ ID NO: 614479 - DNA, 296 bp, Homo sapiens
tcccctcccccctccaatttagccccccccctttcttttttgggtgggtgggtttgggaattcccccccctcccccccaagccccccctttttggggggggcctgtggctttttcctgttgggggttccccaaaggggggggggccccccccccgggcccttttttggcccatggggccgggtgaaccctttttggccccttcccccttgggtttttttcccttcccaaggggcggcccccctttccccccccccccccccccttttttcaataaaatttggggggtggggggcca

SEQ ID NO: 614480 - DNA, 115 bp, Homo sapiens
cgctgactctagaggatacacggcagcccacgcaaagacggttttattgaattagttgcatgcaggagcaattctgatcttcccatgagcagcagagtcgagtgttagagtgcag

SEQ ID NO: 614481 - DNA, 228 bp, Homo sapiens
tggtacctgtttgcagcctgtgaggcgggtggttcacaatggtcaagatcgagactgagggctgggcacgatggctcatgcctgaatcccagcactttgggagtccgaggtgggcagatcatgaggtcaggagttcgagaccagcctgaccaacatgatgaaaccccatctctactaaaaatacaaaaattagccgggcgtggtggcaggcgcctgtaatcccagcta

SEQ ID NO: 614482 - DNA, 398 bp, Homo sapiens
gagaaggagcacacgacctcgtatgtttgacacgtgcgaggagatacgcttccgggtggtggacgagagctttgttgaactgtccccacaggtccatgctcatgagatgccaccacttcagtgaggagctgcaaagaaggaggctccgtacacgcttgtgggatccatcagtgagccagtgctgggccttctctcctggtggaccagcaactagccctggtggctggacagttggaacctaaccagcctgcgggaaaggtggtatggcctgcctgtgacagcacaaacagcagctgacggcgatgctaaggagatacgtgtctcgagcttgacagtgaggcaaggccaggaggtgcccaccagattgcccctggtcctccaccatctaggccctgctc

SEQ ID NO: 614483 - DNA, 271 bp, Homo sapiens
  misc_feature (98)..(98): n is a, c, g, or t
gggcccagtcttttcccaagtccacacaggggaggggaaagcattgcttttgggtaaattatgtaaagcaaaatttttttaatcttgccccaaaaaanttttttattttgttttaatttagaaagaagagccttggggcccccccttcccccttttttgtcccccaacttaaaaggtaaaaagggttttggtttccctgggaggggggggaggaaaccagggtttccttgtaccttgatttgagaccagttgaaaaaaagggcccccctta

SEQ ID NO: 614484 - DNA, 127 bp, Homo sapiens
gcatagcataaacttaaaatttacagtcagaggttcaatacctcttcttaacaacatacccatggccaacctcctactacctcattgtacccattctaatcgcaatggaattcctaatgcttaccag

SEQ ID NO: 614485 - DNA, 104 bp, Homo sapiens
gcacagagcgagctcttgcagcctccccgcccctccggcacgcgctgcgaccccagagattcccccgcttgcgctctgccccgcacatggccgcacagggagga

SEQ ID NO: 614486 - DNA, 284 bp, Homo sapiens
  misc_feature (98)..(98): n is a, c, g, or t
  misc_feature (134)..(134): n is a, c, g, or t
tttttaacctttttttaaccccctaaaattaagctctttctacttgggcacctatcccccgcgggtttgggacccaatgggcgggagggcccagattncgggtttaaaaaattcccccttgggctccaaaattnccccttggggggaattttttaccttaagggggtcccccaaaaatttgcggttctttaacccagccctttgttaatccggtaaaaccagaaaacttgggggccttttttaaaaggttccaattgaatagtttaaaaggttttttaatgcta

SEQ ID NO: 614487 - DNA, 688 bp, Homo sapiens
ggacggagtgtatggatgagcatgattgtatgtactgtccgtctggcttcgtagaattgatattacatctgtccaggaggtactagggctctgaagtataactcagtactgtcttgagctgtacatgctcgaatcggcagcgattttacaagcaatattacaaggatggtcatgagctagcccaataatgagttacgatggtggattacttatgacgttgatgcagtgcaagggaatgtatatcgcagctcaacacttcgagacgctgtctttgatgctactgtatcagcactatgctatgtacgaatttatacgaccgcatgagctactgtgtaactaccatgatgaggcctagatgtaacctgtgcaatgatcagattctcaaagacctgctcgagacagattatcctaatatttccaagatacagagatgagagaaccttatagagcctgacttgtgatactgatgatcactacacgcacatcacgttgatgctacctcaatgagtagaataatatcagtacgacgtcaatacttctcggagacattgctcccgtacagcacattgctgtattgaatgacaatggactcttttaggaagtcactgaaagtgcctgattctttgctagtcttaatatgatcatacatgtgaacctactgcaagtcaggtctggtatagctatggct

SEQ ID NO: 614488 - DNA, 940 bp, Homo sapiens
  misc_feature (869)..(869): n is a, c, g, or t
  misc_feature (940)..(940): n is a, c, g, or t
accacccgtccgaagtaaacacacaacaaacaaaaccctataggggacttccctgtaatgctgcgctgaggaacgtggcacaagtgccatcgtaggggtacctcctgtttcccaaaacctctcaatgaaccctatgctgctactgactggacgcacctggaagggagctattcttggtggctataaaagtaaagaatgtgacccaaaacttgcggctgattttatggctaagaagttttcattggatgcattaataacccatgttttattttttgaaaaaaaaatgaaggatttgacctgcttcactctgggcaatagatccgcaccattctgatgttttgcgacaatacaaacgtcttcccttgcagctaacttaagactcctataccctacatagatatggaagaaaaactggcaactaacattaatccacgtcaccacaatcgtattcaatatattacattcggcggacttccaaagaactgcacaaaacgtacatctatttctaacggaattgtccaaatatcaatagaaatataaataatgtactcacactccacacaagtaaccacaagattctcgtggtctcaaactcggccactctcgcccgaccacgttattccagattcaccacagaaccgattgttatataatatcatgatacctcacgcgctcgtcgacttgtcttgctgtctcctgctctggtccgtcgatgcctgtgctcgtttgcccttgccgcactccgccctgtatccccttccgcaatgttcagcgcatagacatcatcctcgtatgtgattctatctctgacatatgcccggattccaccccgcttacacgatacacatttctccggctcctccatcctncacattgtctgtttatctcactgtcaccctatcttccttctctcctcgcgcaacatgctacttactcatan

SEQ ID NO: 614489 - DNA, 1836 bp, Homo sapiens
  misc_feature (1527)..(1527): n is a, c, g, or t
  misc_feature (1807)..(1807): n is a, c, g, or t
ggccctgtcgcggcccacaaaggtaagatcgcttaagaacatccggaaggactgcaatgccacatcattatgatccggagggaagtcgggtctggtccaaaggaacacgggcgagatcgtacggtgccgcctaagaatggcgcgaggactggtaggccagaagaatatgacgccacctttaatggtctggatatactgatgcatacctctgcaggaatcgctgagagcatgggctgatggagacacgactaatgacatggatcgcatgtgtatgtccataggtgtagtcgccgtatctcccagttagggagtcctagtaacatgattcttatccgcgatggaatttgacacgtttcactgtgagctccgcggtcgcatttgatagactcgtgggtaccgcctcttgatgggtccagacaacgcaacgataccagaggaagtcatttgagagaaggccctgtacgcgaagcatacatccggagactagcccagtgcagtatgccattcgacaccacatgcgagcaacaagtcgatgataaccaagggtagatagggtagatgcgcggcatagagttaccactcaatctaggaatctgcgacggaaccgttgtgatgagactcttctccattagagggtgtcccctggagttaggaatgtaccccgtggccacggtatcaggctccttgcagtgggcaattgacagaattgcacaaggcgaggaaactccgggaaattttagcacagagacattgattacccaaggtgcgcccgcgtgacctaatttggggcgcggtccggaaaaagcgatagcaagggtttgggggattaccaaccggaaccccaattcgctttcccacacaattgacaaaactaactcttgggtgcgatgggagccgttgccacctattctccttttcccttggggcagaatctccttgggaacaccttaacaccaaacgctaattcacctcatcctgttgcctgaggccaaagaagaggccttatctcaatccggattccaccataggtcatttggcactaccccccccgggcaccacaataattcgagaatccctgccaagggtacgcttccacaaacgcgggttatcagtatcggttcaaagtttgggttcattaacacaaaccgcacgaacggaaaagacacctagatagctccaagcgcaccggtgtgtgtagtttgcacactttttccgttgtgtggcacgcccttatatcgaagggaacaggcaaagcgatccggtggtaccccctttagtcgccacacgtggagtggtacattgtgctcactttgatgtcactcgtcgtgtcaggggtatccctctatggctgcattggggggtgccacccggggggaaagtggtgatagagaccaccaccccacaaccgaaagaaaatttatcgccgcaaaggaagcgccactgtttagccccagtccttgaacaacccgagtggtgtgtgtggaccacccataggggtggggggaacacattcctccccaggtcgangtggagacaaaaaccccgccaatgatgtggaggaaacccccgaacagcagcccgcggtgtgggatattgggtggaggcaacgaccacacgccgcccagggacaggagaacacacgagaagcgacggtcagcaatcgacacgacagctagcgatcacgaacgtgcgaacgcgtccagctcgaccatagggagaagacagtcgcagaccaggggtgacgaagacagatccgcgattggagatgtcgatgcggaaacatcgacagaaggtagaacgcagcganaacacggagaacaggccggaagacagaac

SEQ ID NO: 614490 - DNA, 867 bp, Homo sapiens
  misc_feature (38)..(38): n is a, c, g, or t
  misc_feature (68)..(68): n is a, c, g, or t
  misc_feature (353)..(353): n is a, c, g, or t
  misc_feature (360)..(360): n is a, c, g, or t
  misc_feature (373)..(373): n is a, c, g, or t
  misc_feature (378)..(379): n is a, c, g, or t
  misc_feature (400)..(400): n is a, c, g, or t
  misc_feature (421)..(422): n is a, c, g, or t
  misc_feature (433)..(433): n is a, c, g, or t
  misc_feature (440)..(440): n is a, c, g, or t
  misc_feature (448)..(448): n is a, c, g, or t
  misc_feature (459)..(460): n is a, c, g, or t
  misc_feature (467)..(467): n is a, c, g, or t
  misc_feature (767)..(767): n is a, c, g, or t
  misc_feature (829)..(829): n is a, c, g, or t
tctggcaccatttttacaacttcctcatcacccaacgntgaggcatacgctgaggagtttgcaacganacgtggggcgtaacaaaggcagcagagaaacaaatgaaggacaaacaggacgaggagcagaggcttaaggaggaggaagaagacaagaaacgcaaagaggaggaggaggcagaggacaaggaggatgatgaggacaaagatgaggatgaggaggatgaggaggacaaggaggaagatgaggaggaagatgtccccggccaggccaaggacgagctgtagagaggcctgcctccagggctggactgaggcctgagcgctcctgccgcagagcttgccgcgccaaanaatgtcnctgtgaaaataanaactnncatttttttccaggctggttnggatttggggtggagtgtttnntttttttcccnttttttntttttttnttttttttttnnttttttnttttttttttttttttaaagtggtattttatctttgattctccttcagccctcacccctggttctcatctttcttgatcaacatcttttcttgcctctgtccccttctttcattttttagctcccctccaacctggggggcagtggtgtggaaaagccacaggcctgagatttcatttgctctccttcctggagcccagaggagggcagcagaagggggtggtgtttccaaccccccagcactgaggaagaacggggcttttttcatttcacccctccctttttcccctgcccccaggantgggccacttttgggtggggcagtgggtcccagattggctccccctgagaatgtaagaactncaaacaaaatttttattaaattaaattttgtgtcccca

SEQ ID NO: 614491 - DNA, 304 bp, Homo sapiens
agagttcgagaccagcctgaacaacataggaaaaccgtgtctctaaaaaaacaaattttaaatcagctgggtgtggtggtgcatgcctgtggtcccaggagaggctgaggtgtgagatgggaagattacttgagcccaggaactcaaagctgcagtgagccatgattgtactactacactccagcctgagcgacaaagcaagaccctgaaaaaaaggaaggaagttagaaaggaagccagcttggaaggaaggaaggaaggaattctaagcatctattgaccttttttgggaggggagtatgtg

SEQ ID NO: 614492 - DNA, 194 bp, Homo sapiens
acagaggtatccaggctgaccccagtgaaaagcgagatctcgtaggccttctcgatgcagccagagatctcatccctgatagtgtcgagcaggatgtcaatgaagaaggtgtaactactcggcggggatgttacccttgcgccaggaacacttatgttgtagctgccctccatacaggtatttgctacagcgct

SEQ ID NO: 614493 - DNA, 870 bp, Homo sapiens
  misc_feature (38)..(38): n is a, c, g, or t
  misc_feature (68)..(68): n is a, c, g, or t
  misc_feature (312)..(312): n is a, c, g, or t
  misc_feature (319)..(319): n is a, c, g, or t
  misc_feature (414)..(414): n is a, c, g, or t
  misc_feature (418)..(426): n is a, c, g, or t
  misc_feature (443)..(443): n is a, c, g, or t
  misc_feature (451)..(451): n is a, c, g, or t
  misc_feature (462)..(463): n is a, c, g, or t
  misc_feature (470)..(470): n is a, c, g, or t
  misc_feature (770)..(770): n is a, c, g, or t
  misc_feature (832)..(832): n is a, c, g, or t
tctggcaccatttttacaacttcctcatcacccaacgntgaggcatacgctgaggagtttgcaacganacgtggggcgtaacaaaggcagcagagaaacaaatgaaggacaaacaggacgaggagcagaggcttaaggaggaggaagaagacaagaaacgcaaagaggaggaggaggcagaggacaaggaggatgatgaggacaaagatgaggatgaggaggatgaggaggacaaggaggaagatgaggaggaagatgtccccggccaggccaaggacgagctgtagagaggcctgcctccagggctaaaanaaagccnaagagaatcataaaaaaaaaaaaaaaaaaaaaaaaaaaaaaaaaaaaaaaaaaaaaaaaaaaaaaaaaaaaaaaaaaaaaaaaaaaaaaaaaaanaaannnnnnnnnttttttttttttttttntttttttnttttttttttnnttttttnttttttttttttttttaaagtggtattttatctttgattctccttcagccctcacccctggttctcatctttcttgatcaacatcttttcttgcctctgtccccttctttcattttttagctcccctccaacctggggggcagtggtgtggaaaagccacaggcctgagatttcatttgctctccttcctggagcccagaggagggcagcagaagggggtggtgtttccaaccccccagcactgaggaagaacggggcttttttcatttcacccctccctttttcccctgcccccaggantgggccacttttgggtggggcagtgggtcccagattggctccccctgagaatgtaagaactncaaacaaaatttttattaaattaaattttgtgtcccca

SEQ ID NO: 614494 - DNA, 757 bp, Homo sapiens
cgctgtggctcactcctgtaatcccagcactttgggaggccgaggcgggtggatcacgaggtcagcagttcaagaccagtctgaccaacatggtgaaaccccgtctctactaaaaatacaaaaattagctgggtatggtggcaggtgcctgtaatcccagctactcaggaggctgaggcagagaactgcttgaacctgggaggcggaggttgcagtgagccgagattgcgccactgcactccagcctgggcgacagagcgagactccatctcaaataaataaataaataaataaataactaataaataagtaaaatggctaaaatggaccgggcatggtgactcatacttgtaatcccagcactatgagaggccgaggtgggcagatcacctgaggtcaggagtttgagaccagcctggcaacatggtgaaaccccgtctctactaaagatctacccacttagctgggagtggtggtgggtgcctgtaaacccagctactcaagaggctgaggcaggagaattgcttgaacccaggaggccagaggttgcagtgaggccgagactgcaccattgcactccagcattgagttggcaagggcgaaaaaagtcctgtcccaaagaatatatccacataataagtcaatagctttttgcggccaatgtttccacccatttataaaaccctccttttcctttatttccagacaaactctccgcctttaccaccactttttgagatgacatcctgctcccatg

SEQ ID NO: 614495 - DNA, 202 bp, Homo sapiens
caacggatgtgccgctccgagcacaacgagttcgttctagtccacgacggccgccaggtgcagctactgaggtgcgagcgaagcgagccgcgaaggactccatacgtgtctcacccggcccttcgtggctcgtcgctaacgctcctcgcacctcagggaccagttgggtctgtattcggatcagggagcggcacatgcgttg

SEQ ID NO: 614496 - DNA, 862 bp, Homo sapiens
  misc_feature (38)..(38): n is a, c, g, or t
  misc_feature (68)..(68): n is a, c, g, or t
  misc_feature (353)..(353): n is a, c, g, or t
  misc_feature (360)..(360): n is a, c, g, or t
  misc_feature (373)..(373): n is a, c, g, or t
  misc_feature (378)..(379): n is a, c, g, or t
  misc_feature (389)..(390): n is a, c, g, or t
  misc_feature (394)..(394): n is a, c, g, or t
  misc_feature (397)..(397): n is a, c, g, or t
  misc_feature (402)..(402): n is a, c, g, or t
  misc_feature (419)..(419): n is a, c, g, or t
  misc_feature (432)..(432): n is a, c, g, or t
  misc_feature (436)..(437): n is a, c, g, or t
  misc_feature (762)..(762): n is a, c, g, or t
  misc_feature (824)..(824): n is a, c, g, or t
tctggcaccatttttacaacttcctcatcacccaacgntgaggcatacgctgaggagtttgcaacganacgtggggcgtaacaaaggcagcagagaaacaaatgaaggacaaacaggacgaggagcagaggcttaaggaggaggaagaagacaagaaacgcaaagaggaggaggaggcagaggacaaggaggatgatgaggacaaagatgaggatgaggaggatgaggaggacaaggaggaagatgaggaggaagatgtccccggccaggccaaggacgagctgtagagaggcctgcctccagggctggactgaggcctgagcgctcctgccgcagagcttgccgcgccaaanaatgtcnctgtgaaaataanaactnncattttttannaaanaanccccnaattgggaaaaaaaaangttttcccccccncctnnactctcccccaccccccccccgcccttttttttttttttttaaagtggtattttatctttgattctccttcagccctcacccctggttctcatctttcttgatcaacatcttttcttgcctctgtccccttctttcattttttagctcccctccaacctggggggcagtggtgtggaaaagccacaggcctgagatttcatttgctctccttcctggagcccagaggagggcagcagaagggggtggtgtttccaaccccccagcactgaggaagaacggggcttttttcatttcacccctccctttttcccctgcccccaggantgggccacttttgggtggggcagtgggtcccagattggctccccctgagaatgtaagaactncaaacaaaatttttattaaattaaattttgtgtcccca

SEQ ID NO: 614497 - DNA, 1324 bp, Homo sapiens
  misc_feature (38)..(38): n is a, c, g, or t
  misc_feature (68)..(68): n is a, c, g, or t
  misc_feature (353)..(353): n is a, c, g, or t
  misc_feature (360)..(360): n is a, c, g, or t
  misc_feature (373)..(373): n is a, c, g, or t
  misc_feature (378)..(379): n is a, c, g, or t
  misc_feature (400)..(400): n is a, c, g, or t
  misc_feature (421)..(422): n is a, c, g, or t
  misc_feature (433)..(433): n is a, c, g, or t
  misc_feature (440)..(440): n is a, c, g, or t
  misc_feature (448)..(448): n is a, c, g, or t
  misc_feature (459)..(460): n is a, c, g, or t
  misc_feature (467)..(467): n is a, c, g, or t
  misc_feature (767)..(767): n is a, c, g, or t
  misc_feature (829)..(829): n is a, c, g, or t
  misc_feature (1324)..(1324): n is a, c, g, or t
tctggcaccatttttacaacttcctcatcacccaacgntgaggcatacgctgaggagtttgcaacganacgtggggcgtaacaaaggcagcagagaaacaaatgaaggacaaacaggacgaggagcagaggcttaaggaggaggaagaagacaagaaacgcaaagaggaggaggaggcagaggacaaggaggatgatgaggacaaagatgaggatgaggaggatgaggaggacaaggaggaagatgaggaggaagatgtccccggccaggccaaggacgagctgtagagaggcctgcctccagggctggactgaggcctgagcgctcctgccgcagagcttgccgcgccaaanaatgtcnctgtgaaaataanaactnncatttttttccaggctggttnggatttggggtggagtgtttnntttttttcccnttttttntttttttnttttttttttnnttttttnttttttttttttttttaaagtggtattttatctttgattctccttcagccctcacccctggttctcatctttcttgatcaacatcttttcttgcctctgtccccttctttcattttttagctcccctccaacctggggggcagtggtgtggaaaagccacaggcctgagatttcatttgctctccttcctggagcccagaggagggcagcagaagggggtggtgtttccaaccccccagcactgaggaagaacggggcttttttcatttcacccctccctttttcccctgcccccaggantgggccacttttgggtggggcagtgggtcccagattggctccccctgagaatgtaagaactncaaacaaaatttttattaaattaaattttgtgtccccaaaaaaaaaaaaaaaaaaaaaaaaaaaaaaaaaaaaaaaaaaaaaacaaaaaaaaaaaaaaaaaaaaaacacacaaaacacaacaaaaaaaaacaaaaacaacaaaaaaaaaaaaaaatatatgggcgaccccccccaatgccatttttataaacaaagatggggagggggcggggacgaacgcaagagaagaggacgcggagaaagaagaagaataagaacgaaggcgcagggagagagaaaatgggggggggagcaacactaaaaaaaaaaaagcacagagggggggaacaaaaaaagaaagagaagagataaaaaaaaaaaaccaaataaagcgataagaagtaaaacgaaccaacacaacagatgagaggaattaccaacacaagagacaagcaacacaacaggcacaccacacataaaaataacaaacacccccccgaggagacggggagaan

SEQ ID NO: 614498 - DNA, 158 bp, Homo sapiens
gtctgtttgacactaatacttaccgagtcagactttgtgttcatttcatttcagggttttggctgcctgtggcttcccaggtggcctggaggtgggcaagggaagtaacagcacagtgttgtccaaggatggttttgggacttagaggtccatggtgg

SEQ ID NO: 614499 - DNA, 106 bp, Homo sapiens
attttaaagcctccctgtgctcctctgtgctgtccacctcctctgtgctgtccacctcctctgtgctggccactcctctgtgctgtccactcctctgtgctgtcca

SEQ ID NO: 614500 - DNA, 109 bp, Homo sapiens
ctttttaaaattttttttaaatttttttccccccgggggccaaaattggggggggggggttttaaggggtcccggcctttgttttttttaaaaaaaaagaaattaccca

SEQ ID NO: 614501 - DNA, 551 bp, Homo sapiens
  misc_feature (26)..(26): n is a, c, g, or t
tctgctcatatttgaagcccattgtntttttaagcttgctggatgaataaaggaaagaaggtttatatacactaataatagaaatgttttgggatggttcatgatttcgaaaagcttcagagaaaataaagatgcttaatgttagagtacaaaacatgttttccctgcagtctcacgaactgtgaacaaaaactgaagtgaaaactcatagtgcataactcgtcaatactcctgtgatcgtataaccatcagcaagaaaacaaatttgattgagcccccatccagtcctctttgcgtggaatcagacctcttttgcagtggaaaggagcaggtaaaacaaataagcagaggcacaaaatcatcaccaaaccagactcactgaaatgccaacactggcatgtgcgcagacattttctattctggacttacttctaaacagcaatgccaacaagcatgagaggtgaaaaaatgtggataaatacatgtttggtttattgaactaggtcttatcatatccaaattaaaaacaaaaggcacatctcaatttcaaa

SEQ ID NO: 614502 - DNA, 3173 bp, Homo sapiens
  misc_feature (26)..(26): n is a, c, g, or t
tctgctcatatttgaagcccattgtntttttaagcttgctggatgaataaaggaaagaaggtttatatacactaataatagaaatgttttgggatggttcatgatttcgaaaagcttcagagaaaataaagatgcttaatgttagagtacaaaacatgttttccctgcagtctcacgaactgtgaacaaaaactgaagtgaaaactcatagtgcataactcgtcaatactcctgtgatcgtataaccatcagcaagaaaacaaatttgattgagcccccatccagtcctctttgcgtggaatcagacctcttttgcagtggaaaggagcagtgctgcagctctgatggttcaactctgccaaaagatggatctttaatgattagcactacacactgaccaactcagaagaaggagccacaccacctgtgactccagctctgacttctgctctggaccagtgtttccataacagggacttcaaaatcactgtgatttgaagcctttttgaacatgaagatgttactcctgctgcattgccttggggtgtttctgtcctgttctggacacatccaggatgagcacccccaatatcacagccctccggatgtggtgattcctgtgaggataactggcaccaccagaggcatgacacctccaggctggctctcctatatcctgccctttggaggccagaaacacattatccacataaaggtcaagaagcttttgttttccaaacacctccctgtgttcacctacacagaccagggtgctatccttgaggaccagccatttgtccagaataactgctactatcatggttatgtggaaggggacccagaatccctggtttccctcagtacctgttttgggggttttcaaggaatattacagataaatgactttgcttatgaaatcaagcccctagcattttctaccacgtttgaacatctggtatacaagatggacagtgaggagaaacaattttcaaccatgagatccggatttatgcaaaatgaaataacatgccgaatggaatttgaagaaattgataattccactcagaagcaaagttcttatgtgggctggtggatccattttaggattgttgaaattgtagtcgtcattgataattatctgtacattcgttatgaaaggaacgactcaaagttgctggaggatctatatgttattgttaatatagtggattccattttggatgtcattggtgttaaggtgttattatttggtttggagatctggaccaataaaaacctcattgtagtagatgatgtaaggaaatctgtgcacctgtattgcaagtggaagtcggagaacattacgccccggatgcaacatgacacctcacatcttttcacaactctaggattaagagggttaagtggcataggagcttttagaggaatgtgtacaccacaccgtagttgtgcaattgttactttcatgaacaaaactttgggcactttttcaattgcagtggctcatcatctaggtcataatttgggcatgaaccatgatgaggatacatgtcgttgttcacaacctagatgcataatgcatgaaggcaacccaccaataactaaatttagcaattgtagttatggtgatttttgggaatatactgtagagaggacaaagtgtttgcttgaaacagtacacacaaaggacatctttaatgtgaagcgctgtgggaatggtgttgttgaagaaggagaagagtgtgactgtggacctttaaagcattgtgcaaaagatccctgctgtctgtcaaattgcactctgactgatggttctacttgtgcttttgggctttgttgcaaagactgcaagttcctaccatcagggaaagtgtgtagaaaggaggtcaatgaatgtgatcttccagagtggtgcaatggtacttcccataagtgcccagatgacttttatgtggaagatggaattccctgtaaggagaggggctactgctatgaaaagagctgtcatgaccgcaatgaacagtgtaggaggatttttggtgcaggcgcaaatactgcaagtgagacttgctacaaagaattgaacaccttaggtgaccgtgttggtcactgtggtatcaaaaatgctacatatataaagtgtaatatctcagatgtccagtgtggaagaattcagtgtgagaatgtgacagaaattcccaatatgagtgatcatactactgtgcattgggctcgcttcaatgacataatgtgctggagtactgattaccatttggggatgaagggacctgatattggtgaagtgaaagatggaacagagtgtgggatagatcatatatgcatccacaggcactgtgtccatataaccatcttgaatagtaattgctcacctgcattttgtaacaagaggggcatctgcaacaataaacatcactgccattgcaattatctgtgggaccctcccaactgcctgataaaaggctatggaggtagtgttgacagtggcccaccccctaagagaaagaagaaaaagaagttctgttatctgtgtatattgttgcttattgttttgtttattttattatgttgtctttatcgactttgtaaaaaaagtaaaccaataaaaaagcagcaagatgttcaaactccatctgcaaaagaagaggaaaaaattcagcgtcgacctcatgagttacctccccagagtcaaccttgggtgatgccttcccagagtcaacctcctgtgacaccttcccagagtcatcctcaggtgatgccttcccagagtcaacctcctgtgacgccctcccagagtcatcctcagttgacgccttcccagagtcaacctcctgtgatgccttcccagagtcatcctcagttgacgccttcccagagtcaacctcctgtgacaccctcccagaggcaacctcagttgatgccttcccagagtcaacctcctgtgacgccctcctagagccagcctcagttgatgccttcccagagtcaacctcctgtgacgccctcccagagccaacctcgggtgacaccctcccagagtcaacctcatgtgacaccttaccggagtaaaagtggtaaacaaaagcaatcagtaccaattccaaaaactgtatccagaaaaggtacattaaaaatatatcttataaatgttaaaa

SEQ ID NO: 614503 - DNA, 3183 bp, Homo sapiens
agcggaataaaagctctcctgatggcctgttcctgcacatttcctgaggacgccctcgatcacaagcaggttagagtacaaaacatgttttccctgcagtctcacgaactgtgaacaaaaactgaagtgaaaactcatagtgcataactcgtcaatactcctgtgatcgtataaccatcagcaagaaaacaaatttgattgagcccccatccagtcctctttgcgtggaatcagacctcttttgcagtggaaaggagcagagaatgtgactttcctgaacaacaggagcaagaatcaatgccagattctcttctctaaaaataatcaatttgttactacagtgctgcagctctgatggttcaactctgccaaaagatggatctttaatgattagcactacacactgaccaactcagaagaaggagccacaccacctgtgactccagctctgacttctgctctggaccagtgtttccataacagggacttcaaaatcactgtgatttgaagcctttttgaacatgaagatgttactcctgctgcattgccttggggtgtttctgtcctgttctggacacatccaggatgagcacccccaatatcacagccctccggatgtggtgattcctgtgaggataactggcaccaccagaggcatgacacctccaggctggctctcctatatcctgccctttggaggccagaaacacattatccacataaaggtcaagaagcttttgttttccaaacacctccctgtgttcacctacacagaccagggtgctatccttgaggaccagccatttgtccagaataactgctactatcatggttatgtggaaggggacccagaatccctggtttccctcagtacctgttttgggggttttcaaggaatattacagataaatgactttgcttatgaaatcaagcccctagcattttctaccacgtttgaacatctggtatacaagatggacagtgaggagaaacaattttcaaccatgagatccggatttatgcaaaatgaaataacatgccgaatggaatttgaagaaattgataattccactcagaagcaaagttcttatgtgggctggtggatccattttaggattgttgaaattgtagtcgtcattgataattatctgtacattcgttatgaaaggaacgactcaaagttgctggaggatctatatgttattgttaatatagtggattccattttggatgtcattggtgttaaggtgttattatttggtttggagatctggaccaataaaaacctcattgtagtagatgatgtaaggaaatctgtgcacctgtattgcaagtggaagtcggagaacattacgccccggatgcaacatgacacctcacatcttttcacaactctaggattaagagggttaagtggcataggagcttttagaggaatgtgtacaccacaccgtagttgtgcaattgttactttcatgaacaaaactttgggcactttttcaattgcagtggctcatcatctaggtcataatttgggcatgaaccatgatgaggatacatgtcgttgttcacaacctagatgcataatgcatgaaggcaacccaccaataactaaatttagcaattgtagttatggtgatttttgggaatatactgtagagaggacaaagtgtttgcttgaaacagtacacacaaaggacatctttaatgtgaagcgctgtgggaatggtgttgttgaagaaggagaagagtgtgactgtggacctttaaagcattgtgcaaaagatccctgctgtctgtcaaattgcactctgactgatggttctacttgtgcttttgggctttgttgcaaagactgcaagttcctaccatcagggaaagtgtgtagaaaggaggtcaatgaatgtgatcttccagagtggtgcaatggtacttcccataagtgcccagatgacttttatgtggaagatggaattccctgtaaggagaggggctactgctatgaaaagagctgtcatgaccgcaatgaacagtgtaggaggatttttggtgcaggcgcaaatactgcaagtgagacttgctacaaagaattgaacaccttaggtgaccgtgttggtcactgtggtatcaaaaatgctacatatataaagtgtaatatctcagatgtccagtgtggaagaattcagtgtgagaatgtgacagaaattcccaatatgagtgatcatactactgtgcattgggctcgcttcaatgacataatgtgctggagtactgattaccatttggggatgaagggacctgatattggtgaagtgaaagatggaacagagtgtgggatagatcatatatgcatccacaggcactgtgtccatataaccatcttgaatagtaattgctcacctgcattttgtaacaagaggggcatctgcaacaataaacatcactgccattgcaattatctgtgggaccctcccaactgcctgataaaaggctatggaggtagtgttgacagtggcccaccccctaagagaaagaagaaaaagaagttctgttatctgtgtatattgttgcttattgttttgtttattttattatgttgtctttatcgactttgtaaaaaaagtaaaccaataaaaaagcagcaagatgttcaaactccatctgcaaaagaagaggaaaaaattcagcgtcgacctcatgagttacctccccagagtcaaccttgggtgatgccttcccagagtcaacctcctgtgacaccttcccagagtcatcctcaggtgatgccttcccagagtcaacctcctgtgacgccctcccagagtcatcctcagttgacgccttcccagagtcaacctcctgtgatgccttcccagagtcatcctcagttgacgccttcccagagtcaacctcctgtgacaccctcccagaggcaacctcagttgatgccttcccagagtcaacctcctgtgacgccctcctagagccagcctcagttgatgccttcccagagtcaacctcctgtgacgccctcccagagccaacctcgggtgacaccctcccagagtcaacctcatgtgacaccttaccggagtaaaagtggtaaacaaaagcaatcagtaccaattccaaaaactgtatccagaaaaggtacattaaaaatatatcttataaatgttaaaa

SEQ ID NO: 614504 - DNA, 191 bp, Homo sapiens
gtaccacccaagtattgactcacccatcaacaacccgcctaatgtaatttccgtacattaactgccaagccaaccatgaaatattgtacagtacccataaataacttgaaccacctcgtaagtaacataaaaaacccccaattccacatcaaaaacccccctcccccatagcttaccagagcagagtacca

SEQ ID NO: 614505 - DNA, 2814 bp, Homo sapiens
  misc_feature (2756)..(2756): n is a, c, g, or t
agcggaataaaagctctcctgatggcctgttcctgcacatttcctgaggacgccctcgatcacaagcaggttagagtacaaaacatgttttccctgcagtctcacgaactgtgaacaaaaactgaagtgaaaactcatagtgcataactcgtcaatactcctgtgatcgtataaccatcagcaagaaaacaaatttgattgagcccccatccagtcctctttgcgtggaatcagacctcttttgcagtggaaaggagcagagaatgtgactttcctgaacaacaggagcaagaatcaatgccagattctcttctctaaaaataatcaatttgttactacagtgctgcagctctgatggttcaactctgccaaaagatggatctttaatgattagcactacacactgaccaactcagaagaaggagccacaccacctgtgactccagctctgacttctgctctggaccagtgtttccataacagggacttcaaaatcactgtgatttgaagcctttttgaacatgaagatgttactcctgctgcattgccttggggtgtttctgtcctgttctggacacatccaggatgagcacccccaatatcacagccctccggatgtggtgattcctgtgaggataactggcaccaccagaggcatgacacctccaggctggctctcctatatcctgccctttggaggccagaaacacattatccacataaaggtcaagaagcttttgttttccaaacacctccctgtgttcacctacacagaccagggtgctatccttgaggaccagccatttgtccagaataactgctactatcatggttatgtggaaggggacccagaatccctggtttccctcagtacctgttttgggggttttcaaggaatattacagataaatgactttgcttatgaaatcaagcccctagcattttctaccacgtttgaacatctggtatacaagatggacagtgaggagaaacaattttcaaccatgagatccggatttatgcaaaatgaaataacatgccgaatggaatttgaagaaattgataattccactcagaagcaaagttcttatgtgggctggtggatccattttaggattgttgaaattgtagtcgtcattgataattatctgtacattcgttatgaaaggaacgactcaaagttgctggaggatctatatgttattgttaatatagtggattccattttggatgtcattggtgttaaggtgttattatttggtttggagatctggaccaataaaaacctcattgtagtagatgatgtaaggaaatctgtgcacctgtattgcaagtggaagtcggagaacattacgccccggatgcaacatgacacctcacatcttttcacaactctaggattaagagggttaagtggcataggagcttttagaggaatgtgtacaccacaccgtagttgtgcaattgttactttcatgaacaaaactttgggcactttttcaattgcagtggctcatcatctaggtcataatttgggcatgaaccatgatgaggatacatgtcgttgttcacaacctagatgcataatgcatgaaggcaacccaccaataactaaatttagcaattgtagttatggtgatttttgggaatatactgtagagaggacaaagtgtttgcttgaaacagtacacacaaaggacatctttaatgtgaagcgctgtgggaatggtgttgttgaagaaggagaagagtgtgactgtggacctttaaagcattgtgcaaaagatccctgctgtctgtcaaattgcactctgactgatggttctacttgtgcttttgggctttgttgcaaagactgcaagttcctaccatcagggaaagtgtgtagaaaggaggtcaatgaatgtgatcttccagagtggtgcaatggtacttcccataagtgcccagatgacttttatgtggaagatggaattccctgtaaggagaggggctactgctatgaaaagagctgtcatgaccgcaatgaacagtgtaggaggatttttggtgcaggcgcaaatactgcaagtgagacttgctacaaagaattgaacaccttaggtgaccgtgttggtcactgtggtatcaaaaatgctacatatataaagtgtaatatctcagatgtccagtgtggaagaattcagtgtgagaatgtgacagaaattcccaatatgagtgatcatactactgtgcattgggctcgcttcaatgacataatgtgctggagtactgattaccatttggggatgaagggacctgatattggtgaagtgaaagatggaacagagtgtgggatagatcatatatgcatccacaggcactgtgtccatataaccatcttgaatagtaattgctcacctgcattttgtaacaagaggggcatctgcaacaataaacatcactgccattgcaattatctgtgggaccctcccaactgcctgataaaaggctatggaggtagtgttgacagtggcccaccccctaagagaaagaagaaaaagaagttctgttatctgtgtatattgttgcttattgttttgtttattttattatgttgtctttatcgactttgtaaaaaaagtaaaccaataaaaaagcagcaagatgttcaaactccatctgcaaaagaagaggaaaaaattcagcgtcgacctcatgagttacctccccagagtcaaccttgggtgatgccttcccagagtcaacctcctgtngaccttcgaatatgtgaggatggtggagaggagacggtgtacaccctcccaaatcaac

SEQ ID NO: 614506 - DNA, 848 bp, Homo sapiens
gccccgggcacatgtgcccaggcctgggtggaggactggtccagcctccctgagctgcaggatgactccagctccttggggtcctgactcagagctcagctgggcctggcccatatctgccagtgccgacctgctatggattcattcggtgtggcatgctcagcagagccagtgccgggccacccacctgcagacctacatccgccaacgggagatgaagtggtgtggagatgacctcgcactgggagaaaaccatgtcccggctggtacaagaatggtaaagatgcatgtgcctggaaaggcatcccgtctgccctgacgcgccctgatgctggaccctgttgtgtggggcccatgtgtgccagaagaacagacctggcacctatcagtgagctggcagagtgcccctggagacccacagtggatggagaccattgggcagtggacctgcacctgtcaattccctctgcactgagatgttatgtgtcgcctcagtggccacagggcagcacgggcgctcctgcaggtgctcaatggcctacaccctgtatcgacctggacgcagggctactgccaggcccagtgtgccccgtggactgcttgtgctgctccatgcacacttgcccccaagaggacggccttcatgcgatgccatgggtgcagaagtcttgatgaatgactacactacccctattgggtaacttaacgtgtgcacccccagcaattgagaaatgccatgtggcaaaggcatgggacacgcccgaagggcctgcttccaaagaggacccatggcgatgagagaggacgtgaattggcattcctagcaccagtagggacaagaggcgact

SEQ ID NO: 614507 - DNA, 530 bp, Homo sapiens
ggctaacgatgcagtctcgagcacgtatcccgtctcattacagcaaagaagtcacgtatacatacccagctacgttattaaattatctcattaattctaataatttttaaaaagacttttaggttaggccaggcatggtggctcactcctctgtaatctcagcagtttaggaggccgaggcaggtggatcacctgaggtcaggagtttgagacgagtctggccaacatggtgaaaccctgtctctactaaaaatacaaaaaaattagctgggtgtagcagcgtgcacctgtaatcccggctacttggaaggctaaggcaggagaatcgcttgagcccaggaggcagaggtgaaaccccatctctactaaaatacaaaaaaattagctgggtgtagcagcgtgcacctgtaatcccggctacttggaaggctaaggcaggagaatcgcttgagcccaggaggcggaggttgccgtgagccgagattgctccattgcactctagcctgggcaacagagcaagactccgtctc

SEQ ID NO: 614508 - DNA, 168 bp, Homo sapiens
ccccccttttgggggtgtggggggggggggggggggccccgggggtttttttttcccccccccccttttttttcccggggggggggggtttgggggcaaaatcccccccctggttccccccgggggggggggccccccccgccccttttttttccccccccccttaga

SEQ ID NO: 614509 - DNA, 221 bp, Homo sapiens
ggcgcgagctgactcttgaggatcccataaatctggaaatcgcagttgtcccgtgtcatcgaagagagtgcgtccgtatagggcctggaccctgattcttacttgtgtgacttggctagagttgggagttcccccaaagataaacgtgtcccctattttaccaggaaccaaatcctcgaacacaggcgaaagctgacgctggtcttatgtgctggcaaaag

SEQ ID NO: 614510 - DNA, 286 bp, Homo sapiens
taaggcagggtttcactcctttctcccaaactggagtccaggggtatgaggagggctaattgcaccctaaacttcctggactcaggcgattttcccactgcagcctcccaaatagctgggactataggtgtatggcccaccatgctggggaaaactttttctttttggtattttaagaaaaaacagggtttcaccatgttgcccaagctggtcttaactccggggttcaagggttctgcccaccttgaccccccaaagtgctaggctcacactgcacccggcctga

SEQ ID NO: 614511 - DNA, 561 bp, Homo sapiens
  misc_feature (55)..(55): n is a, c, g, or t
  misc_feature (153)..(153): n is a, c, g, or t
  misc_feature (532)..(532): n is a, c, g, or t
atagatcttagaaattaaatttttaagagagctaatggtaagtgaagaattttanatttaattttccatgatatagcacagcatactttttttttgcagaatcttctattttaaagggtgaatattcaaggttgcaaagtaatatgacctctnttgattcaatatttggaatactatgtcttttctatattgataggtacaattcagaaaaatttctcactctttatataattattttaataactgaagtttagtctacagtttttattcttagtcacctaactagccaacttcttattttctatggaaaacttttggagataatggcagcttttggattaaaacgttttctgttattttgcatgcaaacttatttactgtgttaacagagtagttagtcatgagaccataagaaacacctctttttcagtgtctttcattccattactgtctgcaataaataaatgtgtatttgctctgtaaaacattatgtttggaagtatatatacattgtcaaatgcttaattttagntcattaaagttttacctcacagagttaaa

SEQ ID NO: 614512 - DNA, 962 bp, Homo sapiens
ggtgtgtgtgtgagtgtgtgtgtgtgtgtgtgtgtgtgtgtgtctaaacacattatgtctgtgtcctgaaagaaaacacctttctttattaaattctctcataatacaaatttctgcttatatgttgactatcaagtctatataagcaaatttcccttatataattacacttcacatttataaactatttcccaacattttatacccattcctgaagacagctttgtgtgaaacttgtcgatactaagggtttaactcaagggcaaagccttgacgccttattacgtataagggcttataaagagaacgcatactagaagcgagggacttggaagcggtgcttgttgaagacagtaaaacacctaaaatgggagagacatgtgatagacttacaagtgtacacactgtgagagagacagtggacgttattaaacgtacggtgcagcaactgtgctgtattactatacgcacatgtagaaccagatgttctgacttcctcaagaacctcgatctcaattacattctgcattcctctttccaggaggacagggtaatgctctacacacacgatccccagacaggagtctcttaacaagcggctcataacatctatctttaccacgggactacacctgaatctacgtctaaccctggaacaaccgcatggaactacctgtgttgctccccaaaagtggccacgccaaaaatgacgtcacgtacaatctacgtccaacgttgctacgtcggaccgaaggttcttgacttaaccgagctacacttaccaccaagaaacagtcgtattacttgtgtaaaagaacctcctacattctttacaggtctctcggacaattgtactccccagcatctgtggcggaaaggcactctggttgacgccccagagagaccaaagcaccgggctggcgcaaccatcggaaaccccgcggtcctgctacaaaaaaaaa

SEQ ID NO: 614513 - DNA, 242 bp, Homo sapiens
tttttttgggggaccccccccccttttttcccctttccggggataaagggggccggcccttttttttttggggggggggtgtttttttttaggggggcgcgggccccccccctttggggggtcccccccccgtttttccctttttgttttggggggggccttttttttttttttgggccctttttttggggggggggcccccctttggggccccctttgggggggtggccccccccccccca

SEQ ID NO: 614514 - DNA, 1522 bp, Homo sapiens
gcgtgagaatcgggactgagccgggtagtacctcaaggttgagaacaacaaagcatgccacctggagatttccccgcgcaggccctctgtcgctggttgagcttcggtggaagttactggggcgtcttgtgctgccaggccgctgcatgcctggtagcaaccagaaagcaggtcctgctcgcctccgtggacatttcattagccattccatgaacgtgtactcccatttgaagggcatccgtggttgtccttgaagaccacaatacaatgccagcaacccaatgatcactctgacacccaccactgatcaaagatgtccatagactagctgagtgccctgacggggagggtgaacgtgctctttgtgagtcaaggctccgatggacctgtccctaggtcctgactctggatcgacggagcgtggcacgaacgttcctcgtctgaaactggcaacggacttcacgttgacttgcgggggccagcctagcggatagttcccactatcttcatacgtaacagcgtaatgatgaagcgggcaccgtgccacgaggtagggctgacggcgctcctgttgtcttgacaccttgtgggtactacaacgaaaacgatttgagtcggtaagagaatacttgcgacctcttgtactcccaccaacgaccgacgcgtgactcatcttccacttggggggagcaaccccgtgattaaactactgttgggcaagaggttcgcttcatccagaaggtttgcctcccacccatgaaaacacccagagttaattgggaattcggcgggcttggtcgggacactgcactacccaggcctgggttcaccccaacccaacgattgtccctgtaaccagagcggccacgcgtgagcgtaacttgtgggccttttctgctgagcgcggtgcctttcgatcacctggaatcgtcccttccaatttaagtgcgaccatttggcctaccaatagaacggtggcagacggagagtacttatgtctgcacatggccatctgtcatcattacaaccgcgtactacgtggtcacacatgtgtgtgcggtgccacaaatggtgcagaacctccaggagctacggaacccttttgtggcaaaccccggcaagcagtctataagtcattttacgcaagttggtgccaacaggaccgcgacaccttgctcgcgacgtttattctgttgccattcgcgcgcaggacatccttacaagggtagacagtaaacaagcgcattgctaactgtgccaccaaaggtgaactctgtcaccttaagtgtacaatagagcggctcgaccagtgggtacccaatgcgcacggggcgtatcaaaaccacaacacagccctaagtactcttccagtgtgttaccgtgctctagcataactcatacaggcattccctccccattttcttggaatatcacatctctactgcgggtgatcacgagttcaatggtcacccattttataaacctgaaccccagtgcctgtgtccccaagcgacgagtacaa

SEQ ID NO: 614515 - DNA, 103 bp, Homo sapiens
  misc_feature (7)..(7): n is a, c, g, or t
ctctggnatgcaagtgtctgcatgaaggtgctcagactttatgaggcactccttctacttgcgattattgatctgtctttctgtggagttcggtttcgaaaac

SEQ ID NO: 614516 - DNA, 633 bp, Homo sapiens
ggggaaagcaaaactgggctaaacttagccaatgaccactcatggagggagcatttaggccagccatagtcagaggggaatctcccagcccagttgttggaacttgaatttcagcacgccttgccactgcaggctaaattgctgtaggccctacataaacttgaaaggcagtctaagacactaggactccaattcttaggcaagtctttgtgctgagctgggctcagagccagtgaacatggtggggcacatgacctagtgagacaccagccatggcgtccgagggagtacttgtgccacccctccctcagttttgggcgcacagcttgtagcttcaaaaaagaccccctccttccgcttgagaagaggagaggtaagagtaaggaggacttttatcttacatcttggataccagctcaaccactggaggatagggcactgggcggagtcatcaggccctagcttctggatgacatatgtagacacaccctgggccagaagggaaactcctgccttgaagagaaggatccagtcctggtggcattctttacctgctgactaaagtgcccttgggccctgaggaaccagcagcaatacctagttagtacgctgtgggtcttgggtgagcttctg

SEQ ID NO: 614517 - DNA, 328 bp, Homo sapiens
  misc_feature (48)..(48): n is a, c, g, or t
gggtggagtacagtggcatgatctcggctgactgcaatctccgcctcncaggttgaagcaattctcctgcctcagcctcccgaatagatgggattacacgtgtgcacctccacaccggctaatttttgtatgtttagtagagacggggtttcactgtgttggccagactggtgtcgaaatcctgacctcaagtgatcccctgcctcagactcccaaagtgctggaattacagttgtgagccactgtgcctggccattttgtttcctttttttgtcttcttccttccctccctcccttctctccccctttccccttctgtcgtcttctc

SEQ ID NO: 614518 - DNA, 390 bp, Homo sapiens
  misc_feature (348)..(348): n is a, c, g, or t
gaagaagacaggtgtaaaggtgagaaagaggccgggcatggtggctcgcgctgtaatcccagcactgtgggaggccaaggcagatggatcatctgaagtcaagagttcgagaccagcctggccaacatggcaaaaccccgtctctactaaaaatacaaaattagccgggcgtggtggcacatgcctgtaatcccaggtactcgggaggctgatgcagcagaattgcttgaacccaagaggcggaggttgcagtgagctgagaacgtgccattgcactccagcctgggcaagagagcgagactccatctcaaaaaaaaggtgagaaagataggtgtgaacatgaggtgncaggtgtgaagataggaaaggcaggctcatgtgggggaaggg

SEQ ID NO: 614519 - DNA, 129 bp, Homo sapiens
aggctagtaacccatcccgtggcataaacccagataaagctgtagcgcatggtgctgctgtccaggctggtgtgctctctggtgctcaagatacaggtacctggtagtgcttgatgtattgtcccctta

SEQ ID NO: 614520 - DNA, 154 bp, Homo sapiens
cgggccgctgtgcaaaagttcttttgctcttccttttctctgagacgtttttcttcctgttctttaagaagtttctgccttaacagctccttttcttgcttcttgctttgagccgcagctcccgctcttcttcatcttgtatgcgtgcccgtct

SEQ ID NO: 614521 - DNA, 185 bp, Homo sapiens
ggaatcttatacttgagaaaaattgtataaatgaatatggaaaatgccatttatatcttgctcacatgtaaaaacatcatgttcataccttaataaaactgcaacttacctgtcaacatctattcagaacaatataatgcctttaaatgtgaagaatgatgtatttatctttgaatgacaatgca

SEQ ID NO: 614522 - DNA, 252 bp, Homo sapiens
  misc_feature (95)..(95): n is a, c, g, or t
  misc_feature (164)..(164): n is a, c, g, or t
  misc_feature (182)..(182): n is a, c, g, or t
  misc_feature (195)..(195): n is a, c, g, or t
  misc_feature (209)..(209): n is a, c, g, or t
  misc_feature (228)..(228): n is a, c, g, or t
gctttccgcttggacagatatcagcaggcccaagataagacatagctccagataaaagaagagacagacttggactcgcagaggctcttacttanggctgagagtctagaatggtcttactggctgaatgcagcattattagaataagatagaatgaagacatnagatcagagcagtgaacnaattcaggattangattataaatattngtgaaagcaatgcctttanaagacaatgctgtgttaaactttt

SEQ ID NO: 614523 - DNA, 533 bp, Homo sapiens
cttatggcactgtgcttgcctcggtgtccgccctagtaatatatttgttaaacgggctttgttaaaaatagctactatttctcattgtcagcccatggtaaatgatggaaatatcttccttgatgaattcattatttaacagtactcacaccatattaattttaataattaatataggtatatgaattatggactatgacttctaatatctagcatacatttttagataaaaatataatatctagataaattggaatgacctctttatagtattaattttactatttccacgtattctatagataattttttaaagtgagagcttggaaagaagacaaaatgattcatattaatctttcttagagagtgaatcagcctcctccttgtgcatatttaaagaaaacttactaaatgtggaaattgatgtgttgtcaggactaggtatgcatcaaaccctatgtatgcatcagaaacagtggcatctagcatcgtctttgagatctatgcatggaactgcctcgtaagggcatatt

SEQ ID NO: 614524 - DNA, 134 bp, Homo sapiens
  misc_feature (20)..(20): n is a, c, g, or t
cacggcctataccactcgtnaattctcatggaggtagtgcttttcttatacttggtgaaggtggtatcagcctcaggctataccacccaaacccacaggtcctaaactaccaaacctgcattaaaaatttcggt

SEQ ID NO: 614525 - DNA, 855 bp, Homo sapiens
ggacttgtatcacctgctggaatgtttcaagtggcctgattgacaaggcagagaatggaacagtgatatgtttggtctgtccccacccaaatctcatcttgaattcccatgtgttgcgagaggaacccaaagggaggtaattgaatcatgagggcaggtcttgcccctgctgtctcataacagtgaataagtctcacgagatctgatggtttgaaaaaggagagtttccctgcactagttctcttctcttgcctgcctcgacgatgagatgtgcctttcatgtgccgtgactgtgaggcctccccagccatgtgaaaccgtaagtccatcaaacctctttctttggtaaattgcccagtcttgggtatgactttatcagcagtgtgaaaatggactaatacagaacaattggtaacagtaaagtggggtgttgatgaaaagacagctgaaatgtggaagacaagtttggaactgggtacaggcagaatttggaacagttttggagggtcagaagaagaaaggaaatgtgggaaatttgaaaattcctatagagttgttgactagctagcaccaaaaatgtgtccaggctgagggtgtctcaggatggaactgagggaattgggtggtaacttggcgccaaagatgcgtccattatgtttaaaagcaagaagactggtggaatactgcgcgtgccatatgagaatgtgtggaaattgaccttggaggagatgataaggggcactgacagcagaaatataaaagaaaaaattaaaaggggcttggttctctggaggcacacagatagaagagaagaagaaacaataaaacatgatatggaattgttgataaaaccat

SEQ ID NO: 614526 - DNA, 108 bp, Homo sapiens
gtctcaagcaagaggaaagttgacgacgccccacctcgatgaggcggcgcccctgagtaggccaggagcctctcttgcaacttataccaccgcgggccactgcggccg

SEQ ID NO: 614527 - DNA, 1012 bp, Homo sapiens
gacacatgtgcaggcgcccaaggtccggcgcgtcagatcggtgccgatttcctgccctgcccctgatcgacagactgcgaccatgtcccatcatcgtggcggtgtacggcaaacacaagggacctgagacactgtgcataatggacttccccattgccaagggagagcgccagtcccctgttgacatcgacactcatacagccaagtatgacccttccctgaagcccctgtctgtgtccctatgatcaatgcaagcttccctgaggatcctcaagcaatggtcatgctttcaacgtggcagttggatgactctcaggacaaagcagtgctcaagggagtgacccctggatggcacttacagatctgattcacgtttcactttcactgggggttcactttgatggactacggttcacgagcatactcgtgcgctacacacacggacacatactcgctgcacagaaacttcaccttggttcacttggaacaccccaaagtcatgggcgcgattatgggcgacaggctgtgcatgcaacctgatgagactaggcgcgccctacgcgctactccactctgaacggctggcagtcgcctaaaactcggcgccttcacacacagttgctcgactgtgctggcatttccattaacaccacactgcgcgcccacaagtgctgactttcacctaacttcgatcctccgtggcctccttcctgaatccttttcattactggatctaccaaggctcaatgaccaccctcctcttctggcatgtgtgacctggatggtgctcaagggcacccatcccgcgttcgcactcgcacccggtgctgcacaacctccggtaaacttaagttcaattgcggcacgggtgtacccccaatgacttcgatgctgaccactgtgcgcacccgtctcttcccttgtcacaccacgggcacactaagcttcgctcgaattaccatggttccactagtatcgcattccgcacaacgatctctaggtgttaccctta

SEQ ID NO: 614528 - DNA, 780 bp, Homo sapiens
  misc_feature (45)..(45): n is a, c, g, or t
  misc_feature (111)..(111): n is a, c, g, or t
gggttaaacgccttcttcacttaaaacacttgtgtcgtctagcancctctgtgtgtacgatgtcagctgcatcgcaatgggtcttgaccatgaccgcgatcagcgcatagncagctctcctgcataggggcagatttcagccactctggtcggtactcgtttgagacacagtgtcggtgcaattgttcagacagcagcactcgtggatggtgaaaatatcatgttgagcagctaccggtgatcatacgcaggagtacagggtccggagtggccgtaagctaactcagacagacttgcagatgagggtcctgtctgttagatgtatgcctgtcctgcagatctccatccgctccaggcacccatctgtgcatctccatcatcagagtcctgaagtagatccaccacaaagagtgcaattcacagagcagattaactgcatactctaaggagcagagcgcctctcctcctccaaaggaacgtagttcctcaccagctggggaacatagctggatggagtatgactcttctgagtcgatagaaggcttgagatgatcctatgatcaaaatttagatgtatgtatagctagcatagccgatacagagtagtgcttaaatgagttgatggagctgacagcccaggctcgagaactatgttaagaatgcagtcagcctcagcagccgatgcgatcagctggaaggaagggcatcagtcatggcagatgtgatgcatgtgatgtagtgagcaggggagtttcagaaaaaagaacagcccaactggag

SEQ ID NO: 614529 - DNA, 107 bp, Homo sapiens
acgaaaaaaaaagcataaaaaaagccgccaccaagttgaaatagccacccgccacccccaaaaaagagagggaataacccccccaagaaaaaactcttccccccccc

SEQ ID NO: 614530 - DNA, 117 bp, Homo sapiens
actccgaggtattcccagatgagggatatagctgatgagggatattggctgattgaagagtatgcaatgagcgattttaggtctgttagtcgtaagcagatggagcttgttataatt

SEQ ID NO: 614531 - DNA, 162 bp, Homo sapiens
  misc_feature (90)..(90): n is a, c, g, or t
ttatctgctgctgctatgccctggatgtaacttgtgtgtcatagttacctttaactcagtggttatctaatagctctaaactcattaaanaaactccaagccttccaccaaaacggtgcccagtctgtatacatttttactaaaaaatactaggcttatgta

SEQ ID NO: 614532 - DNA, 347 bp, Homo sapiens
tcatcgagctcggcccaatgtttgacatgagacgggggaagccacagtaaccatctcaggcacagcagacaaacgcgtgctgtggaatctgacacaaagtctgttggattccaagggttcaacgatctttatgtgattgatgaacgacgacgcctgcccaagagcagtcagagctgtaagaagagtagcaggagggcctgtgaatgcccccaaccccctaaaacctgcagctccaggtccgacactcccaggtttgcgttttgaatttacactacctatggggtccaggccatcacctaagtgagaaatttcacacgctcacccggggtgctcaaagccatctctct

SEQ ID NO: 614533 - DNA, 527 bp, Homo sapiens
  misc_feature (294)..(294): n is a, c, g, or t
  misc_feature (300)..(300): n is a, c, g, or t
  misc_feature (315)..(315): n is a, c, g, or t
  misc_feature (374)..(374): n is a, c, g, or t
  misc_feature (396)..(396): n is a, c, g, or t
tttgggctcagtcaggggaaggggtctcagaggcaggagtggcagcaaacataaagaagtggggtaaatgccaatgttttaaacagaaggcaatgggagttggtatgaaatattttagggttcatctctgggggagttagcaaaggaggaaggaaatgtactagctcaggagtagatgaacgggaagtcctttttttggagacaggttctggctcagtggcccaggcgggagtgcaggggcgtaatctcagctcacggcagcctcaacctcttcggctcaagcaatcctcctanctcagnctcccgaatagctgngaccaggcgtgcatgacatcacaccgggttaattttcctatggcgggcagagagggggntccgccatgttgcccaggtggntcttgaactcccgagctcaagcaatcgagccagatgggcctcccaaagttcggggattacaagcatgagccaccaggccgggccaaaaaatcatttctggcagtagctatgctagctatgggggagtgaag

SEQ ID NO: 614534 - DNA, 227 bp, Homo sapiens
  misc_feature (71)..(71): n is a, c, g, or t
cccggcctagtgtccagggtggtgacattcatctgaacaaagaccagtctccaccaccaaagtcatggttntgctgttgcttccagaaccaaagaaaggctggcttctgggctgcgcgcggtgattcacgcctgtaatcccagcactttgggaggccgagacgggcagatcacgaggccaggagttcgagaccatcttggctaacatggtgaaaccctatctctact

SEQ ID NO: 614535 - DNA, 278 bp, Homo sapiens
atgtagatactgtgttattctacacaaaaggaaacaaatagacaaaaatatttaaccacagaaattaggaatatttatatactttataacactgtagaaatctttggtggtgacatatagaatcctatcgctgaaaactagttaaagtcattttgtcccatcaaagtcagagatagtcgagtattacataatcagtaatcgtggcaatagtacttatcttagccaaatacacacatacacacacacacacacacacacacacacacacacacacacac

SEQ ID NO: 614536 - DNA, 348 bp, Homo sapiens
aacttaaatgagctatacagcgtgcaagaaactatcaaaggctggagacaatatccctgaggcgcatgctgtgtatttcaaccccaccacagtgtcagatggggccaacaagaaggataaataagatcctcactttggcagtgcttcctctcctgtcaattccaggctctttccataaccacaagcctgaggatgcagccttttatttatgttttccctttggatgtgactgggtggggcagcatgcaagcttctgatattaaagaggcatcaagggaatagtcaggcaccctacagggaaggctgccatgctgtgcgcaactgtttcacctggagcgatcagagaaa

SEQ ID NO: 614537 - DNA, 107 bp, Homo sapiens
  misc_feature (72)..(72): n is a, c, g, or t
gctttgagggttctcctgttttagtctcctccatttagcgcgtcgattctgaaaccaggttttgacctgtcnctcgctgagctgttttatcttggccagacgcttcc

SEQ ID NO: 614538 - DNA, 256 bp, Homo sapiens
gcaacgggaggaaggggaggcttctgcattgtgggtgataacgtaggacatgtgcttggtacaaaaagggcctgagacattccccctagcttgactggctgcaaaattaaaactggggggggtgcaggtggtggggaaacaaatggaaaaactggcaaattaagggtgggggctgcggatcccagggactgccccaaaacccaaacccaagtcctgtgcctgtccccagggtcctgaataaataaaagcctccttg

SEQ ID NO: 614539 - DNA, 139 bp, Homo sapiens
  misc_feature (78)..(78): n is a, c, g, or t
  misc_feature (105)..(106): n is a, c, g, or t
agagtggtgccctccgtgtactctcttggaggatgaacttggactgctgctccatcacactgtacttcctaacatggnccaagatcttccttgggagggttcagnncttctcaagtgagggttctgactcttttgtacc

SEQ ID NO: 614540 - DNA, 194 bp, Homo sapiens
gtactggcattcgcttcttgaacgtggttgagtagtggccccctttgatggccaaaactcagtgatggcacaagggtaggttacagtctgtttacacttccatttaggttatagttcaactattttcagagaaacttaaaatatgtaaggaggcaactttagagtaaacttgatttaacatcatgtaggtcaca

SEQ ID NO: 614541 - DNA, 397 bp, Homo sapiens
  misc_feature (111)..(111): n is a, c, g, or t
  misc_feature (207)..(207): n is a, c, g, or t
  misc_feature (228)..(228): n is a, c, g, or t
  misc_feature (257)..(257): n is a, c, g, or t
  misc_feature (394)..(394): n is a, c, g, or t
ccccagcatgcagaaggacgcctctttgagcggcttcctgcctagtttccagcatttcgccactcaggccatccacgtgggacaagagcctgagcaatggaattctcgtgncgtggtgctgcccatttcgttggccaccacatttaagcaggacttcccgggccagtcctcgggttttgaatacagccgctctggaaatccaacaanggaattgcttggaaaaagcangtggctgcgttggatggggcaaagcacangtttggcctttgcatcgggtcttgctgccaccattacgattacccatcttttaaaagcaggagatgaaatcatttgcatggatgaagtgtattggaggcaccaacaggtacttcaggagggtggcatctgaatttgngac

SEQ ID NO: 614542 - DNA, 308 bp, Homo sapiens
cccttgcctttttaaggtttttttttccctttttttttcccctttttgggtccccccccctgggtttcttatgggaaaaccttttgtttggcccattttatggcccaatttttttttcccccgggccccgttttttgggggggcttccgggggttttggattttttttggtggtggttcccctccctgcccaagggcttgggggggggtttcccttggggttgtttttttggggttcccccttttggtttccttcttttttttttggggtttttatttcccctggtttttggggggcccgggtcccga

SEQ ID NO: 614543 - DNA, 172 bp, Homo sapiens
tatgccaccgtattcaactccaagggtatatggtcaagcttacaggtggtaaggaactcggctcgcagcacatcggaataggctcacttcgctagcgctgtgctgtggaattatctgtatttctagctatgatcttagcttcctcaagtccatttcatttggacttacaccc

SEQ ID NO: 614544 - DNA, 302 bp, Homo sapiens
gtgactccgaggatttcgttgggcactcgtcacaactgggacgttcatggagaagatctggcacacaccttctacaacgagctgcgcgtggcccgagaaggagcacccagatgctgctgaccgaggccccctgaaccccaaggccaacagagagaagatgactcacgacttaatgttttgagaccttcaacaccccagccatgtacgttgctatccatggctgtgctatccctgtacgcctctggccgtaccactggcatcgtgataggaactccggtgacggggtcacccaacaactgtgc

SEQ ID NO: 614545 - DNA, 315 bp, Homo sapiens
tacagcccatagcccaccccaacggggggcaagggtgattttctctcagaggaaccggaccggggcttggggttttcaaacaataaaaaaagagagagaaagagagaggcacagggactcaagaaggggccaggaacgggagacccaggaggaggagaaaggcacagaaagacaagccagaggggccaaggcacaccctggaggggagctgggcgggctaaacctcccctccctcccaggggggcttttgaaaaccctttggacaggcccccaaaccctcccttgagggaggaggggcctgggggggagagcaac

SEQ ID NO: 614546 - DNA, 460 bp, Homo sapiens
tgtattcaaaacgtcaaacatgacttcacaacagtgcaattgagcaatattttgagataacacctgctattcttactccattactttccttgtagtagttctttcctgctagctgagttagtcttagcctttgactaggcacttgaatgtgtcatccatccgtttggcaggtgtttgaggctcatttgctcagctaaaaccagatacacttctgagtgctaaaaccccaacatcaaaccaactgcccttacaactcgagtaaattgtgttaatatcaaatcctagaatcatatctgcaataaaatgtggaaaaacatcaggtaaactgctgaatgcccccttccatatttttagttgctcacaccaaaaggaagaagctaattataagatatgaaccacaccattgcagtcagcacccaatcaccaagacacaaatgtcacgagaaaggaaaataggatg

SEQ ID NO: 614547 - DNA, 1198 bp, Homo sapiens
ggaggccggaggccaagccagcgagccaccatggagacccggtacaacctgaagagtccggcatgtcaaacgtgtaagtagaaagaagcggcagaattgaaagatccaacagatcattaccatgcgcagcctttagaggataaccttatttgaatggtcactatcacgggttagagggcgccccagacatccgatgttgatggaggagtgtagtcacgggcggatagtactgccaacagagtatcccatgaaagcagcaagcattattctcctaagcggctaatggtcgatttgaagtgggcaagaagaatctgttatgagcatctcaggaccatcgatcctgaaacttggtcagacgttcgctggagtataaggacgagcattattgagccatcatggggttatatgccaactaaaaggagagggagccataggttctctaggattacacgtcctgaggaaccgaagagcacttgccaaaaaatcacaagatttctgtctgtgaaggatgtaggctctgccatgacaggatgtccgtgttgcctttaaaatctggaaagcgatttccaagccaagctgaccaagaagccaaagaactggataagggcgaaataagcttaagggcaagaaagtccaattcattcgtgggaaagactatctttgagtcagaatttaaaaccggtctttttacacttaagtggagttaccaggaatggtttacgtacataattcagggggtaaggcaaagtaattcggtagcgggtcccagaactccccccagaagggcactctttgactgaaggttcacacagactggtcacaaaagaaccccaaggagaccctgaaaggcgtggccaagacgagaagcggaacaagggcgacatagcaccgaaaggacacggacacaacgcagagagaccccgaatggtgtcgtcgctcgttgtggatagagacagccgattgcgacgggagaggctaacatgaccagatatatggacgcacgcaaaagatgatgcgagacagtaccgtgagcagatcagagaacgcacacacaaaaacaggagagggatgacacgataataacagcattgagccactacacagcgcgaacatcaaacacagtaggaagacaaacaagaagacgaatatcgtgtcttatcttctcgcttcttctcctgtcgttcatgagagaggagtt

SEQ ID NO: 614548 - DNA, 648 bp, Homo sapiens
agcgggggagctgcggcggggtctggggcgcagagcagcggcgggaggaggcggacacgtggcaacagcggtagcagcccgggcggcggcagcaacagcggcggcggcatcggcccgagccgccggccgccctcccagccgtcccgacccgcggcagccctagctccctccacttggctcccctggtcccgctcgctcggccgggagctgctctgtgctttatctctctgattctccagcgacaggacccggcgccgggcactgagcaccgacaccatggggaagggggttggacgtgataagtatgagcctgcagctgttcacagaacaaggtgataaaaagggcaaaaagggcaaaaaagacagggacatggatgaactgaagaaagaagtttctatggatgatcataaacttagccttgatgaacttcatcgtaactatggaacagacttgagccggggattaacatctgctcgtgcagctgagatcctggcgcgagatggtccgcaaacgaccctcaactccaccctccacatactcctgaaatggatcacagtttgtcggcagctctttggggggtctccaatgttactgtggattggagcgaatcttgtatcttggcttatagcatccaagctgctacacga

SEQ ID NO: 614549 - DNA, 1395 bp, Homo sapiens
ccgtgcagaaaaaaaaagaaaagagaacaaacaagagacgaaagacgcacacacgaagaaagcagcaaacacgaggagagacgaggaaacaacacagagacaacaacagaaacaacaagacacaccaacacaacgcgaagagaaaaaaacgagaacgaacaacacaacacacaacaaactataataacatatacatatacaataccaactaactaaactaacacaaacaaacaaaaaacaaaatatacaacaaaaaagacataacaatacaatacacacgacacaccagtaaagaaacaaaaggcacaaaagagaagagaaacaacagacacaagcaaacaagagacagaagcagagaaaccgcacaacgagagaaacagcagagagacgcaagagacaacagagcaaaccaaagagacgaagaccgcacacacagaacgagatcaacaaacaaagaagacacaaacaccaagacacagagacaaaacaccacaagcacaaataaacagcgaacgcaaagacgcaaacaaaccccgacaagacagacaaagcagacacgcacacaacacaaaaaccacacgaccacacacaagcacaaaaagcacccgacgcagacccaccacgagacacggcccaagagaaacgcagcaggagaagggagagggcgcaagccgaggagccggagacgatgagaagagacagcagagagcggacaacaggacacgaacgagcgcgcgtacaagaggagaagcgaggaaacgagcgatggagacagccggaaggacagagagacaaaacacaacccggaacacgaagaaacaaaacaggcaaagaaaaaaagaagcaagagaacaagcaacgaaggcaacaagacacgagcccacagacaacacgcgcagaccaaccagacagcagacgagaccaaggaacgaagaaaagcaagaagacgaagagaacacgagagagcgagacagaagaagcgaaggaacaggagccagaaaagaagcgaaggagaaacacaacgcaccccagcgagaacacgcaagcgcgaacaacgagagcgcgagcccagcgcaccagcagcgagccgaaccacagaaagcaggacagcaaagaccgagcacagaggacaggggcagcacgagcacagacagaacaggacgaggacaggagccgagcgcagacaggacggcagaccgagcacaagaagagagcgcgagaaggacgacgagaaacagcacgcgcagaccgagagccgagagagagcagacagagcacgaagcaaaccgagccagaacaaggaaagacaagcagagaagaacaagcagagagcagaagcaaacagcagagagagcaggaagggacagcaggcaagagcgcagccagcaggagcag

SEQ ID NO: 614550 - DNA, 614 bp, Homo sapiens
agcgggggagctgcggcggggtctggggcgcagagcagcggcgggaggaggcggacacgtggcaacagcggtagcagcccgggcggcggcagcaacagcggcggcggcatcggcccgagccgccggccgccctcccacctcgccgactacccctcatgcccctgccgtcgccgacgctctgtgctttatctctctgattctccagcgacaggacccggcgccgggcactgagcaccgacaccatggggaagggggttggacgtgataagtatgagcctgcagctgttcacagaacaaggtgataaaaagggcaaaaagggcaaaaaagacagggacatggatgaactgaagaaagaagtttctatggatgatcataaacttagccttgatgaacttcatcgtaactatggaacagacttgagccggggattaacatctgctcgtgcagctgagatcctggcgcgagatggtccgcaaacgaccctcaactccaccctccacatactcctgaaatggatcacagtttgtcggcagctctttggggggtctccaatgttactgtggattggagcgaatcttgtatcttggcttatagcatccaagctgctacacga

SEQ ID NO: 614551 - DNA, 1343 bp, Homo sapiens
gccgcgggtgatcagctggtctgcgctcccctgacgtgggctggtggcaccgtcaccgccgaactggcagcctccagacaagccaccgcgagtaacggtgtgaatcaccaggacttttcaactgacgaaatttacagaataatgcaccctaacgaggtgacacactcaggcagacacaggtgtggcaaccagacggccagaatgcctccaaagggtgacttcacgagcctgctatcggccagccttgcataacaagcccacttgacggcaacctctgaactacttgtgaacccggaaacctgactccaaggccctaacattcaatccccatacgggccacgacattggctccactcaagaaggttgacgtagtatttggctaccacatgctggaaccatggatccgcgcacagtgcgactattctcgcgggctacctcatgtgcaacttcatcggaactatggacatcctggcgggggccacaccaagatagcccaatcacatacacacagtaactgcaaagcccattgcccatgtcgcaattggcatgcgacacctatgccctggtggcccggcctatacccgtttccaccttctccaatgtggtccttgcccccatcacttcccagaccaactggggaacccagggccaaccagcattgggcacaccagccgtgcaacggtgggcaaacggcaactaggggtcctccccggcacacgcggcaccccaccgacacgccacacaccccataccacaggggccccggcacccccaagggcccaccgtgctccttgaaacgatatgtgttaggcgcgtaagacacccattggacaaacacacgcaaagtctccaccactacggacaccttactgatgaaaatggcatttgccgaacacccaccccctctacatggcacacttgtcccaattagtgccgctttaaaccactgcgcacccttcacactacgggctgcaaccacgtcacctaccacgacacatggcgggcccccacaagctcaagcggaatatcacaacttgacacccaccacatgcgtctttgtcgcccagtgcgtgctctcccctgttcacaaacgcccattccactccagttatctcccctccttgggactccccacacgaggggccacaatcacaaatcgactgcctatcacgctaacctcgccacactcgcacgtcgacacactctacctttgtggtcgcactactacctgcaaaactccctcgggctaaccgcccccctgtgtacaatccccaggttctcccacccttatagtgtcctcacattactcccctcttaatcatatacctccctattcacaccca

SEQ ID NO: 614552 - DNA, 264 bp, Homo sapiens
catgtatacagctacttgggagggcgaggcaggagaatcgcttgaacctgggaggcagaggttgcagtgagctgagatagcaccgactgcgctccagcctgggggacagagcgagaccccgtctcaaaaaaaaaaaaaaaaaaaaacaaaaaaacccaaccaaacaaaaaacctcccgggccagccatgttgacgtcagaagggacaaaattccacattattccacattccaagagtgctgtgcagaggtctctcaacgcactt

SEQ ID NO: 614553 - DNA, 322 bp, Homo sapiens
ctcctgcttcagcctccaagtagctgggactacaggcacatgctaccactgccggctaattttttgtattttagtagagagggggctttaccatgttgcccaggctgatttcgaactcctgatctcaggcaatccgcctgcctctgcctgccaaagtgctgggattacaggcgtgagcgaccgtgcctggtccatattttcttttattgaagtatactatcctgtttctttgtgtaccttcttgtgatttttttttgttgttgcatttgaaaactggactttgaatagtatattgtggcaactctgaaaataagattcttct

SEQ ID NO: 614554 - DNA, 268 bp, Homo sapiens
  misc_feature (148)..(148): n is a, c, g, or t
  misc_feature (159)..(159): n is a, c, g, or t
gtcgcccgtgttttcgttggcgggtgcctgggctggtgggacagccgcccgaagaagcaccatgatttcggccgcgagttgttggatgagttaatgggccgtggaccgaaacctagccccggacgagaagcgcacgaaccgtgcggtnggaccacgagngcgtttgtaaatattatctctgtggtttttgtcctgcggaattgttcacaaatacacgttctgatcttgatgtatttggaagaggagataacattagagagttcagcaa

SEQ ID NO: 614555 - DNA, 390 bp, Homo sapiens
acttcctctcctcccacctctacaaaaaatacaaaattagccagggatggtggcatgtgcctgtagtcccagctactcggaaggctgagataggaggatcacctgagtccagggaggtcaaggctgcagtgagccatgaattgtgccactgtactccagcctggcaacagagactgtgcctcaaaaaaaagaacatttgtgattcatagaagaaggctaaaatattaacaggaacatgagtttggaataagttgattccaactctcatgaatgattttgaggggattcaagacttcagtggaggaagtaactgcagatgtggtacaaatagcaagagacctagaattaggctaggcacggtggcttatgcctgtaattccagtactttgg

SEQ ID NO: 614556 - DNA, 1384 bp, Homo sapiens
aaacaggggtcgaggccggtcctgaccttgttaccatgacacgacttgacttgctatgtgggattacaccagacgcttgcagttggacgtacactggtaacggaacctcaagcaaggccttacacatatgtcggctgtaatagtgacgcatactcctaacttgcagacacgacccttcctactgaccggactcatgggcatcaagcctacggggacccactgtgccagctacagtacttgtggaccttgcgcactcgtgacacttgactatataagacacatatttccctcgtgacaagctggcacacggttcaattccaccaccgcttaacaaggctactctcttaagttggccaacaactggtgatcaccaacacaggacaagtcactttcaataccgttacgctaacgccaatggggcagttccttaaacttacacgcgaccttacacacggtaatcatttttcaaacagacagtcctgggctactaaacgataaagactgcttgcatctccccactttgagattcaaacactttacccgggacttcccccagacgacagggtttgggcgctacttttcgcctggaccaacactaaagtttatcatccctttttggccactactcatagtgcttgtaccatcttatatatcacgatatctctgcgataacttttgggcacaaagtagtgggacttacttaccgagcacttggcatagctggccccaactgatagaccaattgcggaaaactacgcgtgtacacacaaattctaatccagttaacacatggcgtgctaaaccccaacagtgtatcaactatccatttggcagtttggtcacacttagttcatacccacatcatcctactaaacttacgttgtgattccccaaccctttactgcgacaactatgcgtgcgtatcccaccgaacatctattcgcacatggcatcaccccacggcgtcttggcaacccctacctcccaccgaaccctcgggatatccggctcgcacgtcgccactatccccacagaacattagcactggactccctctctatccataagtaatcacatgatttattacagtacagcggccacttatggcgttaacactaatacgcccctcccccactatgccacacgaaagacacttcggatatcctcatatcccccgtgtgttccgcgcataaccttgcaaacagtattcacaaacactttctcgcgtagcgcctatcataagtcaaaccgtcacgtgtggcacaacccatatcgtaacatatgtcacagtgcactacgtcactccaacactaatcgcacccaatagtttacactccaccttgcatcagtagccaagttagcacaccaccatagtctctgtcgc

SEQ ID NO: 614557 - DNA, 222 bp, Homo sapiens
gagggccagcggccgattagtcttgaaaagtaggtattgcctagtagagcgtccatgtcaagatttgcatacgcatcactgtggtatcatttaacacatagctctgtttatcttgttctttatataggttagatctagaagcttgaagatctagatctagttctggttagatctataagctagaagagattcggtttaaaatctttttttttttggcaagaa

SEQ ID NO: 614558 - DNA, 583 bp, Homo sapiens
ctagaggaccccgagtgcagtgtcgaccatgaatatagtatatatagtggcacaagggactatgcagtatataataacatagatgtatctagaggagcatatcctggcttgtctgactgggctgaggcaggaggcgcatgaatcagagaaggagatgtgatgatggaagcagaggtcagacagagatttggagatgctcaactagttggctttgatgatggacccaagaaaggacggcaccatatgtagatgcgggccaaggcaaggaaatggattctactctagcagcctaagaacacatgcctctgccaacaccgatgagtatcaggactcctgacgctctagaactgccggtatacgcacacttggatgtctttaaggtatcccagtttgtgcttctttgtgacaacaaggcaatcaggagactgatacagtcggtgatagacgatacatagttggtttcctgcggctgtactccattacctggcaaagcaagggtaccgtacagtcggtccccttcagagactatagcccttatgactgtgacctgatgaacctccacacttagagaaacctgtccatc

SEQ ID NO: 614559 - DNA, 3970 bp, Homo sapiens
gttcccaaaaatgccaaggaaaaggaagtaccactggaggaagaaatgctaatacaatcagagaaaaaaacacaattatcgaagactgaatctgtcaaagagtcagagtctctaatggaatttgcccagccagagatacaaccacaagagtttcttaacagacgctatatgacagaagtagattattcaaacaaacaaggcgaagagcaaccttgggaagcagattatgctagaaaaccaaatctcccaaaacgttgggatatgcttactgaaccagatggtcaagagaagaaacaggagtcctttaagtcctgggaggcttctggtaagcaccaggaggtatccaagcctgcagtttccttagaacagaggaaacaagacacctcaaaactcaggtctactctgccggaagagcagaagaagcaggagatctccaaatccaagccatctcctagccagtggaagcaagatacacctaaatccaaagcagggtatgttcaagaggaacaaaagaaacaggagacaccaaagctgtggccagttcagctgcagaaagaacaagatccaaagaagcaaactccaaagtcttggacaccttccatgcagagcgaacagaacaccaccaagtcatggaccactcccatgtgtgaagaacaggattcaaaacagccagagactccaaaatcctgggaaaacaatgttgagagtcaaaaacactctttaacatcacagtcacagatttctccaaagtcctggggagtagctacagcaagcctcataccaaatgaccagctgctgcccaggaagttgaacacagaacccaaagatgtgcctaagcctgtgcatcagcctgtaggttcttcctctacccttccgaaggatccagtattgaggaaagaaaaactgcaggatctgatgactcagattcaaggaacttgtaactttatgcaagagtctgttcttgactttgacaaaccttcaagtgcaattccaacgtcacaaccgccttcagctactccaggtagccccgtagcatctaaagaacaaaatctgtccagtcaaagtgattttcttcaagagccgttacaggcagcaattcccccaggcaagcaaccgtcttcactagcttctccaaatcctcccatggcaaagggctctgaacagggcttccagtcacctccagcaagtagtagttcagtaaccattaacacagcaccctttcaagccatgcagacagtatttaacgttaatgcacctctgcctccacgaaaagaacaagaaataaaagaatccccttattcacctggctacaatcaaagttttaccacagcaagtacacaaacaccaccccagtgccaactgccatctatacatgtagaacaaactgtccattctcaagagactgcccctggcaaccaccattctactttctgattctgaaaatgactgctctagcagcaaattatcatcctgatggaactattcaagtaagcaatggtagccttgccttttacccagcacagacgaatgtgtttcccagacctactcagccatttgtcaatagccggggatctgttagaggatgtactcgtggtgggagattaataaccaattcctatcggtcccctggtggttataaaggttttgatacttatagaggactggaagcaagatacacctaaatccaaagcagggtatgttcaagaggaacaaaagaaacaggagacaccaaagctgtggccagttcagctgcagaaagaacaagatccaaagaagcaaactccaaagtcttggacaccttccatgcagagcgaacagaacaccaccaagtcatggaccactcccatgtgtgaagaacaggattcaaaacagccagagactccaaaatcctgggaaaacaatgttgagagtcaaaaacactctttaacatcacagtcacagatttctccaaagtcctggggagtagctacagcaagcctcataccaaatgaccagctgctgcccaggaagttgaacacagaacccaaagatgtgcctaagcctgtgcatcagcctgtaggttcttcctctacccttccgaaggatccagtattgaggaaagaaaaactgcaggatctgatgactcagattcaaggaacttgtaactttatgcaagagtctgttcttgactttgacaaaccttcaagtgcaattccaacgtcacaaccgccttcagctactccaggtagccccgtagcatctaaagaacaaaatctgtccagtcaaagtgattttcttcaagagccgttacaggcagcaattcccccaggcaagcaaccgtcttcactagcttctccaaatcctcccatggcaaagggctctgaacagggcttccagtcacctccagcaagtagtagttcagtaaccattaacacagcaccctttcaagccatgcagacagtatttaacgttaatgcacctctgcctccacgaaaagaacaagaaataaaagaatccccttattcacctggctacaatcaaagttttaccacagcaagtacacaaacaccaccccagtgccaactgccatctatacatgtagaacaaactgtccattctcaagagactgcccctggcaaccaccattctactttctgattctgaaaatgactgctctagcagcaaattatcatcctgatggaactattcaagtaagcaatggtagccttgccttttacccagcacagacgaatgtgtttcccagacctactcagccatttgtcaatagccggggatctgttagaggatgtactcgtggtgggagattaataaccaattcctatcggtcccctggtggttataaaggttttgatacttatagaggactcccttcaatttccaatggaaattatagccagctgcagttccaagctagagagtattctggagcaccttattcccaaagggataatttccagcagtgttataagcgaggagggacatctggtggtccacgagcaaattcgagagctaactgcttcattatgagaaactcactgttgctaataaaacagcagggtggagtgattcttctcaggtgagcagcccagaaagagacaacgaaacctttaacagtggtgactctggacaaggagactcccgtagcatgacccctgtggatgtgccagtgacaaatccagcagccaccatactgccagtacacgtctaccctctgcctcagcagatgcgagttgccttctcagcagccagaacctctaatctggcccctggaactttagaccaacctattgtgtttgatcttcttctgaacaacttaggagaaacttttgatcttcagcttggtagatttaattgcccagtgaatggcacttacgttttcatttttcacatgctaaagctggcagtgaatgtgccactgtatgtcaacctcatgaagaatgaagaggtcttggtatcagcctatgccaatgatggtgctccagaccatgaaactgctagcaatcatgcaattcttcagctcttccagggagaccagatatggttacgtctgcacaggggagcaatttatggaagtagctggaaatattctacgttttcaggctatcttctttatcaagattgaaagtcagtacagtattgacaataaaaggatggtgttctaattagtgggattgaaggaaaagtagtctttgccctcatgactgattggtttaggaaaatgtttttgttcctagagggaggaggtccttacttttttgttttccttcctgaggtgaaaaatcaagctgaatgacaattagcactaatctggcactttataaattgtgatgtagcctcgctagtcaagctgtgaatgtatattgtttgcacttaatccttaactgtattaacgttcagcttactaaactgactgcctcaagtccaggcaagttacaatgccttgttgtgcctcaataaaaaagttacatgc

SEQ ID NO: 614560 - DNA, 281 bp, Homo sapiens
tgacagtaacacatagagtagatcattatccagcaacatatctgctaccttagaacaagaatttaaaacttgggacgaagaagtaaaagagcattatgcaataagtatgtcgtcatgctagatgaggtctctagtaagtcccagagataggaatgacagtctcactctctgaaacaatcccatgtttctcacattcttcgcagatcaaattcattcatcaagtggcaactatgtcgaccaatagaacattttcgattaaggacatactacacaatgtctag

SEQ ID NO: 614561 - DNA, 1214 bp, Homo sapiens
gcctccggaagcgtatccgaactttccagaagtttctcgggacgggcaggagggggtggaggacgtgccatatatagatcccgggagcgaggggcagctgggctaacgagtagagagtcgtgtcagctggactcgaggagcgagagtcacgtcccggcgcgtagcccagaccagacccaggccgcaccgatgggtgcgacgcaaaccacttcctggaccatgcgctccctccgtgcttactcatggcgcctatctagcgctcctggaaggctggtcctggccgccgaggtgagagaaacctgccagacctgcgagactaggtcctgtgcactgcgagagaagattgcagccccaaggctggccacgactagcccagagcgcagacggcaggccatggacgttcaggcatgagtaccaggccatggaccaaggcaccaggcagtggagaacatcactaggatgtcacgccgatgagtgagatggcctcgatcagcatgggagctcagtgtcgcatggagcggacaagggcagacacaacggactgtcgcagggccacaggccagatagaatgagacgccgaagcagcatgacagcgaccgaagagagtgtgccacatcccgagacctggagcagatgcatggctgccggctacaagtcaagcaacactcagacagggagcgcaaagtagaccttggcaagcctgggcaagccgaacttgtacggaacccagactcagtgagcatcggctgcatgacttcgctgcgcaagcaagcaaagcagcagtacaactggcagtgacactacaaaggatcacagtaaccaggaacacgcagcaagagcagcacgaaagacaccaacgacgctgggcccgcgcaagaccaccgacggccaacggccgaggaaacaaagaagggcagccacacggaacgtccaacaagcaaaaaaaacagagatcataacgaacacagagcagacaaaaactccccccaaaacatacgcaccgcgacacacgacaacaggaacaaacaggaagacaaaaaaacaagacaagacaacaacaaaaacaaaaggaaagagacagtaacatagaacaagcacagcacacacgacacggaaacacgaaccaagacacacacaacgagaaaaaaaaaaaacaaagacaaacaaagtaaagaaaaaaagcacgagaacaccacaaccaacagcaaaacgaa

SEQ ID NO: 614562 - DNA, 107 bp, Homo sapiens
acctcaacttacgtactctcgacttccgtgtgtgtgtgtgtgtgtgtataaggtaatgagtgcattttagatttgtatctgaaatggggatgaaaatgtgtttcttg

SEQ ID NO: 614563 - DNA, 510 bp, Homo sapiens
atcagattcttataggggcacaaaccctattgtgaactgtgcatgtgagggatctaggttgggtgctccttatgagaatctgatgcctgatgatctgtcactgtctcccatcaccctcagatgggaccatctagttgcgggaaaacaagctcaggacccccacagattctaccttatagtgagttgtgtaattatctcattatatattacaatgtagtaatagaagtaaagtacacaataaatgtaatatgcttgaatcatcctgaaaccatctccaaagtacacaataaatgtaatatgcttgaatcatcctgaaaccatctccaccaccaccgtctgtggaaaaattgctttccatgaaactggtgccatggtgcaaaaaggtcaaggacacaaaaaaggttgaggaccacaaaaaagaagtgctcagaggcaggcacgtggctccgctgtaatccagcctttcggaggctaggcggcagatggctgagtcaggagttcaaaccagct

SEQ ID NO: 614564 - DNA, 1286 bp, Homo sapiens
ggaccagcaacgtgtcggatccgcaggcgcacgccgtgcgatgttgtcctctacagccatgtattctggctcctggcagcagacttggggcatggaacccgacagagccgcgggccctttgcacgctgcagattttcagccctacgtttaccaacggaggtactatactgggcaatggcttcgcacacgactttggcaaatggtccgcctccgtagaatacctcgcattggagctgaccgaggtatcacaatccatacgcggggattagcccccaaattgttacaaaattaagcagaccacaaaccagccatcgggcattgcaggcgcgtttcccattgggagaacatggtcttaccgccctgcacccaacagaactttattgggagagccaaacgacccttacaacgccacttgcttcatataagcccaattgtcccaaactacacctcaacgggccccctcgatcacccttatcgaggtcgcgaccacaatttgagccttgccacaatatgcatgtgctgcctacccaaattccgcttggtaatccacaacacggctgcccgccactctccttttatccccacagctaacgcctacacttggtttacaacaccacaacataaatttccaatatgccgcggctggggacacgatctgtggcagttgcaataacgacaacacgcgcgacacaagagacagcagcctctcgtaaattccccaacgaccatctctggtacattgccccaaacgctataggagcgctccgtttcaaccccaaagaaatgcacagaaaaccaatcccccattttcacaaacagtgtcacatcgcgcaaagctagcaacctcatacagtccaataacagtgttgcggcccccactgagtgtgtaacaacgacgtggcacgacaccagtgttgacctgttgagcacataaacagccgccaaggcggtcatgcgagcatttactcacaacaaaagcaacaccccactgttgccccagcgacaccacatgtgattgccgaacccgcccatagttgtttcactacacgcgcgctgtgctctgccccacttgtcggcgaagccaatgcaaagaccccacaaattggcccggcagcagctgaggctaatagaacaacgcagtaactagtggtcttcacctgtatacacaacatgtcattgacgatcgggacctagggatacgtgccaacataacatagaagagcatattgattggtataaaccacaccctggttgatcggatcataataccgacaaacactcgcccg

SEQ ID NO: 614565 - DNA, 326 bp, Homo sapiens
atgccgattcgtagcacggttgctcgattctagtacgtgtacgcacctacctcgaggacatccttttacctagactctcaccaccaaatctttaacgctccttccttcttcctaccttccttcaccaaatcgcactggctcctgaactcttatcctatcttcaccacgaacagctgcttgctcacttgctcctcaatcctagcttcatcaaacactggttcctggaatcctgtctgcatctgtcttcctagattcactgaatccaatatctgtgtagcacctggatcagcattcgattaatgctagtcctcaggattagtcgagct

SEQ ID NO: 614566 - DNA, 732 bp, Homo sapiens
gtcacgttcactgtcatccccccagtggcccaggccacagtcaacttccggattcaccctggacagcacagtccaagaggtcctagaaactcacgaagaacactgtggctgataacagagtccagttccatgtgttgagtgcctgtatgaccccctccccgtcagcccttctgatgacgaggacttggtgctaccagacatgctccgcccaggaccgatacatgtccggtcattccacggaatgtcacattattacatggacccgcagtgtaatacatatcttagtgttggacaaaaacaccaggaactaaggcaccgacttccttctatcataagccctctatcgcagcattggcactcttacagagattcataccgctcatcttactagtatcgagtcctgatacaacttcaaagcggcaatccagtggatgtgcatccgagatacaatctctggtccacgcctatgagacccacgtgaacatttcatctttggagttggagttgcaagaattgctgatcatcatgacgcatgagagcctagtatttctcactctgcacaaactgttgagagtcaacggtggcctgctcgggttaagtgccatgcccgaccccagtggacagtgactatacccaagggggacaagctacgttgttcgatgacactttttgatcatgaccacattgtatatcattgcccattctgtcttgctcactcttaaatctctccca

SEQ ID NO: 614567 - DNA, 1054 bp, Homo sapiens
atgatctgtgcctgtgccagctgtgacgtgcatgagctgtgtgcggacgtggtagtgccctggcctgctcttcgcgaggagtgaagaaggtggccactctcccgtgtccccagaacctccccagccccctgcagtcctgtgcgctgttccctgcaatgactgagctgtgtgtgtgtgatgtgtgctccctgtgcctgccgtgccccgggctgcgaggaaagatggctgtgacctggcctgaggtgcaacatcaaagtgatagttgtctgcttcagacctctcaactgagtcttgaatgtgaacctgctgtgctgacaatgtacatcgccagagtttacagggatgaatgacactggtctgtgatcgctgtccaatgcctatatgcattttgatctgtggtgttcccagtcaagcacatctcaatgagcaagtgtataatgactgtgcaaagaagattgttaaagatgtacttgacaggatataatggaacaatatttgcatatggacaaacatcctctgggaagacacacacaatggcagtggtaaacttcatgatccagaaggcatgggaattattccacgaatagtgcaagatatttataattatatttactccatggatgaaaatttggaatttcatattaacggtttcatattttgaaatatattttggataagatacgggacctgttagatgtatcaatgaccaaactttcagtttcatgaagcacaaaaacctgagttccctatgtcaatggggtgcacaagagcgtagtgtatgtagtccagatgagggtatggataccatagattgatggaaaatccaacagaccatgtagcagttaccactattgaattgacattgctctaggagtcaccggactattcctaattactggtcaaccagagaaccacccaaccggaacccagagccgcgagtggaaacttcatttggatggataaccttgcacgacacgggtttcacaccgtaacctgcacgtgacttactctgcactacagcaacacgtaacaaaacttgtgctctaggcctgat

SEQ ID NO: 614568 - DNA, 556 bp, Homo sapiens
acgattcaccaaaccgcgcgaaaaaaaaggcctcaggtctcctgggatttgcctgaggtccactccagaccctgtttgcctgggtgtcaccagcagaggctgtacaacagcgaggagggggtcctgctccttcctctggaagcttcatcccagaggagcacctgccaaatgccagctgaacctctcctgtatgaggcgtctgtcaacccctgctggtgagaggtgaagccagctggacttcctgggtcgagtggggacttggaaaacgtgggcgggtagctaaaggattgtaaatgcactctgtaaaaacacaccaatcagcactctatgtctaactaaaggattataaatgcgcccatcaccactctgaaaaaagccaccaatcagagctctgtgtctagctaaaggattgtaatcgcccaaccagcattctgtataatggaccaatcaccaagacatgggcagggacaaatacaggaataaaagctggccaccccagccagcagggggaaaaaaaaaaaacaaagtggcctccttcgcctcaccggggaaactc

SEQ ID NO: 614569 - DNA, 144 bp, Homo sapiens
ctctagaggatcctctgatatgctgttcaacaatgcacccggtgaaattgaaggtaccatgtgaagatgctggttacccgcgccaggacggaaatgaccccatggagctttactccagtttggtactgggattcggtaatactc

SEQ ID NO: 614570 - DNA, 625 bp, Homo sapiens
taggggcctgggcttaattgtaaatttactggcccgtcgtcttaccaattatacatcataatgctactcccacgtagtcaccccctattatgcagtcaaatagtaatgatagcaaagccatcgtgaagacccttgctagtaccgggatcaggatatagactgtgctagcaagactagaaatacagtatggtgcagagtctagggggtagcctccatgagtaggatatatactatgcaaatacctatgtaaacaagtatctcaaattaagtatgctgcataactaattgtgagtaccagactgtatgactatttagatagtgaagttgagttgatgaaagttgccagaagcacaaatcccaacagtcataaagggttgcggtctatttgccgggagtattgcccacctgtattgaattccaaagcagatctgtcgtcgtcagtagtgaaatatctggtagccacgctcagaactcatgcagggctcgctattatgtgagagcggtgcgaagacagaaatgcttaaagacagttaaatttccgcgcaaatttgggtttaggggtctacgagggttggggttaccaacaggcccaatatatcccccaagttggtttaggggggaaagg

SEQ ID NO: 614571 - DNA, 242 bp, Homo sapiens
aactgaggctccggggattcaatcacttgccaaggtaccacgcaccgagccgcaggaaacgcgcgaaagccccagcacccgccacccagttcctcccggactcggcccccgccaccaacttcgcccgcacctgcccgagccggcgcgcccccgctccccggcgcgctcaccttgctgcgagacgggcggcgctggcggccggcgcgcggtccgggcctgctcccgcctggcgcggaagcgct

SEQ ID NO: 614572 - DNA, 1165 bp, Homo sapiens
ggggggctgcagagcagcggcgggaggaggctggacactgtggcaacagcggtagcagcccgggcggctggcatgcaacatgctggctggctggcatcgtgcccgatgcctgcctggcctgccctcgcgcagcccgtcccggcgccctgctggcaggcccttatgctccctccagcttgtggtcccgctggtcccgctcgctctggcctgggatgctgctctgtgcttttcatctctgattctccagtcgagcatgtgaccctgggcgcctgtgtgcacctgacggcaccctgacagcgcattggtgcgaatgagtggcgtttgagacgcgtgactatatgtactagacgacactagcaggacttgttatcaagaaccagatcggctgattaccacccatgtgggccacagcaacggctgcaaacatacataagcaactgtcgtaaccagtgtcaatggcacaacattgtaagagccctcccccaatgattctcctatcgtcgactgtactccattatttacatctacgccccgtatggactagcacaccttatcgactccacatacaacactatctgcgtacatctaaggaatctctgtgtaatacaccgcgctacgcaattttacacgcaacttcctttaggcacttcagatctagcccaacgcctcttagacaaggcaacttcctttatatgtcatgccagctatcaactaggaggttaccaccacaaatccatggcatcaccattccacacctatcacctccgctaccacttcctcgccaccctgtcatatcttcctttttgcacatcattcgagacactacacagacgtgctttacttaggtctatcactgacgcaagatacgtaccattctacagtactgccgcacagcatgacacgtccacaatacactcgcctaacaccacccctcgccttaccagcaactcattgcgcccacatcctttcaactactactctttacaccgtcacatctcttctaatgcctcgtagcatcccacattaacggtcaatagctatcacgaccacctactcctggacctctatctcactctacttacctagtagcgcaacaaccatctctatcaatacaatagagatcatccaccttcctgctacatcacattagtacgtctgcttgacc

SEQ ID NO: 614573 - DNA, 216 bp, Homo sapiens
tctagcctcgccaggggtcagcaggggtatgatcttgaagttatcaggaactggtattcaagagtccttttcatagtcttttccataaatctccggccagtcttcctgaaatacaaaaatgacatcacggcggcaacgtgggattatggaaagcaaaagttcctaatccgggaggagcaatgactctgatggtcaaggatgtggagctttcctcgc

SEQ ID NO: 614574 - DNA, 424 bp, Homo sapiens
aactcgtatatgcggtgggtgggaatggaaagtagtacagtcactatggtggaggttcctcaaaaaactacaaatagaatggccatatgatccagcagtcccacgactgggcatttatccaaaggaaagggaatcagtgcatcagagagacacctgcacccccatggtcctggcagcactgttcacaatagccaagatatggaatcaacctcagtgtccaacaacagatgaatggctaaagaatgaaatagtatttcattgtggatgttggtacatctacacaatgaaatactactcagccataaaacagaatgaaatcttgtcatttgcagcaacatgaatggaactggaagacgttaagtgaaataagccaggaacagaaagttaaacatggcatgttctcactcatatgggaaagctaaaa

SEQ ID NO: 614575 - DNA, 468 bp, Homo sapiens
gtcggtaccaattcattccagcgtagctggactttcacacatggaaccctaagcacatgtttgaagtccggctaccctgggccaccatgctggagtggtgatatggtttggctgtgtccccactcaagtctcatcttgaattcccacatattgtgggagggaccggtaggaggtaattgaatcatggggacaggtctttcccatgctgttctcctgatagtgcataagtctcacaagatctgatggttttaaaaaagggagtttccctgcacaagctctcttctcttgtctgccaccatatgagatgtgcctttcaccctctgccatgattgtgaggcctcctcagtcatgtggaactgtgagtccgttaaaactctttcttttgtaaatttcccagtctcagatatgtctttatcagcagcatgaaaatgaactaatacagtaaattggtacgctggaatggaattg

SEQ ID NO: 614576 - DNA, 401 bp, Homo sapiens
cggcacgaggcttacttaaccctctttgtgcctcagtttccacattgttaaaaagggatggtgatggtgccttcctcctagggttgttgtaagaagttcatgaatacaaagtgctgagaattatgcctggcatatggtaagcactatgtcagctgtcgttaaaccctcccttctgcctgtcccctttattccttttcttcatggcccatcagctgaagcttttcaggaagagatgaaggtcagaggtaaagttggggctcagtgctgaggttgttaaacaggccccatgtagctgtccccacattggggtttgctttctacttcccaggtgtttctcagcgtgagagtttagtttgctttgtgctgctggacaggttcctgcagaatggcctgttgtacga

SEQ ID NO: 614577 - DNA, 321 bp, Homo sapiens
atagagtgagcatacacacccagccagtcttttgtctatagtagataaatgttacccagcctgctcttgcactcctgcgctcaagctatcctcctgcctcggcactcctaccgtcttgagattataggcgtgagtcactgggctggccaaggcatacaaatttatcacagagtgattgccctatcccccccaggtggttcagcaggttatcataccattctgtgcacaacaggttccatggcaaacctggcagcaagcaggcaattccgctgcaggggcattcctcacggaggcacatgcatggctcagggcaacagcagc

SEQ ID NO: 614578 - DNA, 1127 bp, Homo sapiens
  misc_feature (493)..(493): n is a, c, g, or t
  misc_feature (758)..(758): n is a, c, g, or t
  misc_feature (795)..(795): n is a, c, g, or t
  misc_feature (837)..(837): n is a, c, g, or t
  misc_feature (851)..(851): n is a, c, g, or t
  misc_feature (943)..(943): n is a, c, g, or t
  misc_feature (955)..(955): n is a, c, g, or t
  misc_feature (958)..(958): n is a, c, g, or t
  misc_feature (987)..(987): n is a, c, g, or t
gcgtcccgcgaagcctgggcgtgtcaggcggttccgtccgggtctcggcacgtcgagttccgtcgagttccgtcccggccctgctcacagcagcgccctcggagcgcccagcacctgcggcggcaggcagcgcgatcctgcggcgtctggccatcccgaatgctatggccgccgtcgcctgtcttgctgggccttctggggcaagttgggcccatgtgtctcctggctgcggccccttgtggcccagcttcccctgccctgctttcttgcagcctggtgaacctgtgccggggggccgggcgctggctcggggagtcgggagccctgcggccaccagctgcggcggcacgctggacggcataaggaacatcgtcttgagcaatcccaagaagaggaacacggttgtcacttgcaatgctgaacatctctccaaagtgacattcttcatgacgctgacagcaacgatctgaaagtcattatcatctcggctgangggcctggttttcttctgggcatgacttaaaggagctgacagaggagcaaggccgtgattaccatgccgaagtatctcagaactgtacttcaaatggcctggccacggctgccggctgtcaactggttgccagctgcgacattgccgtggcgagcgacaagtcctcttttgccactcctggggtgaacgtcgggctcttctgttctacccctggggttgccttggcaagagcagtgcctagaaagggtgcctttgagatgctctntactggtgagcccatttctgcccagggagccctgctncacgggctgcttagcaaggtggtgccaagagcggagctgcangaggagaccatgcngatcgctaggaagatcgcatcgcttgagccgtccgtggtgtccctgggcaaagcaccttctacaagcagctgtcccaagacctggggacggnttactacctcanctnccaagccattgtggcaaccttggcctgcngaccggcaggagggaataacgtcttcttcaaagagccggctggtacaccagccatgtgagtggaggagaagagtgaggcccacggcagtgccaggccaccttccctcttggccaggcacactgctttttttagcactttt

SEQ ID NO: 614579 - DNA, 2154 bp, Homo sapiens
  misc_feature (1317)..(1317): n is a, c, g, or t
caacatagtgagacctacatctctataaagaattagccggcgtggtggtgcacctgtagtccttccagctactcaagaggctgaggtgggaggatcactagagcccaggaggttgaggccgcaggtgagccagatcatgccactgcaccccagcctggatggcagagtgagaccctgtctcaaaaatcggccgggcgcggtggctcacgcctgtaatcccagcattttgggaggccaaggcaggcggatcacctgaggtcaggagttggagaccagtctggccaacatggtgaaaccctgtttctactaaaaatacaaaaaattagccaggcgtggtggtggttgcctgtaatcccagctactcgggaggctgaagcaggagaatcgcttgaacccgggaggcagaggttgcagtgagccgagatcgcgcagctgcactccagcctgggcaacagagcaagactccatctcagaaaagaagcagaaagcctccaagagccaatggctctcaagcatcttggtctctgctaagaagaggctcagaggcttagaagccctgcctcgccggggctttgaggtgtgtgagcaatggctggggactgcaggcccgggaatctgagggcctcaccccacttcctttccagagccgtgacctcaggctcacctcctgccctcctctcaggcaagctgcagatgccctttagggcccaggccatgccccggatgtgaggggctgagtcactggtttggcagtgcccctcagagcccaggcctgggctgccacccacctgaggacgagggctgggccagctgtcgtgctccagttgctggggcctcttgggatcttgggaaccccatctctgagccccgccccatggccccgcccctcccaaggagggaaaaggcggctgccagtcgctcaactcaggcactgggacctagagctcagaagaccgagaggacagactgccgtgttgccaccacaggctggaccatggacccccaagagatggtcgtcaagaacccatatgcccacatcagcatcccccgggctcacctgcggcctgacctggggcagcagttagaggtggcttccacctgttcctcatcctcggagatgcagcccctgccagtggggccctgtgccccagagccaacccacctcttgcagccgaccgaggtcccagggcccaagggcgccaagggtaaccagggggctgcccccatccagaaccagcaggcctggcagcagcctggcaacccctacagcagcagtcagcgccaggccggactgacctacgctggccctccgcccgnggggcgcggggatgacatcgcccaccactgctgctgctgcccctgctgccactgctgccactgcccccccttctgccgctgccacagctgctgctgctgtgtcatctcctagcccagcccaccctgccagggccaggacccagacttcagcaaatgtggctcacacagtgccgggacatgccgggacatgcggggtggctgttgtcatgggcgtctgccccttcacaccaggcactggggctcagacccaccaggaaggtggccgttcagcccgagctcctgaaacggaatcccaggtcctggctggagagggacacccctgattaccttaaggcccaggcaataaagcagggtgatcttcctcccagcattcttctttgctgcaggctcctttgggagggggttgtagctggacacagggcatctgcccctttatgtggacccgagaacacacacacacagtcactgtggacactgcaaggacagggatgccactgcctcatgacgtccacactttcccctggcctgcaagtcccgggtctgcccagagactgcacgagggcttgcagcgtgtccacagccctagctgagccaggtctggatttgagctgacctgcgctccctggggccgagactgagactgtgagctggggtcagtccatgggtcggacagcaggaggatacagcgcatggaactggggggaccccaggaaaggcctccaagagaaggagcgtgtcgacaagagggtggtgggtgcagcaggtgctgcaggtttcagggagtggaaggttgggacaggagagcccagacagccaggaccacgcactgcccactgg

SEQ ID NO: 614580 - DNA, 123 bp, Homo sapiens
tcactggcagtctataaagcaggcaggaagaacacgaaagggccaaaggacttgccatcttatttatgaagaggtgctctcgctcaggagctcctgcctcttgttcataggccagagctgtgt

SEQ ID NO: 614581 - DNA, 124 bp, Homo sapiens
cacgagggagcaaaggactctctattttttttattttgtggccaagggtgcccgtcctcagttgctcatcctggcttagactcgcgcagtcttgggacaatgtgcattccgcctcacaggctat

SEQ ID NO: 614582 - DNA, 181 bp, Homo sapiens
  misc_feature (171)..(171): n is a, c, g, or t
gtgggttgaccgtgcttgagaaagccttaactctatcatcgacgtctaccacaagctactccctgatcaaggggaatttccattgccgtctaccggggatacctgaatgaaattgctagaagaccgagttgtcctcagttatatcagggcggatccctctagagctcgacnctgcagcgca

SEQ ID NO: 614583 - DNA, 136 bp, Homo sapiens
  misc_feature (49)..(49): n is a, c, g, or t
  misc_feature (82)..(82): n is a, c, g, or t
tcccgttggaacaaggacataacaagtctggtctgccagataaactaantagtaagagggtctgtgtagaggcatttctgtncaatctaaggctatgacatcatcaagctcttccttctgttcatacgaacctcgt

SEQ ID NO: 614584 - DNA, 187 bp, Homo sapiens
agaggctgactgtgatcttatgctcaagcagagggaggctgatgtggctgctgcttcccgcagcttgagaggcgagtggcttgaagttgccttgcgcttgggacccgggctctcctggctcagctggcacatgagcaggtgcagctcccgttccacgatgtccatctcacgttctgccagctcctgc

SEQ ID NO: 614585 - DNA, 289 bp, Homo sapiens
  misc_feature (66)..(66): n is a, c, g, or t
aaaaaaaaattttaggtccccttttaatttgcccccaaaacccctttaatccccttgttaattttnctgttggtccaaaaaggaacccctctttggcccctaggaaaaacccctgttaaagaaggtaaaaatttttcccccccaagtgggccttaaaacccccccccattaaaaaaggggttagggccccccccccccccctaaaaaatccccaaaaaaaaattggacccccccccccccattgggcccatttttccccccaaaaaaaaactaatgtttggtttaggta

SEQ ID NO: 614586 - DNA, 429 bp, Homo sapiens
ggcacgagctttgactcaactgaggctcctcgggcaaaatctgtacgggcaaagaaacctataaagtacctggaagagtcagatgaagaagatctgtttaaaaatgtgaggcgattatttaaagtaattatcttaccaagcccaagactggttttaaagttacctgaagctcttaactgcctcccctctgaatttagtttggggaaggggtttatagtacaagacatcaaagtgaagtaaagcccaagtggtcttaagctatgtataaaactggctaaaaagtgaccatctcaagggcattgatatcatctctgatatgccagagatagaagacagaaaacttttgacattaaaaccagaatattaaggactatctggaactggaaaaaaaagtatactgaacacttcaacgtaaagcagtggggttaa

SEQ ID NO: 614587 - DNA, 124 bp, Homo sapiens
ctgtgtcatgcagtggtactctggaacagtacagagttctgatagctctctgtcagagctcttcatgtactctttacagtcctacggagccccacggggaaccacggaggagctgacaccccag

SEQ ID NO: 614588 - DNA, 948 bp, Homo sapiens
tatgatgtctgtgtggaaagcggctgtgcagacattcaatgttaagaaaaaaaaaaaaaaaaaaaaaaaaaaaaattttggggcgtcccgcccccgaaaagtttttaaaccactggggggcgccggccccaggaaggaagagcaaaacgtggggcgaaagtgggtcccacaagggaaaccggggaccaatcacatatggggtgtggtttcctcgccaaataaaagaaaccgccgggggggcacccgggacgcgtgctccagaaacaatccgcatggggcaggttcggaaggagccagcacgggggtcctgcactacacagggcgttcgaaggcacagcccgcaatgttcaaatttacccccgccctggggatgaaaatgtctgtacagcacaacggttgcaccttgggggctttgacaaataacaacaaccagtgggtcttaaggttgaagtgtggttcagggaccagtgcatattagtggacagcacttagtagctgttggaggaagatgcagagtcgagaagatgaagaggaagaggatgtgaaaatcttaagtatatctggaaagcggttctgacccttggaaggtggtaagcaaggttccaagaaaaaagtaaaactaggtgtgatgaaatgaagagacgcaggattgcacaggacgacgatgccaccatgacgtcagaccaaaccttagaagcctgaggaagctacaaaaacagccagcaagaaagacacagaaaaataccagacacaaagaaaaaagaaaacacaaagaagaccaaaaccaacacaaaaacaagcacaacaacaaaagacacaacccaacaacagacaagacagcgacaaaaacggcaaaacgagacagagaaaaaaggaaaaagcacaaaagcaccacaaaaaaaagaaaccaaacacgaaagcaagacagagacaacacaaaacaaaccg

SEQ ID NO: 614589 - DNA, 308 bp, Homo sapiens
agagatcacccagtcgccagacccttcatcctaccgatcaggaaggcttaacacccattggggcgacagccactggcaggaggccacattgcacgacagtgcaaggccgatactgaacagtgctctctagattgctctgtcacagttctcctgactgcgctccgccaggcacagcttcaccgttcattttagcctgtagcctcactaaggtgacggtcgtcgcaagcctcgccacactgtgccccggcctacgtccctcatatgtgctctatgtcttagtccccactactgccccggaaggtggtacc

SEQ ID NO: 614590 - DNA, 408 bp, Homo sapiens
  misc_feature (3)..(3): n is a, c, g, or t
tcnacgaacaaaccccccaaaaacttttaggacaaaaactttcccataaacatgcccaccccatcctttcatgttagaacagctgccctctgtggtcctgcctgggtggaagtttcaccttactgatagtccctagagtaagaaagagggctgggtgcggtggatcataactgtaatcccagaactttgggaggctgaggtgggtggatcagctgaagctaggagtttgagaccagcctggccaacatggcgaaaccccatctctactaaaaacataaaaattagctgggcgtggtggcgcatgcctgtaatcccagctgttcaggaggctgagacacgagaatcacttgaacctgggaggtggaggttgaagtgagctgagattgtgcactccagcgtgggtgacag

SEQ ID NO: 614591 - DNA, 108 bp, Homo sapiens
agaacggtcagtttagggctggtgcaaaggatgcagttgcacattgttgcaagcagaggcaatgaattacgaaggcagtccaattaaagtaagggtgccgagctcgaa

SEQ ID NO: 614592 - DNA, 254 bp, Homo sapiens
cgatggactgtgagtctgcctgctcggaagagagagagcccgccacggctagcggcagagttgtgcgcgatgtctctgctgtctcgtcgctgcggcgacacgctgtttcaccagaggctgcctggtctgccagcagggatcagtcctttccagccttgagtttgactggcagggagtcagggggtcgctggcttgggcgggaaaggtggtgtggaggagagcgggactgagcagcataggtgggtgggatctag

SEQ ID NO: 614593 - DNA, 397 bp, Homo sapiens
agggtcagattgacattggggtgtgtgtggtctccccacctcctacacattatgcctacacgaacacagacacatgcaggtgcctttagcagacacaaagtcagtgattcttcaagtcacacagggaagggcaggaacaactcttgcctctcagtcccacacaaggcagctgtctcacactttacaagctgtgagagacacatcagagccctgggcactgtcactgcttgcagactgagagtagctccctcctttactatctgagctacttcctacctccacatcacagcagcgaacacagctccagtgatcacagatccaaagagaaccaggccagcaatgatgcccacgatggggaatggttgggctgagaagacgtgctcccatcccagggtga

SEQ ID NO: 614594 - DNA, 493 bp, Homo sapiens
agtatatacactaagatcgtacacctaccgttatcatgaccactgctcatgtctacttttatacatctaccgtatcttaaatgatcgaaaatttataagtcgctgaatatataataacctttgcttgtatgtaaccgaaaatggatataagagccaacatttagagtatgacaatggagctgaacagttttaaatgcgcaagcaagatctgtcctagtgaatgacttgtacccttaatttactgtgtaacgatggtcacataatttccttagctaggtaagtgggagacaaatagagaatgctttgtatcagtctgtcaaaacaaatcttatcttgtagaattagcgtaactgtattatacgagctatattttacatttgccagaaaagaacagcttgtataacgcttggggaagtctctgctctgtaatgtcttaagcgctgacagtcttgtaaggtatgtttatctcttcatgctacagtctcagttggtg

SEQ ID NO: 614595 - DNA, 658 bp, Homo sapiens
cacaccacagtggtctacgacggagggtatcataataatctcttatatatggattcatgggacgcgcacggccgaccaggaggcattctgtcaaaaccacctcttccccgcatgggaaatcccactgggcgtccgcgacggtcatcaaacatcattgtaaaaccaccataatcataggtttcatcgtaaaaattgggatcataaggctgtgcacgtcctttgatgggagactcaaatataagatcaaggatgatctttatgcactctactaccctatcgggttttcctccaataagaacaactctgtcagtggaatgaggacagcattcctggaaaagcttgatggtggtttgagtgttctctcgaagttctttgattttagcacctttgaccccaataattcctcctgctagactctgatgaatcaacagcctcaactcgcagtcaaagtcacttcctttatagtgttggtaatttaagcattccacagcatcagattcgagcgggagctggctggttgcagtgggtgatggcaactgcaagccctcttccaaggtagggatgattttcttcagaatttctccaattgtttcaatatcagcactgatactcaatatgcgctcggggccactgctgtctgggactgaaacactggcat

SEQ ID NO: 614596 - DNA, 382 bp, Homo sapiens
  misc_feature (382)..(382): n is a, c, g, or t
gagagagagatttagggaggaaggaaggaaaagagaaagaagacaaagaagaaaagaaagacaggaaggaaagaaagaaaagaaaaggaaggaaggaaagaaaggaacgagggaaagaaaaagatgaaagaagaagatgaaagaaaaaataaagagcctttaattggtgattggatcataaaggctccaccgtcatgaatggattaacccattcatggattaatgagttaatgaattagtggtttatcacaggaatgggactggtggttttatacctgtgctggctcgtgccgaattaggcacgaggaactagtctcgagttctttttttttaatatatgtccattcatctttattcctttatttaatcctgcccatgtatn

SEQ ID NO: 614597 - DNA, 540 bp, Homo sapiens
ctcttgtcgttcaccgtgcccccgcggcccttctttttgggttttccgccctttagacgggttttttgcgcccccgccccttctcgctgtacggggtctcccaccccgctgccgttctgttgtctctctcagtggtgatgttctctctctaatatacgctcccccgaggtggcgctcgtctcctctccccatcggcgttctccggtgctttggcgctctccgcctcgtcttgactaatttttctgtcctgtgcccacctggttcggtgttgttcccaggtgtgtctgcccccccagtgtactctctttccgccgggcgagtcggtctcctcgccggtcatggcgccacactccagtgtcacagcccctcgatgactacgtccgattgtgtgcggagacacctatttaggcgcggggctcatttttttgtcgcgccgttgatctgccctctctcgccttcttacgtgtctgtgggtcgaaacacgccgccttctgggagccaaaagagcaggtacccccctgtcccaacaatagacagaca

SEQ ID NO: 614598 - DNA, 432 bp, Homo sapiens
ctggcgaggcagtctcacaggaagacgggaatagggaaacatttttcagactgatggaacagttcaagagtgctgcagccttgttaaaaaaaaaaaaaaccccccaaaggcttttcattggggggccaaaggcccaggggaggttaaaagggttttttcacagaaaacacaaaattcccctggggggaagccaaaatttggaacacactttcttttggccaagggttttagcctttaaaagtcccagttaagggcctcctgtctccctgggttttggcggggggaaatttgccggcccccgggttttccgggcaaccctttttttttttggctttaaaaagccccaaattttccttgctttttttaaaaattccaaccatcccggccgtgggaaaggtacttttaaagaatttttttttttgggcccctgag

SEQ ID NO: 614599 - DNA, 349 bp, Homo sapiens
ttccagaggatccctgaatatccttcttaatagttatttccttttattttttggagagagtctcgctctgtcgcccaggctggagtgcaagggcaccatctcagctcactgcaatctccgcctcccgagtacaagcgatatctacggcttcagcagcctcttgaatagctgggattacagtcgtgacccaccgcacctggctatcatttggtattggtaaatccatggataagggctttctcagatactaaaaccttagaggaggattcattctatcccataaggtcgaaagagtgtctttcctcttccaggaggtggcaattggaatcagcagccaaaatttaaacct

SEQ ID NO: 614600 - DNA, 298 bp, Homo sapiens
gctcgacgatggggggagggggaaaaggttggggagtagctaaataggttgttgttgatttggattaaaaaatacgtagagcggattggattgggagccttgatattgacagtatgaaagggggcctgggctcggcggaggttggggattctcgggtccgggttttcgggaattgttcggcaataaaaagtttgtttgaaatttggggcttaggggttttgtttggttggttgaattggttttgggtgggggaaaagtaaaaagggttttgtcccaaagtttgggttttttccaaaag

SEQ ID NO: 614601 - DNA, 146 bp, Homo sapiens
tggttggttttgacttcggattgaacttactgtagcctccggtggtttcccccccccgcctccagggaggaagaattttactcccttaataaaaaatgaaaaggggatgatggtcaaaatctttccaaataaaattttccctgtta

SEQ ID NO: 614602 - DNA, 769 bp, Homo sapiens
caagaaacagaggccctgagaaacagtgactagcaaggtttcattttattattaataatagagattatagaattgaattgcaaaatgagtaaaaacaaacactataatcccaccttggtaaagttcatgtttactgggttttctacatcagcttttaaataattcagtgtgctttggtttttttgtttggttttgttttgtgtttatttgtaacaaagaacacctaaccagtgtgtcttagaaaagaattgaacccttgataacactgaaaaataatgaaacttttaaatcctccagaatgtgaaagactgctcagggattataactaatgcattttattcttatgacttgctgattccaccgacagctgccttaggggtgcagttctaatcaatgactgtatccacttggcaatccatacctcagaaacacaaatcggagaaaaccatcaatgtgtaaaagagacctataaatcagaatgtcaggtgggcacagtttcattttagtaactagtatttagagattattggataaaatattccatggacacaagatttatggtcttcatatccctccaggattctactgcatcccagtgggaatatgacatcctttgtgattttcttctgccaacaggaatgatgagttagtgacaggaaagcaaaactgttgtaagttctctcgcttattcaagcttttaaatgacttaccatgatttcctttctaaggagagtcatagagtcttctttgctgtaaaggtgtgcctatc

SEQ ID NO: 614603 - DNA, 829 bp, Homo sapiens
  misc_feature (44)..(44): n is a, c, g, or t
ttatttattacttcagattgatgattcagcgtttgagaaagttngggaaacttcaggttaactccattcacaacctatgcagtccaacggaggttatggaggtggaatgcctgccaatgttttaatgcagctcgaggatacgaaggcggggtagccctggtcctttctctaaagtgtgatggcaccttgttcaccctagtcgagattattccagtgatgaagctactgttctgctctgaaaaaaatactgtcagacgaatcctgcatttgcttgagctggcatgcatgccttaggactcatggaccagatccttcggatcgacactgaattttcaatgttaatcagtttggatcctgatcctcggctgaccctttttgtgaatagctaacaccattatggcacttatttttcttctatactaaacactcttgtattttactaccaaccccactggtctacaaccacattgctaaccatagcacggctattatgtcgtcagtaagccatgatctcatgctatttacggaggtacgcgacccccaagtacacttgacattcaatttttgctagccgccccgcaacttgaagacaataatcgtgctgccatcgtaagtgaagccgccgctcagcgccaatacccccggctctccccaattgctatgctaggagttctgtccataacacccagcacttaactaactttaactgcggaaacactcctttttacttcccaccacaacccccgcgaatctacttcaccacagcccacttcggtgccattaccgccattccataccccctcacccctccctcgacactccataaaag

SEQ ID NO: 614604 - DNA, 169 bp, Homo sapiens
gcagtgagcttcaaacggagatagcagacaaatgctctggggaaacacccaggcaaagaatagggcacaggtatattgagatcttcagaagtagcaggagtgaaatcaaaggatactatgatccaccaagaaagactcgctgggacagcgacacgggaccactactgag

SEQ ID NO: 614605 - DNA, 317 bp, Homo sapiens
  misc_feature (23)..(23): n is a, c, g, or t
ctgaggggacctgggggctttantaaggtttctcccctgggggctttactcatagtggcacacccttttaaaggggggtcagcctcccctcccccccttccttccctgtccttggatttcagggacttggtgggcctcccgttgaccctatgtagctgctataaagttaagtgtccctcaggcagggagagggctcccagagtttcctctgtacgtggccatggccagaccccccagtcccttcacccccccctgctccccacgccccccccatttggggggctgtttttaaaaagtaaagtttttagaggttcata

SEQ ID NO: 614606 - DNA, 420 bp, Homo sapiens
  misc_feature (79)..(79): n is a, c, g, or t
  misc_feature (123)..(123): n is a, c, g, or t
gagaaaaagagggtattggacttactgaagaaggtgtgtattgacacctttataactgaaatgaactatggaatgtctntgtttttaatatcttaaaagactaaaagattaagagtaaggtgntgctgggcacgctttataggtgtggtggctcacacctataatcccagcactttgggaggctcaagcgggcagatcatgaggtcaggagttggagaccagcttgaccaacatggtgaaaccccgtctttactaaaaatacaaaaattagctgggcatggtggcgcacacctgtaatcccagctactcaggaggatgaggcagcagaatcacttgaacccgggaggtggaggttgcagtgagctgagatcgcgccactgcactccagcctggacaacaaaccgagactccatctcaaaa

SEQ ID NO: 614607 - DNA, 384 bp, Homo sapiens
caccactcctatagatcagtgtttgaaatattgggagaattaccaaaatgtgacacagagacacaaagtgagcacatgctggaaaaatgatactggtagacttgctccatggatggttacaacaaaccttcaatttgttagcaaagtgcaataaaacaaggtaggccttcagcctgggcaacatggcgagatctcgtctctacaaaaaaaaaaaatacaaattacccaggcatggtgctgcatgcccgcggtcccagctacttggaaggttgaggcacgacaattgcttgaaccaggaggcggaggctgtagtgagccaagactgtgccactgcatgctactgtttttattatggggactgatctataggagtggtgggggatc

SEQ ID NO: 614608 - DNA, 266 bp, Homo sapiens
cgatatgtgaggtgattagaggatcgccggggtgcatgcatgtggacatcgagcatgagaacaacaaccgctttgagcgagtatgagtcggtgtggacagaagcggatacgggccaccactctcctgcgaacgtggccttccgaggctcctggccttcatccatgctgcagcgcgcaacagagcaacccggaccagtgactgctgcacttggactgcgcgactgggcgatgacacctctgcgagctatggcgaacgccaccaacta

SEQ ID NO: 614609 - DNA, 291 bp, Homo sapiens
tgaatggttccaatatcttactatacaaacaagcgtacaatgaagaatatccttttgcatatgtgagtatatcgtgtacctaaattcgaacaaatggaactgctcggacaacatggtatgtgcatgtataacattagacagacaaacgcggctatgcttcttctgttttcgtttttgtaacttaccggtacttgtaacgtaatacgtgtgttatgaaaaatatattgacttgttaactgccctctagcatgtcagctatactctcaccagaataaagtatgatcaacaaaa

SEQ ID NO: 614610 - DNA, 164 bp, Homo sapiens
attggtgttgaggatcctgacaggacgacacccagttacgtgctttacggacacgagcggtcatcggggattcggcagaacaagttggctgaaccggagaaacgtgtgtgacgcgaagcggtgatcgggcgcgagttcgggaaccggttgtggcgtcggacctt

SEQ ID NO: 614611 - DNA, 674 bp, Homo sapiens
cacggtggctcacgcctgtaatcccagcactttgggaggccgaggcgggcggatcacgaggtcaggagatcgagaccattctggctaacgtggtgaaaccccatctctactaaaaaatacaaaaacttagccgggcgtggtggcaggcacctgtagtcccagctactcaggaggctgaggcaggagaatggcgtgaacccgggaggcagaacttgcagtgagtggagaacatgccactgcactccagcctgggtgtcacagcgagactctgtctcaaaaaaaaaaagaagaaagaaagaaaactatacttgtgccccttacattgaatacaaaaaaaaaaaaaaacaaaaaaaaaacgtttttgggccgcgccttgggccccggagaagaaagtttttctgaagaaaccacttgcggtttgggggcgcgcgcgggggccccggtctggtttagcgtgtgcaactgttggctccatggagcgtgctccctcaggagaaaactccgcgggcacgggcacttgggtgctgtggggtttccttccccatagtaaaaaggccccgcgggggggacgacggagggtttcggtataacatcctccagaagtgagtcggggggcccttgggggcttctcacaggatgttccgcgaggcgtattaaatggccgcccgctgtgc

SEQ ID NO: 614612 - DNA, 826 bp, Homo sapiens
  misc_feature (595)..(595): n is a, c, g, or t
  misc_feature (671)..(671): n is a, c, g, or t
  misc_feature (702)..(702): n is a, c, g, or t
  misc_feature (716)..(716): n is a, c, g, or t
  misc_feature (720)..(720): n is a, c, g, or t
aaccagggcccagctcagaaatcagcgctgatcaaataaagcacacattccctttggcactaaatttgactcggcagcgtctgtacagggatcctggcaaaaccagaacattcagcctttagaatcactggggattggctcaccgctgtgtggaagcacaactgttatttctgaatgccatccacgtggctcagccactgagatgaagcaccattcagaagaagcaaatgtgtgctctatgtttcacccagtctgatttcgccaagatcacacagataggttctacaaagaaagcactattgccattatcatcgaaatacaaatctacttttggaagacaagtgccttataaatacaccaattgaaaaacaagcaaagtgaatttaagctacggtctcactctgtcatctagactggagtgcaatggctccatcacagctcactgcagcctcgacctcctgggatcaagtaatcgtcctgcctcagcctcctgagtagctgggactacaggcatgtgccaccacactcagctaattttgtatagatttagacgtggggtctccctatgttgcccaggctagtctcaaacatctangttcaagcaatcctctgcctcaacctcccaaagtgctgggattatgggcaagagacctgcacctgcccttgtctgnttatattagggggttctacacaagattgtgngaaagggtttatancaanaaaaataggtttgacaattagtaaccattgacccagctgctaattgacagtgaatatttcatttcagtgactctactttgttggtgacaaagctctactgaccggg

SEQ ID NO: 614613 - DNA, 777 bp, Homo sapiens
ggtgagagaggtatgaaggttatcgaaaaccgggccttataagatgaagaaaagatggaactccaggtaaatccaactcaatagaagctaagcacgattgcagaagaggcagatagggaagtatgaagaggtggctcgtaagtgggtgatcattgaaggagacttggaacgcacagaggaacgagctgagctggcagatgctcccgtatgccgagagatggatgagcatggattagactgatggactcagacaccctgacagttgtctagaagttgctgctgtacactaaacagtattctcttacagaaacacgaagataagatatgaggagagaaatgcacgagttcttactgattcatactccgatggcggcagagacccgtggctgcgtttgctgagagatcggtaaccaactgctggaaaagacaatagatgagcctggaagatgagctctatgcccaggaaactgaaggtacaaggccattagcgaggagctggaccacgccctcaatgacatgacctctatatacaactgaaatgcaccaaagaggagcacctctgtacacacaaggatgctgtgaccagaccctgcttgaccctgaatgagatgtagacacgccccaagtcccaccctgtctgctggtcctccctctgagccagactccgcctgaggccagactgcgcgaagctgagcttcaaactgaggggctgatctttaactggaaggctgcttgctcctttcacaccccctccttccctgcgtcttcgccgcaaca

SEQ ID NO: 614614 - DNA, 513 bp, Homo sapiens
gcggcagctgatcacatttaacaaatggcagttccaaactcctgaagcaatgggtgaaaaataaaactacagcaaaacaaacaaaaaagaaaaaaaagggggaaaaaagatgcatctgtcttcagtagaaattgtgcagaataccaagcattggtccctttattctccggtaagggttaattaagctcgcctgttttgtgcgcagcctcctcctcatcagggttcatagagtgaaactctgccacatacaggctcttgtcaatgctgctgggtatgggctttatgtcagtcatcagctggtcctcaatgccttttagattgaaacgatcttctgaggtgatcaggttaatggccagacccaggtgaccataccttcctgatcgaccaatgcgatgcaagtacgtctctgcatttttggggaagtcaaagttgatgacaacattgacagcctggatatcaattcctcttgtaaaaaggtctgtgcagaccaggttcctgcacagtccattcgag

SEQ ID NO: 614615 - DNA, 1133 bp, Homo sapiens
  misc_feature (258)..(258): n is a, c, g, or t
tggggcccggttcccccctctgccccccagcccggggtgtcggagtgtgaacactcattctcaaaaaaaaaaaaaaaagagggggggtggggagagagagccttttccagagaaatttttaagaggagggcgcggggcccgcgggaccccgaggcccgtgttttccctaaccccttgtgggggaagacccgacatgtgtgggcgagatctccgcgagaggctccaagagaattgtggagaacaccctctcgctgtggnccccacactgtgtgtgtggaaaaccccctcttctctcttctctcttaaacaattctcccacagacatacttttctctcgtgtgggcacagtgtcgtgtgtgagcggtgtggcgcgcccctgtgtgtgcgctcctctcggacgctatcacctgtgtggggggagaggcgcgtcttgagcgcggccgggcgcgaaaacactcgcgtgtgttgtgccacccccgttgtgtggagaaagagtctgacgagaagatgtgttttgccccaagcgatgaaaacgcccctgtagaaatgtcgtgttgatgtgtggccaataaggtggttgcccactctctacccagaaagccgccctgatggggggcgcacaccaaaacaagcaggaggcgccctcttttataaaaaaacacccccccctcggtgggtgttctctcacaaaaacgaataacaacacacgaagcgggaggggcggcggtgcatcactctccctattaaagaggcggggcgatgggacgactctatctcccccccgaaagaagtgtctctttgaaccccctcgtttatatgaaaacgaccgcaccccgcttaaatcataacacagcgtgctgtcttcgcgacaacattaattatctagtatcgaatcgtaagcgctcgttatgacgccgcgggggcgtgcatgttgccgccgcccacgttgtgtgcgcggctcaattctttcatgtcgggtcgcccccccgccgacgcctcttcttatcgcggggggggggggggccacatcaccccccgcccttcttctcttcgtgtcgtcctggcccaccgcaggcgggaggtgatctctccccccgctgatttggtgtagtcatctctcgttcctttatcaa

SEQ ID NO: 614616 - DNA, 205 bp, Homo sapiens
  misc_feature (35)..(35): n is a, c, g, or t
  misc_feature (71)..(72): n is a, c, g, or t
  misc_feature (154)..(154): n is a, c, g, or t
  misc_feature (167)..(167): n is a, c, g, or t
aaagtggtttggtttagacgtccatctggtttttnataacttctgtaagagcataatcaaacaggaatttnnttttctcagtggataggtcagtgaggagaagtgtggaaaggcctgggaaagacggatatttgaaaatgaagtcatggccctnctgagagactttnctaaaaacaaaaacaaagagcagagactacgtgcccca

SEQ ID NO: 614617 - DNA, 573 bp, Homo sapiens
  misc_feature (568)..(568): n is a, c, g, or t
agacttaatgtcctttagcttgtgtatataattgtgttgtatagtctcagagtacattctaaccctacatttctaatcattgttattggtaatcttttctgtgaatattaggtttcctccagaaatagtctgttatttggtaaagttatctgtgtgctcatgtacatcttcctacgatttacaggcaaatcacagtaatgacaatggtactgggtgaattctgaatatacttgctaaatggcacatgcactacaagaggaaccttttgggttatttaatatgcacagaaaacattagaaaaaatttattacagaattctaattccagtatgaatagtggaaacccatctgtaaattagatggatgttggatggaaaatgacattgctaaatttgaccatttctttttacctactaatgtggaatgctttgtatcataaaccacagggtctgaaaggctccgttacagggagcatggtctgttgaagatttttaaaatgcatttttctagaagaaattctgtgcaggaaatgtctaataaaacggtgacggttttaaagaataagcccntgtgt

SEQ ID NO: 614618 - DNA, 135 bp, Homo sapiens
tgcaacctctgcctaccacgcttcaaatggctctcctgcgtatcagcctcccgagtagctaggattacaggcatatgccaccacgcctggctaatatttgtatttttagtagagacggggtttctccttgttggt

SEQ ID NO: 614619 - DNA, 125 bp, Homo sapiens
aatgtctcactggaagtatatatatatatatatatatatgtatgcgtgtgtgtgtgtatatatatatatatatatgtatatgtttctgagtaatttttaaaaaataaaacaggttaataagaaga

SEQ ID NO: 614620 - DNA, 169 bp, Homo sapiens
agagagcatattatgcgactgtgagtcgtcgtagttagagtttgctaggcgaatagtaatgaggatgtaagtccgtgtgctattatgagaatgactgcgccggtgaagcttcagggggttcggatgagaatggctgttactacgagggctatgtggctgattgaagagt

SEQ ID NO: 614621 - DNA, 954 bp, Homo sapiens
  misc_feature (21)..(21): n is a, c, g, or t
  misc_feature (29)..(29): n is a, c, g, or t
  misc_feature (42)..(42): n is a, c, g, or t
  misc_feature (55)..(55): n is a, c, g, or t
  misc_feature (72)..(72): n is a, c, g, or t
  misc_feature (83)..(83): n is a, c, g, or t
  misc_feature (86)..(86): n is a, c, g, or t
  misc_feature (100)..(101): n is a, c, g, or t
  misc_feature (109)..(110): n is a, c, g, or t
  misc_feature (131)..(131): n is a, c, g, or t
  misc_feature (137)..(137): n is a, c, g, or t
  misc_feature (150)..(150): n is a, c, g, or t
  misc_feature (155)..(155): n is a, c, g, or t
  misc_feature (168)..(168): n is a, c, g, or t
  misc_feature (175)..(175): n is a, c, g, or t
  misc_feature (183)..(183): n is a, c, g, or t
  misc_feature (190)..(190): n is a, c, g, or t
  misc_feature (206)..(206): n is a, c, g, or t
  misc_feature (223)..(223): n is a, c, g, or t
  misc_feature (227)..(227): n is a, c, g, or t
  misc_feature (231)..(231): n is a, c, g, or t
  misc_feature (239)..(239): n is a, c, g, or t
  misc_feature (248)..(248): n is a, c, g, or t
  misc_feature (261)..(261): n is a, c, g, or t
  misc_feature (263)..(263): n is a, c, g, or t
  misc_feature (268)..(268): n is a, c, g, or t
  misc_feature (282)..(282): n is a, c, g, or t
  misc_feature (287)..(287): n is a, c, g, or t
  misc_feature (293)..(293): n is a, c, g, or t
  misc_feature (300)..(300): n is a, c, g, or t
  misc_feature (321)..(321): n is a, c, g, or t
  misc_feature (338)..(338): n is a, c, g, or t
  misc_feature (340)..(343): n is a, c, g, or t
  misc_feature (345)..(345): n is a, c, g, or t
  misc_feature (364)..(365): n is a, c, g, or t
  misc_feature (380)..(380): n is a, c, g, or t
  misc_feature (386)..(387): n is a, c, g, or t
  misc_feature (391)..(391): n is a, c, g, or t
  misc_feature (397)..(397): n is a, c, g, or t
  misc_feature (399)..(399): n is a, c, g, or t
  misc_feature (403)..(403): n is a, c, g, or t
  misc_feature (406)..(406): n is a, c, g, or t
  misc_feature (408)..(411): n is a, c, g, or t
  misc_feature (417)..(417): n is a, c, g, or t
  misc_feature (419)..(419): n is a, c, g, or t
  misc_feature (421)..(422): n is a, c, g, or t
  misc_feature (424)..(424): n is a, c, g, or t
  misc_feature (427)..(427): n is a, c, g, or t
  misc_feature (430)..(433): n is a, c, g, or t
  misc_feature (938)..(938): n is a, c, g, or t
gcttgcgcagaaagttaaaanaatgaaanatctattattgcnaataatgtgggtntttctagtgagaggcgnaaggtgtcaanganaaagaggagggttnnttcagtgnnctgtgtggtcaacgagagccnatgtangagaaagagaganaaaangaggctcccagcnggaggcntgccccancgcccancagtggaggtggctancgtggctcgctccagcnaaanaagntggcactnaaaaaaaanaaaaaaaaaaagnanctgangctggtagggtgtnttcangctganccaaaantgggggtgttgtgtcctaaangatgtcagttgcaaccngnnnngntacaaaaggaaaggccaannaaaaaaagtgttganggaggnnaaanaagaangngggnggngnnnngggagngntnntnttnttnnnntttagtaaatgtatttgctgaaagaactgtggaaaaaaaggcagaagcaagtgaaagataatgaaaatgtagtcaatgagtactcctcagaactggaaaagcaccaattatatatagatgagactgtgaatagcaatatcccaactaaccttcgtgtgcttcgttcaatcctggaaaacctgagaagcaaaatacaaaagttagaatctgatgtctcagctcaaatggaatattgtcgcaccccatgcactgtcagttgcaatattcctgtggtgtctggcaaagaatgtgaggaaattatcaggaaaggaggtgaaacatctgaaatgtatctcattcaacctgacagttctgtcaaaccgtatagagtatactgtgacatgaatacagaaaatggaggatggacagtgattcagaaccgtcaagacggtagtgttgactttggcaggaaatgggatccatataaacagggatttggaaatgttgcaacaacacagatgggaanaatactgtggcctaca

SEQ ID NO: 614622 - DNA, 524 bp, Homo sapiens
  misc_feature (14)..(14): n is a, c, g, or t
  misc_feature (17)..(17): n is a, c, g, or t
ttcgtggcccaatnttnaacggggcccggcggggtatcttttgtaaaaccccccacacaccaagcaacggacaccagctggatgtctccaattcaagtctaaaaccatctacctggaaatagtgtcagatcccacaggttggggactcagtccccaagactgccccccagttacagacaccagtcataagttcaggccttcgaaacttctgactgattggctccaagttggagttcccatgtcctcctctttgggttcaaataatttgctggagtggctcaaataactcagggggatacttacttacctttactggtttaatataaagcaggggtccccaacccctgggccgcagaccagtaccggtccatggcctcttaggaacggggccccaccgtaggaggccagcgagcattaccgcttgaactccacctcctgtcagactagcgggcaggagattctctggagggcgaaccctattgtgaactgtgcctgcaaagggatctagattgtatgctcctatg

SEQ ID NO: 614623 - DNA, 386 bp, Homo sapiens
  misc_feature (170)..(170): n is a, c, g, or t
  misc_feature (194)..(194): n is a, c, g, or t
  misc_feature (208)..(208): n is a, c, g, or t
  misc_feature (213)..(213): n is a, c, g, or t
  misc_feature (239)..(239): n is a, c, g, or t
  misc_feature (270)..(270): n is a, c, g, or t
  misc_feature (359)..(359): n is a, c, g, or t
gctccaaggccagggggctttgctcatgttgagatgtcaggcttcctggaggcatcaggctttgagccctgctggggtccaactgactgacaggtgtcgcgcagagatgtcctcattctgtgcctccttctgtgcctcctaccatgttccctttaactgtgcctcagtgngggttagggaacaattttggtatngaatcaagtttatncaggnaattcacttgaggaactaaccagctnttactttctgctagaatgatggacatgaagnagagtaaagccataatgctccaaagggcctggtttctctgatacaaacatatttataaggacatattcctgggggtcttgggaggggtngccacatcaagaattagggaagggggg

SEQ ID NO: 614624 - DNA, 497 bp, Homo sapiens
caacttctgtattttgaattagtttaagaaagatcttctttacctcaggtttataagggaattaatcttgttttattttcatgcttatatgacttcatattttacggtgaaatttttatctatttgaaattttactggtgtatcctgctaagtttcatcaatgtaactcttcagttgttcaaacccaattgttaaaaaacttttaacattttaaacatttaaacttttaacattcccacttcaactttagaagttacatttgtcatatattaaaactccatattgatttcaaaatatttctagattttatgttttgtttttttatcttattatttctagttttaattgttttgaagcattataatataatatgccttatgacctgttcagaatggttttctgctgtagttcttaaacagactttccctgattattatattctgtatttatataaatccaacaacccttgtatgtaaatataaatgtatataaatttc

SEQ ID NO: 614625 - DNA, 817 bp, Homo sapiens
  misc_feature (389)..(389): n is a, c, g, or t
  misc_feature (411)..(411): n is a, c, g, or t
tggggagcctcaggggtctgtgcctggaagaaggaagctgtgataggttatgtgaaagagatgtctcctcatctctaatggcttaccgagacagctctcgattcagagacgagacttaatatggtatttgtagcacaatacatcacacaggtaaatgtgctccaggaagcctcactagtcactcgtcgatcatatacatactagatgtgctcatttaactaaaaacctattggatggggggaaagagagatccgtcatatgtgttccggttcgtcattcagagaaacggacgatgatagagtcgccagcagcacgtggttctcgtaaggatgaatgcttgtagtgctgtctaaacgtaacatcgtattgcgtaattgaatggattcacngctaatctgacatttgtatgtnggcgcacgtggcaccggggtggcgtgaggagaactagggcgatttcgtatacaatggtgcttaactctcgtacgcggtgcaaagggcaaaggggccatagttcaccatacacgcaaccacccgtagggaactttctaacaccgaaaggctttgtaaaacttcaatgcataaatgcaatatgctccgttatgaagagaggtaagctagttatgtaagggcgaaaacagaagtagatagaagagtataccgatgctagtgataggaattcttgatgaatctcaggcaatatatgtaatagacgtgtctgtgattagataccggatgtggtatgaggatccatattcattaactgtatgatttgagccaaaactgtgatgatatccgtatactagtagtagaagtagaa

SEQ ID NO: 614626 - DNA, 526 bp, Homo sapiens
tcgtcaccttcgtgctaactactccataaccgacacccaagctactctactaaccaactacccaaccactctactaacctactctgtaaacgatcacccaaagctactctactaacctactacgcacacctactctactcacctattccactaacctaccacccaaaactactctactaacctactacgcaaacctactctactcacctattccactaacctaccacccaactctactaacctactccactaacctaaaactcaaacctactccactaatctaccacccgaagctgctctattaccctagtctactagcttaccagccaaatctactctactagccaactacccaaccactctactaacctactctgctaaccgatcacccaaagctactctactaacctactacgcaaacctactctactcacctattccactaacctaccacccaaaactactctactaacctactacgcaaagctactctactcatctattccactaacctaccacccaaatc

SEQ ID NO: 614627 - DNA, 995 bp, Homo sapiens
atgcccagcagattcagagtaggatcctaggagctgagtgctgccgaattgtctggacatctgagtatttgaaaaaacaggggttctgcaatctagccctgtacaggtgtaaagatcatagccgtcccagtcgtgtatatggtagctggacgagttgggacttcgggacagaggcacaacgagtaaactgatatctgtcagtgacggtattgacctccagtctggcactgagcctaaataaggttcggacagcttagtaccctacatgaagccagctgccatgtttgaacaggctgcaaagaaactcagggcaaatacatagatgagaagtgaccttctaacacataaactatttaataataggacataacttccccaatttctaattctagcacacaaatttacaatatgtaccgagtcattatccctataaaactacccaacattagggaaccaaaaatacgaaatcagcattggtgtcaatactatggaggaaagtctactgaatctggcttccagatgttaaattgtatcgtcctagaaatattgactcgaaccatatcccttatgatggatgcagactgtccaatggtgagttgcaatctttggttcaatatgtcttgtgctgtgctttgaccagtgtctataccgctttgaagtgagaatagaagcctgtatatctatgacctaggggtgctcgtgcgtataagtcacgctgtctagaactggcgggacgaaccatcactgacgttctgccatattacctgatactaatgccccaaggagaggctcgcttgcactctgtccctctacgaatacaggacgggattcgatttaagaatcggaacagtacacgtgatattggtaacacgcttacatacaagcacgtcttggtcacaacactgatttgcacataaacgcgctcttccacggtcaccaccactcggggtcagatgccccgagctctgactaccagagagaaccaaccgaatagc

SEQ ID NO: 614628 - DNA, 1273 bp, Homo sapiens
gatattctgccataacaggaatgaagtgctgatacatgctacaatgtggacgtaccttgcacaacattatgctaaattaaagaagtcagacactaaaggccgacagtattgtatggttgccttttacatgaaatggttgcagcaacaggcaaagtctagagaagcggaacagtatgattgagtggttcatcatgggctggaggttggaagggatattggggagtgatcggtaactgatatgggagctcgtacggggagatgcactgcatcagatattctcataattggctggtcatattatcggtaactttaatgagatgatgctatgacactacccactgtaattcgtattacagtccaagaggagtgaaataacactgtatactatctctaggtacaagggtgtgtatcagaacatagacatgcttagtagtaaagacccaagaaagtaggagacaagcgcatggtgccaaaccgcaagctggcgtgggtcctagtcaggtgcctgcgtggtagaaaccttcgggcttttcattgttgtgcagcgaaggcacagggataggggtatgtacgcatgctgtgtgaagaaaccaagcgggggacatacgcctgatgatcgaggacgtcggtattagcaatggctcgcacagaagacttacggagttttaacccatgggccttaagtggatagtttgtttaaaaaattccaaagtcggaattggcttttttgggcaacttggttccaacaaggaagcccccacaggcttccccattgggtcagcgaagttccacactccgttggcccaacaagggaaacggggcctcgggatgggcagatatgtgctgtcggactagaaaagcgacaaagcgggaaggcctaggaacacataaccctttggcacaacaagggggccctatggagagaagaggcccccaaagaaaggccaggaaccccctatttcccgtaggaggccacttcccctggtgggtccgtgacagcgactaaaacaggttatggcaagagacccaaagggaataccccaaggctacccatcccaaagtcaacttatttggctgcgagccaacaaaggtcccaagttggaaggcaatcgacatttacttggcgcgggttcgcgaaaattgggcttagttataacacattatcccctttatagggtaggcctcccaacacacagccaaatagggaaaagaattctggcacacatatcactaactaggttaaggaactgcaaacaaagtgagaagcacacag

SEQ ID NO: 614629 - DNA, 343 bp, Homo sapiens
caggaccatgtagggtgcagtttttactccctaacccgtttcccgaaaaaggtgctccctcctttccagacaaatgagaaagggcaggatttcaggctggatccccctatgggttctccctcccccagcctggagcacgggaggggaggtgacggttggtgactaatggatgggtagtgggctgaaaaaaggggattaggaagggctattccaggctcagccctgttcctgcagttttgccgctgagtgtaggaaaaacaggcatgccagaccagggttagggttgtgcccagttgggccccggccatgggtggggtggcccaataaaccccgtggactccca

SEQ ID NO: 614630 - DNA, 118 bp, Homo sapiens
aacaacaagctgatccgtgagctgaatggatgaggtgacccggctgcgggaccttctgtacgcccagggtcatgtcagtgatgtcgccaagaccctgggcgtacagaaggacccgcag

SEQ ID NO: 614631 - DNA, 685 bp, Homo sapiens
  misc_feature (240)..(240): n is a, c, g, or t
  misc_feature (307)..(307): n is a, c, g, or t
  misc_feature (625)..(625): n is a, c, g, or t
  misc_feature (655)..(655): n is a, c, g, or t
aattatgcatcgtaggagctgcggttgtacactctacaagatgaggtttcggagccgcagctctttagactcataattgagctgtgcaccactctgagtgtggtgtaagcaatctgttttaggagatgagagaactcgagaggaggggacagcttgtgaagaaatcggtggatttttgcttcaggtgaaaatggccctgtgggtaagaggcacctgtgtggtggatgtgaagaatggcanaggatcagagcttcctaactcagatatgagagctgactgcacactcacactggctgactcagacttnctggctttaatgactgggaaaatgaatcctcagtcggccttctttcaagcaaattgaaatcactggcacatgtgtctcgctatgaagttacacaatcttcagcttcagccaggcaacgctaagctctgaagaactccctctggctactcttgtcaagatgagatatatagatatatatccatacattttattgtcagaatttagactgagactacacattggcaaatagcgtgggatagatttgtttctaatagggtgtgaccaatcctgtgttttctatgctctgggtgaatagagcctgatggtatactactgctntgcgggattgcatacaactgtgcattacanagtttatggtgattatggcctggggtgctt

SEQ ID NO: 614632 - DNA, 338 bp, Homo sapiens
tctctcttaggctcacagtcagttaccaaagtatcttagattaagatttggaaaccaaagaatgcataattagaagtgtcgcgtatcatgcaaagtctatgaaatcctaaataaggtaacacagttaatcatttaaagcacaatgcattattcttaaaataaaccagttcgtaagtgaatactgcaaattaaaacctgtcaaaccacagcaaatgataaggattaaacatccattatccacaatctcatttgaacctactcccatggatttgagagggaacccaaaagttcgcaaacctctctgagatgtgtgtcagagagagtattctaaagcccta

SEQ ID NO: 614633 - DNA, 209 bp, Homo sapiens
tggggcgcgaggccgggtgttgctgggtggcacagggagaggtgtgtgtgtgtttgtgtgtgtgcgtgagtgtgagcgcgagtccccggacggggctgcttctctcgctctctccctcgctagctctacccctcgctgccgtctctgcccccattaaattattggttgactcatcccggccgctgtcgctgccgccgccgcgcccacaa

SEQ ID NO: 614634 - DNA, 180 bp, Homo sapiens
gatgatctagaggatcccttcaaagttccgctcataaggggatggcatggctaggtttatagatagttggtgtggttggtgtaaatgatgtgaggcagtgagtccgatggaggttatgttgttgtgcaataaaacatgattaagtgatactagatataatgagatcagtgttctgtcctt

SEQ ID NO: 614635 - DNA, 117 bp, Homo sapiens
gactctgtatgcctcagtgcacagaatgagactttgtttaaaaaaaaaataatgattttgtcacctactagtccttcttagaaggatgatgggatccttagaaacttttcttggttt

SEQ ID NO: 614636 - DNA, 313 bp, Homo sapiens
tgagagcacgccacttcactccagcctgggagagagagtgagactctgtaaaacaaacaaacaaaaacaaaaaaaacaaaaactattctctcaccatatataaaaatcaaatcaaaatagattaaagatgaaagacataaatgtaaaacctgaaagtatgaaactactagaagaaaacattggggatatgcttcaggacactggtctgggcaaagattttttgggtaagatctcaaaagcaaaggcaacaaaagctaaaatagataagtgggattatatcactctaaaaacctgcacagccattgcactccgg

SEQ ID NO: 614637 - DNA, 133 bp, Homo sapiens
ttttattacaagttttcacatctgggactagtttctttttttcttttaactggaaatgccaacttcagcccaggttttttcacaaccaaactaaaaatgacttactactctggaaggtgctactctggaaggt

SEQ ID NO: 614638 - DNA, 80 bp, Homo sapiens
ttcggctggagcccaatgcccaggcccagatgtaccggctgaccctgcgcaccagcaaggagcccgtctcccgtcacctg

SEQ ID NO: 614639 - DNA, 124 bp, Homo sapiens
gagattcatgtcaattatcttgcttagatcaaataccacttgtaacagtcctgacctgagatagaaaacacacccacagagcctacaaggttgtaagaacgacgtgtatgactgtaacatagtg

SEQ ID NO: 614640 - DNA, 439 bp, Homo sapiens
  misc_feature (6)..(6): n is a, c, g, or t
  misc_feature (16)..(16): n is a, c, g, or t
  misc_feature (179)..(179): n is a, c, g, or t
gtcagncggatgtggntatccaggcggtgctgtctctctatgcctcgtggacgcacaactggcatcgtgctggactctggagatggtgtcacccagcaaggtccccattctatgagggctatgccttgtccccatgccatcgatgcgtctggatctcggctggtccgacatctcactgnactacctgcatgaaggatcctggactgacgcgtggctattccgttcgtgtactacgtgctgagacgtgaggattgtccggtcacttcacggacgaaactgtgcttgtgtagctctggtactttgcacaatgagatggccactgccgcgtcctcatcctcccttgataagagttacgagttgcctgatgggcacgtgatcaccatcggacatgaacgttgccgctgcccagagaccctgttccagccatccttcatcggga

SEQ ID NO: 614641 - DNA, 913 bp, Homo sapiens
  misc_feature (17)..(17): n is a, c, g, or t
  misc_feature (661)..(661): n is a, c, g, or t
  misc_feature (672)..(672): n is a, c, g, or t
  misc_feature (674)..(674): n is a, c, g, or t
  misc_feature (685)..(685): n is a, c, g, or t
  misc_feature (693)..(693): n is a, c, g, or t
  misc_feature (695)..(695): n is a, c, g, or t
  misc_feature (697)..(697): n is a, c, g, or t
  misc_feature (699)..(700): n is a, c, g, or t
  misc_feature (730)..(731): n is a, c, g, or t
  misc_feature (751)..(751): n is a, c, g, or t
  misc_feature (753)..(754): n is a, c, g, or t
  misc_feature (761)..(761): n is a, c, g, or t
  misc_feature (768)..(768): n is a, c, g, or t
  misc_feature (772)..(773): n is a, c, g, or t
  misc_feature (798)..(799): n is a, c, g, or t
  misc_feature (802)..(802): n is a, c, g, or t
  misc_feature (806)..(806): n is a, c, g, or t
  misc_feature (853)..(853): n is a, c, g, or t
gggactgggggcatttngtgttggctggagctggagtaacaagatggcgtcgtccgcggagtgacaggggtccctctgggccggagccgctggcagtggtggcagcgtgtatcgccgccctagctcaccgcgccccttttccagcccgcgacgtcgccgcgcaagcgaggcagcggcggccgccgagaaacaagtggcccatgctggtaacctgcctgagaagcccttcacaaactgcggcctggcaaaaagaaacctgactgagcggcggtgatcaggttcccctctgctgattctgggccccgaaccccggtaaaggcctccgtgttccgtttcctgccgccctcctccgtagccttgcctagtgtaggagccccgaggcctccgtcctcttcccagaggtgtcggggcttggccccagcctccatcttcgtctctcaggatggcgagtagcagcggctccaaggctgaattcattgtcggagggaaatataaactggtacggaagatcgggtctggctccttcggggacgtctatttggcgatcaacatcgcgaacggcgaggaagtgggcagggaagctgggagctgagaaggccaggcatccccagttgctgtacgagagcaagctctataagattcttcaaggggggttggcatnccccacatacngnggtatggtcangaggactncnangnnctagtcatggatcttctgggacctagcctnnaagacctcttcaatttctgngnnagaaggntcacagnggcnngacttatgttagctaccagatgatnngtnggantggatatgtgcatacgaaggggtttgatcacggagacgttgaaccanatgagctgcgtatggggatggggcgggactggagtggggtgcctaggggtgggttggggc

SEQ ID NO: 614642 - DNA, 913 bp, Homo sapiens
  misc_feature (17)..(17): n is a, c, g, or t
  misc_feature (661)..(661): n is a, c, g, or t
  misc_feature (672)..(672): n is a, c, g, or t
  misc_feature (674)..(674): n is a, c, g, or t
  misc_feature (685)..(685): n is a, c, g, or t
  misc_feature (693)..(693): n is a, c, g, or t
  misc_feature (695)..(695): n is a, c, g, or t
  misc_feature (697)..(697): n is a, c, g, or t
  misc_feature (699)..(700): n is a, c, g, or t
  misc_feature (730)..(731): n is a, c, g, or t
  misc_feature (751)..(751): n is a, c, g, or t
  misc_feature (753)..(754): n is a, c, g, or t
  misc_feature (761)..(761): n is a, c, g, or t
  misc_feature (768)..(768): n is a, c, g, or t
  misc_feature (772)..(773): n is a, c, g, or t
  misc_feature (798)..(799): n is a, c, g, or t
  misc_feature (802)..(802): n is a, c, g, or t
  misc_feature (806)..(806): n is a, c, g, or t
gggactgggggcatttngtgttggctggagctggagtaacaagatggcgtcgtccgcggagtgacaggggtccctctgggccggagccgctggcagtggtggcagcgtgtatcgccgccctagctcaccgcgccccttttccagcccgcgacgtcgccgcgcaagcgaggcagcggcggccgccgagaaacaagtggcccatgctggtaacctgcctgagaagcccttcacaaactgcggcctggcaaaaagaaacctgactgagcggcggtgatcaggttcccctctgctgattctgggccccgaaccccggtaaaggcctccgtgttccgtttcctgccgccctcctccgtagccttgcctagtgtaggagccccgaggcctccgtcctcttcccagaggtgtcggggcttggccccagcctccatcttcgtctctcaggatggcgagtagcagcggctccaaggctgaattcattgtcggagggaaatataaactggtacggaagatcgggtctggctccttcggggacgtctatttggcgatcaacatcgcgaacggcgaggaagtgggcagggaagctgggagctgagaaggccaggcatccccagttgctgtacgagagcaagctctataagattcttcaaggggggttggcatnccccacatacngnggtatggtcangaggactncnangnnctagtcatggatcttctgggacctagcctnnaagacctcttcaatttctgngnnagaaggntcacagnggcnngacttatgttagctaccagatgatnngtnggantggatatgtgcatacggggattgtatgcgcagagacattagccagagtacttgctgatgggtattgggcgtgcgtgggatagggattgcctgtgtttgggtggggcc

SEQ ID NO: 614643 - DNA, 82 bp, Homo sapiens
  misc_feature (38)..(38): n is a, c, g, or t
tctcatccaaacccccccaacgcttccccggcgcagtnatcctcatcctcccccccgggcttacatcctcaaaaaaataaaa

SEQ ID NO: 614644 - DNA, 1520 bp, Homo sapiens
ctctgcttgtgttggatcctgtcgtactgccctgtttcgtgtggatgcgcttcttcttgtcttctttgttttccctcttgtgtgttcctctctgtcgcttttcacgtttgtctgtcactcgcgctctgtgtgcacgggctctcttgttgcttcgcacacgttttgatactgtctttgtgtggtaacacaatcaccggcctccggtttctgtccgttgcatccttcctgaggtgcgcattttcttgtctccttggcccttcgtggttcgtccgtgtctggacaactggtgtgtctatcactctgtggctggtcttcgcggggccgtgccatggctgggaatgtttagagggccggacatggggggccatctctggtgcctttcctatggccttttgcttgtgtgctttgagtttctagcaccctgtccaagtgtgccccgttctgcccttttatatcgcatctgtctctgttctgccaccggttctcactttttttcgcatcggcttttgctctatgtttattacctcccccatgtgttttcactgttcagtctcttatcttttgactgtgtcacgcctctccacgatactcccctttcgcttgctgagttaatcaggttggtacctattatctagggataagttgaagagccccctgccctctgtagtcaagtatgatctttgccaactctagcggtgcctcgtggacagttcccacttcagtgccctacgctccgcatgccgtggttttccctccacttccgtgggaaagcatcgtatcgtttgtcttggtgtttggtccgcctatgcaacgacttctgcggattcgatactttcttgcctattgctcatccacgtgatgagttttcccccgcagactcgtctttgtgcctgtgggtcatccccctgcactttgctcctgagctcatggtgccttgtccactgctagcgtttcccacgagcttctccaaggcggcacagtgtctgtggagtctccacatgctcatcccacacttagtgtctcgccagtgcctgccactatcgcctacctttcaggtcagccctatggcgtatcgacagtggctcctcatctgtcccctcgtgtcgcccgtgtcggttccaggagctgcgagtcacgttcgtacccccatacatcttcgtgtctcgctcaagacgactcttgtgcaggaatgttgctggggacctcaccagccaggagcgcgtgctaatgccgtagcaagccggtccagcctaagaacccatcagcccctccaggagcatccccaagctctgtgtgtgactgatagctttctcgtccctcaagcctgtcaacagggtccgagatttgccatcgaacaatacgacaaccgtcgtacttttgttcttcttgtagttttgataaacatctgacagctggagctgataaatttatcttggggaaaccttcagaacctggtctattttgatgtcgtggaacctcttactgctttcaatacacgattaaaccgtcacctgttttga

SEQ ID NO: 614645 - DNA, 405 bp, Homo sapiens
tgatccacagttggttgaatcctcagatgcagaatcggtggatacagagggtcaactctataaaacatcttctataactattgagtctatattagccactattagagaataaagtactaatcgttatttttaatcacccaaaggaaaaactattgtttctttaaaaaatgtcttcaattttgcagtatatcaagtgtgttagctatcaagcttctagaccaataaaatatataaattatccagcaaagtagggttaaaaaaaatcatgctgtctaaagagcattatcaaaattttatccagttataaaatgagactgatgtttatgagctacgtctttcattgtcatctgcaatcagctcattcatcttctaggaggtagcttaatcaattgtggtttaattata

SEQ ID NO: 614646 - DNA, 556 bp, Homo sapiens
cccaaaaaaattcccccccgtccctcccaaaaaaaacaaaaacccgggccaaatttaaaaaacggtttcccagaccccaaaaaaaggggcccccccctggggggaagagggggggggtttttttcccccgggggggggttcccccaaaggccccaggggggggggcccctttggggttccccttttaagggcccaaaagggggggggaccggggccccccccccccctggggggaagggggccccccccccccttttccccccggggcctcccccccccccccctccctttttggggggggggggggggtttccccccccaagggaggggcctttttccctttaaaaagaaggggggggttccccttcccggggggggttttccccggggggtttttttaacccttaaggaaaatttttttaaggccccggccccgggcccttttcccggggtttggcccccgttaaaatttggaaaaaaaaaaaaaaaaaagggggcgggaaaaatttgtttttaaaataaaaaaggggggggttccaaaaaacccaagggccca

SEQ ID NO: 614647 - DNA, 148 bp, Homo sapiens
ctggtggtgcccagcgccatgcatgggtcatccccatcggggcccccaccaggcaattctccaacagttcccagcggatgtcgtgcaacttccatgggtaccccagcacagcaggcggtccagcatgtcaccccagtgcagctcctgc

SEQ ID NO: 614648 - DNA, 475 bp, Homo sapiens
  misc_feature (9)..(9): n is a, c, g, or t
  misc_feature (18)..(18): n is a, c, g, or t
  misc_feature (70)..(70): n is a, c, g, or t
aggaataanggggaaaanttaatgtttaaaagggttaacaggtttccaatttggggaaagatgaaaacanttcctagagatggatggtgcccaaaaggttcccccaatagtgtgaaatgtaccctaatgcccactgaaactgtacgttaatccatggcctaaaatggtcaatgttggctgggtgcggtggctcacacctgtaatcccagcactttgggaggcagaggcggggagatcacatgaggtcaggagtttcgaggccagccttgccaacatggcaaaaccccgtctccactaaaaatacaaaaattagcccaggtgtggtggtgcacatttgtgctcctagctatttgggaggctgagacacaagaatcgtgtaaacccgggagccagagtttgcagtgagccgagattgtagcactgcactccagcctgggtaacagagtaagactccatctcaaaaaataaaaaaaaa

SEQ ID NO: 614649 - DNA, 105 bp, Homo sapiens
agacagtgtggaatttgtgaatttgaaaaaaaaaagtgtactttatggattcaggattcaaaaagaatcatttggtatcgagtttaccccagacaaagggaaaca

SEQ ID NO: 614650 - DNA, 370 bp, Homo sapiens
  misc_feature (102)..(102): n is a, c, g, or t
  misc_feature (104)..(104): n is a, c, g, or t
  misc_feature (291)..(291): n is a, c, g, or t
  misc_feature (294)..(294): n is a, c, g, or t
  misc_feature (335)..(335): n is a, c, g, or t
aatacaacgtttaatcatctggttgatcaagaaatgcaatgctcagtttaggaacagcagcagaaccagctgtgtacacgggacttttatacaaaaaaattngntgtttacaatttttattcacaaaaagcttaaaaaaaccagagaccaaaggcagcatccttgctaattttcatctacattaagaaaaaaaaaatcttgtaactaatgtttttattttccttaaaaaaaatatttcgcttaggcacaatttgctggtggctttacaagaataagccaggtttccacagnatnccccttgagtgatatgtttccatttctccgctttttatagntaaggcctttttttcttctctcacaaagcgcacgt

SEQ ID NO: 614651 - DNA, 678 bp, Homo sapiens
  misc_feature (588)..(588): n is a, c, g, or t
tgcccagtgttttgaaaaaatcatttcaatagccagttctagggctcctgaagtgtatttcaattccctttctgcagctacttgtgagactgaggcaggagaatcgcttgaacctgggaggcggaggttgcagggagctaagattgcaccattgtgctccagcctaggcaacaagagagaaactctgtctaaaaaaacaaagacaaaattagccgggcgtggcagtgcatgcctataatcccagctactcagaaagctgaggtgggaggatcacttgagcctgggaggtcgaaactgcagtgaaccttgatcatgccactgcactccagcctgggcaacaaagcaagaccctgtctcaaaaacaaaaacacaaaaaacagttgcccgtggctgggtgcagtggctcatgcctgtaatcccagcactttgggagaccgaggcgggtggatcatttgaaatcaggagttcgagaccagcctgaccaacatggtaaaaccccgtctctactaaaaatacaaaaaaaattagccgggcatcatggtgtgtgtctgtagtcccagatacttgggaggctgaggcaggagaatngcttgaacctgggaggtggagggtgcagtgagctgagatcacaccactgcacttcatccagcctgggtgacagcaagaactcgtcttcaa

SEQ ID NO: 614652 - DNA, 252 bp, Homo sapiens
ggatctactcaacatggtgagatctgtctcgataaaggtataggggcatattcggaccagagtaacaactctctccaatagaatccatcgactctcactgccatatcaccacaatcgctctcgtgccatagagtgcacccattgccacgccgccaagacttcacacgattatcaaattgtacagccagtgtgcgtagaagctagacatgtcaactagtattggttcttaagacaacaggatcacgatgaccc

SEQ ID NO: 614653 - DNA, 582 bp, Homo sapiens
tccatgagattggtacatgtgttgtaaacactattgaggtgagggagaactcagacctatggaagtacacgaggccaacacaattatgccccttgtgaatacatttgtaaatatttactcaactgaagatgttatgaataacccagtgtcagtctcacagacatttcctcatgacaaggggaattcatggatggacaatattatgtgtattgagaaagcagttgtctggaaggaccatactcaagaatcccatctggagctccccactttgtttctctaactgaaaatcctttgcccatagtccttttggctctgtgacctctgcctcaccccgatacggtgactcctcttttctctattcatagtagagcactgttagcccaccatatgactattaactgtcctcacagtggattccacaagatgtgccatcattcttgcaaacaaaacagctccccagatgcaggaaagggtaaggataaagcaatcgaaccctatctgtgatgtggaccaagtcacatcttggacataactgttcacagtacatggattcattccctaagcccctcagtggccatcttt

SEQ ID NO: 614654 - DNA, 108 bp, Homo sapiens
  misc_feature (39)..(39): n is a, c, g, or t
  misc_feature (93)..(93): n is a, c, g, or t
gaccagcgaggcctcaaggaccccgacggatgcacaganctgccagctcaccacatatgccatgggcgcaacatctacaaggaagggcagganggacccctgaaaccg

SEQ ID NO: 614655 - DNA, 158 bp, Homo sapiens
  misc_feature (51)..(51): n is a, c, g, or t
  misc_feature (54)..(54): n is a, c, g, or t
  misc_feature (80)..(80): n is a, c, g, or t
  misc_feature (114)..(114): n is a, c, g, or t
cttgttctttttgctcaaaggtgtgcaccagttcattgccccctctgggtnttncatttctccaggagaaacatcccagnaaccagcactgtttaggcctgatacctttctaangtccatgttcaattttcaataaaattcaaagaaatgctaaaaaa

SEQ ID NO: 614656 - DNA, 126 bp, Homo sapiens
gagttcactgtttcagttcttaccttctcattgagttatattatgctcactgtgtgtaatagttataaaatagattttctttcttttttttatttcctttctttccctccccactccccgtcgacg

SEQ ID NO: 614657 - DNA, 385 bp, Homo sapiens
  misc_feature (80)..(80): n is a, c, g, or t
  misc_feature (112)..(112): n is a, c, g, or t
  misc_feature (121)..(121): n is a, c, g, or t
  misc_feature (241)..(242): n is a, c, g, or t
  misc_feature (251)..(251): n is a, c, g, or t
  misc_feature (281)..(281): n is a, c, g, or t
cgacctaccgtaccccggaaggaaccatcactgcttttatgcatatggtggagtaccggcgtaatcagaagcaactacgngaaacgccggcgttgcccagcaatctgacttncaataccgnagaagcgcatcttctgttgcaacaggcgattgccgaagggctacgtcgctcgatacccatgaagttcagcccatcctgcaagcgtatggcatgaacacgctccctacctggattgccagnnatagcaccnaagcggtgcatattgccgaacagattggtnatccggtggcgctgaaattgcgttcgccggatattccacataaatcggaagttcagggcgtcatgctttacctgcgtacagccaatgaagtccagcaagcggcg

SEQ ID NO: 614658 - DNA, 161 bp, Homo sapiens
  misc_feature (144)..(144): n is a, c, g, or t
ctagtacttaaggatccggccggatcctgccaggatgtctgttctctgtggttgaaggaggaacggggcgagactgtgggaagatcagagtctaatgctcacggcacccggggcagcccctggtgaggtctgtgccaagctggnagctcttccttgcggct

SEQ ID NO: 614659 - DNA, 126 bp, Homo sapiens
  misc_feature (74)..(74): n is a, c, g, or t
  misc_feature (90)..(90): n is a, c, g, or t
agctgtcatatatcttagacggtgcacgcacactgttctgacacgtatgctttgcattcacaggtgaactaagncagacacctgttcctnaaagtaacacgaatctctttaacttcaccaccgcaa

SEQ ID NO: 614660 - DNA, 1209 bp, Homo sapiens
ccagatcatttctgtatttttagtagagacggggattcaccaagttgcccaggtgcttcctggtggtccttggttggagggtactatcagaaatggaggagcaacaaagattcagctgaagccctcactgcctgggactgggacccttgactcgtcattgtatgcacacctgaaactgcttatgtcgctgaggtgccaacctgctgatggttggaagctaattgagttctgatattgtgttgatacccttaagcattgggtttactttttattttaattaattaattaattaatttttgagacagagtttcactcttgttgcccaggctgaagtgcagtggcacgatctcggctcaccgcagcctccgcctcctgggttcaggcggttcttctgcctcagcctcttgagtggctgggattgcaggcatgcaccaccacacctggctaggttttgtatttttggcagagatggggtttctccatgttggtcaggctggtctcgaactcctgaccccatgatctgctcaccttggcctcccaaggttctgggattacaggcatgagccaccacacccaggaatgccggttaagttttatatatatatttttttgtagagatagggtttcactctgttacccaggctggtctcaaactcctgagctcaaagcaatcctcccaccttggcttcccaaagtgctgggattatagatgtgagccaccatgccctgccaagcattgggtttatttggtttttcagtttttttactcctggaataaggcccccacactggatttttggttatctgatcaaatatttattttgtccttggtgcaattgttttctgtccttctacactcattcctatggtgttttcttgtctagtattttgaatattgtttgtctataagaggcaaagtcgatataaaaaggatggatgtaggctgggcgcggtggctcaggcctgtgatcccagcaactttgggaggctgaggtgggtggatcgcctgagatcaggagttcgggaccagcctggccaaaatggtgaaaccccgactactaaaaatgcaaaaaattagctgggtgtggtggcgggtgcctgtaatcccagctacttgggaggccaaggcgggaggatcgcttgagcttgggaggcggaggttgcggtgagccgagttcgtgccatggcactccagcctgggcgacagag

SEQ ID NO: 614661 - DNA, 139 bp, Homo sapiens
gtcacacatccttcacggcatccgattcccaggccacgtcctgtgttcattcaacaacacttttcgggggtctgcagacgcaacacgggcgggggtcacgcagctcgcaatcgtcacatccatggtccatcagctgttt

SEQ ID NO: 614662 - DNA, 518 bp, Homo sapiens
attccttaacagttcattcttcccacagtcctcacattaaaatttagtgcaaactctactattaaagtaatttaagggagtgaacacagaaagctaagaatcattccatgtgtgatctcatttgccactttccgtttcaaaaagcaccagggaactattaatttcattgtgccatgaaatcacacccctcagtatgttcagaggcaaagagtcataggcatgtgcaggttgtacttccttcccagaccatctgctgatgtccaaccccctctattcttttctttgtgaccgaaacctttagcaacatccttaggtttatgctaatttatttctagaaaccaagaggtggaagtctgctaaaccatcagggctttctccatgtctgattattaagagaaatgtggagtgttgtcagctgcttgtgcatttttacctgtttctgatctttccctttcagggacctgatagcagaaaggagagaaattgaagagaatgcctgaggatggagataaaatccc

SEQ ID NO: 614663 - DNA, 290 bp, Homo sapiens
  misc_feature (1)..(1): n is a, c, g, or t
  misc_feature (15)..(15): n is a, c, g, or t
  misc_feature (155)..(155): n is a, c, g, or t
  misc_feature (175)..(175): n is a, c, g, or t
  misc_feature (215)..(215): n is a, c, g, or t
  misc_feature (241)..(241): n is a, c, g, or t
  misc_feature (284)..(284): n is a, c, g, or t
ngagggccacatctntaagagcctgggagtctgcgaaggccgggacccgttccccggcccacagtgggggtgtgcaaacccgagagaactgggaagtgccgtcagaagcgataactgacgacgtctaatgtctatctgaccgcagtcgctgaaanctctacaacttagttgaccntaactgccagagccctgccctgaattcctgttcttaattncctctttaaggattgcgtacccactngcagagtgctttaaggacgggggtaggccacgagggtgcaaanttcgtg

SEQ ID NO: 614664 - DNA, 298 bp, Homo sapiens
tggggaggggtctcgctcagtcccgggagcttttcccggtttcccctccccttcccgggtcattcccggcagggaggtgacgaggtaggggcagagcggatggaagccggagatctcaggttcccggaatactccggctggggccttcgggcttctcctgtcccctccctacccccgtgcctcgggtttctccctccgtccacaccgcccggggctactggactgagcggcgcccaggcagtcccgggggcccttctcctgctccccacccggccacactcccggtggaccggctacg

SEQ ID NO: 614665 - DNA, 176 bp, Homo sapiens
tccctatagtctacgagcatccagcccactagctgggagcagggccctgtcagctccagccccagggtcgccaggagtgacatggctgtacgcacaggtgctggccagtgctggcaacaggagaggctgcaccagcagtttgcacgaggctctggaggatgctcaggtgggcgaag

SEQ ID NO: 614666 - DNA, 81 bp, Homo sapiens
gaggaggaagagggcgaggaggaaggctccgaatccgaatctcggtccgtcaaagtgaagatcaagcttggccggaaggag

SEQ ID NO: 614667 - DNA, 306 bp, Homo sapiens
ctagcagagctacattctcgctcccggctgcagagctgtgatcccactgattctgatcccattactttaacccctggacacagatctctgatgtgcatcccaggactgcttcccctgtgtgatattgttctgcttaaagaaggtgggcccagctcagcagggacagtttggggagagtccgagaggctgggctgattcccttctgtgctcccacatgcttccggaacagtgacaggtgagtgaaaaccaggtatcctgagccccatccctgatgtccctactccatccctgctatatccctagcct

SEQ ID NO: 614668 - DNA, 104 bp, Homo sapiens
tcagcatttccagcagcggtagatacatgcttccaggaggttagcatcattgatggcatccaaacccacgcccggcttctgataccagcagatccgctatccgt

SEQ ID NO: 614669 - DNA, 710 bp, Homo sapiens
  misc_feature (709)..(709): n is a, c, g, or t
ggcgccatttgatggcaggaagagtccggttctggagacagctgcagacagtggtggtgactgaaataagcttttacgcaaaatggatagctcatttggcagagctatcttcgtccaagctgtatatgcgccaaaggtgcttggctaactagagccagtatggtttcctatctcgccaggcatttcgcctctgtgagtttagcacgggttgtcaatcccgaaagcctttcccgactgcaggatcatcaggtgcggcatgagtctcaggtggcatgctcgatgcttccagatatatcgctctcggaaactagggtcggcctggatgagtcgtatgggacccttgtgtacgctccacagatcgagacggttccgagctgccgtggcgcaaccatacggtgggggattgtcgaccttcagatgggcactgtcttcacgagacggaataacgcctggttcataagacttttgcctggatgttctgagcgagaatgcctttatcagagtggctagaccatggaagttagtggaatggcgcattatggtggacatcgaatttcagggtaatgatgcacgctgtgtgatcgaacatgttgaccagtgcagataaacttgtttggaaagtgcctgagtagaatgggtgcaatacaagtgttggtccagaaatggttggcgagaagatttggaatcacgtgtttgcaagaaagtaggnt

SEQ ID NO: 614670 - DNA, 1257 bp, Homo sapiens
caaccccgacacagttagcatttgtgccgattttcctggttggaatggtgacaacagtgctggatgccgaaagtgctaaacgatgcactttggcttccaaggggtatgtgtcaagagatccgacccgtaaaggcatggcgaatgctccaagttggacaaccgaggcatgcgttgaaggcttctgtgaactagcaatccattaccgagcaaacatcgttagcaacctgacgtaagcccatgcgccctgccatctcctaggatgtctacgagaatcggatagcgtcatttgcgtgcttgttcgctgtggggacccgaggtgtgaggacttagtggtagtttcatcgaaataccccggtgtgatagggattggtcaaccgattttagcttgcacagtcaaaaccgattaagcaacatctgggcaagggctacaatagtcttcgtgctgatagaatggccagcacattggaagagctttaggagatagagagctgctatcaccttggggggaacaatagtgcgagcttgtacagatatgttctacagaaaatggtagtcgtgtacaaaggggcattgttgttcagtgcggtcggggcaaaggttaatgcattggggttggaaccacggctcatgggaattggatacaccgaacacgaaaagttgggcacacagacaaggggtgtggagtcgattatccaacgttggccgttccacgcggttggacatttactcacctgggaaaagcgccatttcccacaaggggcgcaaacagaatcaaagtctggcccgagagattaatggaccacccctggattattttgggggaatatatggcccaacaaccagagctgtacaccaaattcaggcgatttggccaaaaggatttatgggctttgcaggcctttgacaagggggaaacacgaggacttttagcagtccggccacggattccatgggtaaaaaaaaaaaggccttggggaacacgcaattggggccccccattaaagaaggttttcctttcgagaacagggttcacttaggggtatggatatctggcattgggacccaattttaggctaatgaactacaatcgagggttttccccttgggttgagcaataggcccccaaactggatagttaggtcttagaccagacagcattatttataccaaacggacgcgttatgtaccacagcccatttttgtgggaccatctcgacgtattagtgcatagtacaccggatgaggtctactcaacaa

SEQ ID NO: 614671 - DNA, 134 bp, Homo sapiens
acgattatttagctcccacttataagcgataacatagtgggatgttggatttctagtatcctagcatataatatcagtaaaggattatcctaccaatatgcatatcgtgtaagctagcaacaagaacatagact

SEQ ID NO: 614672 - DNA, 1709 bp, Homo sapiens
  misc_feature (354)..(354): n is a, c, g, or t
  misc_feature (1153)..(1153): n is a, c, g, or t
ggttaaaaaatctttaattggtttctcccaaatacacaatcactaagttccccaaacacaccaactatccaccaccacaggcaaaaatacaacaagttgcaattttcatttataggtgaatggtgatcacagtgttatatattcctctataacaaacagtgttcaaacaccttttaaaagaatccaacaacatgaaattatcctgacaaatatcttgtaaccaagtgcgtgttattattatatttgagagagcactcacaatgacatgaatattttattattcaaatatgtgtctcaaatattattatttctcaaaacacttctcgagagagaccacgagatatcatatgtgtngttcaaatctgtgtgcgttcatctctatattttcacacaacacaccccagagagagacatatacacgttatgtatacttaagtgtgtaacatatatagagcgccaaactcccagagaagatatattataatcctgtttatattgagcgcgccatctctgtctccatctccatatcctctataaaacgtgtgggtatatatttctctacgtgttgtaccccaagaaaatctttatttaggggtccatctccccaatatatatgtgtggagacacaaaaaatatagggacatattaacagagaacaatcttcacaccagggtgtatacacaccgtgcgacggtcattacacatccttccacagttgacacccgactttttgatggatgccccccaataatatactataagacgagaagacaggaacccttcttccaaacacgcggttctcctttaaaaaaacacccccatattaaggggcacacaggcgaggcaagaatctatttaatttatgaagggcccccccttaataaagcgagggaaaaccctcttataaaaacaacttctttttacaagaggaaaaagcatcttctccagttggcaaaaacattacaaccgggggcgaccgactattcatattaattttctgcgtgtgggccaacacgacggagaacatttaacaccggcggggtctaatatatgttgacccaccaaaaaccccccccccgaggttgtagtgctcatcgcttagataaatattacacagatggtgttacagccgaaacaaccagtttctataaanaaacgatatagcagggcacaattcccccatacagggggcgtatgaaaacaagcaccggacgtaaacgcgataatatatatttatccccgccgccgtaaatggatagaaacaaacacagggagagaaacgccgtagctaacagacatactaattttctgcgctcacatatatatgtagttgaagtggtcgcagacaacacaaggcaagacgtgagtgcactactgctacaacacacaccacaccccaccgtagggggaagtaaaccccccctcccctccaaaaacagcggggaccggccaccacttactacttaaatacaagacagacgctacattattatttacccacccaattagagctgaaaaaatatccaccccaacaacagagatattattcacgcgcgcaaagacagacactccttacaaggcggagcaagattaaatatatactatagagaacaaacaaatcagacacaaggagcaagtgaactctatcccaaccgtcacaccaataaatacacttgctgagcgaggacgaacaacatattacaacagcg

SEQ ID NO: 614673 - DNA, 305 bp, Homo sapiens
  misc_feature (78)..(78): n is a, c, g, or t
  misc_feature (191)..(191): n is a, c, g, or t
caaaatattggttgggggaaaaatgaggaagagtgaaaaatcaccctggtgacccactgaacaggtccccagagactnaaactccctaatctgaggaatttagaagggaagaaagaccaccctggtgaccatcaaagaggccatacagaggcaaaactccttatctgggagaaaattagaagtaattagancttctgcggggcatggtggctcacacttgtaatcccagcactgtgggaggctgaggcaggcagatcacctgaggtcagagtttgagaccagcctggccaacatggtgaaacccc

SEQ ID NO: 614674 - DNA, 337 bp, Homo sapiens
ctcaaattaaataatactttactttataatcattctaaaatacatattaatttttttgccatctaaacaattatcaacacctaaaaacagaatcatactgcatacccatttcttagtgtcacttttcagtaaataaatcaatttgtgaatgctgttgtacagaatattgtcacttactttttttcacatatactgtatcatagtttcatgaagctaataatcactgtactgcagaaatagtctaataggtcttttattcaccacactgcttctgtatttgattatggtgatatttgacacttgagaagcaaaagtggtgagacagtatcttcataaa

SEQ ID NO: 614675 - DNA, 378 bp, Homo sapiens
gccaggttgctggtcaacctcttcaatctggaaatataaaataatggtccacactcactccaagaactatagagggtcggacatcagctatatcggtggagttaatgttgactaatttaatctttcttccttcgaggaacttgagtgccgtgccaatgttgagccacagcctggattcgcttcatccggcgtccttgttcacaagggcagtttctgcccagtacaggacctccagaaggggaaagacagtttaacaccatctttcatgtcttcaaaaagatcgtccaccaccattggcggtttccgattggacagatacgagtagatccatatagtgaaagtacgttaatgtactatctcttgatcatcctccgtgga

SEQ ID NO: 614676 - DNA, 160 bp, Homo sapiens
cgaggtgctcagagtgtggtggccagttcaatgcctcacagctgatcaccggcgggccggtatccctgttgatccgcgggagctgacgagggggccaggcttcagctcttccgggttgttggggcccccagagtgggtttgccggagtaacggtgctggg

SEQ ID NO: 614677 - DNA, 355 bp, Homo sapiens
  misc_feature (317)..(317): n is a, c, g, or t
tgggccatttattttaatgattctggtttttactttcagaatttctatttttatatttttcatatccatctgttcttaattataactctctattttaatcatatttttattcttctttgttaccattaagagtattacctatacttatttaaagttatttttggtttgttctacttggattttgagagcagtaaatttatatcatgattgttgcatttgttggctgtctcttacaaattttttcttatgtgctttggaggtttcatttgtagctttatcctgagtgggaaattttcttctctctaagagcctattgngtggttgcttcctctcatctccctggaagcctggtctg

SEQ ID NO: 614678 - DNA, 172 bp, Homo sapiens
gagaaaattttaataataaaaagttttgttcccccccatttgtaaaagtgataatggccaggcagagtagtacatccctgaagtcccagtttcttaggaggccaaggctggaggatcacttgagcccaggtgttcaagaccagcctaggaaacacagcaagcccctttctca

SEQ ID NO: 614679 - DNA, 575 bp, Homo sapiens
gaaaagtaacatttaaaaatcctctgggtaattcaaattacagatttaaaagagcttaagatctggtgtttgttaatgcttctgtttattccagaagcataaaggtaatccattgccaagtatcattcttgcaaattatcctttatataactgaccagtgcttaataaaacaagcaggtacttacaaataattactggcagtaggttataatatggtggtttaaaaataaccatggaatacaggacttgtagccaatatgggtaattttcattcagtatgtatagtaagttttagatttgaaacctggaaatacagtacaactttgactgtcttaaaactgttggccaacaacaacatcaacgatttaatttctctttatcttgtactgaaacaacctaattcataacctgttaatttctcagccatcttttgaagcttgacaagaagagtctataggtcattatggtaaacgtttagcacgactttcctgcccagtgtcagcaaaatcctatctatgaatcctggtacggtatatccttgggctatctcgacaaaaacacctaccaaatagtaa

SEQ ID NO: 614680 - DNA, 220 bp, Homo sapiens
aggataaccctcccaagactaaactacgaagaagtagaatcccatttcagctattctacatatggctagccagtttttccagtaccatattaaataggaaatcctttctccatttctggtttggtcaggttgttgaaaatcagatgcttgtagatgtgtggcgttatttctcaggcctctgttctgttccattggtctgtatatctgtttgggtaccagt

SEQ ID NO: 614681 - DNA, 838 bp, Homo sapiens
  misc_feature (40)..(40): n is a, c, g, or t
  misc_feature (146)..(146): n is a, c, g, or t
  misc_feature (177)..(177): n is a, c, g, or t
  misc_feature (205)..(205): n is a, c, g, or t
  misc_feature (213)..(213): n is a, c, g, or t
  misc_feature (219)..(222): n is a, c, g, or t
  misc_feature (228)..(229): n is a, c, g, or t
  misc_feature (262)..(262): n is a, c, g, or t
  misc_feature (264)..(264): n is a, c, g, or t
  misc_feature (291)..(291): n is a, c, g, or t
  misc_feature (449)..(450): n is a, c, g, or t
  misc_feature (452)..(452): n is a, c, g, or t
  misc_feature (456)..(458): n is a, c, g, or t
  misc_feature (464)..(464): n is a, c, g, or t
  misc_feature (467)..(467): n is a, c, g, or t
  misc_feature (499)..(499): n is a, c, g, or t
  misc_feature (509)..(509): n is a, c, g, or t
  misc_feature (512)..(512): n is a, c, g, or t
  misc_feature (523)..(523): n is a, c, g, or t
  misc_feature (528)..(528): n is a, c, g, or t
  misc_feature (530)..(530): n is a, c, g, or t
  misc_feature (572)..(572): n is a, c, g, or t
  misc_feature (575)..(575): n is a, c, g, or t
  misc_feature (577)..(577): n is a, c, g, or t
  misc_feature (580)..(580): n is a, c, g, or t
  misc_feature (718)..(718): n is a, c, g, or t
  misc_feature (831)..(831): n is a, c, g, or t
cttctcttgtatctgtattctaatggctcccagcagtgcnttcacacagcccctttattccccttcttgtgcctgcccatgagcctgagtgtgacagatcaattagctttgtccctccaaactgtgggagcaggactagactcttntggcaggcagagagctcctcctcggccagtnttcgagcttggtccaccactcccagttnttcttgtnttggcnnnntggccnnggcatccagcgtgtctgggcatgatgaggtgtncncagctcaagcttaaggtctctcaggcntgcaccagccacagggcattcatgaagacaaagtaaaaccagaagtcgagagggtggcccagctctccgtgctgggactccgtcgcggtgctctgtcaggaagtagagcacatccccatagatctggcccagagagaccacaagctgtagaatgaagnncngggnnngtggtngcncaaagcgcatcaccacccacaggctgagtggnccccacacgnaanctggtgatggnttgcntngcacatgtagaattggtcacccaggatgtatgcggctgtgtnccntnggnatactcttttccagagttagagataagaaggcttggtctccaagcaggtcttcgtagtagagaacgaaccagccctcgatcaccaggtgaatgaacccacacactgcaaaccagcacagggacagttgccgccaagtncccaatgggacaaccgcagcacgacctgacaacagccatgtggtcacgactaagacccctgtgacagagaagaggccagccagtatatgccagggggggcggtcattaggtanaagttgt

SEQ ID NO: 614682 - DNA, 977 bp, Homo sapiens
gatccaaggcggcccggatgacgtgctgggcttcctgcgcgtggtgcgcttcgtgcgcatcctgcgtatcttcaagctcacacgccacttcgtggggctacgcgtgctgggccacaccctgagggccagtcaccaatgagttcctgctgcttatcatcttacctggccctgggtgtgctcatctttgccaccatgatctattacggctgagtcgcattggtggccaggccctccgaccctcggggtaatgaccacaccgacttcaagaacatccccattggcttctggtgggctgtggtcaccatgacagagcactgggctacggagacatgtaccccaaggacgtggtcaggcatgcatgggtaggggcactgtgtgcacctggcatggcgtgctcaccatcgccatgccggtgcctgtcatcgtcagacaagttctggcatgtactactccgctggaccatggccaagcagaagctgcgccgaagaaaacggaagaagcacgtgccatgggcggacgcagctggagtcagccatgtactgcaatgtctgaggagagttccgcccgggacagaagctgcaggtgaatacaggccccctggccgggaagagggtcatgatcgcgcaggaaacgggcagactctaagcggaatggcgatgccaacgcagagctcgtctgatgaggcagggagctggcctcagccaagcccgtgggggcacctacccgaacacacgaaggaagcgacgggacactgcgaacgtgcacacgacttcgagcaagggagctccaggaacgcgggtgtacctttgcttccctggtcagacagtggtgcgactatggactgtcggccgagtagtagtgtcacggtaacggggacatttcgacctccctggacctatcccgcttcagcgtttccactgaaggcatgatgccctcgaagaggctggaatctcgtctatgcccacaatggtcgaggg

SEQ ID NO: 614683 - DNA, 117 bp, Homo sapiens
tgttgtggaacgctgccgcctggactcggagctgagaaacatgcaggacctggtggaggacctcaagaacaaatatgaggatgaagtaaatcagctcgatggcagcgttccacaact

SEQ ID NO: 614684 - DNA, 179 bp, Homo sapiens
cgctggacaggggccctggcagaacgcccagtaacctgggctaccagcgtagccaagtttgcctggagagagtgcagactccggacctagtaggtttgccctgtaggacatttacgtgagtccagtgaggtccacagtcaacgcgggccgtgcgtgttgcgccttcgaggagggatcca

SEQ ID NO: 614685 - DNA, 422 bp, Homo sapiens
gagagagagagagagagagagagagagagagagagagagagagagagagagagacagagagacattcgggctttccttgggacctgttccgggactatctgtggggattgagtctgttcaacatgacaacttacttctttcacagactctttagtgtatcagatcttcgctgacatccctgtgcagtgcctgcatattatagaggaaatcctgtcttctaaattacttgtgagcatttgattcaactcctatgttagtctcgcccttacaatgcatctcattaatggcacctttctctattattgctgaactgacttgaggatctgtgtcccccattgacccagagctctgaatatcctttggagagtgcactatctcttgatgattgaagacatctgtcacgttctcctcttgatgcatgt

SEQ ID NO: 614686 - DNA, 1630 bp, Homo sapiens
  misc_feature (601)..(601): n is a, c, g, or t
  misc_feature (636)..(636): n is a, c, g, or t
  misc_feature (672)..(672): n is a, c, g, or t
  misc_feature (734)..(734): n is a, c, g, or t
tacggtctgcctgttgtttttgccccgttgttgttagggtcccttctgtcttttgttgggttccccgtgtgagcggtcgcggggtcctgagtaacgctgtacacctccggggtttttggccctttccgccgctctatttcccctccgtttttgagcgcacctaaaggtttaatagacccaacccgaagcggggtcgacgcagccccggccggccactcttgttttagagcacgccccttgccagccctgtgagttaccagagatccgggcgcataccgagttcttgaggtgcacacctgggagccggaagcgtgttttttctttataagaccctgggtctccccctgccaagactcctccccgggttttaagccttgttgttgagtttccgaaccacgtcccatgagcctttttgacccgctggtgtagctacagagacaccgccttcccttcccgagacctgcttttggcggggaggaggaaatcccctcagacccttggacgcttttctcattgtcttatttattgtatttctggggtatgcgcgttattccgagcaccctcccctccgatggccgcttttacaaagattttttttttntctctcaacaccatgattcctttaacaacatgttnccagcattcccaggtaggcccaggtgtcctaccagnaaaaccttgggtttagacctacagggggtctggctggtgttaaccagaagggagggcaaganctggtgcggctggcccatggagaaagctgacttggctggtgtggtacagagaagccagcttgtttacatgcttattccatgactgcttgccctaagcagaaagtgcctttcaggatctatttttggaggtttattacgtatgtctggttctcaattccaacagtttaatgaagatctaaataaaatgctaggttctaccttaaaaaaaaaaaaaaaaaaaaaaaaaacaacaaacaaaaaaaacaaaacaacaaacaaaacaacaaaaaaccaacaaaaaaacaaagaagagcggggggcgcgcgccccactaaaaaaacaccccccccacggggaggcgcacccaactcactgccgccaccacagccgcatttttgtgcaaacaacgggctccccccactatgagggcgcccatacataaacacacccaaccgccgggcgcgcctctacacaacaacccgcatcggtgagccgagaccaaaccccctcggtcgcccctccttgagcaggaccccccctctctggcgggaggaacaatctcggccgaccaccacaccacccaaacaacataagcgtcgccgcggcgcgaaacacaaacacccggggggtcagcacccgtccccaccccccacccattccgtccgctgcgacaagaacagcgccccgccaattcatctcgcccactcctcagccggcgccgcatcaaaacaccgagcaccaagcacagaccgacgcagcaccacgaacgctgagtcagcaacaaccgacgcgtcagaaccagcaagtcaagcgaccagtcacacacagccacaccacacagccgaccacacacaccgccaccgcgccaccgaaacacacacaaacctaaccatcccgagcccagcccaacaccgcac

SEQ ID NO: 614687 - DNA, 686 bp, Homo sapiens
  misc_feature (38)..(38): n is a, c, g, or t
  misc_feature (63)..(63): n is a, c, g, or t
  misc_feature (140)..(140): n is a, c, g, or t
  misc_feature (157)..(157): n is a, c, g, or t
  misc_feature (233)..(233): n is a, c, g, or t
  misc_feature (244)..(244): n is a, c, g, or t
  misc_feature (267)..(267): n is a, c, g, or t
  misc_feature (275)..(276): n is a, c, g, or t
  misc_feature (309)..(309): n is a, c, g, or t
  misc_feature (442)..(442): n is a, c, g, or t
  misc_feature (446)..(446): n is a, c, g, or t
  misc_feature (453)..(453): n is a, c, g, or t
  misc_feature (490)..(490): n is a, c, g, or t
  misc_feature (495)..(495): n is a, c, g, or t
  misc_feature (516)..(516): n is a, c, g, or t
  misc_feature (519)..(519): n is a, c, g, or t
  misc_feature (609)..(609): n is a, c, g, or t
  misc_feature (613)..(613): n is a, c, g, or t
  misc_feature (623)..(623): n is a, c, g, or t
  misc_feature (662)..(662): n is a, c, g, or t
ctgtcctgggccctccttctcccggccccgggccgggncttccttctttgttggttgtgtgcnctgcccccccttctctttctggttctctccccgggtttgtgctttgttgcctgggggtgctgcttcccggggcctgntctggcggggccccccnccgggttcgggcttccctggggtggggccggggcttggccttttgggtcctggcctggggggcgggtggggcgggnttctgtttggnggtttcttccttctggtcttggntgctgggnngggggctggttcgcgggcctcctggggcttccnggggggggggggggggggggctgtggttctggggttggggggtggttggggttgggggggtgggcctgggccttggttccttttctggttccgggggctgtggcctttgctcccttgtgtggttttgggtgtngggngtggctntttttttttgtgccctttccttttggtccttctggtngtggntttcctgtggcccctggctcnggntggcctgttagcctaggtattgggttcctagctgaagccaggccagagttgccaagtggggtttgggtttttgtccaaacagctcaggcnagcntctggtgggngatgggaaggtgggaaatgggcagatgctctttgggcgngaccccctccccttcaggccccgc

SEQ ID NO: 614688 - DNA, 1200 bp, Homo sapiens
tttatttattttatcctctggtttaattacataatttttttgtttaactattaagtttcagtgatacatgtgccggaatgtgcaggttggttacataggtatatatatgccatgatggaaatattatattattataaagcagtaatttggccaaataatcaaaaacagaaggcacaattggagaattcagagggcaggtagtttcaacagagcaggtatatcacgcagtcacgaagatttggaatcgctgggcagcaggtctcaaggtggcaatcaagcaatttcagggagcaaagtgtgtgttcactatatgtggaagggctaaattgagtggtgggtgccgtgaggttcgtggttacgtataccttcgtgtaaccacagttctcgtggatcctgtcagagagtggcagaactcttgttagacgcttctcggtaagaacgctccatattacgcgtagtattacataaaggctagcgtggatttcgccttgtgggagcattttatcacgtgttcaagcacgtaattagttttaccattgtatagtagttacgttggacaactcgtaaggcatttatttaacctagattagtggggacatggataaggttacaattgaagtggggtgtgacgtgggggattctaaattgttgtgggaattgcggagttccaaggggcgacacggatgcacaacaggtcggacttttccttaaggacaaaggccctggtttgcccgcttacaacgtgggacttgtcaacacttacacttccgatttcttgtgggtaacgattagggactctcaacttaacatcttgtgtggcaacgtgtaaactccgccgggcaaccccataaaatgctcggcgggcggggaagaaaacaccagatgccgaaaacctaacaggaaagacaccactaagataaaactaacaactggcgcgcgaccgccggtggcaccaaccagcactaattccaccttagaacactatgtgcccccacaactcttggggacgcccaataagagagaacggcacatttccaacggcgcacgtcgcaccaaaaaagcccgcgcacgagagaaaacagataaaaaacactacctataacctaccgatgtaaaaacggaagagatagtaccacccgaacacgaacagcggtgctgacatacacgacgcgcacaggagcggcactagctgtcagaagc

SEQ ID NO: 614689 - DNA, 331 bp, Homo sapiens
ctgactttcccttgcttttttagtggaaaccagccagtttgacggcccggtggggaaacaggactccatcagggtagtgttggggaaccagcccggcagccttccatgtgaattccaaagctgtttcaaccctgggtgataggcagacaaaaggttacttgtgtgtttttcttaaaagcggggtaaatgaagtccccttagaaaatattttgtgcggatggttatattttgttaacttcccgacttatggcatgtttttttttaaaaaaaaaaaaggactaggggccaataacattatgaagtggtatttaattaaaaatccatgcagtga

SEQ ID NO: 614690 - DNA, 270 bp, Homo sapiens
  misc_feature (136)..(136): n is a, c, g, or t
tgcccgggggggtccccccccgggggggggggggcccccccccaaaagttttccccgggggggggggtttggggggggggggccccccccccccccctggtttcccggggccccccccccccctttgggggtgtgncccttttttccaggggggggcccccccatggggggggccgggggttttttttcccccccccccccccccccccccggggttttttttttttttgggggggggggggggtttttttttggggtttttttccccca

SEQ ID NO: 614691 - DNA, 890 bp, Homo sapiens
ccccgtctgtaggacgccgccaatttttgtgcggaccatacagtttcgagtccgtcggctatttgccgattgtcccatcgcgcgggggggaccacttcggtaccgcgcctcctgcggtccgccgaggcaccacatggcgaagaggtttactgggtaactcaggcagcgcgctctcggttcgaatctttccagggagcccgagaacagtgtactcttgggtgcgcgccgcaacccccgttccctccgggggtcccgccccgggtacccgcatctcttgggggagaccctcgccttgcagcggccaccggctggtgtggcccggcggtccaaccgaccgcccttcctggtgtacgaccctctgccggccgtggggttttaacaaaacaacttgggatgacttcctggaacatggtattgggtgcaccgcagaattgcttctgcagtcatgtgcccagggtgccccgcgcatattgctccccctccccgccagtgtgccctcttgaaatctttctgggccccgtctgttgggggaattcttccatggccccttgtgcttcagccgcacgctacccccaatgggggtggtccccggcgcccgcagttgttcctggcgcagtcctttggggcacggggctatgatccacccgagcgggcttcgcccggtctcgtatggctgcccgatggtttgccccctgcacccaccggggcaacagaggttttcccgcctagcgccgctagcgtccccctggtcgcccgcctgcctagctttggcatcttgcgtccgctccgaggacgggtgtccgctgctcgacccggttaccccccccgcctttttcccggggggtccccaacagggaaaagattttcgggtgtcgcccccaaacataaca

SEQ ID NO: 614692 - DNA, 333 bp, Homo sapiens
tcgtcgataaggttggggagaggaatttgagaaactttatagcagttatgagaaacaaggtcgtgtccgcaagttgtaaaagctcagcagctatggtataccatcattgagtctcagacggaaacaggcaccccgtatatactctacaaagattcctgtaatcgaaagagcaatcagcagaaactgggaaccatcaaatagcagcaacctgtagcacagaaatagtggagtacaccagcaaagataaggttgcagtatgtaatttaggcttccctaggccctgaatatagtatagtcactatacagatatcggaatatactggggatacctct

SEQ ID NO: 614693 - DNA, 305 bp, Homo sapiens
  misc_feature (8)..(8): n is a, c, g, or t
  misc_feature (21)..(21): n is a, c, g, or t
  misc_feature (62)..(62): n is a, c, g, or t
  misc_feature (263)..(263): n is a, c, g, or t
cgtaagtnaaaaaaaatctgncagggtcttccactatcctttttcaggttgataatgctgtnctgggcacacactttgtaaatggaatgttatggtacagtcgcctctcagtatccatggggcattggttccaggcctcccttaggatgccaaactccatggatactcaaaccccttctataaaatggtgtagtatttgcatatatcctagacacatcctcctgtatgctttaaatcatctctagattacttaaaatacctantacaatgtaaatgctctgtaaatagttgttatactatattgt

SEQ ID NO: 614694 - DNA, 134 bp, Homo sapiens
tcggagcgactggagtgcagtgcagtctccacctccacagctcaggcattcctcagcctcctgagtggctgggaccacaggtgtgcaccagcataccggctaatttgtttttaaactatttgtaatcgatgggg

SEQ ID NO: 614695 - DNA, 220 bp, Homo sapiens
gtggtgttctagaggtactcagccatgtcacatgagatggtagccatgtcacgcagccggcagtgtcaagcagatcgcaagccgaagcctgtgttacagaagtacgctgaagctgctgggtgttgcaggttgtggtcaacctgcctgagtatgagagaggtaatttccacgtttgataacgatctgttaggaagtctttggacagatctaaagatgagaa

SEQ ID NO: 614696 - DNA, 415 bp, Homo sapiens
  misc_feature (9)..(9): n is a, c, g, or t
  misc_feature (19)..(19): n is a, c, g, or t
  misc_feature (52)..(52): n is a, c, g, or t
  misc_feature (72)..(72): n is a, c, g, or t
  misc_feature (171)..(171): n is a, c, g, or t
  misc_feature (408)..(409): n is a, c, g, or t
tcatgcctnccctccccanaaactttctggaaaaaaatgctggcctttgganatggataatagggttttccnccttaaagacccacctgttcctccctagcaaaaaaggccctacccttggccgggcacggtgcctcacgcttgtaacccccagccctttgggaggctganacggtggatggcttaagccccaggagttcgaaactagcgtgggcaacttggcgaaaccccatctctgcaaaaaatacaaaaattagctgggtgtcatggtgtgcgcctgtggtcccagtacttaggaggttgaggctggaggatcacttgagccctggagttgggaggttgtagtgagccaagattgtgccactgcacttcagcctggctgacagagacccctgtctcaacacaatnntttagg

SEQ ID NO: 614697 - DNA, 1156 bp, Homo sapiens
  misc_feature (350)..(350): n is a, c, g, or t
ggctacgctacggtgcctcgtagaggcccgtcgatgacgacttatattgacctctttcgaagcgtgccgtcgacgacggtgtccttgtatgcgtatctccggatcgcctgaacggaacggagaacggatctcgtccaacgtatgtctctcctcggacgaaccatcgggctggaaggattagcaatccatgctcgcagacggagtcacgatccgctgtagggcccgaggtgagtaatcatgtgactagtgtgctcgatcggaagttgtacttagctactcgtgcgaagaacagcaatatagctggagtactgtagtagcgcagtagtcgatagttggtgacacatcactgnacgtttctggctgcaagcggtctttgggctctgtacctggcttgcgtatgtaaggagcacgaagaggcagacctcgactgaatatttgggggagatgaactatttatatcaggggaacgagatttccaacactgaagtcaacaaacctgagcagtggacccacgcatgtgcgcaacactgcgagggtgacctagcaggggattcaaacttgcctagagttgggatagtaaggcccgaaaaacctcactgctagtttggggactttatgcaatgagttgacaacgagttcttgtgcgtcaccccatagctatgcaatggggatttccctatatattagtcttgaggacagaaatgcccttgcgtaaccgcgaacaaatagttgcgtggtcactaagacttcaatgtgaaaatccttgaatgggaaagaccgatccggggaatggttcatatagtaaaaattctatgcagcccctcacgggtgcgtgctcgttataggcatgacccaccctggagagaatgtcggtctaactccgtttacaccgcgtttaaaccgaacgttggctgacgcatacttgataacgttgacccattctccgtgaatattctccccttttaacaagttgtcctaccgaacagggaagcgttgcgcaatttcaccctcggcgaattggaactgcaaggtcttcggctaggagaaacaggtttggcttttcacccctagagtaaagttcgttcggccaccgggcctacttcggtgccccaaagagcgtgtgcacacagaattttttttgggaggattccctata

SEQ ID NO: 614698 - DNA, 421 bp, Homo sapiens
tgcgtcagcaatcagttggcacagacatgaccgttgacggtcaacggggtataagatttagacattgtttacgcagtaaggccttgtaagttgtcgagaaagagtatgcctggtacggtagtatacctgcatataaagtcagcaagacagtatacccccaatgtgtataaggggcagcacagccctaaagtgactcgactcgctgatcatactttgctatcaataggcctattatacgtgcaatttcccagaacattgtgtgagtctttgactactatgttcctgcggttaagtaccgcaacgtccaattacatatcccatgaagttaagggagtagccccaacgtttggttcgagtggtatacaaatgtatatacaaagatatgagctaattggtaagagaggtaataaatggactcaag

SEQ ID NO: 614699 - DNA, 141 bp, Homo sapiens
actcctcctagagattcctttgcaggtgcaacccttgttttctgatggtggagctgctcaaaagttgagcgacgaactgagctgtaaccagactggggaggggcaggcggagaggcccccatcagtgcaccagactgttcc

SEQ ID NO: 614700 - DNA, 446 bp, Homo sapiens
  misc_feature (144)..(144): n is a, c, g, or t
atatttgcatcataaggacatgattttgttggggcaggagcagaatgctatggtgtgaatgtgtactccaaagttcatgtgttgaaacaatccccagtgaaacagtgttgggaggtagacctaataagaggtgattaggtcacncgagctctgccctcacaaatgaatttatatcattatcatgggagtgggtcattaaaaaagcaagttcgggccagatgcagtggcttacacctgtaatcccagcactttgggagcctgaagcaggtggatcacctgaggttgagggttcgagaccagcctgaccaacatggagaaaccacgtctctactaaaaatacgaaattagccgcgcatgctggcacatgcctgtaatcccagctactcaggagactgaggcaggagaatcgcttgaacacgggaggcggaggttgtggggagctgaga

SEQ ID NO: 614701 - DNA, 110 bp, Homo sapiens
agtgaaacattcctttgtaagtgaatcttcaatgaagacgtcccgagtgtgcgtggttgctgatggggccgttttgggaggaaagcgagcaaactgcgctcatccccctc

SEQ ID NO: 614702 - DNA, 194 bp, Homo sapiens
tgacaaccagctcgtacccccttctacgtctcatcactggacagagttcccagtgctacacagcaggatgtcattgttaatccattccaaaagcaatacattgcatcaattaaccccacgctaccaatccattcccctctctccccctcctgctccctcttggtaaccacaagtcagtgatgagacgtagaagg

SEQ ID NO: 614703 - DNA, 229 bp, Homo sapiens
  misc_feature (229)..(229): n is a, c, g, or t
gctccacgagggttcagctgtctcttacttttaaccagtgacttgatctgcccgtgaagaggcggggcatgtacacaagcaagacgaggaagagccctattggaggctttaatttattaatggcaaacaggtacctaagaaacccaccagggtcctaaactatccaaaccctgcacttaaaaaatttcgggtttggggcgaccctctgaggcagaacccaaccctccgn

SEQ ID NO: 614704 - DNA, 746 bp, Homo sapiens
aataaattcaccggcacgcttgttgtgaacgcgggtggtgcccgaaacttggaggcttcccgtaaacccagctccttcctcatctgggaggtgggtcccgacgcgggtccgccgccccctccctgtgccccatccctctcgtgtctttcattttcctggggctccaggggcagcggagaagcgtgcatcccgagaggagcgcgtccagagagcaggacccgggagtgtaatcaaagagccagtgaacaaggaccaggggcccaagtcgccaccagccatgcagacctgccccctggcattccctggccacagtatcccaaagaccttgggaccctcctgtattaggctgcctccattgagttgctcagaatgacaggctgggacatgccccaatcttgcacacgagtgggggtagtactctgatgctcttggggcgacgaatcacacgtccatgtcctagacaagcaatctccaacagccttctcccacggtcaaacattcaagactagcgcttgcaccaccggggcaataggaagagccgcacaatcctgtcacaatggaagagctgggactccacagggactaacctaacgacccccgggagaccgagactgggcaaggactcccagggttaccgcggaagggcggtgggcaacccggcctgggtgactccaaaagggcccgccccgggaagctccccatgcctggcaccgaacaatgtaggcacctcgatgggacaccaaaaa

SEQ ID NO: 614705 - DNA, 101 bp, Homo sapiens
gcttgcggcagactgtgttgctgctccatgctctgcgcaataagatgggtctgaaatttcagagataccgacttgttccttacggaaaccattcatatctt

SEQ ID NO: 614706 - DNA, 1001 bp, Homo sapiens
  misc_feature (405)..(405): n is a, c, g, or t
  misc_feature (644)..(644): n is a, c, g, or t
agatcatcgttgctgcgacggggacatgaacctatgatacaccattcgtcactaatatgactgacaggatctaggcgccctatagccttgtgcataatgagatttagatcaaactatttgcgcaaggaaaagtccaagctcagcatcccctcaccaccaacgaactagctaacaacatctcgaaagtagtcagcatactcggtacgtgagtgataagacagatactaagatcgtgagcaaaagattcttggtgaagatcaggagtgcggacaagaacgctgagccgcagaggcatggaatgaaatcatgacctgggctctgatctcaccggatgaggagactcattgagggtctactaaactctccttagatattagcgcacccactacacagcgcctgcataanaattcctctctctgataaaatattacacgtaggtctaggtctcaaaagaagggaataccaagggctacgtatatgggcaccaacgtgacgtggagagggatagagcacgtctgctcatcatgtggcatgtagagaaaacaatatattggtgaaccactgtgaaggtgacgaccgtagagaaaggcgtgccagccaggtatgacaggagacacggcagttatcaatggcgtctcgcagcncacacttagcactatcacgaattcccccgaacattattaatgtcgtaaactccctacgaacaatcgcaccatagtttggggtatcgcaagagtgctttattcaacctcctcactaaggacaccagagtgacattgttttagcttacctaagttcaaccgataggagccagcgatgaattcccgtgcacagccaggtgcaaaagccatagcccgtcccacgaatgttaactaggaacctgaaactagtactcggttgtaacaaccaaggaaccaaaataaatcctaacaaaggtcgcttccccatcggggaggcctagaaggggaaccccttttccttttggccttcccccgaacctg

SEQ ID NO: 614707 - DNA, 808 bp, Homo sapiens
gagaatctgggagccagttccgtgctgacagagttcacaggcatatattggtggattcttgtacgcgagtagttgcatctgcttaatcgaattaaccgaaagcagtgtcaacgagatgtagaggagttcaaacgcatttagccaaaatatcgagtctagagtcgcattctactcgtcttcctggacattgatctggtggtaccacgtgggcgcagtagcgtactgatgtatgatatgtgcgctcgctaatcagagtttactggggcaagattcagtcacgcaaaagtggtgcagccatgaattgtgatagctggcacctgaagaggctagcgcgaaggtgctcatgtactaggggatggagcttgaaagttggtagcaagtggtaccgaatgtgttgccttccttgggaatcaaagttgatcttttagctttgaggcacattgaaagctgagattgggcaacattagtgggcatgcaatagagggccttttgcagaaatggtgaactagtagtcatggcatagctggcttcaatgtcctatggatgcgacgaaatctttcgtgaggaatagattgcgcatagcatttaacctaggggcagaagttattggcttcttaaattggtaggagcaaactggaagagagctgtcgtattgaaaccacaaagaaagcttgagcagaaggtgtggtggggggcctcatatatacgcaaagagtctcttgggaggggaatcatggaaagggttaacgttccaataatcacaggaataccaaaaagcgtgggggttctttttagacagggggttggg

SEQ ID NO: 614708 - DNA, 224 bp, Homo sapiens
  misc_feature (80)..(80): n is a, c, g, or t
  misc_feature (122)..(122): n is a, c, g, or t
  misc_feature (213)..(213): n is a, c, g, or t
gactctacaggatcttccccgactagccagacaggccaccattcaatcaggaaatacgggtacaccacaaagatactcgntgagaaagagcaaccccaagacacataatcttcagattcacncaaggtttgaaatgaagtgaaggaaatgttaacgggcagccagaagagacagtgtgaggttaccccacaaagggaacccttatcagactanacagcagatct

SEQ ID NO: 614709 - DNA, 233 bp, Homo sapiens
  misc_feature (54)..(54): n is a, c, g, or t
  misc_feature (82)..(83): n is a, c, g, or t
tggtgccgctctacgagacctgcggcaagaagtacgtgtcgccgacactggcgntggagctggccaacgccatcaccgacgnnagcgagcgcccgccgcacgaaaagctgtctgaccgcgagtaccagacgctggtgatgatcgcgtcgggcaagacgctgacgcagatcggcgaagaactgaatctgagcgtcaagacggtcagcgtctatcgcgcccggttgctggagaag

SEQ ID NO: 614710 - DNA, 329 bp, Homo sapiens
  misc_feature (253)..(253): n is a, c, g, or t
  misc_feature (306)..(306): n is a, c, g, or t
aaatccaaaaagtacacaagtagttcttgccaggtggactcaaagcacgtagaagacatactaggtaatcacaagtctccatctccagtaaataaagaaaggtgtatcagtcaactgaagtccatgacattctggatgtccaagaagagaagtgcccttaatgataagggtggtcaacaaaaacacagtgaggaggtaccagaccctgtcattcgacttttttaaagccgacaataaggtttttaaataaaantcaagcctggagggtttcaaacggaaagccagcttgaggattacagggaaacntgttttccaggccaaacccttaa

SEQ ID NO: 614711 - DNA, 426 bp, Homo sapiens
  misc_feature (38)..(38): n is a, c, g, or t
  misc_feature (82)..(82): n is a, c, g, or t
  misc_feature (91)..(91): n is a, c, g, or t
  misc_feature (101)..(101): n is a, c, g, or t
  misc_feature (115)..(115): n is a, c, g, or t
  misc_feature (117)..(117): n is a, c, g, or t
  misc_feature (125)..(125): n is a, c, g, or t
  misc_feature (132)..(132): n is a, c, g, or t
  misc_feature (143)..(143): n is a, c, g, or t
  misc_feature (145)..(145): n is a, c, g, or t
  misc_feature (162)..(162): n is a, c, g, or t
  misc_feature (167)..(167): n is a, c, g, or t
  misc_feature (219)..(219): n is a, c, g, or t
  misc_feature (231)..(231): n is a, c, g, or t
  misc_feature (261)..(261): n is a, c, g, or t
  misc_feature (270)..(270): n is a, c, g, or t
  misc_feature (272)..(273): n is a, c, g, or t
  misc_feature (276)..(280): n is a, c, g, or t
  misc_feature (297)..(297): n is a, c, g, or t
  misc_feature (336)..(336): n is a, c, g, or t
  misc_feature (346)..(347): n is a, c, g, or t
  misc_feature (358)..(358): n is a, c, g, or t
  misc_feature (361)..(361): n is a, c, g, or t
  misc_feature (374)..(374): n is a, c, g, or t
gctttgactgcttggttccctgcgtgaggggccggatnttaaacaccgaaaactcccgggtcagggcttccgcagctgaggnccggcaggnaaaaaaaaanaatgaataaatatnanaaacccantgaatcntgaaccccttntnttggaactcaaaaaacnttgcnaaacaaaaacacataaaaaatacaaacaaaaaaaaaaaaaaaaaaatctctnccacgtgggcanggtccttctctcccggccgctcctccctgncggcggccncnnccnnnnngatcttctctatctgantctccttcttcgtcaggttgtctgtgctctcctgccgcngctcactgtnntcgtcctccgngcngctgctggggccntcctcttccacctcctcttcgtcctcttcctcctctgccaccagcctcttct

SEQ ID NO: 614712 - DNA, 408 bp, Homo sapiens
tcggtactctcctactgtatctatatgaaataaataagttgaataactctataacccacctaaagaataacacttaaaaaaaaaaaaaaaaaaaagaggaaaagctctggagaccaaaagtgaaaaaaccactagggattattcctagctacaaggggcccatttctggctcgggatttaatagggagccatggttcgggaattacaaacacctaaataggcactgggcgtgagtgtggttttggggtcggcacagcccagaaagcggattttggggggaccggacaaacagagaccacaatttatgtggtttcctcattgtgtaggggtttttttcatatttatatttctttttttctctaggatacaggaaggggagagggggactcctctaagagtcagaccggc

SEQ ID NO: 614713 - DNA, 277 bp, Homo sapiens
gtcgacttgtacagtacaaaataaagtctacatttgtttaaaacactgaaccttttgctgatgtgtttatcaaatgataactggaagctgaggagaatatgcctcaaaaagagtagctccttggatacttcagactctggttacagattgtcttgatctcttggatctcctcagatcttctttggtttttgctttaatttatttattgtttttacacagctgggaaatgcttaaggtacaaattaataaattttaaactcagtatagaaaatacatt

SEQ ID NO: 614714 - DNA, 204 bp, Homo sapiens
tccacctacaaatgtcactggcatttggggggccgaggcagtgaatcacctgagatgaggagtataagccaaacaggccaacatggcaaaatctcatctctacttaaaatttaaaaaaaaaaattagccagtcatggtattgggcgcctgtagtcccagctactcagaaggctgaggcacgagaatcacttgaacctgggaggt

SEQ ID NO: 614715 - DNA, 173 bp, Homo sapiens
ccagatgtccttgccatggccccaaacaattttccgttttctggaaacgctgggggtgcccttcaaaaagctggcagcccccgcagtcagggcctgctttgcagaatagaatgtgaaccccactcctgatggcccacttggctttttttattaaagatggaatcctgccatga

SEQ ID NO: 614716 - DNA, 185 bp, Homo sapiens
cccaggcacagcttgtgggcccaggagccagctcaggtgctcccctccaccatgggcaggcgtgtgcaaaaagccaccggcgtttgtctcagcattgtgctgcgtgggcctctccgtgggactaccagtgtggctcttacgtgttgtctttgctacagtaaaccctagtatcttgaacaacagaa

SEQ ID NO: 614717 - DNA, 135 bp, Homo sapiens
  misc_feature (130)..(130): n is a, c, g, or t
gtggaggggagaagagggaacagtccaatattggtcctgctggtacctcttagtgtgtgggatgtcatcatcgtaaggggttaccacaagtggatgccactctcttaacttcctgccacaaccgtctacngggta

SEQ ID NO: 614718 - DNA, 243 bp, Homo sapiens
accagtctccaagagggagatccacactgtagacacgacagacatgaacagtatgattatggagtgatgatgtggcagtccctggagacgatcatggaattggtgctggaataattggttgctatatgtattactatatatgtatatgccatcacgttcaagtccaggcctatggcgtaagtggaggagtgatcaacatgtatctggaattagatgtgatgttagcacaactcggcgagattc

SEQ ID NO: 614719 - DNA, 725 bp, Homo sapiens
ggaacagagtagaggcggcggcggggggccggaccagactgtagtgaggcttggaccccgagccgctgaatgccgctggagctggagctgtgtcccgtggcgctgggtgggcgggcaacaactcgtgcttcatcattgccgagatcggcagaaccaccaggcgacctgacgtagccaagcgcatgatccgatggcccaaggaggtgtgggcgctgattgtggccaggttccagaagagtgagctagaattcacgtttaatcggaaagccttggagaggccatacacctcgaagcattcccgggggaagacgtacggggagcacaaaacgacaatcctgagttcagccatgaccagtacagggagctgcagaggtacgccgaggagggtgggatcttcttcacgtgcctctgcatggcatgagatggcacgttgaattccctgcatgaactgaatgtcccatttttcaaaagttgggttctggagcaccctaataattttccttatctgaaaaagaccgtccaaaaaaatggtcgccccaatggtgatctccccagtggcaatggcagtcacggggaccccatgaagccagtttatccagatcgtgaagccccttcaacccaattttctgttcttgccagtgtcccagcgaatacccgttccagcctgaggacgtcaccctgcggcactcggatatagagctcttctgattccaaaggattcggca

SEQ ID NO: 614720 - DNA, 885 bp, Homo sapiens
atggcccccctcaagtgagcgcttttggcacaacacgaggtgtgccgcgatctgcgttccaacactgttggaggacgtcccgcccactttggggggtggccactctttgtccaccgggagttgtcggcccacttcattgggcacaaccccttgggggcaccaagagctgcgtcacacgtcttgcaaatgtgtgcgcccccacagcgccgtctcctatagtggtggtccgcgcaccccgcgcgcccgccctcttctggcgcgctgtttatcgtctaggaggcgttgccccttgaacccccagggtgtaaccaccgggggcaccacactttgtcgctgcgcttccaaagaggtggggacccacctaaacagcacacagtgggtttcttgccccccagttaataaagcaccccgtgggggaattgatggagatgtaaaacgcgccccagaaggtgttgttagggtttattaaaccccaccccaggtgttagacttccgggccccaccctcccttccatgggagccccccgtggtgttaccacccacaccgccgcgcaccagattagtgtagtgtacctccacaaatttgtagtaggcaactatatacaaattaccaacgataatacctctagtgataaaataccgttaaattttaggtggaaaaccactataagaagaattttaaatgataaccccacttattctgttttgtttttttaactaatagtccccgaagaactacagaaacatcccccattagtaaatgggtacctataaataataagggaagtgtgagcttaaaatgaatttttcccttgtccaatattcctttctgctaattcatcttaacttgccaacaaacacccaaaattatttttccacaaaaca

SEQ ID NO: 614721 - DNA, 1053 bp, Homo sapiens
  misc_feature (113)..(113): n is a, c, g, or t
  misc_feature (173)..(173): n is a, c, g, or t
  misc_feature (367)..(367): n is a, c, g, or t
ggttcttggcctaaggtgggttcgatgggtgttggtgattgacggtcttcctgccaggtggagctgtccagaagaacatgctttctctcccgtgtatcagtcacatgcccaanatatactcggcgtagagcattggctagtatcttgtcgccgcaccttcgcatacacgtggncgtctgtgctgcagtagtactctcagaagcatgccaaagggtcgggacatggagcgaaggtggtcggacatgttgagtgccggtggacccgatcgcatgctcttctagttcctcggtgaaaggctgccctcatccgagcataggtatggctcgcagaacaacgcctgggcgacgcaaaggactgcactctcaantttactgatccagagggcggggccgtatgaggggcactacgcgaagatgagacttctgaaaggcagcggctatatagagaactatagggaagaatatgctagtggggtacgtagagtatatagcgctacaatgtagactggtcgatgggaaacagtcatgcaaaagcgagttgcaaagtgccccagaatgggtctagaatggggctggtgattccttggaaatttaagtaagacaagaaatggtcccagggagaatgaacgggagggactagactctcttggttcgacttgggtggctaaagttggttatggccgatagtctcgagtggacaaggtgacccaatgtcgactaccacagtatccattcgggcaaggcaaccgtgcaggcccccgagttggctgtaccgaaacaactggattggaccatggtctccctatgcatggggggagtcaaaccagggcttgggcaccacaaaaaagggcaaggcacgcaccttggacaatcgcaagaggaaagccatacacaaggacttgggagttctccaccaggaaaggcaaacctttttgaaacaccccagttggaggaaggcaaacactaaggaatttcccaaaaagtgccccacttcaaggggcagaagaaaccaggccgtcggggctctcgggacatccccattttgggcttagtg

SEQ ID NO: 614722 - DNA, 831 bp, Homo sapiens
  misc_feature (128)..(128): n is a, c, g, or t
  misc_feature (150)..(150): n is a, c, g, or t
  misc_feature (254)..(254): n is a, c, g, or t
  misc_feature (320)..(321): n is a, c, g, or t
aaagacacacgtgacccaccaccccatctctgaccatgagtgccaccctgagtgtgctggtgccctggtgcttctaccctgctggagatcacactgtaccgtggcagctgggaatggcgatggaccanaactcagtgacacttgacgctntgtgtgatgaccagaccgagcatggacgactagaagccctatccagaaggtgggcatgcttgtgtgtgtgtgcccttcctgtgagacagagcatgagactacanccatgcacatgtacgagcatgatgggtgctgccgagagccccgtcaccgctgcagatggtgagccnnatcttcccatgtcgcaccagtcccccatctgtgtggacattgtttgcgtggcgctgtgcttgtccctagacatgtttgttggtccatccggacgcctgttggtccgacgtactggtgattgttgtagtgacggcaagcagctcccaggtgtgaacaatggacgggactgctactcctcagtgcttgcagtccaggcgacaagtgcccagtgactcctgatgtgtctctcacatgcttgggcctgagacagctgtcttgtgagggactgagatgcgggattcttcactcctcccctttggttgactcaggagctctgtggttcttcagtgaagggactgtagtgttgtggtctgttagctaggttagagcttgggaggacaccccggtcattgacccgttctctgacaggttccccgcacattgtcatcgaggggctaacaccgctctcatatggcggggcatcactctacacggaacgttccatgatgtcaccgccgtgcacacaccacg

SEQ ID NO: 614723 - DNA, 788 bp, Homo sapiens
taagatcagactctgaaaaagggaaaagcactaaaaaaaaaaaacaaaaaaaaacatcaaaaaaccaaaaaaaaaaccatactaactaaaaaagagaaacaccaaaacaactacaaaaacaaaaaaaacaacaggcaactaaggggtacactaaaagttaaaagataataaggaattttttggccccctgggcccagaccttttttaacctcgcccacttttttcctgcccccccatttgggctccctttggccattttccccttttggggggcgatttcaaattcccggcccccttttttaacacgggggtattggaaaaacccggcggatcccccatttattaggtttgtaaaaatccccctttttccagtttgggttaaatgcaaaaagcccccccaccttcccctttcccaacatttcccccccctaaatgggaaaaggaaatttttcccctttttttttttggaaaatccggccaaaatttttttaaacacacgctttttttataccccaggccccaaaagcccaaatcccccttttaataaaaaaaaacaccccgattacggttgattgtttctccccttaggaaccaattccctctttttaaaaccgggcaccccaactcaaaaggcgcagaaacctgttttgtgggggaggcgcccttccggaacaccaccccctaataattttcttgggcgccggggcccaaaatacattaatcccccccccaaggccccccccatttaatatttcccgggaaacccccccccctgcccaaatagggga

SEQ ID NO: 614724 - DNA, 245 bp, Homo sapiens
ctggatgcaatgggtgtgcagccctcaggatgactctgcaagcatgcagaccacgaaatgcaggagtttggcgtgaggagcagctttcggtatggattgatgactaagtcaagctacttcctgagcttctctcagatttccaagagccagagatgaattgtgctgcatcttgccccaattcttaggatttcttttcctccgccactgcagtgattgttagaggtacgttttcttgaataaatatt

SEQ ID NO: 614725 - DNA, 571 bp, Homo sapiens
  misc_feature (9)..(9): n is a, c, g, or t
agttacagngaggcacacctgtatcccagctactcaggaggctgaggcaggggttccttgaactggggtcaaggctgcagagtgagctgtggtgggccactgcactccagcctggatgacagtgagaccctctctcaaaaaaaaaaaaatgagagactatttttcctgtcctagagatgaggctgaagttcccaatgcagacgatttttgcctgagctaacagcattaatggatgagcaaggacttgtttagtcctttggctgttgtccacagggtcatggtgctagctcaggcaaaaatggatgagcaaggacttgtttagtcctttggctgttgtccacagggggtgatagcgctcagtgttatgtgacgtcagaaggccatcatgttaaaatatagcacgatagggacaactgatcactctcttgaagtccggagctcttagaacagatggtctgtttttctgtagtaatgctcacaccatgtcttcccactcatagctcccactcactgccccttaccccaccccagcctccagtcgtcaaaatttaaagctgtaaagggaagacgt

SEQ ID NO: 614726 - DNA, 137 bp, Homo sapiens
atgatatatgaagaagagaactccccactgttatcactgtggttcatagattttcactgctgaataacattacacagtgtggttgatatcatacttcacccattactcactggcatgggtctttgcgttggttcggt

SEQ ID NO: 614727 - DNA, 100 bp, Homo sapiens
ggattccgtgtgatctttgctggggaaaaaagtggagacagactccaataagccgaagaaccagaacagtttccacaccccagtaaattggccacaaacc

SEQ ID NO: 614728 - DNA, 834 bp, Homo sapiens
ctgtaaacaagccgcatttctccttggggaagactgatcattgaacaggttagttagtgtcagaaacattcccagcttcatcaccaaccctttccttccacctctgcccactggagaccacttacatcccgaagtcggacgcggcagactgtaagtcatggaaaccatgcatcgacattagcaggagccaatctgcagactttagaactccgttcaacatgtggatgcgcgcacgagaaactgacctgtccagacaagccggggtcagtctcataacactggttcatctgctccctgtgcgctcccgcgggtgcgtaagctactggtagcagaccggcgctccataggtacccgcgagaaaccttctgtctgggcactgcgttgtgccatctacttgggcttcctggtgagccaggtggggagggcctctcttccacgcatggacaaggccggatgagaatgggggccacactcgcaagccgctgacaccagccgagccgatccttcccttgaagatacccctggatgagtacccgtggccccttccatgaagtcccacgaggcgaagtgcggtccacgtcttgcatgcccaattgtggtgtacacttacccttacgcgtcctaaggcgcaatgcaacgccggccaagtatccgtggcaccgtgaagcccaatgctgcaggtaaaaagcaatgcagtgagcatcggctgtccccagcgcatgaggctttggtcggaccatcccttcagccgcaaggaagcggctagggaagctgatgctgtagcacctgggtacgctcagggagcaaacctggttaagattggagagcgaccct

SEQ ID NO: 614729 - DNA, 1222 bp, Homo sapiens
  misc_feature (288)..(288): n is a, c, g, or t
tccccagcataaccacataccagtaagtaggcattcccactaagaggttcccatggctcccctatcactaggtattaggaattttccagctctattaaaatccgatgggcccaccaattgtatatgtggtctgccattggctgaagcatcattatttggtgcatgactgtagacctttaagcaatgatgaaaatgctctatatccacactatcaatatgggtaaccactagccacttgtgactactgagtgtctgaaaggtgactggtacaactggggaactgaattntaaattttctataatttaaattaaaacagccacatttattttatggctattatattgtatcctatatcatatcatatttatatatcatatcatatgttacatggtatatcatattacaaatgcagctttagatcattactttccctagaacacaaattacatgaaaatcttgagtacaatgacatagttactgattttgccaggataaaggaaaaagtaaatgttatttaaaaagcatataatttatgaattattaatatcttcattgattatccatccaaacaccacaggcccatcaacagaattcccagtatatgcgataataattatgttcagtcatcgttgacgttttgccagctttcagtcaattagaaactttgaactttactcgtatttttctatctaatcattatgaagatatatttgtcaaggaaggagaatagaaagcatgttgttcaactctttgtgattagaactgttaaatatagtcatatgatatgcaggttctgcttgaattcttgccctggctcttggtgaaggatcggcctgctggatctgagtcatccacctataagagggacaacaccacacattggtcgctgctctcaagcccctggaataccaccccacttggcttctcctgattctgctatcagctacaggtctgggtttgtgtctccgacaaagaaccacctcaaagccccacagaaaaggactgtaccgtatacttcaaactattgacacctcaaagaacagagcttgggttcaggcttctgatgcattctgagacactctcagaccataccagtgggctgggtcaggatttacagaactattttcatttcaagagcatacgggctcatgagattgctaactcaagatccggtggaacagaaatacttatatcggactgaataaactgatgaggaaaaaa

SEQ ID NO: 614730 - DNA, 164 bp, Homo sapiens
cggtacccggactagccgacaggcgttgcgccgcactgggcggctgtgtgcagcccacagcctagactcagccacaactcgctgcgcgcacgtgtaaaccctagcgctcgagatgcatgtggtccagcgccctgaactccctcaatctgtcgggctagtggggg

SEQ ID NO: 614731 - DNA, 387 bp, Homo sapiens
cagagagacaggtaccggctggacgatggccgccgcgtccgggacctggaccgagtgctcatgggctaccagacctacgcagccctcacccgtcttcgatgacgtgcaaggtcatactcatgggcagtgtcaccctggacactttggggaggtgcagtggcggctagacacggcgtgaatccatgcaggtgtgtccagtgctgagagcagagagaagctcatcccgttggctcgcagtggaggcctgtgtggcgtgactgctgtcgagctcacggctagcccaggcacagccagcctgtcgtgtccagcctgacgcctactggggcagggcagcaggcttttgtgttctctaaaaatgttttatcctccctttggtaccttaatttg

SEQ ID NO: 614732 - DNA, 179 bp, Homo sapiens
ctttctggtggggcacattcatgaagcagcgacggcggtaaaggaagatgggcgatgacatgcacaccatctggctatggcatccatgaggttccagaggagttaagtgggcagaccaacatccacctcagcaaaaacttcttcctgacgaatcgcgcccagaatgggggatcctctag

SEQ ID NO: 614733 - DNA, 102 bp, Homo sapiens
ttacttcagtgctctgcaggctcctataaaccagagacctcacatatctttcttctccattccctatgttatcaacacccgaccagagatagggtaccggta

SEQ ID NO: 614734 - DNA, 349 bp, Homo sapiens
cgtgggtttaccccaaggatggttggttttcttggtccggggggcccaggagtgcccccgcaaagagtaccttcttgggcttccgcgcaggagcccagccagggccccccccctttccttgttaccagcattctggggggggcaaccgaggactggaagaagggggacccctttttctgcatggtgggccccgaggcccttccgctggccttcccccagaagaccctcggccgcttggggggttaacccccccctgtcaatgtgtttgttgtcatggcggaggtgggcggcccctgctttttagccgcccgcctgtccccccccctgaattaactccctgctcccccca

SEQ ID NO: 614735 - DNA, 101 bp, Homo sapiens
ttcgttctgcacggggctcactcagctctgcagcagagattgtgcacgaggacttcaagatggggtctgatggggagagtggacaggcttcagccacgtcc

SEQ ID NO: 614736 - DNA, 111 bp, Homo sapiens
cagataggttaaccactcccatatttctataccccttattgtctgccttgaggaagcctaacatactgtacgtatggtattcctaggatgagcaggcaggcctacctccaa

SEQ ID NO: 614737 - DNA, 134 bp, Homo sapiens
  misc_feature (99)..(99): n is a, c, g, or t
cggtactgggtggtgcagctgatccatcagaaggcagggtctgaaaaatacctcaagcacccatgttaggttttacaataataatattatctacaggangcaattggggaggttcatgatctctgaggcctttg

SEQ ID NO: 614738 - DNA, 335 bp, Homo sapiens
acgagctcttcctggagaaaaggcccttggcagatacaaggattttgagatgagctcgtcctggagtatctgtgtgggccctaaatgcaatgacaagtgtccctatacaggaaaggagaggagggacactggagagcagggggaggccacgtgaggttggaggccagcaggggttacacagccacaggccaaggagggccagagccaccagaagctgaaaaagatgaggaagccccttcccctggagccctcagggagcgcggccctgctgcccccttgatttcagacttttgtcctctgtaaccaagggaataaagtcctgctgtgtgaagcca

SEQ ID NO: 614739 - DNA, 81 bp, Homo sapiens
gtctttgcgtttccagggcgtggggaccccgggccccctatgccgccaagcccgccacaccgccctctccctggcttttgt

SEQ ID NO: 614740 - DNA, 353 bp, Homo sapiens
taagctgggcaattgtagcaggcagatctcttgtgagttcaagacctacctggtcttcaaagtgagttccagtatagttagagctacacagagaatccctgtctcaaacaaaacaaagcaaaacaaacaaacaaacaaacaaaacagataatacaaactatattttaagatttctctcccactgaagtgacctcttgagaatagccactgttcttgcatttcttcataaatctgagtgttccccatctcactgagtggaaatactacagatacatttaaaagatcgcctatactgtgtaagaaattacctcctgatgatccagtagaactcactgtgggatagacacgtctgt

SEQ ID NO: 614741 - DNA, 443 bp, Homo sapiens
cggtactgcgctactgtagccttgatcacgtagcaatgcggtatataggctgagcaaaggtggtgaggtgatctggggttatcgaattcacagaacaggctcctactagagggatatgaagcaccgcacaggtcgtttgagctttatatctggtggctcgtagtgttctggcgatcagtgttgtagatttaacgcgttgtaggttgagggctaagcatactggggtatctaatcccagtttgtctcatatctattcgtgtgtgcaaaatatgttaaagccactttcgtagtctattttgtgtcaactggagttttttacaactcaggtgagttttagctttataggggagggggtgatctaaaacactctttacgccggcttctattgacttgggttaatcgtgtgaccgcggtggctggcacgaaattgaccaaccctgggg

SEQ ID NO: 614742 - DNA, 553 bp, Homo sapiens
agcggatttgcacgcgccgcgtcacgggccgctcccggctgggctcccgggggctgtcagggaggtggcggcggtgaccggggacggtggcggcaggcgcgagccgcgggccgcccgcctgggaggcgcccgggcctcatcaagtgaccagtatcccttccagggaacacggtccttcaaggaaagcgagctccaaccgggcccggcgccaagccgcgtcatcttcttcctgtgccaggaattgcatttgtgaacaaagaacaagaattttctgcaaggatcatatctaagtgcaccttgtgctgatacttcatttcgaatcttgtagaaaattttcagctgtagcccttggactagaagctgcaataacagaagctgtgtacgatgcattagggtattgaacaacactaacttttgaattaactattggcatatacggaaaatacggagacgttgcactgaacctggggcggacgacaatacacatcacccgcctactggatgacacggcaccgacaggtcaccttttacaagagaaagtttgcattaatgc

SEQ ID NO: 614743 - DNA, 188 bp, Homo sapiens
gctggggttactatgagaccactttgcggccagcaagtgtgcatcaatctgcggatggtggagggcttgccgatgtgctggtggtagccacctaccaaaaggatgctccacaggataacatggccacaccccgtactcgtggccagcagttcctactttgccttatattttgtggtacgcccgccctg

SEQ ID NO: 614744 - DNA, 715 bp, Homo sapiens
cacacgcccgccgtgaaagctggtggaatgcaaattgtgcagaaacactcacatacaggagacaccaaagaagagaaagacgaggatgaccaggaatgggaaagccccagtccacctaaacccactgagttcatctgtggcgtcatcgaccagagtgacagaggagggcggccggctgctgcgcaggtggctcaccagaagccgggtgcctgcatggacaagcatcctgcgccaagaacccagcgcatccagcagccacgcgagtgatcctggagtccaccagcctgccgacatggggccgggtctgctgcacttggggttggcctgacagatggaacggggagggggggggaggtcctactgtgctggtgaatctaaggcagaaccgagggctctgggctttgccttacatggggctatggaggactagagacaggtccagcccggacgtagtgtatggggatgcgggttggatgtcatttgaggagcattgtgcccgtagaggtgctcatagcaggaatctgccaagatgcgagaagggtggtagctgtaggtctgatggagcagtggcctgacgggctgggctatgatcgtaggagcaataacggcacagttcgagaggatgagagggggttgcgaggacctgaggagtgcatgctgggtgagagggggcagtgagaagtggacacctgtgggagaggggggagtggggtgg

SEQ ID NO: 614745 - DNA, 373 bp, Homo sapiens
ccatacagtacatcaattccattcctaggggcagacgcaaaataaatgaaagaggacttaaaaagatatctgtacaccaattttcatagcagcattattcgcaatagccaaaagataaaacaacccaaatgtctatcaacggataaatagaacaaaacgtggtgtatacatacaatagatattattcagccataaaaaggaaggaagttctaatacacgttacaatatggatgaacctataaaacattatgctacgtaaaatatgccataggctgggtgctgcggctcacgactgtaatcccagcactccggcaggccgaagtaggcagatcgctcgaggtcaagggttcgagaccagcctggccaccatgac

SEQ ID NO: 614746 - DNA, 436 bp, Homo sapiens
cacgaggggcattggccgtgaaatgcacgaacctccggaagtcctgcactggggaagaccgcgaacagggctggcgctgcgcgaaggcatggtgttcaccattgagccgatgatcaaccaggggggcaacgcggttctgaccgaggacgatggctgcacggtggtcacgcgcgatggccagctgtccgcgcaattcgagcacaccgtggcggtgacgcgaaacggcgtgcgagtcttgacgttgcgccctgatgagaaggcaccgaatttcgcgtcatgaggtccgtggtagagtcgttcgtggttcttgatcgactccgccgctgatcacaacaatatggaaagcgccgccgatagggccaatatgactacgcagattccggcaatcgttcccgcaaaaaccgcgctgttggtcatgcactgtcagaccgacatc

SEQ ID NO: 614747 - DNA, 819 bp, Homo sapiens
  misc_feature (318)..(318): n is a, c, g, or t
tggacagcagcatcttggttatattggacaatcccaggtctatccctaacacgccgaagaaagggtctctgtacagcccggcccggtggggaggagggagggaaggcaggccacccgaagacccggggttttgttcgggaaggtgcacacaaacccggtggcttttccctttgtggcgctctaaaagaaggaaaacaccttggataactcaatatatctccggcctcattaacgttaacacgggtgcgcaaaaagaaagacacactttggagtgtggcttcacaactcgtgcggggtgttgtggcgacaatctctctncctctctctccacccaaaatatttgccatatgatgtgcaccccgagtgtataaaaatgtggcgggcaataaagtgccgatcacgcggttccacccgagccgagaaaaacccacccgtgttgtaaaggtctacaaaaacccgaaagtgtgtctcgagcgaagaggaacacaaagagtttttgtgtaacccaagcgaggaagatgcctctcccgagagagggggccgggctctcccccaagatgcgccgggggcccgccactgggaggcggcactcctcccaagggttcaacaaacgccgagacagccgcgtgtgtgtgcccacaaacaaggggggggcggggcaccaactctctgtatctctccctcgcgagaaaaactcctctgtggggaggaacgagcctctctgccgtcagaaactcccgccggattctacccccccccaagtgtgtctctacccccggggggagtgccccgggggaaaataaccccccggggggccaa

SEQ ID NO: 614748 - DNA, 662 bp, Homo sapiens
  misc_feature (279)..(281): n is a, c, g, or t
  misc_feature (283)..(283): n is a, c, g, or t
  misc_feature (286)..(286): n is a, c, g, or t
  misc_feature (290)..(290): n is a, c, g, or t
  misc_feature (293)..(293): n is a, c, g, or t
tgtgatgctgttggtcagctggctcagctcccagtatagccgctctctgtccagtccaggtccgatgggatcaacgcggtgggtacagatggtgtccactccagtggctgcctcatgcttctcaggtctgagcaaggtcagtctgcagccagagtacagagggccaacactggtgttcttgaacaagggcttgagcagaccctgcagaaccctctccgtggtgttgaacttcctggaaccagggtgttgcatgttttcctcataatgcaggttggtgannntnaanttgnaantgaatggtatcaggagagggccaggctctgtgtggccggggaaggaggatggagtcccagtggttgcccagtacactgtggaggtcccaggagtactggtggtgggcacagagttctgatgggtgaaaccattgacatagagactgtccctgtccaggctgtaggggcccagctcagtgatgttgtgggtcagctggcttagctcccagtacagctgctctctgtccagcccaggtcttttgggattagggtggtagaggcagacagcatccattccagttgctgccccatccttctcgggcctgagagaggtcagtctgcagccagagtacagagggcccacactggagttctgaaaatgggactagc

SEQ ID NO: 614749 - DNA, 714 bp, Homo sapiens
  misc_feature (279)..(281): n is a, c, g, or t
  misc_feature (283)..(283): n is a, c, g, or t
  misc_feature (286)..(286): n is a, c, g, or t
  misc_feature (290)..(290): n is a, c, g, or t
  misc_feature (293)..(293): n is a, c, g, or t
tgtgatgctgttggtcagctggctcagctcccagtatagccgctctctgtccagtccaggtccgatgggatcaacgcggtgggtacagatggtgtccactccagtggctgcctcatgcttctcaggtctgagcaaggtcagtctgcagccagagtacagagggccaacactggtgttcttgaacaagggcttgagcagaccctgcagaaccctctccgtggtgttgaacttcctggaaccagggtgttgcatgttttcctcataatgcaggttggtgannntnaanttgnaantgaatggtatcaggagagggccaggctctgtgtggccggggaaggaggatggagtcccagtggttgcccagtacactgtggaggtcccaggagtactggtggtgggcacagagttctgatgggtgaaaccattgacatagagactgtccctgtccaggctgtaggggcccagctcagtgatgttgtgggtcagctggcttagctcccagtacagctgctctctgtccagcccaggtcttttgggattagggtggtagaggcagacagcatccgaagcagttgccggccgcatccgaagcagttgccgaccgcatccgaagcagttgccgaccgcatccgaagcagttgccgaccgcatccgaagcagttgccgaccgcatccgaagcagttgccgaccgcatccgaagcagttgccgaccg

SEQ ID NO: 614750 - DNA, 561 bp, Homo sapiens
  misc_feature (1)..(1): n is a, c, g, or t
  misc_feature (90)..(90): n is a, c, g, or t
  misc_feature (140)..(140): n is a, c, g, or t
  misc_feature (189)..(190): n is a, c, g, or t
  misc_feature (192)..(192): n is a, c, g, or t
  misc_feature (318)..(318): n is a, c, g, or t
ntgtgaagagagagcacatattgtgcgcggcgcggcgtgtgctctacatgctcgtgtatatccacacgcatcttgtggagagcccagagntgtgtgccgagtctcacagagtgctcgagagagtctcagagctcatatcncgtgccatacacagcgtgtaaacacccgctgctctttcatctaaaaaannanaacacaaaaatattatacgccgagcgctatgtgtgtgtgagtgtcgctgtgatatctccacacgcacactgtggagagctctagagcacagagagatatccgctgtgacacccgagagagcgcganagtcttcacatgtaaccgcagagtctcagcgccatgtcgcatctcacagctgtggcgcgcacaaacgcagagatcttgtgtcacaaatataatataatataatataatatatataagatttgcactgtgccctgtgtctgactcgtgtactcgtgtgatacgctttgcgcacgagtcacatgtgcctctctcagggcttctatctcgccgcgtgccatattcgtacagcccgggggatccact

SEQ ID NO: 614751 - DNA, 111 bp, Homo sapiens
  misc_feature (8)..(8): n is a, c, g, or t
  misc_feature (85)..(85): n is a, c, g, or t
  misc_feature (111)..(111): n is a, c, g, or t
tggggcgngtcggtggcggcaggccagcggccattacccgaagtatgtacgcggactcatatagggctatgactaatgccccgtnatgatactataatactaggcatgcgn

SEQ ID NO: 614752 - DNA, 804 bp, Homo sapiens
tacaacgggacgtatagacccgaagatgtgaagcgacgagccatggccgaccctgaggtgcagcagatcatgagtgagcgcaggcatgcgccttatactggaacagatgcagaaggacccccaggcactcagcgaacacttaaagaatcctgtaatagcacagaagatccagaagctgatggatgtgggctctgattgcacattcggctgataggacttgtacatcccccgcttacccgttcgatcactcatgtggaccagaggagctgggaccgcggcgagcagacacggagcggacagggagagacagcgggagagaaggcctcatctctctatattatatagcatagaccccggggaaagacaacagagactcgtacactgcagacatgatatagtgccgacgcatgcactctgggccctacacagacgaacacgcatgagtcacaaacacacgctgaccacggaggtaccatgtaatcgtttaacaatgaacgccaagattgctgtctacctgccttgctcatccacaattaagtaagaggaaacaaaaccatattagtcggaggacaagatgggggacacatgctaacatgtgagggaaggggaaaatggggtgctccaatttcacggcacctccactataccccagcaatggtacatcacggatagcaaacaatccctgcggtacacccatatctcaccaatcaactaaaagagagagttggagacggaggataactatggtcgaaacacaaaccaaaaacaccaaaatcagcaagaagaactacctactctcaaaaa

SEQ ID NO: 614753 - DNA, 193 bp, Homo sapiens
aggagcatccgtgtacgtatcatcttctccgttacgaccgtagcatgtggtctcctttatcgttagtgggccatcaatttcatcacaatcaattatcaatataaaccgctcctgccgataacccaagtaccaaacgcccctcttcgtctgatccgtcctaatcacagcagtcctacctctcctatctctccca

SEQ ID NO: 614754 - DNA, 379 bp, Homo sapiens
  misc_feature (12)..(13): n is a, c, g, or t
  misc_feature (16)..(17): n is a, c, g, or t
ttatggttaccnnccnngagtatgaatatgtgaccgagcgtcgggatagtgtatggcaaccctgaaacttatcattgtcgcacggctgcttctctctacagtacggttggttagcatgtaatatgatgatcatagatacgtaaatgttataaatgttatatcttcttgctgtattgaacctcttactaatatgtaatgtcttaatctcttgtcatcttttgttttaaagtctatttgtcttatagtcaccaccctgctatcttttggttactgtttccatggaatatttttccatcctttcactttcaatctgtttgtgtctttggatataaagtgagtctcttgtagatggacgtagttggatcaggtgctttaatcc

SEQ ID NO: 614755 - DNA, 213 bp, Homo sapiens
  misc_feature (50)..(50): n is a, c, g, or t
catttaagtttagtagtaaaagactggttaatgataccaatgcatcgtanaacctcagaagaaaaggagaatgttttgtggaccactttgggtttcttttttgcggggggcaggtttaaggtaataggttttaaaaacaggaccttttaaaggaaaccacctggcccaaaatttggccacaattttttggccccttttaaaagtgttatgtga

SEQ ID NO: 614756 - DNA, 162 bp, Homo sapiens
  misc_feature (111)..(111): n is a, c, g, or t
ggctatacattatcacatacaaccagaaatctgagaacattccaatgttctaagacatctccctttcaaagtatatacctgtttttgtggcagatttacaaatagcctaanacactcccaccctaccaaaccaagtctttctggaagtttctgtagggcaga

SEQ ID NO: 614757 - DNA, 264 bp, Homo sapiens
cggggttttaccatgttcgccaagctggtctcaaactcctgacctcactcaggtgatccacccgcctcagccttccaaaagtgctgagccaccatgcccggcctcaataattactcttgagatttgtttaattgctctgttcatatattactgtatataaatgtaggcatttactttacgggtcataagtaataatgctaattttttgtgttaaactcttattcagattctactcacatattatttgaactctatgtgttgctg

SEQ ID NO: 614758 - DNA, 109 bp, Homo sapiens
gcaggacctcggcagctcaacgggccatgttagaaatccagtatgaaaataaggttggtacaggtcttgggcctacactggagttttatgcggttgtatctcaggaact

SEQ ID NO: 614759 - DNA, 621 bp, Homo sapiens
  misc_feature (34)..(34): n is a, c, g, or t
  misc_feature (223)..(223): n is a, c, g, or t
  misc_feature (228)..(228): n is a, c, g, or t
  misc_feature (232)..(232): n is a, c, g, or t
  misc_feature (239)..(239): n is a, c, g, or t
  misc_feature (241)..(241): n is a, c, g, or t
  misc_feature (247)..(247): n is a, c, g, or t
  misc_feature (260)..(260): n is a, c, g, or t
  misc_feature (344)..(344): n is a, c, g, or t
  misc_feature (363)..(363): n is a, c, g, or t
  misc_feature (382)..(382): n is a, c, g, or t
  misc_feature (402)..(402): n is a, c, g, or t
  misc_feature (419)..(419): n is a, c, g, or t
  misc_feature (422)..(422): n is a, c, g, or t
  misc_feature (426)..(426): n is a, c, g, or t
  misc_feature (428)..(429): n is a, c, g, or t
  misc_feature (436)..(436): n is a, c, g, or t
  misc_feature (442)..(442): n is a, c, g, or t
  misc_feature (453)..(453): n is a, c, g, or t
  misc_feature (457)..(457): n is a, c, g, or t
  misc_feature (490)..(490): n is a, c, g, or t
  misc_feature (541)..(542): n is a, c, g, or t
  misc_feature (558)..(558): n is a, c, g, or t
  misc_feature (560)..(560): n is a, c, g, or t
  misc_feature (562)..(562): n is a, c, g, or t
  misc_feature (573)..(573): n is a, c, g, or t
  misc_feature (583)..(583): n is a, c, g, or t
  misc_feature (593)..(593): n is a, c, g, or t
  misc_feature (600)..(600): n is a, c, g, or t
cagaaaatccccaggtacagtagccatgacatancaaagttctgggcctgagttgaaaggtgacattgagaaatgcctcacagctatcgtgaagtgcgccacaagcaaaccagctttctttgcagagaagcttcatcaagccatgaaaggtgttggaactcgccataaggcattgatcaggattatggtttcccgttttgaaattgacatgaatgatatcaangcctntatnagaagangnatggtntctccctttgccnagccctcctggatgaaaccaaaggagattatgagaaaatcctggtggctctttgtggaggaaactaaacattcccttgatggtntcaagctatgatcagaagnctttaattatatattttcntcctataagcttaaataggnaagttttttcaacaggnttncagngnngctcccnccatgntgaaaaaaaangccnttaaatcctttttatattataactctggataanaaagataaggcccttttttaaaaatgttttcccccaaccataaaaccctanncaagttgttttagtancnanacatgagaaanatgtttatgnagctgaaaanaaaatgncgtccccagaaaaaaaaaaaa

SEQ ID NO: 614760 - DNA, 1631 bp, Homo sapiens
  misc_feature (172)..(172): n is a, c, g, or t
  misc_feature (253)..(253): n is a, c, g, or t
  misc_feature (770)..(770): n is a, c, g, or t
  misc_feature (800)..(800): n is a, c, g, or t
gcatgaaaagaactgaggaatactgaagagacatatgcttgagtctgtggagcatggggatggagtaacctggaggtaccctccatgtggaaacattctcgcgcatcgttttgatacatcaacctggcaaggatgacgagaggctgtgctacagggactgtctgcaatgttntgggggaatgtatgcaggtatgatgatgagtgagtgctttgtataactactatccaccaatgtgaaaaaaaattcccatgnctcagccatggccaggcaaaggctcaggcgacgtcacggcgccaagcaagccaacgcccgacttgtttcttaggcttggaagacattagacgattatagggcgaacgtcgcatcgttgccagtagccaaacaaaacacgaattagagcagttccgtgggcgatgctctggggcagatacgtacgcataaacacgagttggaggatatatctattattctcaacagaaaatacatagaagagaatagggttgacttcatttctgtcgccacattgcaggtatgcgtcgtacggacatgtacgtcctattttctggatgcttttccgaggccaggttagacccgtaggtgagacagcttgctcgatcgagagttctagagggaggagaacggtgatgcgagatggagaacgctaggggtctaatcgatcgcaattgtgtgggtttcgctctttgggtataaaggttacaaaaggtgcgattggcaccatttgcgaaccaatctatgagtaacattgaancgagaaagacaagaagagctagcttattcnacaagtgggggctactacgaagttcccacaaacccctttgggcccatgtggagcaacatgttgtacacatgcatgtgggcataggggtggcgatgtggggcgtctgtccacattgtccttgagctaagagggggaagcgcgtctccaaagggtgtaccctccatatattttgtaaccccaaaggggtgtccatggcaaggaaaaacgtggcaaacgattggggtggtctggtttgtgaacctgtgcgaacaagcgtcgggggtataattcctcatactaatgttcgttctaatcctatgtacaaaaggcatttgcgattaagactgggagtctacccatcgtttttggtacgcttcccacaagaaaacacccccaaggggtgggcttgtaggcaagtgcgtcaggtccaattgtcctcctattgagcaaaaccattcacgtcacctgccataagggtaatcttaggcaacgtaactggggcacttgtccggagcttctaaacattggaggcacatggctggggcaaaacacaacaccccaggaacttaaggcaaacggaagtaccttcagcgggcgcggcagcggtcccccaatgtcaacacggtggtgtcgtcggacccgtagaacgtcaggttgtacccggcgcacagcagggcaccggcccgtgttcccaccaggtgacgcgggcttacgctggtaaaccacacagtggccttcccgctggcgtcacaacagcgtgcggtgtgtcaacatacggcggcgggatcacacccactatattcggaggggcacagggtacaatcggcacaacccccccgtgcaccacacgtc

SEQ ID NO: 614761 - DNA, 229 bp, Homo sapiens
  misc_feature (175)..(175): n is a, c, g, or t
  misc_feature (218)..(218): n is a, c, g, or t
atgctggattacagggataggtgctgggctgacaacacacttccagagtgttcaaagacagctaatgacgctatccaggacatgttatgtgacatggagggactgccgcagaagcacaacttttctcattgctgcgggaaagccggctttccaagaagactctgtttcttctacnaccaagaaaagctaatgtaggattcttgcccccctttccccantctgggatccg

SEQ ID NO: 614762 - DNA, 289 bp, Homo sapiens
  misc_feature (32)..(32): n is a, c, g, or t
  misc_feature (46)..(47): n is a, c, g, or t
  misc_feature (58)..(58): n is a, c, g, or t
  misc_feature (70)..(71): n is a, c, g, or t
  misc_feature (84)..(84): n is a, c, g, or t
  misc_feature (93)..(93): n is a, c, g, or t
  misc_feature (112)..(112): n is a, c, g, or t
  misc_feature (118)..(118): n is a, c, g, or t
  misc_feature (134)..(134): n is a, c, g, or t
  misc_feature (148)..(148): n is a, c, g, or t
  misc_feature (193)..(193): n is a, c, g, or t
  misc_feature (206)..(206): n is a, c, g, or t
  misc_feature (216)..(216): n is a, c, g, or t
  misc_feature (241)..(241): n is a, c, g, or t
aacagctaagagatatcctttagaattacatntattttagcataannaaattgaaaantaaaacatactnntttttttcaacangaccatatntaaattaaatagtgaaatntgtatnagtttcagtagaactntaccatcaacaatntttccataaatatgcagagttctttctttgtattgttatttacantatttttaaattnaatgcatttncaatttctaggattctaaagaattnagtacagaaagtagcaattttattatttgatgataatatgaggattac

SEQ ID NO: 614763 - DNA, 406 bp, Homo sapiens
attcgaccgggctcctgcccatgtgcatttccaaatgtgaatagctggaatccaaaattcattaatttaattttcatttcagttgaccctcgaacaacaaaagtttgaactgtgtgggtccacttatatgtagggctttttttcaataaacatattggaaaatttttttggggaattgtgacaatatgaaaaaactagcagatgaaccatgtagcctagaaacataaaaaaaaaaaaattcaagaaaaggttaggtatgtcatgaatgcttagaatatatgtagatcctagttaaagtatgggattaatcaattatttatgttatcaatacggttaccagtcaacagtaggctattagcagttaagtttggggggaatcacaagttgtacatgggcggggagcccg

SEQ ID NO: 614764 - DNA, 211 bp, Homo sapiens
cttcacctgctcacagtgcagtctacctctgacacacacccgcacagccacacccagaaacaatgcttccccggttctccaggtgtaccttcatccagtcaagttgacacctaaaattcaccatcacagctggattggagtctctggatggtttagtgaaatgccgtatacccctattatttaaggaggtctgtggtgtaactgctcttgt

SEQ ID NO: 614765 - DNA, 306 bp, Homo sapiens
tctgctgcgcctctctgtgaattccaaggccccatcagtatcagaatgaaatgaaaactatctcaataggggcgtttctatcaacttctgtctgatccacacccattaatgcatgagactctttaacacaaatactttaattgggcgtcaccctacacctaaagtcaaactaattacaaatgtgcgtgagaacatatggccacaaaacgtaataaaatgcttgttgaatacaaactgctcgcgtctccactccgagggtcacagtaagtcagtggccaaacaagtactgcagattataacgagcta

SEQ ID NO: 614766 - DNA, 94 bp, Homo sapiens
  misc_feature (38)..(38): n is a, c, g, or t
  misc_feature (61)..(61): n is a, c, g, or t
  misc_feature (91)..(91): n is a, c, g, or t
caaaacgttgtgggcaaggactggtcgccccgtaagcngccggcgcaccgcagcccgtgcnccaggagagactcgaggccctgatcccgcncct

SEQ ID NO: 614767 - DNA, 475 bp, Homo sapiens
aagaactgattgctatactcacagaaaactatggtgggaaatggccctttatgctgtcccctcgccaggtaatgtgtagttccagtgggatcacacctgtgatgaatatgcccaaaaggtacgacaccaattccacgatgccaaattcatggcagacatatgatactggatccaggctgtaccttgaataagcacacgatacgaaatgcacagtaagccacagtcatcacttcatactatagttgtaggtgaaaaccgagaaacatcagttggcactgttacataatccgcacaagagacaataaggtccacggggaactgcaccaatttactgaaactatcgagcggctaccagcaactccaaagagttccgggagcaacaacaggccgaagaagactgtacactgcccaaattaccccagacttggaccatggaaacaaggaggactagcgtttccgtaaaaattgactctgt

SEQ ID NO: 614768 - DNA, 836 bp, Homo sapiens
agagtaaatagacaatctacagaatgggagaaaatactcataaactatgcatctgacaaaggtctaatatccaggatctataaggagcttaattcaaagcaaaaatcagtcccatcaaaaagtaggcaaaggacatgaacagacatttttcaaaataagacatacaagcagccaacaaacatgaaaaaatgcttatcattactaatcatcagagaaacgcaaatcacaaccacaatgagatactgtctcacaccactcagaatggctgttattaaaaagtcaaaagacaatagatactgacaaatttgcagagaaaaagcaatgcttatacactgtggaatgcagtttggaaatttctcaacttaaaacagagctaccattaggcccagcaatcccattactagatctatacacaaaggaaaatagattatcataccaaaaagatacatgaagttgtatgttcattgccatgccattcacaatagcgaagacatggaatcaacctaggtgcctatcagtggtggattggataaccgacaaatgtggtacatatacaccatggaataccacacagccctgaaaaagaatgaagtcatgccctttgcagcaatatgaatggagccagaggccattaacctaaacgaattaatgtaggaacagaaaactacatatccacatgtttctcacttataagtggggatctaaaccattgagcacatgttggacataaaacatggggaccaggtagacattgcccgactactagagcgggcagcacaggttcaagaacaaatacctatggggtaccatgctcactacttgactgcagtataacc

SEQ ID NO: 614769 - DNA, 136 bp, Homo sapiens
cccctgataaggttcaataccaaataagcttgcagtagaaccaccgtcagtcgctttaggcttagttttgcgcacacgttttgtagatttttcatctacaacatcagtttgttcgtctaagacagtattttggttg

SEQ ID NO: 614770 - DNA, 360 bp, Homo sapiens
atgtgtggtgtatggcttagataatggttctttgacaatgatgatttcgtacaaggtggcaaattaatggctcattgtagccatcgcgtacatgcgattaaggttagaacttaccatctcaataatttttctcttatacagtaagatgtcaaccttagaggcaacattagtccatcatgccatgaatacatggaaattcttgcgatctccttgaacaatcaaattgagttgttcctcatgctttgtaatcatagtgtacatggaaaagcgacctataaaatatgtaattagattgataacagggaaaaacttaccccacaattgtagtggtaccatcgctcgacataacaccacacaatt

SEQ ID NO: 614771 - DNA, 124 bp, Homo sapiens
  misc_feature (33)..(33): n is a, c, g, or t
  misc_feature (37)..(37): n is a, c, g, or t
atatccaaacagcatccctgcaaaaataactgnatgnagcctcccagttttttaacttcttgtcgtggactcatcctcaagtcttgctatgttggcacaaggcagtaaatcactcagccagtgt

SEQ ID NO: 614772 - DNA, 1078 bp, Homo sapiens
  misc_feature (914)..(914): n is a, c, g, or t
gctgcgggaggctctggagcggagacttggggagctgcccgctgtagcaccccaaggggcggtgtctgcgagaagagctcgctgcggtctcctccgatgccttcagcacccgcctggccgggccctttcccgacagagctctacatctacccttgctgcaatgcctcgcgcctgactcacgaggagagcccgtgagcaggtacagaagttggtggggtctgcgaggaggatcctcccagtacgaacattctcacgtggatacaccttactcgcgcgctcaaatggagtgcggaccttgagggactcccacagaaacacgcacgtgcaccccaacattatccgtgaaggtcgcagcgcgctagactcctgggggtccattttacgaagaggcgccaaagcggtgacagcgcgcgtccaaggttgggcgcaggtaggcaagcccgtcgatacgtgccaggaatgggcacggcaggcacatgagcccagggttgataggagttcggggcaatctggttgcatttaaaacggcgtacgggactacacctagcccaggtaggttagcgcgtgcaaccgaaccacgtcttctcggcgcacaccgacccacttcgttgaggcgtcacacgcacaaagtttcggcccctttgtggtggaaccaccactgaaaggcttctaacagccttcgttagcgcacggccttcggcgaagcacgcggtgcctcagcggcggtacaccttggggaaggtctacgagactagattgccttactccttgaggtacggtgcgaaaagcccagggagtccggggttggcacctttcgtatagcctaggtccccatttcacaaaatcgatcatccgcctttgagataccagaatatcgctgacaggcggtagcatctgtcccgtatcttgtgcgncaccgaaccacttgagcaccgcaacgggtggccacctttagtacgtagttttgacgcacgcacctttcgcggaccctatagttgttaagaccgatcagctcctaagggttacgcttgcgccctactggttagtgcaggccatgcacgtaggtttcagcacacga

SEQ ID NO: 614773 - DNA, 624 bp, Homo sapiens
tgacgagtattcattatgcgtgcatattagttgtagggcataaaagacagcttagaggacggaggtaacatgggattacatttttgctttcccatcctcctcccccacctctcaccagtgggcttctgtgtaaagtgagcgctggaaatgaaaatgcttgtctgacaacaaagcattgagctgcccttggaagactagaaccaaagcgggttgcttgggtgatagcattgtaggtactgggcgtcggttagcatgaggtctttatgcatgaatacattctacatatgtataagcagtatgctttgatttttacttaatttaatcttcagtgtttaaatgcaaatttatagacatcaaaagagaaagacatctaaatttggcaacagaaacgtacagacggaagattcagtgtttctgtttcactttaacggtatggctcaaaagatcaaaatgatttatagggcttattaaaaatcagatttgtgagttaaatctcagaggataaggcccaggaatttacattttaactagtttaccacagtggttgttaggcacaggaacgttgagataaagcttctcatatcatgtccaataacatacacagagacggcaaaaaatagaaga

SEQ ID NO: 614774 - DNA, 222 bp, Homo sapiens
tctgctaccgggactaacatggaagcgtttttggggtcgcggcccgcactttgggcggggggtccggccccacgacagctttaccggattccatccactcccgattccttcatggatccggcgtgtgcactttacagaggtccaatcacgcgaacccagaaccccatggtgaccgggacctcaggcctcggagttaagttccagggcggtgtggcgattgcc

SEQ ID NO: 614775 - DNA, 1314 bp, Homo sapiens
ttgtcacacgcgcattttgtcgtctcgcgggatgacacaaactatttctcctgggggggatgagaaaacaacaacagccgcttgtgggaggagttattttgcgcgaaccacctgtctcatcgcgggttgtgcgccgcgtagagatctccaccctcttgtgttgttggacccgccctggggtttttgcccaaaaccccccgctgtgacggcggactcttgcgggaaaataccggggccacacagggccgcgattttctccagtgtccgctgggagagacctcctcctgggtggaaaagattcacaccaaaagttcctctagcgggcaaatatccggggggcgccctgtttatccacacgggggcttctacaccaggttgctcccgcgtatcaacggggcacaatcaatattaatatgttacccggggcgggccccctatatttttcgggccccgttgtacacgactaatcagggccccaaaaggggcaaatagtcttcctccgccgatctccccccatggtacaaccgccaacacctctgctgggtgtatacctgggaatgtaattctgccgccacgagcctgctgatgacgcggcccgcttggccacgggctctgggtgttctctataccccccctttgagacaccgggctttcgtgcggcccgcccactcgagttgaaagcgccagttcccgcgggccgcccaaagggaggccctaacacttcaatggaacacgggggcaccccctcgacctctttgtgagggaaaagaattttcaagaagaatgtaagggggggcaaaaggcccatttttttcaaaagaggtgccgtgcgtcccaacacagtccctctcgcgggacacatgggggggccgcccttcgctgcctgggtccctggtatcgaacgagggctcaaagaaaggggaatctaaaagggcccccggcgcctccctccaccaacaacaacaacaacacacaccccaggggagaccccaagaggagacccccggtatgaaatcctcacacccgtgcggagccacatcaaaccttcgagagaaaattccacgttgtcttttttcccacaccgcacatcctgcccgtaagagatggccggggaaggctttagaaaaaggggcgcacttgcgaatccacaaccaatcggcacgccgagattccctgttttgatcaccggggtgggaagggaccgctggcgtccccgcgtggggccccatgggtgagacactcccagtactgagacctagagtcccaaaagcttgtaggagcccagtcgtgttctaagtatttattttaaaccca

SEQ ID NO: 614776 - DNA, 748 bp, Homo sapiens
gaggggacgtaacggaggcaggttggagccgctgccgtcgccatgacccgcgtaaccaggtgagttcgcccgcagaagaatatgaaaaagcagagcgactcggttaggggaaacgcgccgagatgacgggctttctgctgccgccgcaagccagagggactcggggatcatgcagcagaacgcagaaaagggcaccgagaagaaggaggaacccaagtagcttgtggcttcgtgtccaacctcttttgccctttcgcctgtgtgcctgggagccagtcccaccacgctcgcgttccctcctgtagtgctcacgaggtcccagccaccgatgggcattcccttttgccctgaggtctgcagcggtgtccttggggtgctttccttcccctcaggtagccttatctccccgtggccacttcccggggtggaggggggttacccctttcccgggctggtccatccctgtggggctcacccccaggagtttattcaagagttccgctttggttaccaacacaacacgaaccggagcacacacaactttgctggcccaacctgcagccctctgaaggaaggtcttcacaagcaatttgttgtggtcgctggaccacgtgtgtggttgagcacaacggtcgcaatcagggctctcaagcggaactgcgcggccaataacagcggcgtggattacgcagattaaaagccccgggtggacccacgtttggcacacccacacggctcccaggcccaa

SEQ ID NO: 614777 - DNA, 86 bp, Homo sapiens
caggaatgccatcctctcttctcctgcctggattatttacaaagcatgtgtggaaacccactatttaataaaagtgatagaatcag

SEQ ID NO: 614778 - DNA, 195 bp, Homo sapiens
gagcatgtggatcagacgttgtgtcaaggggtcaaatatttacatgtcagttgggtgtggtggctgaaacctgtaatcccagcactttgggaggctgaggcaggaggattgcttgagcccaggaggtcaagtctgcagtgagtcatgattgcaccactgcactccagcgtgggtgacagagtaaaccctgtctca

SEQ ID NO: 614779 - DNA, 412 bp, Homo sapiens
  misc_feature (12)..(12): n is a, c, g, or t
  misc_feature (178)..(178): n is a, c, g, or t
  misc_feature (185)..(185): n is a, c, g, or t
tttccctttttnttttattctcccccccaaaaagagccggggcgggggttggcgagtggggcgtttaaaattaaagccctatgccaggtccaatgtacagctgcaaagtggcaagaagccctaagaaagttcaagaagcaggtcaagggggtgggttggaagatggacgttcaagcanaacaaangagccctccctccccctccgtaacttaatgtcacaggtggaattaaagaaatctggcaaaaaataaattttgttatccgtgcttggggcggtgacccttgaccccattcctatttaaacatctggattctctgccataacatcttttgccacctatagctacaataaagtgtcgtcttggagtctgttgtacatttaagaataaacttttgtaaggaagtaaaaaaa

SEQ ID NO: 614780 - DNA, 752 bp, Homo sapiens
gagcggacttgcgtgtgagcccggcggtgatgacggcaacatggccctgaacggtagctgtaagtctgatcgacttctccgtgggaggcccccgattgaggcggagacgaaggtgctgcaggcgcgacgggagcggcaagatcgcatctcccgcgctcatggtgcagactatctgcgtgcgcaggtctcaccgacatgtcgtgggcgagacagtgatgcggatctgcagggacgatcctacctcctaaagagcaatcagtcggagtaatctactagcgtgtgcttgtcagtgaacctcggagtcagtacgtggatataagatatatccctgttgctgaatgcgccagtgctgcccatcatcccacagctcgggattgcagcacagatggcctcatgcctcagatgctcccacctgggactctcgatcctgcgccccaagcccccaagtaccttcgtccgagagcactagtgagaggagcgtgcagcattgactcacaggcagccccaggggccacctgctacctgcatgtgcctccaatatacaagatcgtcatggcctgcacacagaacagccctcattgcagaacgctgacctggtgcctctgcgtgaactgggctctagcacactcccttggagactagacatccagctgtgtggccttatccgcgcatatgcggaggccctgcgcaggcctgcagcaggctacagcactaagagcaagcccctgaggacaaaaccctctagaaaaacg

SEQ ID NO: 614781 - DNA, 913 bp, Homo sapiens
gaggttactctggtctgggtgctctcattcatgaatcgacaaggatacattagattatatcgaaagcattttcttaacgaagcagaattcctttaactaattccttcctacgacattgaactatacttatacaaattaaagacttggggacaggagaccactgacgcagacttgccagtttgggtcctcatgaacataaagaggacagtttgataacgtaccagaatagaatacccctagtttctaacagatagtgagaatctctgaagttcatcaggcatcttaagatgcacttacttgaaagtttgagattctgtctatcatttgaaaacacatttggctttaattctttctttgacatgtggtatattccatatcaagaagtatatgaacaaaataataaccttttgaccctgaccttgctgggtgaattagctctgaaaccactctctacaaccagtaatgcatttgtcccacatttcattctgatagaaaatgaacaacatagcaccaaatcaaaaatccgaggcgtcagataatgtctggattaactaatgtaagactctctaggatttcggtccgtcatgtaccattaataacagactttacagtcagtttctgttgccatcataggtacccattaccagacaaggtaagtgtcgtgtaccattgcatctgaattcctgattgtaaagacacctatgagggactcttagcaaccgggccactccactaagatcggatttcactcacaccgtacacattaatatactggtggtagaaccacctgaaactgtacaagcaggattcatcataaggctactagtacacatatttggacaagcagtcagataggcggaacaccttggaaaaaggtgaatggacatcagcggtgtagcccatcaatgtcaat

SEQ ID NO: 614782 - DNA, 207 bp, Homo sapiens
  misc_feature (37)..(37): n is a, c, g, or t
  misc_feature (73)..(73): n is a, c, g, or t
ctctagaggatccttacacttccccacaggcgcacgnggcagctgcggtcgctcaatgatcagcttacgtatngggcatctataagacttgagcttcttcctttcagcaagatcaaagtcttagaaaagtttggtaggcctggagggactcgaacccccaaccagaccgttatgggcggtcggcggaacgttgctagcggcggccgc

SEQ ID NO: 614783 - DNA, 175 bp, Homo sapiens
ggctcgcgagcatatctttaagggcaccttgccactactggcttagctgcactgtgacaagctgcacgctggatcctgagaacttcaggctcctgggtcaaggtgctggtctgtgtgctggcccatcacttatggcgaagaattcaccccaccagtgcaggcggcctatcagaaa

SEQ ID NO: 614784 - DNA, 133 bp, Homo sapiens
agagcggacaggtaggacgagatgcgaggttcgagtcagaagcttatgtcgttgatgcaggcaaacgccatatcgggggcaccgattattagggcacactagtcagttgccaaagcctccgattatagacttt

SEQ ID NO: 614785 - DNA, 427 bp, Homo sapiens
  misc_feature (35)..(35): n is a, c, g, or t
  misc_feature (51)..(51): n is a, c, g, or t
ctgccccccagtcttttatttgtaattgtaatganatatacatagcatganatttacccctttaactgtttttaagtgtacaattcagtggcaccaagtacagtcacactattgtgtaaccatcaccaatatttacatgtagagcttcttcatcatcctaacagaaactctgtttccactatatattaactccctgacccctcccttcctttagccctggtaacctctactatattttttgtctctatgaatttgcctactttaggtgcctcatataagtagaatcatacaatattcgtctttttatgtctgtctgtcttatttcacttagcataaagttttcaagattcatccacattgtagcatgtatcagaatttcattgctttctaatgctgacacacacacacgcacgatcgtcgacgcggc

SEQ ID NO: 614786 - DNA, 336 bp, Homo sapiens
ggtcgacaagtagatcatatattatgtccccaaaaaatcttaaaactttcaaaaaatttgaaattatatcaagcatcttctctgaacataatgggataaaactagagatgaataacaggagaaattttggaaattttacaaatgcctagaaattaaacactacacttctgaatgaccagtgggccagtgaagatattaagaagaaaagagaaactcttcttgaaacaaataataatgcaaacacaacatactaaaacttatggaatatagcaaaagcaatactgagaaggaaatttatagctataactgtctacatctaaacagagaaaagccttc

SEQ ID NO: 614787 - DNA, 280 bp, Homo sapiens
gcttggctgccacgcgcagcatgctggtcacagcgaacggggtgggccctggctgggctcctgccggtatgctcaattaggtacttatcgcggggcagcttctgtgacccctgctgtcagagaaccagcacatgctttgggctgaagccacgtgccatgcacgtcagcggctccaggtcgtgcaaggtcatctccttcgacgggggatgcacccggtgtcccacctgccataatgtgtttgcagattttgtgatgatgccggctagatggggtcttcaac

SEQ ID NO: 614788 - DNA, 303 bp, Homo sapiens
aaaatccaagtgaatgaggatgtacacatcaaaaccctggactacatgagacctgagaaggggttaaaggatcagccactggggatgacagaattcctagtatgtccaaccctctgggcctccgtttcccccatgtgtcctacctgctccctagtaaaatgccaagttctataatcatttgacataactgagaggagccaggaaagaatgcagaaatcaacacacacacacagacacacacagacacacacacagacacacacgcacacacacacatacatttcacataaaaaccgtcgacgc

SEQ ID NO: 614789 - DNA, 387 bp, Homo sapiens
  misc_feature (57)..(57): n is a, c, g, or t
  misc_feature (170)..(170): n is a, c, g, or t
  misc_feature (173)..(173): n is a, c, g, or t
  misc_feature (182)..(183): n is a, c, g, or t
  misc_feature (186)..(186): n is a, c, g, or t
  misc_feature (232)..(232): n is a, c, g, or t
  misc_feature (246)..(246): n is a, c, g, or t
  misc_feature (255)..(255): n is a, c, g, or t
  misc_feature (300)..(300): n is a, c, g, or t
  misc_feature (315)..(315): n is a, c, g, or t
  misc_feature (365)..(365): n is a, c, g, or t
  misc_feature (385)..(385): n is a, c, g, or t
ctcccaaaagcccggtgtgggggcgggccacgggggagatcccaagctcagtccccncaaagttcagggccggtcggaggcaggggcaggtccgggtccaaaggcctccaacttcagggggttgggtaaggggggccgcctcccttccgcacctccatccagcaaggacnccncagtttttnngantccagcagcagctccagcgatttggacccggatgtgaagtcccccnctgctggctccaancagcacganagcatcccgggcaaggccaaaaagcccaaagttaaaaaaaagganaagggcaaaaagganaagggcaaaaaaaaggaggctcccccctgaagggccctggacagggctcnttaaaccttcctttttgccnta

SEQ ID NO: 614790 - DNA, 344 bp, Homo sapiens
  misc_feature (137)..(137): n is a, c, g, or t
  misc_feature (145)..(145): n is a, c, g, or t
  misc_feature (161)..(161): n is a, c, g, or t
  misc_feature (227)..(227): n is a, c, g, or t
  misc_feature (250)..(250): n is a, c, g, or t
  misc_feature (269)..(269): n is a, c, g, or t
  misc_feature (276)..(276): n is a, c, g, or t
  misc_feature (300)..(301): n is a, c, g, or t
  misc_feature (317)..(317): n is a, c, g, or t
tattatgcatagctggtcttgaactcctgggctcaagcgatcctcctgcctcagctacccaaagtactgggattacaggtgtgagccagtgtgcctggccctgttacctcctttcatcctctgagcagaaaacagtnactaggtngttcatgacatctatngggtactccctactgtgtgccagctgctgggctcacctgcttacacgtgttacactgttgtaggcngtcagctattctataagtaggtnctattattatccccgtttnctagatngggaatctggaatctccagagagnncggatggaacccccanaccccagtgttgggctgcgtaaaagtg

SEQ ID NO: 614791 - DNA, 450 bp, Homo sapiens
  misc_feature (54)..(54): n is a, c, g, or t
  misc_feature (84)..(84): n is a, c, g, or t
  misc_feature (293)..(293): n is a, c, g, or t
  misc_feature (314)..(314): n is a, c, g, or t
  misc_feature (444)..(444): n is a, c, g, or t
aagtttgtggtggaggacccagaaagtggtcaggtggtgcaaagtaatcaaatnttttgcatttgtgtgctgtgggtttgactnttgtgctttttctcctaccacaaagggcagctgacacagttaaagctggcaccccataggttttggtcactgcatgtttagtcctgcagtcatcactccaggcacaattgttcctacacatgttggggcttgggttgttggttttcccacaacaggacaccaggcacatagttaggctaacaatgttcatcctccacagagggccccantcctaccacccagtaccaganagcccttccctacagcactctccactggccctgcacttgacaacacaaagagtcacagccaccgtcctcccaccacaaacgtgggatccgtgcacgttaacgattactaggactatgcgaaaaccttcgngtacta

SEQ ID NO: 614792 - DNA, 328 bp, Homo sapiens
  misc_feature (57)..(57): n is a, c, g, or t
  misc_feature (111)..(111): n is a, c, g, or t
  misc_feature (114)..(114): n is a, c, g, or t
  misc_feature (123)..(124): n is a, c, g, or t
  misc_feature (127)..(127): n is a, c, g, or t
  misc_feature (173)..(173): n is a, c, g, or t
  misc_feature (187)..(187): n is a, c, g, or t
  misc_feature (196)..(196): n is a, c, g, or t
  misc_feature (241)..(241): n is a, c, g, or t
  misc_feature (256)..(256): n is a, c, g, or t
  misc_feature (306)..(306): n is a, c, g, or t
  misc_feature (326)..(326): n is a, c, g, or t
ctcccaaaagcccggtgtgggggcgggccacgggggagatcccaagctcagtccccncaaagttcagggccggtcggaggcaggggcaggtccgggtccaaagcaaggacnccncagtttttnngantccagcagcagctccagcgatttggacccggatgtgaagtcccccnctgctggctccaancagcacganagcatcccgggcaaggccaaaaagcccaaagttaaaaaaaagganaagggcaaaaagganaagggcaaaaaaaaggaggctcccccctgaagggccctggacagggctcnttaaaccttcctttttgccnta

SEQ ID NO: 614793 - DNA, 495 bp, Homo sapiens
tgcatccttcttttatacaaagtcctgtgttagttgtgggaatggagagaagagaatgtatctaaggaggcagagcagacagattttggcaactgattagatatgagggatctgggagaggtcaaagttagctagcgggtttgatccggagtgtgggactctagttgtgccagtacagaaatgggcagacagtcattggaacagttttgagaagaaagatgcccatataggaaagagcccatagaatggttataaaatatgcctggatttgtggaaccagttctaaagctggcattactttcagattcttagtatcttagaggtgggtgtgatcttgtagatcctgtttcagtctcctcagaagcggggaaaattggtatcatttgtaggctattgtttaggttggggcaaaaaaaaatataatggggggagacattatatataaaggtgatatttacttcttagacttgagagaagctggctttcttaagccta

SEQ ID NO: 614794 - DNA, 258 bp, Homo sapiens
cacgaggggcggtgcaaggcggcaaggggattcgtggcgacggttgttgcatggacagcaggatcattggtgctgtcaacgcggccgtcggtttacatgggagacccgtggtcggagctaatagaatctgtccctccacctggtcctgaggaatctgattcaacaacgggtgaaaatgacgacgacattcactttgttagtgcatgaccattactacctgttcttgaatacattgatctggtcagcagtgatggatga

SEQ ID NO: 614795 - DNA, 932 bp, Homo sapiens
  misc_feature (380)..(380): n is a, c, g, or t
tagcgaaggatcgatagtccatcgacaattcctgatatcagtacctcgcataatatcactgtatgcaatgatgttagctagcctagagtagcattagtcaaccgcacgatggtccccgtatgtgcaacacaccttgccttggacgttgagactggtaatcgataggatacaacaagacttcacaaaagctaagttagacacgcattggaaaagtactcgtgacgtactcttcagtacacgaactatctagtgcatgacgttgtcatggaacgcctttgttaacctatagggctacattatgcaacgttcgcaaggtcacgtgcattcaccctagtacacacttgggcactagagtaccgatgttagaatggctcgcaggnaacgagaggaactccgcgtattatgaaatctagaaggtgccaggcgatgacataatcagtccctactctggtcctatgaagactaggagaaactacatgtgtccaacaagggacaaggggggagagtgctgcttgtagtttcgcccataaggtgttcgctaggtcaagtctcgccatgaagtaatggtagtgttgcgcgatagctagaggtagttcactcgttggacaagagttgcattggatgtcgcttccgcatgtgtgctgagggagtacattgaagagcgtatgttcatagccggtttcatgccatgtccttggcctcccaagaacacgtggctctctatgattaggtgaatgagagggtatgggccaccgctagtggtgagaaagtgggagtagtcgcatcttagcatcccagccaaattaataacatcatccattacaaaccattgattggcggtccacttgctttgagtcgtccagccatgagtgactcatgagttggcccgggtccccacccacaacgtgcctttcacgaacacggcatcccgt

SEQ ID NO: 614796 - DNA, 1736 bp, Homo sapiens
gacaaggctctatgcatcctgtcagaacaatggggtcgcagcagcgtcggaccatgacggccgtctgtcgccacgaagcaagatgaccacgggaccacgtgcgcacggagcgattggctaacctggacccacattacgtgtgcaaatcgagcgaaagacaatgcattggtggcatgtagagcacatggcatcggtcgcacaccgacaagcctacctggtacgctctgctcgtcgcttgctacactgcggatgccgcactagacgaggaactatctcacgagcgccctccactcaaactcgctcaatcgttgctccaggaagccacggtgcgtacttgctgctaaccacgttgcattgtggggaatattggacaggccgtagacgaatggccgtgccttaactgaagctaagacgaaacacccaggaacgagaacaccacagatcccacgcttggaggacaatgcccacgcgaccggatagcttggatgaagagatcacatagacgtgcatttcagcgatctcgatcggggtcccagacacgaatcactatcacaagaggagatccacagagggatggatggagaatacctgaggaaatagatacaacaaggacccgaatggatgcatggtggatgattgaatgatgagtgaatgatagatgaatgctggttgagtagatagtagatagatagatgagtaagcgaaagatagaatgccagaaagaagcgacgatcgaatgagaacgagaatgaaagaaaggacatgaaaaaggaaaggcgcagccgagtaggtcgctaagacaggagccacacaacacacgacaggtaggcaacgcagcaagcgcgacgcaacaccgacccgcaacgcaagctcggacccgacaggcgccaagcacaaccacagaaacaagacacgagcaaagcggcacacacacaacacgccaaacacacagccacacgcgcccagacgcgagagaagaaacagaaaaaaccccaagcaagaccagacacagaacgacgagaggacacaacacagcaaacgacgccagcaaagcgactacggcaccgccgacaccacgaacgaggcgcaccaagcaaaaccgagcaccacacagaagcagcaagggctaccaggcagaaacacagaaaaagagagaaacaccccaccaacaaaggagacacagcaacaagacgggcggaggagacggcagaaagacaacacaacggaagaaacccaagaggagcacgcagacaacaagagaaaacaaggacgaacaagcagacaacagaaggaacaaggacgaaccacacacagagacgaaccaaccgaagagggcaccaacaaacacaaacagacagagacacaacaagcgagacacacaagaagagaaagaggagcaaagattgcgcagcgaccgcacacagcgcatacgatcacgccaacgcagtgccggcgcacggcccaagagacaaagcgcacaccaacacacaggaaggccaaagcagccacaacacaagaagagcaacaggaggaagacgagacagcaccgagcagagcgaagaagacacaccgcagacacagaggacgaacgagcgagacgatgcaagagcaagcagacagccaacacacgcaagacacgaagacaacagcaaacacaagagaggcgacgcgccagatgcaggagagacgaagacaaaacgacaagacaaaagaacagacaaagacaagagagagaa

SEQ ID NO: 614797 - DNA, 423 bp, Homo sapiens
  misc_feature (5)..(5): n is a, c, g, or t
  misc_feature (13)..(13): n is a, c, g, or t
  misc_feature (415)..(415): n is a, c, g, or t
acggnaaaacccnaaacactgcattgtagaagagcccagcaaagggattgtgacccaactcagcattccccactgagacctatatggatcaaaacagcaaaactgtttatccatgaaatgcaggatgtgggcaaactaacatctgctcccagctgcccagaaggtttgctgaaggcaatcactcccctggtgcccatgcctcccttagggttatcctactgggacatcctagagcctattcgcagaatgcagtcttgcaagcctgctgtgaatcaaactgctgactgacaatcacccccaccttctcgttatctcttttacctaataaatacagagggctgaaaaagctcagggcccttgttcactagaaacaaggagccccctgaccccttcttccaaatatactcttttgtcnttatcttt

SEQ ID NO: 614798 - DNA, 510 bp, Homo sapiens
  misc_feature (84)..(84): n is a, c, g, or t
aggcaagcttatagtcatatatatccccagacataaagaaaaagacccattttttaggaaatgtttttaataaaagaaaattcnaaaaaaaatttttaaagacccctaaccctttgtgtgctctccattttgctccttccccatagttgcccccatttttgaggtgcactgggaggctccccttctatttggggcttgatgactttctttttgtagctggggctttgatgttccttccagtgtcatttttcatccccataccctgacctggccccctcagtgttgtcaccagatttgatttgtaaccccctgagaggacaaaaaaaaataagtgccctttcccccccttttcctactggtctttttatgcctttttacagttttgttttttttaccctggcccctttcccttgggttttgatgaaaaattgctgactgtagctttggaagtttagcttttagaaccgtaaatgatttcagttttaggaaaataaaacccgttgtttttta

SEQ ID NO: 614799 - DNA, 518 bp, Homo sapiens
gttttttctctttttaattattcttactagaagtttatcaattttattactctttccaaagaacaagcttttggctttgctaattttctctatatttacttgttttaaaaaatgtattggtttctgctcttatctttattatgtttttcttctacttagtattaatttagtttgttcttttcctagcctcttaaggtagaaacttagataattgattttaagccttcctttactatatgggcacttgaaaagctatacatttccctctgaacactaccttcatttgctacaaacatttgctacattcaacaaatatttgaatgtgtgtgttttaattttcattcatcacaaacccgtggtcccagctattcaggggactaatgtgggaggatcacttgagcccaggaggttgaggctgcagcaagccatgattgtgccactacattttggcctgggcaacagagtgagaccctgtctcaaaaaacaacaacaacaacaacaacaacaacaaaaaaaaa

SEQ ID NO: 614800 - DNA, 401 bp, Homo sapiens
gacccgagggcgaggaaaacggccaggcctatgtggtgctgtacaaggccatcgaccaggtgcgccagtgcgtcgacaccatcatcaaggatccgggtagccgcggattctgttccatggctggaactgtgcgcacgtggatgaaatggcgttgcgccgtgtcatttgctgtatcagttccatccgaatgtggagaccaaggagatttccctgaccctctacatccgttcgaatgatctggggttgggcacgccgttcaacctgaccgaagcgcggcactgctgagcctgatcgggcgcttgaccggttatacgccgcgctggttcacctatttcatcggcgatgccatgtgtatgaaaaccacctggacatgctcaacgaacagctgacccgcgagccgt

SEQ ID NO: 614801 - DNA, 848 bp, Homo sapiens
  misc_feature (340)..(340): n is a, c, g, or t
gctcttacagcactacttgcagatgatagcaagtttggattcagtgtaatagatggtagttggtgcactttcttggcacactccaaggaaacacaagagaagtcctgcactagaattcactgtggatctcccgaaagaaaacacggtagaggaggtcacgtcagcccttgcggttgttgcgccgtttaatgatatggaatagagcgacagtaactatgtccggaaagtagcagagactgctgtgcaggctgtgtatgttctggggacaattagtgaatgtggctggtctagtttaagctggatccgctgactttaaaatctgaactaatgtcaatctgantgtgttgtgatcgagaggttaacaagtgcaaaagtttgaaaattagttgatatatccgtatggtggtgaaaatggattcaagcaagctatggagttatctactgaagtcctctccaaggtgaaattcattcaagagaagaaattaataggacgatactttgatgaaatcagccaggacacgggcaagtactgttatggcgttgaagatacactagaggcttaggaaagtgtggagctgtagaaattctagatagtctatgaccaatctggatatagtgagatatgttccttcattgccaaggcacagaagaggagactgttctcgtatcgtaacgtccagagccagagcacggatcaattctcattgtcacagacccatagagaccggacaggatcatgagcttatcgagagcatggcccctgtggaactgggttggtaacagacgtatagtgaaatttggagctacgtttggaaatttgtcccgataatcaccaagaacgggtctca

SEQ ID NO: 614802 - DNA, 181 bp, Homo sapiens
tttgagttcccagagaacggaaagaaaagaggcatgttatactacccagagaaagtagtttgacttcccatttaaacattcccccttgcatcttgatgaacttgatccatcttaggttccagcatagctgtttctcgttcatttttatttctatgttgtgggtactggccagtagtgggga

SEQ ID NO: 614803 - DNA, 108 bp, Homo sapiens
gttggtggtgaccagcgctttctatctaccctggcgctctgcagccagcattctccaaccatttcattgtagtctgttcttttgttgaggcttagtaaggccctccgt

SEQ ID NO: 614804 - DNA, 1642 bp, Homo sapiens
  misc_feature (1)..(1): n is a, c, g, or t
  misc_feature (317)..(317): n is a, c, g, or t
  misc_feature (856)..(856): n is a, c, g, or t
  misc_feature (1071)..(1072): n is a, c, g, or t
  misc_feature (1125)..(1125): n is a, c, g, or t
  misc_feature (1149)..(1149): n is a, c, g, or t
  misc_feature (1151)..(1151): n is a, c, g, or t
nacacatatactctacttgttgtatagtggtgtcacgatatacataccccagtttggttgctagacacacacgatgccgtggtttttgcggtctcacctagttattgataggtcttcggggaggggagtccccaccaacgagggttggttgacacacaaaaaataccgcgagggcttgtttgttaaatacctggctcggcgctcctctgtgttaattttaattactcccggcgttcttcataaaaaggggtatcctgaaaggccccttttgggggttgccccaataattttctcgcctaatagaggggttaacacancaaagaatggggggaactatgctgtctcccctttggggtgattaaaagaaaacatgctccccgctcccccctctgggggaatattttttaataggggaaaaactgtttgtgttgcgcaccgccagttgatgagaggacgtttgttgtgtgtgaaaaaagccgcaggtgataaattatcctccttgggggtacgtttatacctaaggatagacgagaggttgggcccgcccccataaccaagctggcctactagatcctcctcctcccgggcgagtttttaggaagatgtttctcctcttcttgggggggccccttctcccggtgcttgcgcgtggaccccttgggaggaccttgtcgccccaaagagatgggaagaaagatggcttgggagagatattcccaatgtggcacagaaagagtctctcaagaaaaaaaggaaagagacgccccctctcggttggaccattgggggccctcgcgccacacagaggttcccatagggggagagcctccgcgcagagatagagagagcccctctntggggaaatagcgctctttggggagatgcctcttgctcttgcacaacgctttgagagggctctcgagaagcccccccgggcgcgttgagaaacgcacacgagagatctcccccgcacatgggaagaaatttgtgagagaatagaaagcgcctgtcgtgttcttttggggccccctggggagagctctgtggagatgaacaacaatgtgagagttnntgagaggctggctggacaccttcggggaattagagaggagaaggagagaattntttgtgagagagatttccctcggntntccacgagagatgtgccacatgtgagacctctttgggggccacagagatataccacaccacgagagatgtcccgcgcttccacgagtgtcccttcaagaacctcttgaccggtgcccacactaattggtgcctcggtgggtgaacacacccacgggccacaactttcgctggccacaactcttgggtggccactctggtgtttctttctagggttgagagtgagagatgttgtgagtattgcgtaatcacattcgccacgtaattctttgtcgccctcgtggtgagaggctgtaaagcctcacagagttcctctttctataaacaccacgctatgtctaagagagagagccaccaatcctcgttgagctgagaaagtggcacatgccaagataaaatattatttgctgttccttgtttactgctttttttcccccttgtgggctgtcaaattttggtatccagaaatataaccattggaattgccaagtga

SEQ ID NO: 614805 - DNA, 159 bp, Homo sapiens
gcagacgatgacctcaatttttctctgcctgacatccgattagaggagggggccatggaagacgaagagcatgaccaacctgaactggctgcacgagagcaagaacttgctaaagagctttggggactccgtcctgacaggactcccggacagcgggct

SEQ ID NO: 614806 - DNA, 1059 bp, Homo sapiens
  misc_feature (134)..(134): n is a, c, g, or t
  misc_feature (564)..(564): n is a, c, g, or t
  misc_feature (666)..(666): n is a, c, g, or t
gcagcgagagcgcgcggatctcagcgcgggagcagtgcttctgcgggcaggagcccgtggacaagcccacttgctgagctctgaactaggagccaacctcctagtggacttggccaggcttgctctggtctganaccttctggctgtgcaagtcttgggcaaccttggcccttgagggaagggaagctggtccagccaggggaagaaagcgaaggaaacagcccaatcaccagtggaacaacccaagcgtcacaccatgccttccaaaggaacaggatcaacaaaaaggcttgattcttgtggcttttaattctcttcctttctaattggcctttgggagcttccgttgggtggggacaaccggccctttggctttccacccgagttggccacacttctttctcttccaactttggacaccgggtcccaaccgttccgaagggtttcatttattccgcagccggcagaaagccgcggccgctttgtgggaaaacccaatttcgttctcccccccaaaggacaatttgggttggctccccgcttcttgtggagttcccaaccgtntggcagttgggacaatcgtgtggatcgggcacaacggcgggagcgtgggcgcacccaaagagcgctgagtttccacaggggcccagagacgcaccgtcggcnagtgagacaacgccgcactgtttgacgcctgtatggaatgacgccgtgaggaacagacgagttcctctttcctattcgacgtggtgtggggcgcataagttccgtgttacaaaaagccaaaaatgtgggtccgaagttttgaaaggcacgccctttaatatgtttggcaccacattagccttggggcacagcagtggtcgttggggataacattattccagacgcccttacaccagttccaaagagcttccccgttttcccccgttggcccaatatccaatggaaaaggggaagttccacgccgacagaggatacgacgagtataccaggtggaatatcccttggtgggaccatggaccattgggtgtgggggcgcacattctcttagactgg

SEQ ID NO: 614807 - DNA, 943 bp, Homo sapiens
gctgggatactagtgacacagatacagagactatgcaaacatatgttcccaggtgcctggagaactctcttgcatgccagtgtatgacaaaaatactttcatccaagcactttcatattcactttgtaattattgtgaatgtgtagatatgctagtttgccctaatatggtttattaagttggcctccccatctaaactgtaattttctctgagactgagaagatcggttgatatctttatccttttcccattgcccttgcatgattactattcaatcattgctgaattaaacaacactttcctttgtttaggaagatgctggatgctaaacacctgtcttactcaggcttcttattgacatagcaaattctaaacgtgttacatatacatgtgttccttttctgctttaaataaaactgatgggtatttatttctcccattgtgtaatgtagtctgtggaaatagtagccagtgtaggatgcctcagatatatccagctctgcaggcaaagctcagcttttaaagcggcgattcccagttatttgttaaatggatgttaagtcatccctgggttggagtttagacttttattgaaaagctttctactaatcaccagttaatgatgaataaaattcacactttgggcctcttcatggttttatgtccaacacatgctttctcagggagagaattactggaagtcggggtcttccacattaggaagtctgacaaatagggcaatctatttccatatttcagcgcgatttccagaagttgcattatacacgccaagggatgcaaaagccagttagcactatttggaacagaaaggcattctttctcagtaacccattacgtgtggctgtgcctcagtttaaaaacagggaacaccgagggtcttttggggacaccaacccgcggctcttaaacaccaacagcgag

SEQ ID NO: 614808 - DNA, 94 bp, Homo sapiens
gtggaggatcagtactccaggtatggtgcatcaagacatgcaggaacctcttcttaggggtcttaacaagtcacaacatgaagttcaactgcac

SEQ ID NO: 614809 - DNA, 371 bp, Homo sapiens
atatcgcagtacatacctacgagtgacacaatatcataaaatcgctgtgaactgatataacattagccaggtgagttggtgctggtagcagacccagggcgtatgtataataaaaggtagctggaatggtgatcacacagaagatgtttcccatcatggaagcgtcagcatgggtgaatacatataccagcagttggaggaagggcaccaatggtgaagcctgtatgcagtaaaagtccatgggctggcctcccccacccagactgaaacaggaaatataaccactaaggatccttaacaatcttccaagaaggtgcttaaatttccagagtggggattatcaccccaaaatatgttcctctttggcttag

SEQ ID NO: 614810 - DNA, 212 bp, Homo sapiens
tgaaaccctgaaaggaggggacccaccgccagtgaggggtacttcaggtctactcactatccaggagtgagtttgcccaatcgcgaagagctctgtgccaaagctccgcctcctgtgttctacaacaagcctccacagatcgacatcacatgctgggattcagatcccagttccataaccaggaggaggcgctttcacgctgcttcttgttg

SEQ ID NO: 614811 - DNA, 111 bp, Homo sapiens
cagttctaccgaacatttctgtaactgctttagtggctcctcctggggaggagaaacatacaaaaccaaaccctattgctgcgatcaccctcactctttcgattgggttct

SEQ ID NO: 614812 - DNA, 558 bp, Homo sapiens
gctagttcctcagcctcagtgctatgaaggtgacagcgtgaggtgacccatctggcccggcgcgatggctggcaacacggagggtggtcgggtggtcgcttcccgtgcggtacgagatatccaagaaagacctcatttggctcgctgagaggatgaagaccggattttcacacaatctgtatcgggtcgctcattgactgagagtgctgataacgtgtgccgctgagttcgaggtgactgtgctatccgagagcatcagaaggagcatcctgctgaaagggtgcccgatctggatcctgggacgagtatcaaagatccactcggcgtttcgagtgggcccgtggacggcgcgtgtgtctttccgccgagcatgtgacttcctcaataggtgtgagctttcatgaactaaagctcctcagaatggctaaggcccgagtatctggtggtgaacgctggacgatggggggaggctcggggtcacctgcaaggaccgtggagatcttacgccatgatcctcacaagctgctggaagtgctgcctggtggggggccgggccat

SEQ ID NO: 614813 - DNA, 707 bp, Homo sapiens
  misc_feature (501)..(501): n is a, c, g, or t
  misc_feature (539)..(539): n is a, c, g, or t
  misc_feature (670)..(670): n is a, c, g, or t
  misc_feature (693)..(693): n is a, c, g, or t
gcaggaattgcacgagctttttttctttattagtcctgctagcagtgtatcaattttgttgatcctttcataaaaccagctcctggattcattaattttttgaagcgtttttttgttgctatttccttcagttctgctctgattttagttatttcttgccttctgctagcttttgaatgtgtttgctcttgcttttctagttcttttaattgtgatgttagggtgtcaattttggatctttcctgctttcccttgtgggcatttaatgctataaatttccctgtacacactgctttgaatgtgtcccagagattccggtatgttgtgtctttgttctcgttggtttcaaagaacatctttatttctgccttcattttattatgtacccagtagtcattcaggagcaggttgttcagtttccatgtagttgagcagttttgagtgagtttcttaatgccgagttctagtttgattgcactgtggtctgagagacagtttaanttctggtcttttacatttgctgaagagggctttacttncaagtatgtggtctttggaataggtgtggtgtggtgcttgaatgtatatttctgtgatttggtgtggagaagtctgtagatgctattagggtcacttggtgcagggcttgagtcaattccttgtaatcctnggaactttctggctttgatctgnctattggtgcgggg

SEQ ID NO: 614814 - DNA, 204 bp, Homo sapiens
  misc_feature (17)..(17): n is a, c, g, or t
  misc_feature (105)..(105): n is a, c, g, or t
  misc_feature (114)..(114): n is a, c, g, or t
ctgttattaagaaaganaatgaaacagcagcgactacctgggcgaatgagtcagcacgtactatggttgtggttaagggtgagtatttcctgttgttgataccgnttttttcangggtcctttatgtatggtgccactcgtgatgtctttgagactttgaattatcaggaccaacaagatcgtggtttctcgtgtttgtgattt

SEQ ID NO: 614815 - DNA, 473 bp, Homo sapiens
  misc_feature (2)..(2): n is a, c, g, or t
gntcgctggctacggcatctgccaccacgcctggtaattttggtactgtagtagagatggggtttcgccatgtgggccaggctggtctcaaattcctgacctcaggcgatccacccgcctcggccacccaaagtgctggggttataggcgtgagccactgcgcctggtcgacatcctatttttatagatggtttccgatgggtggtaatcttccaaaatgtggatggtgtttcctgtggaatggtataacacctgagtgaacagattaatgcagtaagttaatcttgatgggatcctggactggaagagatgcaatatttggggtaaattaggggaaattttagtatagactaatatattcaggggtcagtgatctttttctgaaagagccagataataaatacttgggattttgcagaccttatggtcttggatttatctactgacctgttacagcgacagggagggggtac

SEQ ID NO: 614816 - DNA, 152 bp, Homo sapiens
gcggaggcgttcagctgcttcaagatgaagctgaacatcttctttccagccacttgctgccagaaacttatttaagttgacgatgaacgcgaaacttcgtactttctattaaaagcgctattgcccaaaaagttcctctctcaaagctctct

SEQ ID NO: 614817 - DNA, 1411 bp, Homo sapiens
caaaccttcgtgcccggcccgtcctcgcccccgcctccgtcaccgactcggcccgcagagcttgcccactctccacccgcagacatgtccgagtccaagagcgagcccgagatatgcatacgtaaattcgccgaacatgggacgcctacggcacgaacatgggactaacagacgccctgaggacagactgccaatacgcacagaccaagcagcggataccgagcatatgcggacaagtactaggacatagcagagccaggacgcacgatcataagaaagtaccatacatacccagtaggacaatggcataggcaatcatacaagcacaacaacgagcctagagtggaggcaagtcctacatacgcacaaaaacaccaaggaaatgacgcgacatcgaggcacatctaacacacagaagcatatcgctgcacaaagcgtagagacaagccaagggactaggaaagcacgatagaggacctacgatgcccgagccatagagcaaaggaccaaggcataatagcacaatacaggaaattcagaagccagaggacctcctatgagcagataagaaagggacacaaacgaggaacacaacagcagagaccccacgaacctaacataccggtaaggcgcaaataagaaacccatagaaataccagacaagtccgataacagacggaaaggcggtagcaacggcgccaaactacacagggagcatccaactcaggagcgcgaccaaacaaatccatagcgtcgcgagcaacaaaggttaaggaacgcccgatcttatcgcggaggaacccacaaagcaaggacacagacgtagcagcgtatgtgacgtgttagagcacgagagccaaacatcaacaatcccttcgattatccacccggcaaccccaggacgaaaggcacgatggacaaacaaagttacgcgaacaaggtgaaactcaggacgatccccccgaggagaaaaatacgacacaacggaacaataagcagaaccacagacactaaaggagacaaaaaaaacatagagaaccacaaagaacatgcgcctcagaaaaaacacgcgacagaagacgacaacaacaaaaaaaagacaacaagacagatccacaaagcaaaaaaacaacaaaaaaaaccaaagacgcaaaacaacgcgaagtatgggacaggtagtaagagacgatagccagcacggcgggtagaggccaacatgcaaagaagagaaggaaagagaacgaggaagagcaagtggtaagaatagaaggagaagagaggaacgagagagaatcaaataggggcgattaacggagttgggggaagccacgaagggagaacagaagcaccgcgaggctaaaaagagcgagaaggaggatacacgaggggcaagacaagggcgagagcgcga

SEQ ID NO: 614818 - DNA, 669 bp, Homo sapiens
  misc_feature (571)..(571): n is a, c, g, or t
ataaggtcgactctgattcacagttttgtatgaagatggtttgacgtagacttttgtattgtccctgccgcagcgaattgtgggagaatggaaaccgcctgcacatagcggcagacttgctaaggccccagctagctggcctcgggctgggcgggtgcgaattccacctgagaacaagtgccgcagaccgatgtcggaaggacattggacttttatttttgcatttaatcgacaagaatgtaaaggggacagctcaggcttgttttggagcctgttgactttgtatatatggctgtgagatagttttgtaaatgaagacttcatgatcaaccaggacgaagctgagaaggaaaacaccaaatgctctggttattagaggtcaataagcaacgctctgatacacataggcggttgagatgcacaaagttctttcgattgctaaaccctggagaaacatatgcctcagcctagacgagctgtcttcaattttatggacttaagacccgacagtatgagcgatctctgcgctcttataaggcgggcatgcttgctttggactgtgatgtacagngcaaactcgagtgactgtaaatagcctggcgtgttaaacgctttgagggatgcagagggtattatgaagagacccttaatccatgggctctgatcttg

SEQ ID NO: 614819 - DNA, 101 bp, Homo sapiens
attcccaccgggagctgcccttgacaacgatagctgaaaaaaactctgtattcccaccgggatctgcattcccaccgggacctgtcacccaccgggacctg

SEQ ID NO: 614820 - DNA, 982 bp, Homo sapiens
accttcggctacgtacgaggccctgtggttcacgacgttgacatgccggacatccgcctccgccatgtcgtgtcctgcagcagccagtgactcgactcactgtgcagaaaatcttctcaaggcagacacttacctgaaaatgtgcgggcagccaaggcaggcgagaagaccatctctgtggtcctacagttggagaaggagtgagcagatacacatgtgtgtgacatttgtggaatgatgtgctcagactttctgtggagtgtgcttggttgtgggcagttcagcatggatgcgctgctggtggagcaagactatagagtgtccttcattggtcaccatcatactattcatgtaccccatatccgaggagccgacagatggctcaaacacccaaacactgctgattctgcagttgtatatgtggcactgacaaatgcttggtcccgagagccaagcctgacagaagaaaagcagcctatgtgaccatgaggtcaaaaaattatgttaatgacagccatgcccctaacatagcaaagtgaacatcacaccatatatgagaattgagttatattgtaccagggttatacaataatgccccagcccaatgaacaacaagattgacggcagaagagcccagatacccagaaagtgttgacacgatgacacacagcttgggccaagataccagatgctgaagggaggaagggattgagatgcgccaaaaatcatcattgaagtggatggggggagatcaatattatcgttacaagcccgagaaatccaaacaaaatgaacaatcccccaagtaaacaagacatgatgaacactaggaaggacacataagctaaatacatcatggtagcacttacaaggaatacatagtagattgccacatcaaacacacatccaagatatcaaggggcatagcgagaactacaaaccacaggagattccaaagagaacagtttggttttggcagaca

SEQ ID NO: 614821 - DNA, 902 bp, Homo sapiens
  misc_feature (33)..(33): n is a, c, g, or t
  misc_feature (41)..(41): n is a, c, g, or t
ccgggatcggctgagccgggttggggcccgggntgggccgnccggggactctggagcattgggatttgtagcgcgccctctgggtaggcggctgtagcggagaggcgtgcgggatcgggatgtcggggctgctcacggacccggagcagagagcgcaggagccgcggtaccccggcttcgtgctggggctggatgtgggcagttctgtgatccgctgccacgtctatgaccgggcggcgcgggtctgcggctccagcgtgcagaaggtagaaaatctttatcctcaaattggctgggtagaaattgatcctgatgttctttggattcaatttgttgccgtaataaaagaagcagtcaaagctgcaggaatacagatgaatcaaattgttggtcttggcatttcaacacagagagcaacttttattacgtggaacaagaaaacaggaaatcattttcacaactttataagttggcaagacttaagagctgttgaacttgtaaaatcttggaataattctcttcttatgaagatatttcacagttcttgccgagtgcttcactttttcactagaagtaaacgactttttacagccagtttgttcactttcacaacccagcagacttctttgagattggtctggattttacagaacttgactgaggtgcaaaaggcagttgaagaagaaaattgctgctttgggactattgatacctggttgttatataagctcacaaaaggttctgtatatgccacagatttttcaaatgctagtacaactggactttttgacccatataagatgtgttggagtgggatgattacctctctaatttcgataccactttctctcctacctcctgtgagggacacaaggtaataataaacatcagacatagtaacc

SEQ ID NO: 614822 - DNA, 1038 bp, Homo sapiens
  misc_feature (33)..(33): n is a, c, g, or t
  misc_feature (41)..(41): n is a, c, g, or t
  misc_feature (1036)..(1036): n is a, c, g, or t
ccgggatcggctgagccgggttggggcccgggntgggccgnccggggactctggagcattgggatttgtagcgcgccctctgggtaggcggctgtagcggagaggcgtgcgggatcgggatgtcggggctgctcacggacccggagcagagagcgcaggagccgcggtaccccggcttcgtgctggggctggatgtgggcagttctgtgatccgctgccacgtctatgaccgggcggcgcgggtctgcggctccagcgtgcagaaggtagaaaatctttatcctcaaattggctgggtagaaattgatcctgatgttctttggattcaatttgttgccgtaataaaagaagcagtcaaagctgcaggaatacagatgaatcaaattgttggtcttggcatttcaacacagagagcaacttttattacgtggaacaagaaaacaggaaatcattttcacaactttataagttggcaagacttaagagctgttgaacttgtaaaatcttggaataattctcttcttatgaaggacattaagaagacatacgcacacactccccattccagtgaagtttaataatagccaatcaaaggcgtatgtggtagacttcagtacttgtacctcaggaagttctaaggaggtttgtggtggaccagagtttcacatgttagtgagaatttgtgtttctgtccttgagaaatggaaaagatacagactagatgaatgaaatgcccaaatttcatcttttataaaagctcaggatggatattgagatattatagataactagcagactgttagaagctcttatcattacaggcatgatggctcgcgcctgtaatctcaacactttggaaggctgaggcaggagaatggcatgaacccgggaggtggaggttgcagtgagcccagatcacgccactgcactccagcctggcgacagagtaagactccgtctcaatgaaagagaattggctggatgtggtggtgtgcgcctgtggtcctagctgccttgtagtcctagctacttgggngg

SEQ ID NO: 614823 - DNA, 3178 bp, Homo sapiens
  misc_feature (33)..(33): n is a, c, g, or t
  misc_feature (41)..(41): n is a, c, g, or t
  misc_feature (958)..(958): n is a, c, g, or t
  misc_feature (2665)..(2665): n is a, c, g, or t
  misc_feature (2690)..(2690): n is a, c, g, or t
  misc_feature (2695)..(2695): n is a, c, g, or t
  misc_feature (2705)..(2705): n is a, c, g, or t
  misc_feature (2730)..(2730): n is a, c, g, or t
  misc_feature (2746)..(2747): n is a, c, g, or t
  misc_feature (2755)..(2755): n is a, c, g, or t
  misc_feature (2770)..(2770): n is a, c, g, or t
  misc_feature (2772)..(2772): n is a, c, g, or t
  misc_feature (2774)..(2774): n is a, c, g, or t
  misc_feature (2777)..(2777): n is a, c, g, or t
ccgggatcggctgagccgggttggggcccgggntgggccgnccggggactctggagcattgggatttgtagcgcgccctctgggtaggcggctgtagcggagaggcgtgcgggatcgggatgtcggggctgctcacggacccggagcagagagcgcaggagccgcggtaccccggcttcgtgctggggctggatgtgggcagttctgtgatccgctgccacgtctatgaccgggcggcgcgggtctgcggctccagcgtgcagaaggtagaaaatctttatcctcaaattggctgggtagaaattgatcctgatgttctttggattcaatttgttgccgtaataaaagaagcagtcaaagctgcaggaatacagatgaatcaaattgttggtcttggcatttcaacacagagagcaacttttattacgtggaacaagaaaacaggaaatcattttcacaactttataagttggcaagacttaagagctgttgaacttgtaaaatcttggaataattctcttcttatgaagatatttcacagttcttgccgagtgcttcactttttcactagaagtaaacgactttttacagccagtttgttcactttcacaacccagcagacttctttgagattggtctggattttacagaacttgactgaggtgcaaaaggcagttgaagaagaaaattgctgctttgggactattgatacctggttgttatataagctcacaaaaggttctgtatatgccacagatttttcaaatgctagtacaactggactttttgacccatataagatgtgttggagtgggatgattacctctctaatttcgataccactttctctcctacctcctgtgagggacacaagccacaattttggatcagtggatgaagagatatttggtgtgcctataccaatagttgccttggttgctgaccagcaatcagccangtttggagagtgctgcttccagacaggtgatgtgaaattaaccatgggaactgggacattttggatattaacactggaaatagccttcaacagactactggaggcttttatccattaattgggtggaagattgggcaagaagtcgtatgcttagctgaaagcaatgcaggagacactggtactgccataaaatgggctcagcagttagaccttttcacagatgctgctgagactgaaaaaatggccaaaagtttggaggattctgaaggagtttgttttgttccatcttttagtggattacaggctccattaaatgacccctgggcatgtgcctcttttatgggtttgaagccttctaccagtaaataccatcttgtacgagcaatattggagtcaatagctttcagaaacaaacagttatatgagatgatgaagaaagagattcatattcctgtaagaaaaatccgggcagatggaggagtttgtaagaatggttttgtcatgcagatgacttcagacctgattaatgagaatatagacagacctgccgacattgacatgtcatgcctgggtgcagcttctctagctggccttgctgttgggtttggactgacaaggaggaactaaagaaactgagacaaagtgaagtggttttcaagccacagaagaaatgtcaagaatatgaaatgagtctggaaaactgggccaaagcagtgaaacgctccatgaattggtataacaagacataacactaaatgaaatgatcaaaaccataggtagctggtttatgtgacgtgcagatgagatgaagctcagggataacccatatgacaatgactaagaggagaaaattttaaataagcttcataacttaagaagcattgcttttaaaaaaacaaaacggaacaaaaaactcttatttttttcccctaaaccatggtaaggcagcaatacctcaaaactttatatcttctattttgtagcaaattccaaaggacattagtcatttccaaccacattttgacagttatgggtcctcttcctttttatactgggtcagtggtacataggaacataatgatttaccatccaagctaatagttctgggtcaagtaccatgcacatattgttccaaaattatgtgaaacgtatttctttaattctttaagtgggctatttgaagtacatatagctaaaaagaaagaataactgagaaaatgtggaattttgaaacattaatattttatgtttaaagccataatttcctaatattatatccaaatatgagcttaatatgtccctctcagataagcttatgagatagttaatgctttcctttactggtcttaaagacactgccttaatttttccttgttcaaccaaaatctgagcattctttctatgttgaaaacactgaaaaactaattttagttaatgaactagaaagaatattgatttttaagaaacagaaaaatactacttattttccttctcaaataacgtttctttcaaaaacttctggctgaagtataacatgctggtagttaacataaatcttgtctttctcttgttctttatctttctttgttatttagatgcttgtataaatgtcttttgtttttattaagtgcctaattgacagagcttaatttgaagaagtgccctaatttattgaccacttaagaattgcctttattggggtatttnattgttcctggtcttttgatgttgntcagnctactatccntggagatgtgtggggacagctgatngaaggaggagaggtgnntatctcangattgcccttaccantnancanagatccacagggagcaacaaggacagtttcacatgcttagactttcttggaagaaacagtgaggaggagtaagtcgtgagtagtgtcaagctggatgtagaatcgtccttagtgcaggtggacccaacattccaaaatggttttcacttttaatttgcccatcccctagattgggttaggttccattcgaataggcaggcataaggatttattctctctggcaggatggccataaatcctttattttgaaacagctattagtactacgagtaccaagggaggatataacaatggctgcggcattatgcttggacacgttgctgcgcaatagtgactgaggcagaaacaaataaatatcgggggtcatagtaactcatggcaacactgaaacagtaactcgc

SEQ ID NO: 614824 - DNA, 728 bp, Homo sapiens
gctgggaaggggacccacccgagggtcagccaccatgccccctcactactagcggccaccccggcagcggcggcatgcatgcatgcagcgacgcatgctggcgacagctcagagcagggagtgccgcgccaccttgcgggccggccggagcgggcagacccatgtgccccctccccagggcacccgcgttcatgcaatgtctggtggcctgggacccagcatgtctccaccctgaccgccgactgtcgtcttgactttatatccatggaaggctggccaacttcctacttacgaggtcggaacctgcatttggcctgacttgcggtaccggggcgagcaagcgtgctgggcccacactgacgggcatctcacacctacagactatgccacagcaaaccagcgagcaagcgaaggcaacacacacacacccacctcacaagaagtcggtggggaccgacagcaacatcgcaagggaaaagacaaaaagtcatgtgaggtagagcgagaagtatagaacgacagaaacaaggaaccgagcataacacaataagcgtagctagcaaagaaatacagacgcgcagagcgcaaccagagaaagaagccacccataggacaggacacaaggactaagcaaacgagatcaaacacggcggaaccacaacccaacgtcaagcagcggaacaaagggaagacagagaggacaatagaaagagcaacaagtaatacaa

SEQ ID NO: 614825 - DNA, 486 bp, Homo sapiens
ctagagatccctggcaggctctctacctgaacatctcactaaatggtaccggtcttcttctcggtttaaatcatgttctgggttcagcaggggagatctggcagtcacaaaatagagaaggaaataaccctatgcctggatgggtttcaccttcccaccagttaggatcacggccatcaagaacggtaataatttctccagcttaaaaagtaagttcatggtcttcagcagcttcaaagtcatatatagcacgaactttccggccttcaggtggggggtaagtaaagagacgggatgtgctgggatacaaaggggaaggggtggtggactggtgccttggttcctggagagacaattcaggggctagaaaacaaggagtttttaaagacccaaaaggttattatatccaacagtctgaagaagtagaaaaagacttcaagataaagggtatccttccttcaatagtatagttagaaactagaacat

SEQ ID NO: 614826 - DNA, 559 bp, Homo sapiens
aatacaaaaaattagctgggcgtggtggcaggcgcctgtaatcccagctacttgggaggctgagacaggagaatcacttgaacccaggaggcggaggttgcagtgagccaagatcatgccactgcactccagcttgggtgacaggtgcgagactccatctcaaaaaaaaaaaaaaaaattccaaattctttcagctggggctgcggggggcctcatgtgcctgtggtaattcctatagcactttgtgggaggcttgaaggcggggcagattcacttggcgaggttaggggttcaaaaccagccggtgaccaacattagttaaaacccgggtcccttacaaaaattaaaaaaattaaaaaaaattaagccagggtggtggagggtgtgggcacctgggtgatctctcgaggcttaacgtgtgggaggagggcgtggaggcccgagggagaaaatctcctctgtgtgagaaccttagagggagggccgagagaggtgtgtgcccgagtggggagcccacagagacttgggggtcgccaagcccgtggggcggaacagaggg

SEQ ID NO: 614827 - DNA, 3124 bp, Homo sapiens
  misc_feature (33)..(33): n is a, c, g, or t
  misc_feature (41)..(41): n is a, c, g, or t
  misc_feature (958)..(958): n is a, c, g, or t
  misc_feature (2611)..(2611): n is a, c, g, or t
  misc_feature (2636)..(2636): n is a, c, g, or t
  misc_feature (2641)..(2641): n is a, c, g, or t
  misc_feature (2651)..(2651): n is a, c, g, or t
  misc_feature (2676)..(2676): n is a, c, g, or t
  misc_feature (2692)..(2693): n is a, c, g, or t
  misc_feature (2701)..(2701): n is a, c, g, or t
  misc_feature (2716)..(2716): n is a, c, g, or t
  misc_feature (2718)..(2718): n is a, c, g, or t
  misc_feature (2720)..(2720): n is a, c, g, or t
  misc_feature (2723)..(2723): n is a, c, g, or t
ccgggatcggctgagccgggttggggcccgggntgggccgnccggggactctggagcattgggatttgtagcgcgccctctgggtaggcggctgtagcggagaggcgtgcgggatcgggatgtcggggctgctcacggacccggagcagagagcgcaggagccgcggtaccccggcttcgtgctggggctggatgtgggcagttctgtgatccgctgccacgtctatgaccgggcggcgcgggtctgcggctccagcgtgcagaaggtagaaaatctttatcctcaaattggctgggtagaaattgatcctgatgttctttggattcaatttgttgccgtaataaaagaagcagtcaaagctgcaggaatacagatgaatcaaattgttggtcttggcatttcaacacagagagcaacttttattacgtggaacaagaaaacaggaaatcattttcacaactttataagttggcaagacttaagagctgttgaacttgtaaaatcttggaataattctcttcttatgaagatatttcacagttcttgccgagtgcttcactttttcactagaagtaaacgactttttacagccagtttgttcactttcacaacccagcagacttctttgagattggtctggattttacagaacttgactgaggtgcaaaaggcagttgaagaagaaaattgctgctttgggactattgatacctggttgttatataagctcacaaaaggttctgtatatgccacagatttttcaaatgctagtacaactggactttttgacccatataagatgtgttggagtgggatgattacctctctaatttcgataccactttctctcctacctcctgtgagggacacaagccacaattttggatcagtggatgaagagatatttggtgtgcctataccaatagttgccttggttgctgaccagcaatcagccangtttggagagtgctgcttccagacaggtgatgtgaaattaaccatgggaactgggacattttggatattaacactggaaatagccttcaacagactactggaggcttttatccattaattgggtggaagattgggcaagaagtcgtatgcttagctgaaagcaatgcaggagacactggtactgccataaaatgggctcagcagttagaccttttcacagatgctgctgagactgaaaaaatggccaaaagtttggaggattctgaaggagtttgttttgttccatcttttagtggattacaggctccattaaatgacccctgggcatgtgcctcttttatgggtttgaagccttctaccagtaaataccatcttgtacgagcaatattggagtcaatagctttcagaaacaaacagttatatgagatgatgaagaaagagattcatattcctgtaagaaaaatccgggcagatggaggagtttgtaagaatggttttgtcatgcagatgacttcagacctgattaatgagaatatagacagacctgccgacattgacatgtcatgcctgggtgcagcttctctagctggccttgctgttgggtttggactgacaaggaggaactaaagaaactgagacaaagtgaagtggttttcaagccacagaagaaatgtcaagaatatgaaatgagtctggaaaactgggccaaagcagtgaaacgctccatgaattggtataacaagacataacactaaatgaaatgatcaaaaccataggtagctggtttatgtgacgtgcagatgagatgaagctcagggataacccatatgacaatgactaagaggagaaaattttaaataagcttcataacttaagaagcattgcttttaaaaaaacaaaacggaacaaaaaactcttatttttttcccctaaaccatggtaaggcagcaatacctcaaaactttatatcttctattttgtagcaaattccaaaggacattagtcatttccaaccacattttgacagttatgggtcctcttcctttttatactgggtcagtggtacataggaacataatgatttaccatccaagctaatagttctgggtcaagtaccatgcacatattgttccaaaattatgtgaaacgtatttctttaattctttaagtgggctatttgaagtacatatagctaaaaagaaagaataactgagaaaatgtggaattttgaaacattaatattttatgtttaaagccataatttcctaatattatatccaaatatgagcttaatatgtccctctcagataagcttatgagatagttaatgctttcctttactggtcttaaagacactgccttaatttttccttgttcaaccaaaatctgagcattctttctatgttgaaaacactgaaaaactaattttagttaatgaactagaaagaatattgatttttaagaaacagaaaaatactacttattttccttctcaaataacgtttctttcatcttgttctttatctttctttgttatttagatgcttgtataaatgtcttttgtttttattaagtgcctaattgacagagcttaatttgaagaagtgccctaatttattgaccacttaagaattgcctttattggggtatttnattgttcctggtcttttgatgttgntcagnctactatccntggagatgtgtggggacagctgatngaaggaggagaggtgnntatctcangattgcccttaccantnancanagatccacagggagcaacaaggacagtttcacatgcttagactttcttggaagaaacagtgaggaggagtaagtcgtgagtagtgtcaagctggatgtagaatcgtccttagtgcaggtggacccaacattccaaaatggttttcacttttaatttgcccatcccctagattgggttaggttccattcgaataggcaggcataaggatttattctctctggcaggatggccataaatcctttattttgaaacagctattagtactacgagtaccaagggaggatataacaatggctgcggcattatgcttggacacgttgctgcgcaatagtgactgaggcagaaacaaataaatatcgggggtcatagtaactcatggcaacactgaaacagtaactcgc

SEQ ID NO: 614828 - DNA, 349 bp, Homo sapiens
gagacgaagtcttgctctattgtgcaggctggagtgagccgagatcgcgccactgcagtccagactggggggcagagcaagactccgtctcaaagaaaaaaaaaaaaaagagatgctcttctacccctttgatgagacgtcgagctgtatatgaactcagcctgggcaacagagcgagactccatcttaatttaaaaaattagccaggcatggtggcatgggcctgtagtcccagctactcaggaggctgagacaggagaatcacttgaacctgggaggcagaggttgcagtgagctgagattgcaccactgcactgcagcctgggtgacagagcaagactccatctca

SEQ ID NO: 614829 - DNA, 1701 bp, Homo sapiens
  misc_feature (33)..(33): n is a, c, g, or t
  misc_feature (41)..(41): n is a, c, g, or t
  misc_feature (958)..(958): n is a, c, g, or t
ccgggatcggctgagccgggttggggcccgggntgggccgnccggggactctggagcattgggatttgtagcgcgccctctgggtaggcggctgtagcggagaggcgtgcgggatcgggatgtcggggctgctcacggacccggagcagagagcgcaggagccgcggtaccccggcttcgtgctggggctggatgtgggcagttctgtgatccgctgccacgtctatgaccgggcggcgcgggtctgcggctccagcgtgcagaaggtagaaaatctttatcctcaaattggctgggtagaaattgatcctgatgttctttggattcaatttgttgccgtaataaaagaagcagtcaaagctgcaggaatacagatgaatcaaattgttggtcttggcatttcaacacagagagcaacttttattacgtggaacaagaaaacaggaaatcattttcacaactttataagttggcaagacttaagagctgttgaacttgtaaaatcttggaataattctcttcttatgaagatatttcacagttcttgccgagtgcttcactttttcactagaagtaaacgactttttacagccagtttgttcactttcacaacccagcagacttctttgagattggtctggattttacagaacttgactgaggtgcaaaaggcagttgaagaagaaaattgctgctttgggactattgatacctggttgttatataagctcacaaaaggttctgtatatgccacagatttttcaaatgctagtacaactggactttttgacccatataagatgtgttggagtgggatgattacctctctaatttcgataccactttctctcctacctcctgtgagggacacaagccacaattttggatcagtggatgaagagatatttggtgtgcctataccaatagttgccttggttgctgaccagcaatcagccangtttggagagtgctgcttccagacaggtgatgtgaaattaaccatgggaactgggacattttggatattaacactggaaatagccttcaacagactactggaggcttttatccattaattgggtggaagattgggcaagaagtcgtatgcttagctgaaagcaatgcaggagacactggtactgccataaaatgggctcagcagttagaccttttcacagatgctgctgagactgaaaaaatggccaaaagtttggaggattctgaaggagtttgttttgttccatcttttagtggattacaggctccattaaatgacccctgggcatgtgcctcttttatgggtttgaagccttctaccagtaaataccatcttgtacgagcaatattggagtcaatagctttcagaaacaaacagttatatgagatgatgaagaaagagattcatattcctgtaagaaaaatccgggcagatggaggagtttgtaagaatggttttgtcatgcagatgacttcagacctgattaatgagaatatagacagacctgccgacattgacatgtcatgcctgggtgcagcttctctagctggccttgctgttggtatgtgtgaaatttataagaatgagagttttcttgcaaactcttccttacagatagcatttctcctctcaaattacaaaattctagagagtctggaaagccttggcgtccattaaactccatacacatatgcatattactc

SEQ ID NO: 614830 - DNA, 194 bp, Homo sapiens
atctattctcaagttggatgtcgataggggtgccataaggagctccggggcgaagggccaggtgaggtgggtaggggtcgtagggtagcgaggtggtgggtacaagtcaggcccatattggaggcctggtaaggtggacctaagtctgggccgtactcgtaagggggagtccaaaagccacctggtcgcagggg

SEQ ID NO: 614831 - DNA, 339 bp, Homo sapiens
  misc_feature (62)..(62): n is a, c, g, or t
  misc_feature (67)..(67): n is a, c, g, or t
cccagcatggccccaaccatggtgaaaaccccccatctgtacctaaaaatacaaaaatttanccccngtgtggtggtcctgtgccctgtacctcctcagatactcgggaggctgaggcgggagaattgcttgaacttgggaggtagaggttggagtgagccaagatcatgcgatcgcactgcagcctaggtgacaagagtgagactttgtctcagaaaaaaaaaaaaaaggaaggaaggaagaaagaaagaaagaaagattggctgataccaggcaggaggatctctcaagcccaggagttcaagaccagcctgggcaacatagtgagactttaaaaac

SEQ ID NO: 614832 - DNA, 1031 bp, Homo sapiens
aggtctcctgacctcctcacgggtcttcgccggcgctctcctggctcgcttctgccccagctcggtatcgccggggggggcagcagcagtgcgattgcagaattggtggcacctctgtctagcagatggattaccggaaccatctccagacatcgagggatgagactcaaaggcgtggacgtgtcgatcgcccttgactagcacggcgagtaggccccttgtgagtgagtagtgcgtggagagatgacctgtgaggaccaaggcaggatcgtatgcttcgctctccctggtagaagtatgagtgaccaacataccggtgcacactcatgcgtcaacagaaagcaaagacggtgcgtcatgcaaactagaccaagattgaaggctctattccactagatgatggaagcaggccagttgatggactttagaaacatgaaaagcctagttagcttccttgcaccctatggactgactgggggggtactccactctgcataggtccaaacacacattagcacccatggtgagtgcgctggagtagaacggggccgcgattactacagggttactcgcgactgaatgccttgaagaagataacttggccttaccagggaaatagctaaaataagactagagctgacatgacgttgtacccacttttggagaccagactgaccaagtgggcgaacctataccagactgatccttagggatgtaacaaggatggagaccttggcgggaatagggcttacgctccggggcgacaggggagacttcacaatggcaaggaggacaggacccctgcaaggcatgtacggatgagcctgccacattagatggccccgggggccggggcagcaaaacaccagagcaggacgatgagccagaggagagaaccgcgacgaacgaaccacgagagcaggaagacgaacaaggccaacacatgacgaaggatacggacaagaagagccgaaaaaacgggacaaacacaaaaaaacacgagaccagaaacacagcacgcaatacatcgg

SEQ ID NO: 614833 - DNA, 320 bp, Homo sapiens
ccttaaatagtttggaaactgctggggcctgaatgtttgggtcccccaaaaattggtatattgaactctcatccctaaggtcaccagtttagggaagcgattaggtcctggggactctgccctcttgcatagaattagggcttttataaaaaaggcccgagggagcttttttgcccctcctgccatgtggggacccagttagaagctcccttttgtgaaccaggaagcccccctccccagaccctgaatttgcgggagccccctttttgggcttcccagcccccagagctgtgagaaataaatgcctgttgtttaagcta

SEQ ID NO: 614834 - DNA, 126 bp, Homo sapiens
ggacctgtccaactaagacactactactctacagtatactgctaaatccaccttcgacccttaagttacataagggctatcgtagtatatctaggaggtagaacaatgtagcccattatcttgcca

SEQ ID NO: 614835 - DNA, 766 bp, Homo sapiens
ggctgtcctccctattcatcccatagtccataacccctatccacttctctctctcgatcgctaccaacaccaccctctacactgcaattgacctgaaggatgccttctttaccatttccctacaccctgattcccaaaacctatttgctttcacctggactgaccctgacaccctccagtcacaacaactcacatggactgtcctccctcagggcttcagggatagccctcatttctttggacaagctctagcccgaaacctcacttccttaaacctgtctcccagtcatcttcaatatgtggacgaccttcttctttgcagcccctctctaacagactctcaaactcacacggccactgctctcttaaactttctcgctatcaaagggtatagggtctccccctccaaggcccaactctccatctccatgatgacttacttaggaattcaactttcccctggggaccaggctatgactccatgccagggccagcattagtagaaaatctacccgcagcctcctccagtagcgaagtcctttccttccccgggctagcaggcttctttagagtatggatttccagctttggccctcctagtctcagtcccctctagtgatcgtggcccgatggccctcccgttggtttcctcgtatggcccgttcagcgttacttactcctcccagcttccacgcgttctgctacactggctcctcgtcactgcggtcaggctccgttcgcttcttgggtgttctccccgaccgtg

SEQ ID NO: 614836 - DNA, 866 bp, Homo sapiens
gagctgggtatgggtgtatatccttatgtgtgagtgtgtgttggatactgactgagtacttacatcgtccaaaatgtattagccgtgtctctcaattcataggtaccctgtaattggatcgcatgatttatctattggatagagtaccagacggtccatgtgactacggtgctctggcagaatgatgaagctgctggagatccggcaagtagtacgcttcgatctgcgcagcagtcaagagctggaccgcaaaggaagatatggcagtatatcattccgaacaattgtgggtggagcgaaagtccagtgatgactcatgccttgggtaaccaagtgtgagacgcgaaattcggtgaatggaccacagtgacatggacaagtgcacaccttcatgtggacagaaaagcatttcccatgttccctgagcattcccaagcgtgaccgaacgattccactagattcggaagattttaagccccgtgaaactcaacacgatgcaccgtgaaggctctgcgaactgtgtgtgacccaaacattcaggatacacaacattcatactgaacttgcgtccaaagtgttggacgaacacaagtggcgatggggacgatggatgcgtgtcgtaaggcagcacatcatatgtagggtccaatagtgccaagaacctcggggcgcgttccccagcggtgtgacaagaccgataatcacgcctgtccctccattccctcgcccaacagtgaggcatcgagtaaccacacttggtcaagaagctacatatcagagcggtccacggttcactatgtgggacatacagttactcttagacgcaccacggtaatcaacccattgataggccgagaataaggcct

SEQ ID NO: 614837 - DNA, 1509 bp, Homo sapiens
  misc_feature (714)..(714): n is a, c, g, or t
ccgctgcgtcgagtggtcgtcccttggactgatcactgatgctgcatctgctttcatcgtctcttctccttcttatgatgtgtttattgggtggctctactctcctccgacgatgtgcttctgtgtgctcgcctcataccacaccactggctgctgttttgtgcggggcggcgcaccaccccccccccgtgttgttcctccctggcgacctattttttctgcatgccacgatggttgtccttcttagttcgtggttgttctccttccttgtcgcccctggtggataccccccgcttgctccccgcctcttggtgtggtcttctcctcgctgacgtatcttgtggtgtgctcccttctcctcctgtgggtgcgctcccacctatatgttcttctccccgcttcgtgttggaatatcttcggccgcggctcgctcctataataatctctcttggggtgactctcatccttggtgtcccaccaccaccctttgtcctcaacagcacccgaaatagttggggggggtatatctcctccaccacgctcccgcgggtggtttttttttcgttcatgatggtttcttcctgggggccccctcttccttaattttggcgtgcccccccccggccgcacaaagggcgtttttatatagggcgcggggcttaattatagcgtctatattgttggcgccgggtaacacacccccctgtttgtgtngggcccccaatacccttatacattgggcgcccgagcagtaccacacacacagattagtgaattttgtcgcacacaggcgccctatatataatgtgctgtttgttgttgtgtctgttttctgctttgtgtgtgttatctttgtttgttttttgggcctctgagacttctcacgcgagatttcttaagagacactcgggagacacgcgctgtaaagagggttgacacacaccacagctctcgcgcttttggagagcgcgcagagtcactctcccccccacaaggtttcaccacacatggtggtcccgcagaggacacttgtgtgatgtggcaccacatctgtgttggttcttgtttaagatatagtgcacattctccacaatattgagagagatgccacttttgtttacacacggagaattccccgctgccactctctataaaagccccccccaccttttcttcaaaggaggaatatggcccacgtctctttctccacaagtcacacacacacacaggggagaggtgaatatcgcccttgcttttctgtgtaaaattaatgtaaatcgcgcacaaatttttttaattttcgcccctaaaactctttttaatttgttgttaattttgaaatgagtgaggccttcgtgcccccccttcccccctttttgtccccccaacttgagagagatgtatatgagaaggcttattggttctcccctgggagtgggtggaggcccacccggggttaccctgtacactgacttgagacccagttgaattaaagtgccacacccttta

SEQ ID NO: 614838 - DNA, 411 bp, Homo sapiens
ggtagcatcgataaacctacatatgctacaaagtggacgatacgacatgggatcatatcgacggctcgggatcttataggaaaggttcatggagcacgtggtacatttaaatatcttcgagctgaacctgaggaccattattatttacatcggggtcactatctccttcctgctgtactcagtgaccagacagcaactcccactcaatacaccagaacaacagagcgtatcttgcagacaaattatgtttgaatcatttaacgtaccaggactctacattgcagttcaggcagtgctggcctatggaggacatctaggacatctcgacaagtgggtgcacgtacgtaaacggggataggcattgacagcggaaatggagtcacccatataatcccagtgaaggttatgtaa

SEQ ID NO: 614839 - DNA, 242 bp, Homo sapiens
agctgtggctgggctgggagacagtcacccttgaggttgaactgcaactgtccagtagtttgaccttgtccttgaattactactgtcaaaccttgattgccaccgtgtgcctgtgtaaactaagtaagttgagccatggtgagcttcacttgtccttggatgggggcgaggttggttgtgattgctgaagacgtgtatattttgaatttggactgttgctgaatgttaagctttatcttgcc

SEQ ID NO: 614840 - DNA, 998 bp, Homo sapiens
aagggctgcgcccacctccttcctgcctcggaaagcccgggcctgagggcaggcccaaccgcggaggagcaggagagggcggagtgcggggggccatgcccttgggtccgtccctggtggcgcccttccttttgggagacctgtcctgggctggtgctgggaaccggccggccttcttgctccgaacctgggcaccggatctgtgggggccgcctgtcaaagatatgcgcttcgagagagccagcataccttgtggggccggcagctttgttggcttggcgcctgttgggcccttggcctccttggcgcttgcagttcttcaagcttgggcatctgctggcgcgcttgacacctgctcggccctgggaagggggtaccgcaagccccccgagagccgggaagacaggggcggcgagcgtgacaaccctccggtgcaagcgggggataccgctgggacccaggggggcggagcaaggcacgctggggggaacagggggccatcgctggcgtggtggccagcaaggaagggagagcctacgtgaagtgggaatgtggacccaaagcgcccggatatcgcatgggaccggaacattacagcatttgcgggcggctcctcgaaaacgcgtcctggggcaccgggaccccaagaaggctacacgctgggggcaggggccaacaattcgcagaccaagtgggacgggctgaagtatataccaggtaaaacggggcccacctgtggtcaccacaggggtggcctatacctcctaaaccacaggggttgggactcgtggcacatcccgtcctgggacttcgcgtgggagcctgggcgcaactacacgcggggcttgggaacatgcataccctacaaagccgcacgggccagggccccccggaccacttcgtgggacctgctgtggtgggcggacctcggagggccggtctcagccctcccaataggcacgccagagcgggagaaggccgtcgtaggcaatacgcgc

SEQ ID NO: 614841 - DNA, 870 bp, Homo sapiens
gcaacttgtccggagccctggtagtggcccgggttttccccgggagtcaatctcgccgggtggggggggcccacaccgcacagggttgtgggccgcatctccgggggggccactccctcagagggccccttggtggggtcacttttgtggggagggcctgggtgtttcactcccctgagtcgccgctgggaagggttgcccccccgccgccccgccacccgtgggtggggggcaccatttttgtctcccccccccctgttccccttatgggggggatataatcatgcgccgcgtggtgttctctctgtggagactggttgttcgccgtggagcagcgttggtgctcgcctcttttatgatgttgggtggaggagaggccccacccgttctttcttcttgaagaggaggggtgctattttcttccggggggggccagcaagcgtcgaccactggtcccccgggctgcttgtgtttgttttgttccccacggctgttgaagatgtggtgggcacaccaccccctttcttggtggatgtagagagcacaagcattgttgtctgccccctcccctgttcggcgctttgatgagcccccgcagctgtgtttttcccgcaggagaccccaggaggatggttgtgttgttgccgagtcggcgatattgttgaagaggggggtggggcaccacaccacccccccccagctgatcccccacggacgctcttttccccccgagcgctgctgggtcctccccacccgtgttttttttttttcaaaaagagggggggggggaggtttcccctttttttttcattttttggggcccggggggatattttttttttcccttttaaattagagaacccggggtta

SEQ ID NO: 614842 - DNA, 779 bp, Homo sapiens
agcgggaggctgccccgcggagccgccggtatgagcgcccctcggcaccccgtgttcccaggcccggcctttctgacaatgagctaggacttcgggctccttgacggatattcagttttgtagtgtctgaatatcctctcacctatgttcatgcataaagtaccacttcttaattgattatcctcagcaagacaggtgtgagagggttgctgctgtatctgcaatcagtggtgcagacataccagtccccagtgagggtgtccaaagtacccctttgaattagttatggctgcctatgaaacggaggttccctacagtgtcctttgattccgatgctcgtgggcagtgacacgtgtgaatgaattcaatgagccgaagatggggctattctgtgtcacttgacaatggcgctgcaagttgcatgtaggatgcacccatgactggctgaacgaagacttgcaccggacgttgaccttatgtcctatttagtccagcacccaactcagctgaagttctcgggaacgtacttagcaccattcgcgggcttattcatgaagacgttgttccaatcgggtcatcattaatgagcattgcttgctacaccgcttcagacctgcaaaatgaggattgggccctgtttagaaccatgtctgcaatgtttagactcttacctcttccgttggatttgaacagttactgtggaacaattgccatgcagcaattatccagaacctttacacactgaagggactctctcttctacttcgccacttagacga

SEQ ID NO: 614843 - DNA, 732 bp, Homo sapiens
  misc_feature (31)..(31): n is a, c, g, or t
  misc_feature (728)..(728): n is a, c, g, or t
tcggccattatggccggggccccgcatctgntccccgagggtgagggcgcctccaataaaccccatcatcactgcatgaaaactcttctgtgctaactgtgcagatgctagctatggactgcaaaaccaagaattcacctccttattctaaatcgacaaacaactgtaaggctatttcccaattgaaatgttcttgacagggggaaacacccatctatgaaaaaatttgaaatgacggatgactggattatccaatgagaacgataacagggcatgtcgccagatggaaatacgagcctatgtgacaaaaactgtggaaatcatcgatgggaacatatcctctcaaggcctcttctatggaaatatgactttaaatttctaaatacataagccaggatgatatactcagactatcttatgattctaaggctctcataagaaaagtgcattgaatacagaaccggcattccattatatcttgacctcacgccaggcttaacggtgattacctgtaatcactgacggattacatttttctgcctggagctgcattaatgtcaatacaactttgatttgacaacaaatgaatgtgtaattgggtacatgcttacaataaagagtcggcacccaaaagttgccggccaaggccctagaattataaactcaacaatcttttgaaaaggggccgaatttacgctatattggcccctttggcgcctaatagagtngtta

SEQ ID NO: 614844 - DNA, 275 bp, Homo sapiens
gattgagaacaataatgaacagttattgtatgaacaattgttagagacagctaatcacaaacaacctgcgggcacaaatgacctcattccacacgtagcacccttcagcaggaccctataaaactttcctccagaccttgcctctttgcaggtagccccttctctgctgagctgcccactgcaacatattttcacaatttctctaataaatctgcccttctttacctacaactatcttggtaaatggctttaccacctgcaaaactgaccctagg

SEQ ID NO: 614845 - DNA, 442 bp, Homo sapiens
  misc_feature (23)..(23): n is a, c, g, or t
  misc_feature (67)..(67): n is a, c, g, or t
  misc_feature (97)..(97): n is a, c, g, or t
  misc_feature (103)..(103): n is a, c, g, or t
  misc_feature (105)..(106): n is a, c, g, or t
  misc_feature (109)..(109): n is a, c, g, or t
  misc_feature (112)..(112): n is a, c, g, or t
  misc_feature (121)..(121): n is a, c, g, or t
  misc_feature (129)..(129): n is a, c, g, or t
  misc_feature (135)..(135): n is a, c, g, or t
  misc_feature (144)..(144): n is a, c, g, or t
  misc_feature (157)..(157): n is a, c, g, or t
  misc_feature (189)..(189): n is a, c, g, or t
  misc_feature (191)..(191): n is a, c, g, or t
  misc_feature (248)..(248): n is a, c, g, or t
  misc_feature (251)..(251): n is a, c, g, or t
  misc_feature (261)..(261): n is a, c, g, or t
  misc_feature (266)..(266): n is a, c, g, or t
  misc_feature (268)..(268): n is a, c, g, or t
  misc_feature (274)..(274): n is a, c, g, or t
  misc_feature (276)..(276): n is a, c, g, or t
  misc_feature (280)..(280): n is a, c, g, or t
  misc_feature (329)..(330): n is a, c, g, or t
  misc_feature (366)..(367): n is a, c, g, or t
  misc_feature (372)..(372): n is a, c, g, or t
  misc_feature (375)..(375): n is a, c, g, or t
  misc_feature (417)..(417): n is a, c, g, or t
ggcctgcagctagctctcctctncacctgcaccgccgggatgcttgatggtgtcgtaagcgccggtnatgagcgcgatgaagaggctgagcaccatntagatnannatnctnatgaagganttaaggtngatctnggagatganccacaccaggctnctgcggccctgctgcgccttcacatgataggntnccagcacgatccagcctacagaagcagtagcccaggtagatgacatctatgcagtantanaaaaagcatnatcgntngagtangntcanccgcagtgtggcgatgaggatattttagttgtggaagaaggtcaggtannggatcaccccacgcacaccagcagcgtcgaggtgcnnaggangangctgcagacgtcgtagctcgccaagttcttggcctcgatgcngatcttcatgatggtgcccgacatg

SEQ ID NO: 614846 - DNA, 852 bp, Homo sapiens
aaccacaaagacatatggaacactatacctataattcggcgcatgagctggagtcctaggcacagctctaagcctccttattcgagccgagctagggccagccaggcaaccttctaggtaacgcccacactactacaacgtacatccgtcacagcccatgcataccgctcactaatactatcttcatagtaatacccatcataatcggaggctttggcaactgactagttcccctaataatcggtgcccccgacactaggccgctaccccccgcataaacaacataaagcttctgactctatacccccctactctcctactccctagctcgcatactgcctatagtggcaggccggcacccagcacaccaggctccgaaccacgtcttaccctaccctatagcagggaactactcccaccctggagcctccgtagacctaaacatcttctcctaaacaccttagcaggtatctcctctatcttaggggccatcaatttcatcacaacaattatcaatatacaaccccctgccataatccactaccaacacgcccctcttcgtctgatccgtcctactctctgtcgtcctacttctcctcactctctccccgctcctagctgctggcctccctatactactctttgtatcgcctctcgctccaccttcttcgcctcccgtcggcaggacgtcgatccctttctttctctcttccctacttctgctcctcggcccccctgacgtcctactcttttcctaccagccttcgccctctcccccttctcgccctccccccccgcccccccccctccccttcctcgatactcgccccgctctccggctccacctctccc

SEQ ID NO: 614847 - DNA, 877 bp, Homo sapiens
gggaacgctccgggctaggccctcacggaataggggcttccaggctgcggcgtgggagatcccagcaccaccgtcagcccctctgcctggcacggctgacctacgctcacgtgaaggcagcaaaacccacccagacctctccccagggacaggtactcaccaaggccccgtctcaggacagacccccttgcatgctggaagacggcgcagtatggacacatgtacaggtatgccgttgacacccaccagtggaagtcccatggggcaacacatgttaagggtggtactctcaccccgagtgtagagggatcagacaaaccaaaacaagacaacaatatggggacattgcataggcagtgttggcaacttacaaggttggaatccggaagaccacactgaaacacatcgaccataactcaatgagacacactgaatacatgcacaatgggcgatgcgcacaagggatggcacacatcgagcacatccgagaacacctcacacggagtgaccaaacacaagagagaacacagaatcgtcgaacacaaaacaactttccacctggcacttcatatgagtccatatgagatcccaacagaaaagagcaacgcgatccggctactagccgaccacatacgggatcacaacacacgcgtccttggacggacgaaagtccccacgaccgcacagccaagagcccacaccaacgaagaattggaatcgcgacacgagtacaccgaagcgaaacgaacaccatccatgaatatgggacacacaagaggacacggaggggtcaacagcacccctggacccggcagacaacggcacacatggcacccatcacaatggaccacgacccaaggcacaccacacgacacac

SEQ ID NO: 614848 - DNA, 434 bp, Homo sapiens
ccgaacgcaacccccaaatcatggacgcacctgtggggagcaccacatctgcacctgcggcctgacatctacccactcctcctttttgtacgtaaaacaagattctttgtacgtggtttacgcaactttaaactggaacagccttaatggaagaccaaatggctttttatatgtgtatgtacaaagttttctattaacgctgcccgcctcccttataacctggacgtgagctgtcagagcagaagccactaggccactgcgcgtctgaggctcagaccctgctgaggtaggcttgaggtggccaatgggctgggaccctccatgagagacctggacactagggtcacctgacccgcgcctctgtgacacatgtctccggggggcagcccccatggcaatgtgcataatatgccgtgctggaaccatccatggga

SEQ ID NO: 614849 - DNA, 146 bp, Homo sapiens
accatcgtggtcagtggttacaaaacgactaggaacatgaggttgcagttcgatccctggcttgctcagtgggttaaggatccagcattgccgtgagctgtggtataagttgcagacatggctcagatcccgtgttgctgtggctc

SEQ ID NO: 614850 - DNA, 877 bp, Homo sapiens
catggtggctcacacctgtaatcccagcactttgagaggccgagggaggtggatcacttgaagccaggagtttaagaccagcctggccaatgtggcaaaaccccatctctattaaaactaaaaaaattagccaggcatggtggcagatgcctgtaatcccagctactcggggggctgaggcaggagaatcacttgaacccaggaagcagggttgcagtgagctgagatagcaccactgccctccagcatgggtgaaagagtgcaactctgtctcaataaataaataaataaataaataaataaataaataagcatctctaaatgtttgagtgccaacatgatactcaaaggagatgcacattgtagcatttttgattttggatttagaaggctgaacaggtaagtataaaacaaatattctaaaatttgaaccaattctaaatccaaaatactcctggtcccaagcattttaaataagggatgctcaacctgtaatatcaaatgttgatgaggatgtggagcaactagaactctcatagatgctggtgggactgtaaattgatacactactttaaaaactgggaataggctactaatcctggagtgttagaccctatggacaacaaagatttgtattttcaccgcaagacatctattaactgttcctgccgaatacatttatggtcaaatgggacaaccgtctacaggcaatcaatattgggttttcatccaggaatcgtgcccgttacatggccacttcactaatgcgggggaggggtctccacatatggcttcaagagggcaacatcggcggtcgcttggagttacagcactgtgtaggaggggggggcccacaccagggggggccgggacaacg

SEQ ID NO: 614851 - DNA, 424 bp, Homo sapiens
caacaaagtttggtaagaagaagcagttgtttctctcttttcccccccatttcaaggaggggttaaagatcatggctggccgtgatgtacccatgggctgattttcattttttcagtttcaaagctgagaaattcagctttgttttagttgaatcctcatattggaaagcagccattgaaagttttcttttctatttttgttatgaatggggtatggccccttttggagacttttattgggtaatattctatgtgaaagaaggaaacttgggattaaatgttgtgggaaataaaaatgatgataataataaagtaaaagcggccatgggggcccgccaatccaattgcttgggagaagaaaatttattcaaatcccccgataaaaaattaatttttttttgaataaacaggatgttcccccata

SEQ ID NO: 614852 - DNA, 137 bp, Homo sapiens
gagatagcgcagatcccggaagggggatgtggggcaagagcagggaccaccaggagccaggtacaggccccaagggccccggggcgggaagccagcaacgtgaaaaacccgcgggcgcccgcgcctcgagcgcccca

SEQ ID NO: 614853 - DNA, 217 bp, Homo sapiens
agtgccggagcatgtcatggtaatgcctgtactagcaggcagcatggagaataatttgggacccttgatggtctggtttctgttcttgtgcaaaaggacaatctatatgctaccccttgcatgtatcttcctccaacagataccatttgattttcgaaaacataacacatggttagtcctctacttcatggctggaggaggtatacaggataacaaa

SEQ ID NO: 614854 - DNA, 782 bp, Homo sapiens
  misc_feature (254)..(254): n is a, c, g, or t
caattttggttacgtgttgccccattaaaaaaaaagaaaaattgttattaatagatccccaatcttgggacaaaaaatggggtccatgatggtggtcgcctggttatcccccagtgggtaatcactggagcgttttttaaggccaggatttattacttgatgaaaaggcaatttttctcggtcttgttcacaagcacaagaacatctctggtgggtgccggcctattgcttcttacagcagtgccacaaaagcnggtggtgctttcttaccacaaatgatctggtttggtgtgggggacatggggtccacactacatccccgagtcaatgagggacctctcttgaatttggtaggactatgactggctttgcaactataggtccattattagagtcgcgtatgacgacaaataggggttccctaggtaatggcatagctagcatatgtcatgggttccccgatgtgatcagtatggactatgtgttattttcatcttccacttgttcataagcttgggcttccaggctagttcttagaccaatatttttgcgtggccatgtaaacatcatttagacagccctctatgaatttcagtgtgaaaacaaccttaactttctctttacccttagctgaaatgtttacacagcttatggtgaaatcctttcatgaattgatatctcttacaatggtgatggaggtaacccctcaccaaggttagctttgatctgttgctatctattaaagaccatgtcattttggtcaattaaaataattgtgtgca

SEQ ID NO: 614855 - DNA, 164 bp, Homo sapiens
gaggatcccgtctctcaccaccaggacagacagagctctgctggagcgggtgtccatctgactgcatgttccggtcgcccccagggtacttctgttgctcgactctctagtgggtgattgcgttcccagaatgtatacatcccagggtgggtggaggagcgggg

SEQ ID NO: 614856 - DNA, 875 bp, Homo sapiens
atggcacatgcagcgcaagtaggtctacaagacgctacttcccctatcatagaagagcttatcacctttcatgatcaccgcgccgtcgataatcaatttgtccgttatcttgcctgcctagttcgctgtagtgccctttttcgcgtagttacgtcgacaatcgatagagacgtagacttaaatacttgaaacattcatgcagaacggctcatggaaattagggaatacccggatctagataactattccatcgcctcgcgcgagtcaatctcatagatcgcctcgatcagcccgtgcgcgcatccgcgtagcgcgatccgtgttacgataaacagagcagacggtcaaacgactcgcacctccacattattccatccagaatcaaatgtggccaatcgcgaaagtgggtacgtgaaccgctagcgacgtacaccggatcgtaccggcggaacgtagagtctgtcagatcgtgcctacgatatcttcctcacctttatgtcctaggaacgcatggcgagctagcgaactccgttgatcgttcgaccaattcgtagtacgtacctcccagacttggaagaccgaccgttcgtgatagtagagttatcatcacgaagacggtctgtgcactctatgagactgtccccagcatttatggcttataatacgagatgctaattcccggacgtctaagacgcaaaccactttcaccgctacacgaccgggggtatactacggtcaatgctctgaaatctgtggagcagaccacagtttcatgcccatcgtcctagaattaattcccctaaaaaatcttgaaatagggcccgtatttaccctatagacacccctctacccctctagagttcaaaaacaaacag

SEQ ID NO: 614857 - DNA, 110 bp, Homo sapiens
  misc_feature (33)..(33): n is a, c, g, or t
  misc_feature (69)..(69): n is a, c, g, or t
ccgctgaccagttgcggtccatagtcgctgacnaccatgtcgtcgggttgctggcgatcgtgccgggcnccgtggaatggatcgtcggtgcggaagtgcacgaggggatt

SEQ ID NO: 614858 - DNA, 395 bp, Homo sapiens
gaaaatgttctctcatggttttggaattatcttcattttggcagatacaggcacatgtgctacacacttctcattcttgcacccagggcagacatcactaatcgatcacagccctctttcccactgggaacagatggagcctgtcaatatttctcagcggtcctccaggcagctactactaatcaatcagaattggcatgcaagattaaatgcccttgccattcagggcaataatcacagaaaatgacaatcacacagatgtgagtccctggggtagccaaaattccaaaacctaatataattgcctcttcaaaatgtgattaaatatcctctttccctccatcacaagcaaaaagaataaagtcatgcaaagtaggtttggtttgggaggaaaa

SEQ ID NO: 614859 - DNA, 892 bp, Homo sapiens
gattcctgaagctgacagcattcgggaagatgatgtctcgctccgtggccttagctgtgctcgcgctgactctctctttctgggcctggaggctatccagcgtactccagaagcatttcgaggtttactcacgtcggtccagcgagagaatggaaagtcccatttcctgaattgctatagtgtctgggtttcatccatccgacattgaagttgacttactgaagaatggagagagacttgaagaagtggagcattcgagacttgtcgtttcagcaaggactggatcttctctatactcttgtactacactgaattcacccccagtgaaaaagatgagtatgccatgccgtgtgaaccatgtgactttgtcactagcccaagatcacgttaagtgggcatcgaggacatgtcaagcagcatcatggcaggttcgacagatgccgcattgggcattgggatgaacttccaaattctgcttgcttgctttgttattcattgatatgcttatactacttacactttatgcacaaaatgtatgggttataagtaatgttaacatggacatgatcttctttataattctactttgagtgctgtctccatgtttgatgtatctgagcaggttgctccacaggtagctctaggagggctggcaaacttagaggtggggagcagagaattctcttatccaacatcaacatcttggtccagatttgaaacgtcttcaatctcttgcactcaaagcttgttaagatagttaagcgtgcattagttaacttccaatttacatactctgcttagaatttgggcgcacacattacgcccccttccttgacacgattcttggccactctgtctcctcgcatgaaccatttgcctctagatcccattt

SEQ ID NO: 614860 - DNA, 504 bp, Homo sapiens
acagtgaaatgcttacttacaggctctaaccaatagtgcaaaaaggtattaagtgaacaataggtaagtaaagaaataaaacaacagtaaaaagacaggctatatacagtagcgaggctaaaatagtagagaggctacatacagacaccggttagtcgggctgatcgaggtagtatgtacatgtagatatggttaaaatgactatacatatatgatgaacagagagtagcagtagtgtaaaagaggggttggctggtggtgggtggcgggacacaatgcagatagcccggttagccaatgtgcaggagcactgattggtcggcccaattgaggtagtatgtacatgaatgtatagttaaagtgactatgcatatatgaaaaacagagcgtagcatcagtgtaaaacaaaaggggttggggtgggcacacaatgcaaatagtccaggtagccatttgattacctgttcaggagtcctgtggcttgggggtaaaaactgtcgacgc

SEQ ID NO: 614861 - DNA, 123 bp, Homo sapiens
atgaccccaaagagtcctagatatcctcagcgctattaattgtttatgtttgtgtgttcttgcatgtagaaccatgaaaagtatggtaagtgaaatggtcttggatagatgggatgttccatg

SEQ ID NO: 614862 - DNA, 1644 bp, Homo sapiens
  misc_feature (653)..(653): n is a, c, g, or t
  misc_feature (774)..(774): n is a, c, g, or t
  misc_feature (788)..(788): n is a, c, g, or t
  misc_feature (791)..(791): n is a, c, g, or t
  misc_feature (878)..(878): n is a, c, g, or t
taaaaggggggcaaactttattttattggcctcactggtaaatagagaaatatctggtcctttcttctcgaaccaatatgcccaaagagggttaataacaagaaagttataactttagcctccaattgtggaggattgtgttcactataaaaatttataaacgtctccaccttggggtgtttttttctcaagaactaagtgtggtgaatcaccagcgttagagggcattctcacagtgtgtcataaaaattaaaattctcttacccatatatttttatatgtgtgtaaaaaatgtgtgcgtgacacgcgtgtgtggtgtggtgtctctgtgggcacgcgcgtgtgtgggcgtggtagattatatgtgcgagacccagtatatacacagagtagattctcacacacgctggtggcgctgtggaaagagcctatagagatctctctacagcgtctctcacgaggggagatctcgaggggcgacgagtctcccgagacccgccggtggcgcgtgccccaacaaagagggggggtgggtgggtatcatctcgagagtgctctacccaccctatagagacacccgtgtggcgccaccacttttttatagacacgtgtgcaacccctgtgtggtgtgtggggatcctccccacacgggngctgtgtgtggtgcacacccgatgtgtgttatttcttcaacaccccagcagaaagatttttttcataccacccacattatacaagaccacaacaatgtcgtggcgtttctaacaagaagangagatatcattccngtngaggagcacaccaggaggggcgactattatagacgcgagagcctcctatattctcccccaatatgtcgtggagagtggtctcacctnttcatccacacctcgttgtggttgttgtttctaaaaaaaccattattaatagacgagcacaacacgggtctcccctgtgtggcgtggtggacaacacccggagggggagacaccccgtggttgttccggcaccaaaatgtggtgcggcccccggtggtggtgttgacaacactctcgggggggtggggcacacccagacgagaaggcagcacaaggtggtggcgccgccccgggggagccccaggatggggtggttactccccccgaggggggggccgcggcccaaccgtgtgttagtaaaaacgccccacccccggggttgataaacaaaaggggggccgcaccacttggaatcgccaccgtcctcccctgttggtgatgcaccccacccgccggggtggtggcggcatattttctcgcccggcgcgtgtaaaagaccgcggttgcccgccgcgggggcgaacataacaccactcttaccaaaagagggggggagacgcacatcttcgacggtctgccccaacaaacggggcacaaccatatcttctctaatcttccccgcacgagagagaaaaccaccccggggtggggggcaccccagggcgacagagagacaagggagacggcgcccccccctatctgcggcgccccacagacgggtgagggtgggggagcctcaatcatcaccccagggagaggaggcacatccacccgggagaaactaacgaggagggagatatataaaacaacgaacaacacggcgcgg

SEQ ID NO: 614863 - DNA, 147 bp, Homo sapiens
  misc_feature (31)..(31): n is a, c, g, or t
  misc_feature (92)..(92): n is a, c, g, or t
  misc_feature (109)..(109): n is a, c, g, or t
aaattcgcggccgcgtcgactacggactgangagaagacgacagaaggggggagaccaaggcgggtggatcacgaggtcaggagtttgagancagcctggccaatatgntgaaaccccgtctctactaaaatacattgctgggtgtg

SEQ ID NO: 614864 - DNA, 1161 bp, Homo sapiens
gacgtccgctaggtggcccggtatggagggcccacagtcataccgcgcaaaaggcgcagcaccagtaggagagacgcctagatcgtagctcatgaccaggtgccagggctagtcggtgccgtgcggaggaacgtgcgagggtccgagacctgcagactgtccctgtatccgtcctgctcgcgctcatgcgaacccacgcattcggcgcatcacgtcgagacctctccgcatctgtccaagacgcgccgactgtaccgatcattcgtccggggactggggtgcgtctcgtgagagcgtcaccgtgcgacggtcgcggcgatcgagcgggtcttgacggagagatgggggggcatgatgatgccgctcatcggggggcgccagttgtcacgtttggcgcagacgaagctgtcacgcgcgcgcccggcctggtccatcatcgcaggcgcgcgttgggcagccccagggttggtatgttgcgtctgtccactggccccatgtctgccgtgctcgccgcgcaagaccccggggacaccgcgcgaggggaccggtcccaggggccgcgcacggtgttgcgcggcactcgttggtgactcgactggacctggaggacagcgccattgcgaccgacttctttgcagggactcccgagcgggttcgtcatggctgtcaaaccgcggtggaagaaggcggaatggcaccaggggcagagtggaagcccctgaggccgtggcgcatatccccaggtagttgcgagaggtttcccgaacaatctctctataacctatggcgatatgggtaactgtggtgtcaccattaactgtaccatggcccagatacaaggcgctacaccctacaacccctgatttgtccatggtatcgataggctctcgattagggcacaacacccttgtcgatgggcccggagagagcaaaagcacttgcctggtgttgcccctttcaatgtggggcacccctactccagtcgtaagcgtaccggataggacccaactggaataacaggtatcctggggatccaacctaactgtcgtttgcagaaaaccgttgcatcgtgtgacagccacagtgggacccacggataaagaaattcacaattataaaaccacatgggaggtaaacactagtggataccattacatcaaa

SEQ ID NO: 614865 - DNA, 285 bp, Homo sapiens
  misc_feature (197)..(197): n is a, c, g, or t
gtcaagccagtcttcaggcttgtgggtggggggcaggtcgtgtccgtgggcacacacttctgtctttttttctccccagtgatgtcacatccacttttcagtggcccaacaccccagcatttgtcactgttttattttgttctcacacgtgctcacaccccattcgtcttcccaccgtggtttcacagtgctcaccntattggccacacaagcgcaactaaaggctggctccgtttctcaccacacacaacacacacacacacacacaccccacaacacacacac

SEQ ID NO: 614866 - DNA, 210 bp, Homo sapiens
aacgcgctggaggcctcctgccgagtctgcagacgtgtccctgcacaggaccccccctgtctgtcacacatagtgcccctgacccattccgagggggcctgcgctacataacacccgcgtccagcggaggagatgggcccttgccacggctcgctccgtgtcactgcacaggagccggtggaactgatgtcacgagcgaaccaagcagct

SEQ ID NO: 614867 - DNA, 100 bp, Homo sapiens
cttatgtggaaagcgacgttggaggacgggagagcgagctcagtccaaccctgccgctctgtgggggcatctgcttgagccgtcggcagctccggcaccc

SEQ ID NO: 614868 - DNA, 468 bp, Homo sapiens
gaaatgatctgctgcagtgctctgagccctaggattcatctttctttgcaccgttaggtgggcctgactggcatgtattagcaaactcatcactagacatcgtactacacgacacgtatctacgttgtacgctcacttccactatgtcctatcaataggagctgtatttgccatcataggaggcttcgttcactgattgcccctatgctcaggctacgacctctagaccgaaacctacgccataatccatttcactatcatattcatcggcggtaaatctaacgtttctgtgcccagcaacacgttgtctcgggctatccggaatgccccaactaaatactaccgtatggaccaccataattaccccgatactgccttacactatgcctcatcaccgcaactaaaaatattaaacgacaaactaccacctacctcccgtcaccaagagcccataaaatgtaaaaaagg

SEQ ID NO: 614869 - DNA, 145 bp, Homo sapiens
agttttatgtcagatagactggtgagtggctctcgagtgatgttgggcagatggaccaaatgtggtgtgtctctacagctatcccgttgctgggccagcctggatagacaggaagggagaggtatagcctaaaggtgggtctggc

SEQ ID NO: 614870 - DNA, 122 bp, Homo sapiens
tatattcagtcctcgccgtttacctgatcagtcagtcaaccctcgtccgtgggatcccaggtcattatcagcattacgccaggatatcgctcatcatcagcgcctcctcgcctcgtgcgccc

SEQ ID NO: 614871 - DNA, 724 bp, Homo sapiens
atgagccgtcctggggaggtgtgctcggctctgcaacctcgtgccgagtctctccagaagcacctaggagagctgaatcaccagaagcagctggagtccaatagagatcccagagctcggcacatgagctggagagtggtggtcccgcttcactggccgaacaatcctctcatccatcctctactcctcaaggcacggtcccacgcaagcgaagcactcgcaagcccaagaggtagtaatgtggagtacgatttagtcgcgaggaaactgcatttcatggatggatgcatctagtacaatctcagtactcgcttggtgactggaccgaaacttccgagccgtgttgatcacatcggccgtttggatgagcacacatctgtcgaaacggagagtaggatgtgacgcgaccgtgaggcgcccgtgggccataggcctgcacagtcatgcgaagcaatcgtagtaatccacgtcatgtctaatgtcatcatagaagtctggctagatcccctaggatgactgagtggctacagtagcgacggcatgcacagcaaagcgcctagagcgaagcattctccgttgcagctaaggttatgcaggttcctgtaggatccgaggtcgcaaaagaagatcgcctcattgcgatgagctcgaggcggtccgcacgacaccacataggttgggacctgccacacgaaaatcggttcagtccgctggaccctcggga

SEQ ID NO: 614872 - DNA, 659 bp, Homo sapiens
ggacaattccattaccccaaaatgtaatcaccacaaatccaccctcgctgtgcacctttgtcctcaatccaccctcatcccaacccctggctaccactgatctattatctttccttacagctttgcctttcctagaatgtcatataaatgattcaagctgtatgtagccttttcagtcttgcttcattcacccaacacaatacatgttgaggccgagagtggtggctcacgcctggaatcccagcactttggaaggcagcagttgacagatcacctgaagtcagtaattcaaaaaccagtctggccaacatggcataaccccatctgtactaaaaatacatacattaaccggacatggttgcagactcactataatcccagctgctcggtagactgaggcaggagaatcgcttgaacctctgagacggcagttgcagtgagccatgatcgagccattgccctgcagactgggtgacaagcgtgcaacttcgtctcaaaaagcagtcgccagttaagaaagctatctcgaggaacagccccgtcctccattagtcctatagtgagtcgcatcctgcactgcacgtcgatttactgactgactgacccctgcgggacccagcttcatcgacttgtagtacatccccctttctcagctaggt

SEQ ID NO: 614873 - DNA, 181 bp, Homo sapiens
cagtgatgtcccaatctgtaaaaattacaagttatggtactatgttagccccataatttttttttttcccttattaaaacacttccataatcgggactcctcggtccaggcactgttgcccagcctccaagctccatctccactccagatttttaacagctgcctgcagtagggcgcccaa

SEQ ID NO: 614874 - DNA, 110 bp, Homo sapiens
taaaatttggggttttccccctttctttaacccttttaagggggcaaaaccccctttccccattcaatcccccggttcccccttttgtttctgaaggggggtttaaagcc

SEQ ID NO: 614875 - DNA, 225 bp, Homo sapiens
gctagctgactctagaggatacacatacattgactgatgacaataaggttgattaaaataatcttcgagtagatagagtctattataaatgatagatttgagaacagcttttactactggcaagtgaggagaagtagataaactggaaggatttttttttaatgattaatggtaatttggggggttttttgttgatatttttcttcactcatctaacaaacattt

SEQ ID NO: 614876 - DNA, 306 bp, Homo sapiens
aaactttcagtacatgagactacactccagcctgggcaacagagcgagactccctctgaaaaaacaaaacaaaacaaacaacagagagcagtgaactgagtatccagccagctgcacgaaagagcagcagagtcaaaggaagtggcaggaaaaaattaatgggcaaggcaaaaatgatgaataaaattccaggagcacataagtattacaacccaaggttggtcttaaaatgtccaaattgccagcctctgtatataggtgccacagaaagaggggaggtgagaggagaaggagaggagaaagtgt

SEQ ID NO: 614877 - DNA, 371 bp, Homo sapiens
  misc_feature (11)..(11): n is a, c, g, or t
  misc_feature (44)..(44): n is a, c, g, or t
  misc_feature (51)..(51): n is a, c, g, or t
  misc_feature (99)..(99): n is a, c, g, or t
  misc_feature (104)..(104): n is a, c, g, or t
  misc_feature (112)..(112): n is a, c, g, or t
  misc_feature (118)..(118): n is a, c, g, or t
  misc_feature (143)..(143): n is a, c, g, or t
  misc_feature (320)..(320): n is a, c, g, or t
  misc_feature (338)..(338): n is a, c, g, or t
atttcggcacnaggggctgactaggttttcggaccgcggcgccnggcgaangagagactgcggcgggagggccaggccgtgggagagacgcgggaaagnaaggnttcaaagnctcttnaccaccccgccctaggccgacccgnggacccggcgtctggtcccaggtctccccgctgcgctgcttgaggctcagcatggccagcagagagccctgccccagagcaaggagacgctgctgcagtcctacaacaagcggctgaaggacgacattaagtccatcatggacaacttcaccgagatcatcaagaccgccaagattnaaggacgagacgcaggtntcacgggccactcaagggttgaacaaggacaat

SEQ ID NO: 614878 - DNA, 1300 bp, Homo sapiens
ggcagatggacttcttgcagaagtaccctctcccgctgatccccccgacgaggggaggtgaacgcgggcgacgcctatcgacattgggcttccttcgagtgaggaggacactagaaaggaatcagagttactgggacaggtgagtcaggagctctaccggagacgttccccctcatgcactctcggaagcggtgggcgaggcaggaggtcggctacgatgacttgtcatgtcgatcaccttatcataacgtctgcacgtaccacgacctgagcgtcggtacggctccgctgcatgcacaagcccgcatgaacaatgcagcgtgaggctcgatggatggaaaggactcacggcctctgtggacgaaggaatctggagtccaatggcactgggcgtacattggtccgaatgcactgggggctaagtcacgcgttccgtgagcccgaggtgtggcagtcggcagggttacatgtcgtagcacttgtgacacccccgaagccgtcgcgtcggagttgggcagaggggcgcggatggtggcggagtggctcacacggcaggggagacgcgtgtacgtgcgaaccgagtgcggaagagacgcattcacgagatacgagttgggcaagcgtagcaccgctaggattcaagagggaagacggacacaggatgagcgcatgcgattcgcaatcgagcaggaacatcacggcccgccggatgtggtagaaaagtagccagggatatgcaactcagagtatggccaaggatggccaggtatgtacgactgggagcccctgtgtgaggctctagggatgccatgggtgggcccaggtgaaagggaaaggcattggcggcctgaagcgcgtcccagtagcgccggccggaaggggagtggacccattgtgcacgctcagttggggataggccaaagacggggcgacatgaccccaggaaggcgcagtcgacaatgaaaacgaaaggtcccagcaaggcacacaggacgcccaggtaggcgcagtggcggccagtgaaagacaaagggggcatggccacggaagacagaagcccgaaggtgggacagaggcaggcgaaggcccacagacagggggacatacacgtggacgcgccgaggtgcccaagatgcaccgggccccttagtggaattacgagccaccgccaataaagctcgaaaaaggtgcgagccagaagatcatatcacccataagtatcgaggatacagccgccacgctcgcacagcggcgggaacccaacaggggacgacaatagataggacgaaagcccacgcgg

SEQ ID NO: 614879 - DNA, 118 bp, Homo sapiens
agaggatcccccatcaaaaaaactgtgagaatgttcattgcatataccacagacgatctttcatgggtcctcatagataacttatggaggatgctttgatatcctagttcttggatac

SEQ ID NO: 614880 - DNA, 324 bp, Homo sapiens
aggagaaaaaggagaaaagggaaaaccagaaaggaaaaaaaggaagagagaggaagggaaaagggaaaggaatgaattgaggaagtgaaagaaggcaaggaggtaggaaaaaagggaggaggaaaggaaggaaaaaatccctcaggtttcagcccttacctgggttttcagggcaaacataaatgtaaaaaccctgatttattttgttactagatcaggttttagggtcctgcaaaaggctagctgggcactacactagggaatttgctcctgttttgtcccttgtcatggttttttttggtattaaaggcccccatttgccca

SEQ ID NO: 614881 - DNA, 999 bp, Homo sapiens
  misc_feature (516)..(516): n is a, c, g, or t
  misc_feature (650)..(650): n is a, c, g, or t
agcggggggtgttggctttctccagcagaagggcgcacttgcatactaatgtggggtatcacgtagagctgaagacgaagagaagggggagaaaacctagcaagatccaccagtgtgctaatgggaagtgtgcgcgtatgcaatcggacatgcatcatggatggggctcgcccatcctgctgcgatgctggctgaagtagtttctgcatttacttgtccatgatggggaaaactaaagatatgccgtctcgaaaacctaccatcagagcagcttcagtgtggttctatttctaggcaatcgataggagagtaggcgcatgctgatgtctcctgccaaggcaattgagtgcgttcaattgtggcgtgtaaccacggagtgaccatgctggtaggactgactgatggacccagatgaaaagatgttggcaagagagagtggtgtcgatgactttcattcttgctatccggctagcttcgtcagtttggataattgcatgggatcatgggcgtacgtgntggtcacttcgtaggtaaggccattggacgtttaggcaaggagaaggaagcaccataatatcatttcgaagttcccatcgcgcacatggtggcaacctactaccgttgtgacacgagcatctgatgaggccagntcaccgtatgcgtaaggataagccttggcgaacattgtgtccgacgtgtgcactgaaaacccaaagtcaccattcgtgagaactgggaactggctattctcgtgatattatctgattccctcttggggctctttgggtgggaagtctgagattccattcgttggtagttctgtattgcagagttacataaccatggcagtcgctctgggagcgcactcatgtcgcgcttttgggcttgctcgtcgacccaacaggccaatgatagacttggttaacacagaaagccaaccacagggaacagagaccagcaaatccttccctctaagtttccatcgtgtaactctatcaa

SEQ ID NO: 614882 - DNA, 187 bp, Homo sapiens
ttctctgatcgctcttacattgggataccacacatcccattgaaccatcctgtatgttctgtgcggaagacagatggatcttggagggatgacactagattaagtttaacctggtggtgtttctaattgcagacattgtgccagattgttgtttaaatgcttgaactggtgctatacagctattgat

SEQ ID NO: 614883 - DNA, 641 bp, Homo sapiens
  misc_feature (635)..(636): n is a, c, g, or t
agcaaactctggcaaaactttatgtaaaggaagaactttctcctcttctctccccatatcatcatagcagctacatcctacaaacacacagcggctgttatcagaaatcaacttgtgaaagtcacctctacccatagatgaggttgtgatggtttcatccaaatgattttatggcctgtgaagcagtcatttggatcaaggttaacaaattcttggtatcagaggtgctactgaggactccacataccgataccaataaataatgtccatacaacgaaggtggtgttggttgatacggtttggatctgtgtccccacccaaatcgcatgttgaattgtaatcccccagtattggaggtggggcctggtgggaggtaactggatcatggggttggatttccctattgctgttctcatgatagtgagtgagttgtcatgagatctggttgtttaaaagtgtgtaatacctcccactcaccttcctcctgctgtggccatggaagatgtgcctccttcaccttccaccatgactgtgtttcctgaggccttcccagaaactgagcagatgccaccatgcttcctgtacaatctacagaaccttgagccaattaaaccttttttttataaattaaaaannaaaaa

SEQ ID NO: 614884 - DNA, 1247 bp, Homo sapiens
  misc_feature (601)..(601): n is a, c, g, or t
  misc_feature (767)..(767): n is a, c, g, or t
tcccgcgggggggtgttatcaacacctcgcccacatatcattgattttgggggcgtatatgtacaccaccacttattaagtggtgttagttaatcaaaccctgccctaatagtatcatgaatgtttcctgtggagacaccacaacacatactaaggcggggtactactaacatattttgttccaaggtgagtttttttaagcacagactatgttgttgtatccaactccactatagggggtagttttgtgcgactaaattttgtgggcgctccaacagccattatgcggaggccccatcatactgcgtgggggtgagaacacaatttgtggggacccacatatgattttgtgtctcatggggggggcacaaaaactaaccccttttgtagcacttcaggactcctctcctctcggtaggtggggggctcaaaacaaggctgttgtgatcccctcctttaataggagagttctataatatctacctacatgtcgggggcgtctcacagtggagattagatgacagactatatatatagagatttttctcgcagtcggggctgcgccacacttttgtctgtcgttaatatgtgtgtggagcantttcttatatcgcgaaatattttgtggggctctgtgagagatgtaccgtgtgagattttgtgggcgcacccacacacacagggggtttccctaaggcgcacttgtttatatggtgtcaccatgcaggggggagctcttgcccacacactttttctacacactagtngtaggggtagagcaacaacaacacgtctcagatatgtctatacacactacacgcattgcacccaaattgtgtgcacagaaaaacacagtgtgggtcaaaaatatgttgtgtcaagaattctccaggaatatatccacacaaagacacactgtgttgttgtgtgcgccacacgtcgtagaattgtgtgggtgcgcaaaatttctaaaaatggtggtgagccctgggataggagattatgataaaagtggtgttttttgaaaatttattcaagaggagagatggtgtagttagagaggggatattgggttcccctggagattcaggcgagtctccttggagggatatagaacagagaagatataacacaccacccacctctcaccaccacccccacacataccccccacacacaggtttccatcccctctcccccccccctacacagactggttctcttattagggtgggcattttatttta

SEQ ID NO: 614885 - DNA, 316 bp, Homo sapiens
ccgggatttttttacccccggggtcccccccgggggggggggaggggggccccccccctgggccccccccttgggccccccggggccgggggccccccccttttttttttgggggggggcccccgtttttttccccttttttttccccccggccgggggggggtttgggggcccccccccctttccaaaaccccgggtttttttggcccccccccccttgggggcccggggggcccggggccgtttttccgggggggggggggtccccctttttgggtttttttgggggaaaaaaccctgtttttttttcccccca

SEQ ID NO: 614886 - DNA, 670 bp, Homo sapiens
  misc_feature (91)..(91): n is a, c, g, or t
gccggaacgccttgggttgcccacggcgccgggtcccacaggcgattctttcttctcgaaggagttccgcgcccaagattggccacgaaantttatgaggcacgaaggaagatagtcggagccccttttccgccaagtgttcaccgctattccgccgcggcgctggagacctccgagaccacgcgctgtctggagacacatgttcctattcgggccacgcctgaatgcacgcctgtaccacgctggcggcgcccacaccgggcgcgccgcgctgaaaccgcgggggccttcgcgccggaagcacgccacactctccctcgctgaaaggcgccctcggcgccccaggcccacagaaggagggccccgccccctggaggagaagccggagaagtggtgaaagaacgcaccccgccgggaacactgagtcaatcctaacccgcaagaatggtgggcacccactggtgggcgtttaacacaccggccagacacttctaacccaggtggagatcaagacccgagatgatcggcccactacactgggcgagattttcccatcccactacaagcccgttaagcatggccggcccggcatcggggcccacaccaccatcctcccgcttctatccctctcaagtaatggctcagctaataaaggcgcacatgactccca

SEQ ID NO: 614887 - DNA, 218 bp, Homo sapiens
ggatcaagaagtggcaggcctgtgggatgccaagggtggcacaggccaggagcagccgtgagcagccctggcgctgaggaagcttacgtgggcagaagagccaggtatgctgctgggtgtggagagagttgaccacatgacaggactccctaacaggggaaaactgacgacggaacggtggactgctgaacttgtggactaggggtgtggataactgc

SEQ ID NO: 614888 - DNA, 1019 bp, Homo sapiens
  misc_feature (87)..(87): n is a, c, g, or t
agcgggcggacccacgagccgaggcctcctgcagtgttccacgacaacatacgagcacgtggctgaagccagtggtatcacgtccangcgcatccatgcatgtgaagcgactggacagcgaggcgaagcaggcggccgactgcccggagaaggctgactgtcctggaccaactggaggctcgcgtaatcacagctagggcaggacgacaacttcaatcgtatcattagcacgtcacgggcgcacccttgctgccccccctttcgtaagtgccatcagatgtgggtttgtgcatcctggactgaagagtgagttgcatccttcgactcagatagattcatagaattcacgtcgacgatcaagtgtgtagcactagcccattgtgcgaaacgcttcgccagacatgcagggcctaccttgttagtacgggtctagaagccagttgcatcaatttaaccgcaaacataacttcccaaatgggagggcctgagttactcgtcggaggcgagtcattacgcggaaaacgcggtacctgaacgtgcacccgattcggaccaattggaccgctgattgccgtcctcaaccttggtccggagcttgggtagcctagtgccgagcggtgacagagccgatgacgccccatgtgttcgctgtgggaaccacccgtcgggttggcgcttaatggactaagcttcattccagttcaataactaaacgagggcccataggacttgtgctgaaacccattggagtcaaggttccatacccgtctcatagcgaagaacattcagaattcataccgcacgacacttgctctgcgtaccattattccaactttcgacgcgggggaaattcccacacaagtgtacttttgtgctttctactcaaagcccctcgttgtcagattccctacgcaaaggctgctaaagagattggggaacccaacgacacctctgtgccggggcagccgcactaaatccgtggatataggagcaaccctgggggaactctcctgtgttcc

SEQ ID NO: 614889 - DNA, 877 bp, Homo sapiens
gctgagttgctcgtgactctcttttgagctttattttggaaaaacccggtagactatgtggggcgcatttctgtcgaaaaatatcgagtgatctaaagctgagtgattgtttcagcaaggaatttggaattgtggctccctcgacgcgagttaatatgtcatccttggctgccttgtgatgtgcatcgtctgcgcagcatggtgttgccgaatcttagataagcatcctgtggctcgcaattgggcgtgcgctgcgtcatcatgaaggtccacgcctgtggccacccgaaccacgcttaacctgctctggcacacgggcgctccgttctccggaggcctacttctcctggaacggatgcaattctggggaagcacggctactcacctacactaaacgcccgcttacacaactccacgcgatactgttgccgcctggcgttctgagccccacggtacacgccgcaccttctcctcttcggacccatcacgtaaagaaccattccacgaccggaccatagcgctccacgccctgtgcattacacacaccctctcattgcatccgacccgcgttcttcccttatccccaccacagagttcaatcgccattccacttcaccgtccacacaccatctttgcgccacaagctgtactatcccacatttgcacaccacattcggggccaccatggcgtctcagcacgcacaccctcgactgggcgccatcggcacgtcgcgcctcagcacatcctgactgccgatattggtccaacgaggcgcttcactactcgcccacacgcatcatcgcggcacccccttttccgggctaattgtccaagtgcggctacccccagcatccatctcaccccttctcccgccct

SEQ ID NO: 614890 - DNA, 998 bp, Homo sapiens
gcggaagtatctggcagaggctgaatgagtacatgagttaaatgaagaaataggataactcctggctaaagccgaacagtctaggggctgaaggtaatgtggatgaatcccgagaagattcttatggaagtggaaaagagtgttcgtgtccgaacgaaaaaagaagctgaggaagaatacgatgaaattccatgccatgcatccagtatatacagcagcaaaatgctgcgtgtctgcgaggtctgttcagcctaccttggtctctcttgacgaagtgaccgtcgcctggcagaccacttcggtggcgaagttactactatggggtgcagttcacgactccgacgagaagcttgatcagtcgaggaaaacctgtcgctgtaacaagcaggagaaggagaaatcatggatcgcttgaggaggatgcagacggagagaggaacgggaggagcgtctgagcaggaggtcgggatcaagaaccagagatcgcaggaggtcactgctcccgggatcggcgtcggaggctggtcaagatcgtactcccgagagcgacggaaattgtcccggatcccggtcccgagatagacatcggagcacacgcgagccgtcccggagccacagacggggacatcgtacgggcttcccgggaccgacagggcgaaactacaagtctccagaaagcgggcatccagagaggagtcctgggagagcgggcggagcgagcgagggcccccggactgaggctagagagctccaagggaagatggcttcacggaggtcagaagagaaggacgccggcgagatctgaacccgtttccccggggtgctggtaaactagtctgagttaacgttcacaccggtctaaaaataacccctttaatatttgctggaatacaatcatctttggtagttcacacttctatggtttaggaagctagctgtcagtttctagaagtgacagaagttgcctgtgtcccgagtcaatgtggaataggactaaa

SEQ ID NO: 614891 - DNA, 722 bp, Homo sapiens
  misc_feature (38)..(38): n is a, c, g, or t
  misc_feature (65)..(74): n is a, c, g, or t
  misc_feature (77)..(83): n is a, c, g, or t
  misc_feature (86)..(86): n is a, c, g, or t
  misc_feature (89)..(89): n is a, c, g, or t
  misc_feature (217)..(217): n is a, c, g, or t
  misc_feature (233)..(233): n is a, c, g, or t
  misc_feature (290)..(290): n is a, c, g, or t
  misc_feature (309)..(309): n is a, c, g, or t
  misc_feature (487)..(487): n is a, c, g, or t
  misc_feature (523)..(523): n is a, c, g, or t
  misc_feature (596)..(596): n is a, c, g, or t
gaacgaacagctgtagggggaaaaaattctcagttgtnaaaaaaaaaaaaaactaatctaaaaannnnnnnnnnccnnnnnnnttnttncctacattaacctccatcaaataccaattccaggaaaaactcttctcattcaaaaaggaattattcaaaagtaatcaaaaccacaaatgcatttggtttttgggccagcaattccacttctaggaatntacatactcacacatntacaaaataatgaacatacaaaagtattcattaatgcagcgtttgtaaaaacaaaanattggaagctgtttaaatnacaccatatcagggttctggttccctaaattttggtatattcatacagcctactcctgggtagacaacaatgaataaataaggagaacttggaaaccatttatttagttatttgggataaccttcattttattttattaggtaggaaaaataaggttgaggacagttactgccatttntatataaaaaggagaaaaatggtaagtacataattntgaattcataatttatctctggaaagagacatgagaacctggtaaccctgattaccttgggaggggaaggggnagtggtggctggggggatggaattgagagggagacaactgtatcctttcatagcttttgaaaatgtgggtgtactatgtactatgtggatgtactaccttttcaaaaataaaacatttaaaaagct

SEQ ID NO: 614892 - DNA, 222 bp, Homo sapiens
  misc_feature (42)..(42): n is a, c, g, or t
  misc_feature (160)..(160): n is a, c, g, or t
ggatcctggaatgtgtggtgtatgggaattacaagtgtcttngatacagatacccttaaatatgccatctgaaatcaaactcactatcgaacatggacaagtgcatgaagatccttaccaaagtgttaaaattggaagaatagagtgacttttattttancgtactagacatgcttcatgggaaccctgacggaaggtctatattcataacaccacacaatt

SEQ ID NO: 614893 - DNA, 668 bp, Homo sapiens
  misc_feature (6)..(6): n is a, c, g, or t
  misc_feature (50)..(50): n is a, c, g, or t
  misc_feature (60)..(60): n is a, c, g, or t
  misc_feature (92)..(92): n is a, c, g, or t
  misc_feature (111)..(111): n is a, c, g, or t
  misc_feature (116)..(116): n is a, c, g, or t
  misc_feature (121)..(121): n is a, c, g, or t
  misc_feature (124)..(124): n is a, c, g, or t
  misc_feature (151)..(151): n is a, c, g, or t
  misc_feature (241)..(241): n is a, c, g, or t
  misc_feature (445)..(445): n is a, c, g, or t
  misc_feature (479)..(479): n is a, c, g, or t
  misc_feature (523)..(523): n is a, c, g, or t
  misc_feature (525)..(525): n is a, c, g, or t
  misc_feature (542)..(542): n is a, c, g, or t
  misc_feature (546)..(546): n is a, c, g, or t
  misc_feature (563)..(563): n is a, c, g, or t
  misc_feature (569)..(569): n is a, c, g, or t
gggggnggggggggggggtggggggggggggggggggtggggtgtggggngggggggggnggggggggggggggggggggtgggggggaggngggggggtggggggggggnggggnggggnggnggggggggggggggggggggggggggngggggggggggggggggggggggggggggggggggaggggggggaggggggggggggggggggggggggggggggggaggggggaggggngggggagggggggggggggggggggggggggggggggggggggggggggggggggggggggggggggggggggggggggggggggggggggggggggggggggggggggggggggggggggggggagggggggggggggggggggggggggggggggggggggggggggggggggggggggggggggggggggggggggggggngggggggggggggtgagggggcgtgcggggccgnggcgggggctgcgtcggcggggcctaggaggtccgcctcaatcncnctactccccatatctancaangtaaaaataaaatggcngtttgnacagacaaaacccaccccattcctccccacactcatggcccttaccacgctactcctacctatctccccttttatactaataatcttataaaaaaaaaa

SEQ ID NO: 614894 - DNA, 620 bp, Homo sapiens
  misc_feature (6)..(6): n is a, c, g, or t
  misc_feature (50)..(50): n is a, c, g, or t
  misc_feature (60)..(60): n is a, c, g, or t
  misc_feature (92)..(92): n is a, c, g, or t
  misc_feature (111)..(111): n is a, c, g, or t
  misc_feature (116)..(116): n is a, c, g, or t
  misc_feature (121)..(121): n is a, c, g, or t
  misc_feature (124)..(124): n is a, c, g, or t
  misc_feature (151)..(151): n is a, c, g, or t
  misc_feature (241)..(241): n is a, c, g, or t
  misc_feature (445)..(445): n is a, c, g, or t
  misc_feature (464)..(464): n is a, c, g, or t
  misc_feature (467)..(467): n is a, c, g, or t
  misc_feature (485)..(485): n is a, c, g, or t
  misc_feature (487)..(487): n is a, c, g, or t
  misc_feature (495)..(496): n is a, c, g, or t
  misc_feature (506)..(506): n is a, c, g, or t
  misc_feature (510)..(510): n is a, c, g, or t
  misc_feature (514)..(514): n is a, c, g, or t
  misc_feature (523)..(523): n is a, c, g, or t
  misc_feature (529)..(530): n is a, c, g, or t
gggggnggggggggggggtggggggggggggggggggtggggtgtggggngggggggggnggggggggggggggggggggtgggggggaggngggggggtggggggggggnggggnggggnggnggggggggggggggggggggggggggngggggggggggggggggggggggggggggggggggaggggggggaggggggggggggggggggggggggggggggggaggggggaggggngggggagggggggggggggggggggggggggggggggggggggggggggggggggggggggggggggggggggggggggggggggggggggggggggggggggggggggggggggggggggggggagggggggggggggggggggggggggggggggggggggggggggggggggggggggggggggggggggggggggggggngggggggggggggaggganggngcggcagggggggggggncnaggggganngggggagagngggngggnggggggggnggcggnngcccaccccattcctccccacactcatggcccttaccacgctactcctacctatctccccttttatactaataatcttataaaaaaaaaa

SEQ ID NO: 614895 - DNA, 510 bp, Homo sapiens
  misc_feature (24)..(24): n is a, c, g, or t
gagattgcattttgcaactacaanaatagcaaagattgtagtgaaaacagacactctcatccactgatggaggttatggccttttgtagggaaataaagtgatgtttatcagaagctataaaatgctcatactctctgaccctgtaaaaatatgtctaggagtttgtcctaaggaaataatctgagatgaacgaaaacatttttgtagaaggctgttcttcatggcccattttatgatagggaaaaaaaaaatcttagtggcaagctaactgcaacagcagggaattggttaaatcaaccacgtgacaaccataaatagaatagctcacaggacatttctgcagacagaatgaatctgtgaagtcagatgtcagaacagtgtttatgccctttgtagggtgtgagtgacatagatgtgttcagtttttgaaaattcacacagtacgcttatattttattcacttttctgcccccatatttgatgtcaataaaatgttttttagaagataa

SEQ ID NO: 614896 - DNA, 390 bp, Homo sapiens
ttgcctctatggcctttggcaaattacttaatgtccctgtaattcattttttttttcatctttaagtgaaaataatgctattacctacagcaaaaactttgtggggtttttggtgagaattaatatatgtaaatgcttaggaaaatacctgctgcataataaacgtggaataatgccctcttcctgttctcctccttctccttcttcctctccctatctctcttcctctgcctatcaccctcgctccctcctcttcttccttatcctccttttcctacttgtacttctcttcctcctatacttgctcttaccatcccctctcgactacattttcttcttcttgaactacattttcttctccttcttcttatataccttgtacatcctttt

SEQ ID NO: 614897 - DNA, 267 bp, Homo sapiens
ggggccctttcccaaatgggaataaaagggcccaccctttttaagaaaaaatacccaacctataacccgggacagttgcaagcaaggaacttcaagcctgttaatccttaagaggtgaccacagctatgttagcacttgtccctcccttgactgacaaacctttaggaaggagtcccagttatggtatgagcttttgaaccagtgctacatcaggctactatctcgtcaagcaaggaaccaagggggcaaagacattacctccagaa

SEQ ID NO: 614898 - DNA, 187 bp, Homo sapiens
agtcgttccgggcccaggggatcacgggagccaggtcgggagatgggggcagtaggggtccttggggccaaagtggcatgatttcagggaaggatctgtccttgacgtccattcacattgcttttggagaagttgaatttggggaaacggatgtggttctttatgaaaatggtgaagtcttcggaca

SEQ ID NO: 614899 - DNA, 165 bp, Homo sapiens
acgaattacggcttcgttcctatttatagttctatcgcaggtgttgacacttttccctaaggtgtccacactttaagattcatagggttcagatggttcagtctaggttcacacagtttaacactagtgtcataaggttaagcatacaattcaataggttcaaca

SEQ ID NO: 614900 - DNA, 416 bp, Homo sapiens
tgggcgaccactagagaacacctggagatgggatggctcctatttggagagcccctggctagaggggctgtgctgaaggcagaccccagataggactctgggctcatacagattccactatcattatctgacggggtgtcttcctcctttatgcactgagggatcatggccacacgtaagcagtgtcacgtctggcttcctcatctccttcagtgatctccacttcactgccctagctctaaactacaggaatgatctggagtgcaggaccggacccctgcgggacggggcaagcaggttgtaaccaaggtgaagggggcaacctggtcgggttttgttaaactttctgggagatggcccattgggttcaccgtctgtgggggctgcttattagtctcctggactaggggggccca

SEQ ID NO: 614901 - DNA, 310 bp, Homo sapiens
agacctcgggaccttatagcaccgtggtagcgtggcatttgtagtcccagctgctcgggaggctgaggcaggagaatcgcttggacctaggaggcggaggttgcagtgagccaagactgcaccattgcattccagcctgggagacagagcaagactccatttcaaaaaaaaaaaaccaaaattccttataactcagaaacaaaaagcaaacgaccgtgattttttaatgtggcacgggactttattagacttttccccaaagaagacattacacttggccaacaggcttgtgaaaggatgcccaatatca

SEQ ID NO: 614902 - DNA, 261 bp, Homo sapiens
aggccgagtgtacatatggagacaggggggacacagtcaagagggaagccaagcatatgcctacctccttgtggggcaggtccgaaaatacagacggacggtgtcatgactctgaatcaccctcaagcctgcgacgtggcccacacccaaagacagcaccattaataacctaccacgtacttaggattcctcccaatacagtactcagcagccacacccgccaaataaatccatgatgagacatctgccatccttgcctta

SEQ ID NO: 614903 - DNA, 221 bp, Homo sapiens
agtccaggtctagatctgcctctgaagtaactgtccgagcccacaaagtgggtccaagatttagccataagtcacaggtctttatcataacttacccattaaagtcattatgaagtctcatgttgtccaggctcacgtccagtggtgatatcgaggctcactgcatatagtccatcgcgcgtatagtcagttctgagccagagcctcacacgaagctggcg

SEQ ID NO: 614904 - DNA, 384 bp, Homo sapiens
tcctggatgcccagagcccctggcctggagctgcctcatctgtgtgtgtgtggtactcagtgccccacccctccctctttatgagttcagttgccttgctcagcccctcccctgtatctcagcgtctatcagacctctgacagagacgacgatgtcgtgtgtctccctgtgtggcccactggtgtgtctcacgggtcatggtgtgtgggatatgccgggaactcggggagcccactggctgcgccactctgacctggcagctgaagcctgggagagtcctgcgtggtgtacttggactcagccgctaacctgtgccgacgcaccagtgttatcatacttgacacagtgtcatacatcacgaaaacaatgcctctcactatatgc

SEQ ID NO: 614905 - DNA, 773 bp, Homo sapiens
  misc_feature (482)..(482): n is a, c, g, or t
gggggtgtgagaggttttgtcgctctagggagattcttcgacgcaatcgcttatgtcaagagaacacaggtgtttcgccttccttcatatgaggaagatcagggatctgatagactgattccgaatagagcgtaagagatggacatccacttcgtaacccggtatgggaatagcggagtgtattgtagctagttgattgcattatggagttatatataactgacagagacagagggaagatactaaaatgtccagttacactctgatgcgacatgcagtgtggcatgggcaaggactttgattgtagagagcaagtgatctgtgggtactgagtgctattccgatgatattcgggaatttctgtgagctaaataggcataagacctgtaagaagaacgagatagctgtactatggtcttgatagtgaggagcttgtcgttttagtttgagaatgtgctttagttgattcaaatgtgtacctnattattggtcggaaagtaaactaagtatagtagtgggttgaggatgggtaacagggggatttgaatagtcggcgtatcactgtatcttgcagggcttgatgtgagtcttggtcgatgcgaattgactatgtgactaggttgactaactacggtcattcatagggaagtcgggagttagactgaaagcagtgtcacgctaaatgcacttgatgggtgttgaaatgtgcagcgttcttgaaatttttgtaagatgaacttagttctggaagaagatagcagggctaattctga

SEQ ID NO: 614906 - DNA, 579 bp, Homo sapiens
  misc_feature (462)..(462): n is a, c, g, or t
  misc_feature (503)..(503): n is a, c, g, or t
  misc_feature (516)..(516): n is a, c, g, or t
  misc_feature (559)..(559): n is a, c, g, or t
aggtatctaggaaactacagtcccacaacatacagagactctaatccaagccaagggtgcttgtcactgccaaagagaaggctatgagcccccgcacacctctggagccctgatttccagatgtcctgaaaacagcatcatgcctctgcgtccactcagctcccgctctgcatttgctttggcttgagtctttcctgtttctgagatgccctcctcccagagtcggtcagctcacttcctgtgcttccagaagcttggttgttttccacactgtttcatccccatagaagacccaggtctctcggtgccattgacatctgtgagagtcataggtttactgaaatagtcaacgtgttgttaagctgataaaggctctgagtaacgaacgggtgctgcctcccacagtagagccaggctaatgtaatggtccccgttccataaatgggaaaacaggaaactgangctctgagaattggatagtgtccaggattccagcagcaagngcctcaatgcctnaaagtttttattgagctgaacaggaccttcagtacctcctganggtgaacccagaaatgcatt

SEQ ID NO: 614907 - DNA, 305 bp, Homo sapiens
cccatcgccaactaatcgtacgaacaccacaccgtgatcggcttggggccgttatggccggcaaaacaccgcgcattggggaaagcccctttgttgcgcaggatgtcgataatgacgcgataacgcccttcgacatgcaggcgatcgatcgcctgcgcgaaaatccgggagtactcgaccccgggatgcggtgagtctacgtccatgtccgcccactacccccgccaagcgccgatttccagcggctttccccgatctacgtgatcatacctatcggttatagaatatccagccgcgcagagttt

SEQ ID NO: 614908 - DNA, 923 bp, Homo sapiens
  misc_feature (193)..(193): n is a, c, g, or t
atacagaatattaagaaaatgaagtaactgattttctaaaaaaaaaaaaaaaaaaaaatttctactttttaacccaaagtttgtcccattggcaggtttggcaaggttggggggtaaagaccgaaaattttttccgtaaccaatattgtcgtggacctcttcaacgatggctaataggggcctggacctggangtggctggctatcttggaattgtggcacagcgtccacttaccctttttttttttttttttttaaagtgttttcccccttccgggaaaccaccctttggtggctctgtgtcccctcagggggacccaattgtgtctgtgcgcgtccccccttgtgggggtttaaccgcgccctttaaattttttcctacccttctcacaaaagggggggggggggacaaactagcgggcctctgggcacacaatagctttgtaagaaaagccttcttcccctttaaaaaacgggtcctttactttcaacttatcaccctataaaccccggggttcgaaatttcccaggggttacctgcacccttttttccaaccacttcttgaagaagattgtcatccctggtgtggagcgacaaacaaatgcgctttaattagttcgcgcaggggggacttttcttgcccccaaattttttgagcccaaccaccagtgaggaaacgggctgggagaaaaaaaatttatgcccggggtttggaaagggccaatatccctataaaataactggggtcacaaaaggggggggacgcgatattacggtccggacccaatttttgtggaatccccgtgtttatggtccttacaccctaatggctcggacacattcacacgaatacagaccggggaaccgaccccaggattgagtaccccacgttttgacctgtggtcgacgaagggtcacaaatt

SEQ ID NO: 614909 - DNA, 144 bp, Homo sapiens
gtaccggtgttatcgatgcacacaactaagtaaaacattacattctagacccccttacaactagatatggccggctagatgcagtggctcacgcctgtaatcccagcacttgggaggctccctcagtggtggcatcgataaaca

SEQ ID NO: 614910 - DNA, 686 bp, Homo sapiens
ggcttaatcactttttttttttggaggtggagtctcgctctgtcgcccaagctggagtgcaagggtgcgatttgggctcactgcaacctccacctcccgggttcaagcgattctccggcctcagcctcctaagtagctgggattacaggggtgtgccatcacgcctggctaattttggtatttttagtagagatggggtttcaccatgtgggttaggcgggttttaaactcctgacctcgtgatctgcccgcctcggcctcccaaagtgtggggattacaggcgtgagccagggcgcccgaccagggcttaatcactttatatatttatggtaatttcaattggtatttttggagatggagtctggctctgtgtgcccaggctggagtatagtggtgtgatctcagctcaatgaacctccgcctcctggttcaagtgattctcctgcctcagccttccaagtagctggacctacgggcgtgtgccaccacaagtgctaatttggtatttcagtcaaagatggggtttcccatgtgggccacggctgtcttggaactcctggaccttaagaaatccaccaactgcggcctccaaagtgctggcattcccggggtgaccaacaaatccaggcctttatttttttatacttagtggaaaccgatattcttcaagaacatggacgggctg

SEQ ID NO: 614911 - DNA, 407 bp, Homo sapiens
ccccccccccccctttggggggaagggttaaaaccccttgccacttttaaacccaggtaaaagcaattttgccgggtttcctgaaaacacaggggcttttcaaaaaaccgggttgggttatttaccttaaacaacttatttaattaactaaatggatatcccaagcattccatgtttatcctgttgctcagtgaatcctcaaatcgttaatttggtagattctcttttttgtcttcatactattatttcttttagcttttaaaaaaattgtgtactgcctacaggtctttatggaagtttcacctttctttgtgtcgcactggcatcggctgtataatttttgcagctagaccacattttaaaaaaatctacatttttggaactagtaaaagatacttatttgtgtt

SEQ ID NO: 614912 - DNA, 1235 bp, Homo sapiens
cgtcatctactctaccatctttgcaggtcacactcatcacagcgtctaagctcgcatctgattatttcacctgagataggcctaggaaattgaaacatgctaggcttgttattcacacgttacgtaactcaataagaaataaacactctcgtatccacagaatgcatgctcatcaaagtatttcctcagcagcaacgtcaaccgcataccataatccttctaactagcatatcgctcttgcaacaaatagtactctccggacaatggaagcgcataaccaatcactaccaaatcaattactcatcattaataatcataatggcgtagtagcagataaaactaggaatagccccctttcactttctgagtcccatgaggttacccaatggcgacctcctctgacaatctcggcctgcttcttcgtcacatgagcagaaagactagcccctcatcgtcaatcatatagccagatctctccgcgtacactaaaacagtaaagcctatctcctcacgtctactcagatactggagtcgcatcatagcagggcacggtcgacggtggattccagtagccagaacccagactagcgcacaaagtcttagcgatacttccatctaattacccactatacgggatcgacttcaatatcgcgggttcctaccctgtaacacactccttagacaatacacccattactttacctttctaactcattatattatttaatcctaaactaatcacccgcatttgccctaacttaactcaaacttaaacctccaaggcgacgccaagaaaaccttaataacttaattctcggcaccttgtagatacagtctaatgcttgcactaaagcaccctttaaatttcaagatccagcccaatccttctcccttaagtagtgccatgaccccgggctaagcgcggcataatggccaaatgggtgcaatcatcggaacaaggttttctctacatagcgaagtgccattaaaatccccacccattatttgcaacaccagttcaccccgcgtttcagtcgtcattttagcccattgccccatcattattcgccctgcatcactaacgacccgaattgtagagccgaaaacacaggcggtgagtatcccataccacccctcggcaagaggaacaatagcgacatacgcacatcctcccttcagtctctatagcaacacgggggtgacccaccttacggactcactctctggctatgcaa

SEQ ID NO: 614913 - DNA, 299 bp, Homo sapiens
  misc_feature (144)..(144): n is a, c, g, or t
gatgaaggtaagagtgtcacactctgagaatgtacgccacaagaaggtcgtgtgacagatgctactgagacacgatacattagtggaaacaagatgagacgatcactggttcaagttgatgcgtcagcaatggccagactcaancagagaacatcaagcagatgtaagaagctacaccatcacaggtttacaaacaggcactgactacaagatctatcttgtacaccttgaatgacaatgctcggagctcccctgttggtcatcgacgcctccactcccattgatgcaccatccaacct

SEQ ID NO: 614914 - DNA, 122 bp, Homo sapiens
cctgggtgtatttaaaaaaaactaaggcagaaggctttggaagagttagaagaattggaaggccttaaatatagtagcttagttgaaaaatgtgaaggactttcgtaacggaagtatgtagt

SEQ ID NO: 614915 - DNA, 262 bp, Homo sapiens
ctcgtgcttgatgcaggtgctgccttcctgacttcttctctgtgaaagtctttgtaatttgttaagtatatagtagggagatacttttgacataagatcaaactttcagttatctctactatctcaactttaatcagagttcaatttgcttatttatgtcatgattggctcagtggtttccccagttaatccggttgattgttacccttgtgtcaggactttatttgatgttcatcatctcaggtttgcccctgagagcccc

SEQ ID NO: 614916 - DNA, 7045 bp, Homo sapiens
cctcccaactggtgactggttagtgatgaggctgtgtgcttctgagctgggcatccgaaggcatccttggggaagctgagggcacgaggaggggctgccagactccgggagctgctgcctggctgggattcctacacaatgcgttgcctggctccacgccctgctgggtcctacctgtcagagccccaaggcagctcacagtgtgccaccatggagttggggcccctagaaggtggctacctggagcttcttaacagcgatgctgaccccctgtgcctctaccacttctatgaccagatggacctggctggagaagaagagattgagctctactcagaacccgacacagacaccatcaactgcgaccagttcagcaggctgttgtgtgacatggaaggtgatgaagagaccagggaggcttatgccaatatcgcggaactggaccagtatgtcttccaggactcccagctggagggcctgagcaaggacattttcaagagcacataggaccagatgaagtgatcggtgagagtatggagatgccagcagaagttgggcagaaaagtcagaaaagacccttcccagaggagcttccggcagacctgaagcactggaagccagctgagccccccactgtggtgactggcagtctcctagtgggaccagtgagcgactgctccaccctgccctgcctgccactgcctgcgctgttcaaccaggagccagcctccggccagatgcgcctggagaaaaccgaccagattcccatgcctttctccagttcctcgttgagctgcctgaatctccctgagggacccatccagtttgtccccaccatctccactctgccccatgggctctggcaaatctctgaggctggaacaggggtctccagtatattcatctaccatggtgaggtgccccaggccagccaagtaccccctcccagtggattcactgtccacggcctcccaacatctccagaccggccaggctccaccagccccttcgctccatcagccactgacctgcccagcatgcctgaacctgccctgacctcccgagcaaacatgacagagcacaagacgtcccccacccaatgcccggcagctggagaggtctccaacaagcttccaaaatggcctgagccggtggagcagttctaccgctcactgcaggacacgtatggtgccgagcccgcaggcccggatggcatcctagtggaggtggatctggtgcaggccaggctggagaggagcagcagcaagagcctggagcgggaactggccaccccggactgggcagaacggcagctggcccaaggaggcctggctgaggtgctgttggctgccaaggagcaccggcggccgcgtgagacacgagtgattgctgtgctgggcaaagctggtcagggcaagagctattgggctggggcagtgagccgggcctgggcttgtggccggcttccccagtacgactttgtcttctctgtcccctgccattgcttgaaccgtccgggggatgcctatggcctgcaggatctgctcttctccctgggcccacagccactcgtggcggccgatgaggttttcagccacatcttgaagagacctgaccgcgttctgctcatcctagacgccttcgaggagctggaagcgcaagatggcttcctgcacagcacgtgcggaccggcaccggcggagccctgctccctccgggggctgctggccggccttttccagaagaagctgctccgaggttgcaccctcctcctcacagcccggccccggggccgcctggtccagagcctgagcaaggccgacgccctatttgagctgtccggcttctccatggagcaggcccaggcatacgtgatgcgctactttgagagctcagggatgacagagcaccaagacagagccctgacgctcctccgggaccggccacttcttctcagtcacagccacagccctactttgtgccgggcagtgtgccagctctcagaggccctgctggagcttggggaggacgccaagctgccctccacgctcacgggactctatgtcggcctgctgggccgtgcagccctcgacagcccccccggggccctggcagagctggccaagctggcctgggagctgggccgcagacatcaaagtaccctacaggaggaccagttcccatccgcagacgtgaggacctgggcgatggccaaaggcttagtccaacacccaccgcgggccgcagagtccgagctggccttccccagcttcctcctgcaatgcttcctgggggccctgtggctggctctgagtggcgaaatcaaggacaaggagctcccgcagtacctagcattgaccccaaggaagaagaggccctatgacaactggctggagggcgtgccacgctttctggctgggctgatcttccagcctcccgcccgctgcctgggagccctactcgggccatcggcggctgcctcggtggacaggaagcagaaggtgcttgcgaggtacctgaagcggctgcagccggggacactgcgggcgcggcagctgcttgagctgctgcactgcgcccacgaggccgaggaggctggaatttggcagcacgtggtacaggagctccccggccgcctctcttttctgggcacccgcctcacgcctcctgatgcacatgtactgggcaaggccttggaggcggcgggccaagacttctccctggacctccgcagcactggcatttgcccctctggattggggagcctcgtgggactcagctgtgtcacccgtttcagggctgccttgagcgacacggtggcgctgtgggagtccctgcggcagcatggggagaccaagctacttcaggcagcagaggagaagttcaccatcgagcctttcaaagccaagtccctgaaggatgtggaagacctgggaaagcttgtgcagactcagaggacgagaagttcctcggaagacacagctggggagctccctgctgttcgggacctaaagaaactggagtttgcgctgggccctgtctcaggcccccaggctttccccaaactggtgcggatcctcacggccttttcctccctgcagcatctggacctggatgcgctgagtgagaacaagatcggggacgagggtgtctcgcagctctcagccaccttcccccagctgaagtccttggaaaccctcaatctgtcccagaacaacatcactgacctgggtgcctacaaactcgccgaggccctgccttcgctcgctgcatccctgctcaggctaagcttgtacaataactgcatctgcgacgtgggagccgagagcttggctcgtgtgcttccggacatggtgtccctccgggtgatggacgtccagtacaacaagttcacggctgccggggcccagcagctcgctgccagccttcggaggtgtcctcatgtggagacgctggcgatgtggacgcccaccatcccattcagtgtccaggaacacctgcaacaacaggattcacggatcagcctgagatgatcccagctgtgctctggacaggcatgttctctgaggacactaaccacgctggaccttgaactgggtacttgtggacacagctcttctccaggctgtatcccatgagcctcagcatcctggcacccggcccctgctggttcagggttggcccctgcccggctgcggaatgaaccacatcttgctctgctgacagacacaggcccggctccaggctcctttagcgcccagttgggtggatgcctggtggcagctgcggtccacccaggagccccgaggccttctctgaaggacattgcggacagccacggccaggccagagggagtgacagaggcagccccattctgcctgcccaggcccctgccaccctggggagaaagtacttctttttttttatttttagacagagtctcactgttgcccaggctggcgtgcagtggtgcgatctgggttcactgcaacctccgcctcttgggttcaagcgattcttctgcttcagcctcccgagtagctgggactacaggcacccaccatcatgtctggctaatttttcatttttagtagagacagggttttgccatgttggccaggctggtctcaaactcttgacctcaggtgatccacccacctcagcctcccaaagtgctgggattacaagcgtgagccactgcaccgggccacagagaaagtacttctccaccctgctctccgaccagacaccttgacagggcacaccgggcactcagaagacactgatgggcaacccccagcctgctaattccccagattgcaacaggctgggcttcagtggcagctgcttttgtctatgggactcaatgcactgacattgttggccaaagccaaagctaggcctggccagatgcaccagcccttagcagggaaacagctaatgggacactaatggggcggtgagaggggaacagactggaagcacagcttcatttcctgtgtcttttttcactacattataaatgtctctttaatgtcacaggcaggtcccagggtttgagttcataccctgttaccattttggggtacccactgctctggttatctaatatgtaacaagccaccccaaatcatagtggcttaaaacaacactcacatttattctgctcacatatctgtcatttgagcagggctcagcggggacagctccttctgtcctactctgtgtcaggtggggcagcttgagggttgggctggtgtcacctgaagactcattcttctgtacgtctgacaggcaatgctggctgttggctgggggcctcagtgcactacggaatagttggctaggacccctccatgtgggctagttgggcttcctcataagtatggtggctgggttggagggtgtcccaaaaagaaaggaggggatagagagagaccacttttcataacctagccttagaagtcacacagtattacttctgctacatatatatgttttaagaggcagggtctcactctgtgcccccagtctggaatccagtggtatgatcacggctcactgcagcctcaacctcctgggctaagtgatcctcccacctcagcctcccgaatagctgggactacaggtgtgagtcaccaaagcccagttaatctttagttttcatttttgtagagccagggtctcactatgttgcccaggcaggtcttgaactcctggcctcaagtgattctcctgcctcagcctcccaaagtgctgggattacaggtgtgaaccaccacacccagcccacttctgccatattctgttggccagtgtgacaaggattgctactgtcctacccaccctcctttccaccacatgtgcacatgcacgtgtgtgcacgtacacacacatacacacacacgcgtgcacacaccagagcccaccttggctcaagtcctcttttctgagaggacttttctttgtggcttcctaaaattcagtggaaaattaattgtttggggatgagaaaggttgaagcaccaaaagcttaccaaggggaatgtttgcctctgcctctgacacacagctctgtcctgggagtgagctggtttttagcggagacggagtcccaccttggctgcagggagtcgaaaggacttggaagctccgctttctacccagcgagcccctggtggcagtgggagctgcctgttcagctccagctcaccagccccagtgcccacaggatcagtctgattcccaagctctgctcctctccccagcaagtgagagctgggtgtcaagagggtctgaggaatccagacccggctgcgtggttgatgatctttgcagacaggcaagcacctcctgcctcgaactggctgcaaagggtatcaggtgctgccatccaggttcagcttgtaaatagctcaggtgtaccctgcacttgcagactctacagaggccatgggctcctgtgtgtgcggctacaggagtgagcactgaggtgtgctctgatcatccactgtgccatgtgccaggtttttggtctgacccactgcttttggtctgtgtgatgatgaaatgaggtcagagcctcgagttattaacactaacgatttgttaatgatagctactgtttattattttatttaatttttttgagacagagttttcactcttatgcccacgctggagtgcagtgagccgagatcacgccactgcactatagcctgggtgacagagtgagactctgtctcaaaaaaacacaaaagtttctcttttcaaaacattttactttaaaaggagccaatttaaagaaaactgttaatagttcaggtaacaggcagatacaggaaaagctgctgacagtgttgtatgaggtttgaggattttgatccaagctggtcccactcagtccatagcagagaatgaaagggcccagagagggtggtgacctctgcctgaagtcacacagtgagtcgaggacagggaggtgaccccaggtttctatgtgtagggcgggaggatgttctgggacacagttcaattctcatttgtcacacactttggctattagagatcaaccccttcgctcctgtgtcttgcaatggcagccttggcaaacgctaaatgaaaatcgtgacaacacttgtgttatgaagcatttactttgtgttcaccttgtactactcgaactcatgtcttaactcacttatccctcaaaaacaactctaggaggtagggccaagtaggaccatcatccctgcatttcacatggagctcagagaggttaagcaagccgtgcaaggccacacagctcataaatgcagagccaggatttgaacccccgtggcctgaccccaaagccgaaaccactcggcactgcaggttcgtcccttttctctgagatgggggtatccaatcttttggcttccctgggccacagtggaagaactgtctggggccacatataaaatatactaatgatagctcatgagctaaaaaataaaacaaaatcacacacacacacacaaaaaaacacaaaccaaaaaaaaa

SEQ ID NO: 614917 - DNA, 4541 bp, Homo sapiens
cctcccaactggtgactggttagtgatgaggctgtgtgcttctgagctgggcatccgaaggcatccttggggaagctgagggcacgaggaggggctgccagactccgggagctgctgcctggctgggattcctacacaatgcgttgcctggctccacgccctgctgggtcctacctgtcagagccccaaggcagctcacagtgtgccaccatggagttggggcccctagaaggtggctacctggagcttcttaacagcgatgctgaccccctgtgcctctaccacttctatgaccagatggacctggctggagaagaagagattgagctctactcagaacccgacacagacaccatcaactgcgaccagttcagcaggctgttgtgtgacatggaaggtgatgaagagaccagggaggcttatgccaatatcgcggaactggaccagtatgtcttccaggactcccagctggagggcctgagcaaggacattttcaagagcacataggaccagatgaagtgatcggtgagagtatggagatgccagcagaagttgggcagaaaagtcagaaaagacccttcccagaggagcttccggcagacctgaagcactggaagccagctgagccccccactgtggtgactggcagtctcctagtgggaccagtgagcgactgctccaccctgccctgcctgccactgcctgcgctgttcaaccaggagccagcctccggccagatgcgcctggagaaaaccgaccagattcccatgcctttctccagttcctcgttgagctgcctgaatctccctgagggacccatccagtttgtccccaccatctccactctgccccatgggctctggcaaatctctgaggctggaacaggggtctccagtatattcatctaccatggtgaggtgccccaggccagccaagtaccccctcccagtggattcactgtccacggcctcccaacatctccagaccggccaggctccaccagccccttcgctccatcagccactgacctgcccagcatgcctgaacctgccctgacctcccgagcaaacatgacagagcacaagacgtcccccacccaatgcccggcagctggagaggtctccaacaagcttccaaaatggcctgagccggtggagcagttctaccgctcactgcaggacacgtatggtgccgagcccgcaggcccggatggcatcctagtggaggtggatctggtgcaggccaggctggagaggagcagcagcaagagcctggagcgggaactggccaccccggactgggcagaacggcagctggcccaaggaggcctggctgaggtgctgttggctgccaaggagcaccggcggccgcgtgagacacgagtgattgctgtgctgggcaaagctggtcagggcaagagctattgggctggggcagtgagccgggcctgggcttgtggccggcttccccagtacgactttgtcttctctgtcccctgccattgcttgaaccgtccgggggatgcctatggcctgcaggatctgctcttctccctgggcccacagccactcgtggcggccgatgaggttttcagccacatcttgaagagacctgaccgcgttctgctcatcctagacgccttcgaggagctggaagcgcaagatggcttcctgcacagcacgtgcggaccggcaccggcggagccctgctccctccgggggctgctggccggccttttccagaagaagctgctccgaggttgcaccctcctcctcacagcccggccccggggccgcctggtccagagcctgagcaaggccgacgccctatttgagctgtccggcttctccatggagcaggcccaggcatacgtgatgcgctactttgagagctcagggatgacagagcaccaagacagagccctgacgctcctccgggaccggccacttcttctcagtcacagccacagccctactttgtgccgggcagtgtgccagctctcagaggccctgctggagcttggggaggacgccaagctgccctccacgctcacgggactctatgtcggcctgctgggccgtgcagccctcgacagcccccccggggccctggcagagctggccaagctggcctgggagctgggccgcagacatcaaagtaccctacaggaggaccagttcccatccgcagacgtgaggacctgggcgatggccaaaggcttagtccaacacccaccgcgggccgcagagtccgagctggccttccccagcttcctcctgcaatgcttcctgggggccctgtggctggctctgagtggcgaaatcaaggacaaggagctcccgcagtacctagcattgaccccaaggaagaagaggccctatgacaactggctggagggcgtgccacgctttctggctgggctgatcttccagcctcccgcccgctgcctgggagccctactcgggccatcggcggctgcctcggtggacaggaagcagaaggtgcttgcgaggtacctgaagcggctgcagccggggacactgcgggcgcggcagctgcttgagctgctgcactgcgcccacgaggccgaggaggctggaatttggcagcacgtggtacaggagctccccggccgcctctcttttctgggcacccgcctcacgcctcctgatgcacatgtactgggcaaggccttggaggcggcgggccaagacttctccctggacctccgcagcactggcatttgcccctctggattggggagcctcgtgggactcagctgtgtcacccgtttcagggctgccttgagcgacacggtggcgctgtgggagtccctgcggcagcatggggagaccaagctacttcaggcagcagaggagaagttcaccatcgagcctttcaaagccaagtccctgaaggatgtggaagacctgggaaagcttgtgcagactcagaggacgagaagttcctcggaagacacagctggggagctccctgctgttcgggacctaaagaaactggagtttgcgctgggccctgtctcaggcccccaggctttccccaaactggtgcggatcctcacggccttttcctccctgcagcatctggacctggatgcgctgagtgagaacaagatcggggacgagggtgtctcgcagctctcagccaccttcccccagctgaagtccttggaaaccctcaatctgtcccagaacaacatcactgacctgggtgcctacaaactcgccgaggccctgccttcgctcgctgcatccctgctcaggctaagcttgtacaataactgcatctgcgacgtgggagccgagagcttggctcgtgtgcttccggacatggtgtccctccgggtgatggacgtccagtacaacaagttcacggctgccggggcccagcagctcgctgccagccttcggaggtgtcctcatgtggagacgctggcgatgtggacgcccaccatcccattcagtgtccaggaacacctgcaacaacaggattcacggatcagcctgagatgatcccagctgtgctctggacaggcatgttctctgaggacactaaccacgctggaccttgaactgggtacttgtggacacagctcttctccaggctgtatcccatgagcctcagcatcctggcacccggcccctgctggttcagggttggcccctgcccggctgcggaatgaaccacatcttgctctgctgacagacacaggcccggctccaggctcctttagcgcccagttgggtggatgcctggtggcagctgcggtccacccaggagccccgaggccttctctgaaggacattgcggacagccacggccaggccagagggagtgacagaggcagccccattctgcctgcccaggcccctgccaccctggggagaaagtacttctttttttttatttttagacagagtctcactgttgcccaggctggcgtgcagtggtgcgatctgggttcactgcaacctccgcctcttgggttcaagcgattcttctgcttcagcctcccgagtagctgggactacaggcacccaccatcatgtctggctaatttttcatttttagtagagacagggttttgccatgttggccaggctggtctcaaactcttgacctcaggtgatccacccacctcagcctcccaaagtgctgggattacaagcgtgagccactgcaccgggccacagagaaagtacttctccaccctgctctccgaccagacaccttgacagggcacaccgggcactcagaagacactgatgggcaacccccagcctgctaattccccagattgcaacaggctgggcttcagtggcagctgcttttgtctatgggactcaatgcactgacattgttggccaaagccaaagctaggcctggccagatgcaccagcccttagcagggaaacagctaatgggacactaatggggcggtgagaggggaacagactggaagcacagcttcatttcctgtgtcttttttcactacattataaatgtctctttaatgtcac

SEQ ID NO: 614918 - DNA, 289 bp, Homo sapiens
  misc_feature (9)..(9): n is a, c, g, or t
  misc_feature (101)..(101): n is a, c, g, or t
ggcgctcantggatccaatacaccagactcccgggagcgaaacgcccgcaggtgctcaaagaacttaaaacagaactgccattagaccccacaatctcatnaaggatgttatagatatatccaaaagaaaataaatcattcttcaaaaagacacatacactaacacgttcatggagcactattcacacagcaaagactcgatcaactcacacactcatgaatgcggatcgaaatagaagatgtggtatgcatacaccacgaaatactacgagccataaaaggcgaaatc

SEQ ID NO: 614919 - DNA, 285 bp, Homo sapiens
gatgcggtacataaagagactcatcacatgctcagacaaaaaggaagtagttatggaagagcacaaagacgattgaggacatatatttatcgaatttatccaaaataaatttctagaatgaagaaaactttttttttttttttaaagggaaagccacccaaagattagggagtaagcctttatttaaaatgtctcaattttaagttttggtcaagccgtaggcaaaattagaggacggcatttttcttagaggtggtggcacttgattggttacgggggatcccg

SEQ ID NO: 614920 - DNA, 525 bp, Homo sapiens
  misc_feature (29)..(29): n is a, c, g, or t
  misc_feature (67)..(67): n is a, c, g, or t
ggcaggtgcctgaggtcccagctactcgngaggctgaggcagaagaatcgcttgagctagggaggcngaggttgcagtgagccgagatcacgccactgcactatagcctgggtgacagagtgagactctgtctcaaaaaaacacaaaagtttctcttttcaaaacattttactttaaaaggagccaatttaaagaaaactgttaatagttcaggtaacaggcagatacaggaaaagctgctgacagtgttgtatgaggtttgaggattttgatccaagctggtcccactcagtccatagcagagaatgaaagggcccagagagggtggtgacctctgcctgaagtcacacagtgagtcgaggacagggaggtgaccccaggtttctatgtgtagggcgggaggatgttctgggacacagttcaattctcatttgtcacacactttggctattagagatcaaccccttcgctcctgtgtcttgcaatggcagccttggcaaacgctaaatgaaaatcgtgacaaca

SEQ ID NO: 614921 - DNA, 7921 bp, Homo sapiens
cctcccaactggtgactggttagtgatgaggctgtgtgcttctgagctgggcatccgaaggcatccttggggaagctgagggcacgaggaggggctgccagactccgggagctgctgcctggctgggattcctacacaatgcgttgcctggctccacgccctgctgggtcctacctgtcagagccccaaggcagctcacagtgtgccaccatggagttggggcccctagaaggtggctacctggagcttcttaacagcgatgctgaccccctgtgcctctaccacttctatgaccagatggacctggctggagaagaagagattgagctctactcagaacccgacacagacaccatcaactgcgaccagttcagcaggctgttgtgtgacatggaaggtgatgaagagaccagggaggcttatgccaatatcgcggaactggaccagtatgtcttccaggactcccagctggagggcctgagcaaggacattttcaagagcacataggaccagatgaagtgatcggtgagagtatggagatgccagcagaagttgggcagaaaagtcagaaaagacccttcccagaggagcttccggcagacctgaagcactggaagccagctgagccccccactgtggtgactggcagtctcctagtgggaccagtgagcgactgctccaccctgccctgcctgccactgcctgcgctgttcaaccaggagccagcctccggccagatgcgcctggagaaaaccgaccagattcccatgcctttctccagttcctcgttgagctgcctgaatctccctgagggacccatccagtttgtccccaccatctccactctgccccatgggctctggcaaatctctgaggctggaacaggggtctccagtatattcatctaccatggtgaggtgccccaggccagccaagtaccccctcccagtggattcactgtccacggcctcccaacatctccagaccggccaggctccaccagccccttcgctccatcagccactgacctgcccagcatgcctgaacctgccctgacctcccgagcaaacatgacagagcacaagacgtcccccacccaatgcccggcagctggagaggtctccaacaagcttccaaaatggcctgagccggtggagcagttctaccgctcactgcaggacacgtatggtgccgagcccgcaggcccggatggcatcctagtggaggtggatctggtgcaggccaggctggagaggagcagcagcaagagcctggagcgggaactggccaccccggactgggcagaacggcagctggcccaaggaggcctggctgaggtgctgttggctgccaaggagcaccggcggccgcgtgagacacgagtgattgctgtgctgggcaaagctggtcagggcaagagctattgggctggggcagtgagccgggcctgggcttgtggccggcttccccagtacgactttgtcttctctgtcccctgccattgcttgaaccgtccgggggatgcctatggcctgcaggatctgctcttctccctgggcccacagccactcgtggcggccgatgaggttttcagccacatcttgaagagacctgaccgcgttctgctcatcctagacgccttcgaggagctggaagcgcaagatggcttcctgcacagcacgtgcggaccggcaccggcggagccctgctccctccgggggctgctggccggccttttccagaagaagctgctccgaggttgcaccctcctcctcacagcccggccccggggccgcctggtccagagcctgagcaaggccgacgccctatttgagctgtccggcttctccatggagcaggcccaggcatacgtgatgcgctactttgagagctcagggatgacagagcaccaagacagagccctgacgctcctccgggaccggccacttcttctcagtcacagccacagccctactttgtgccgggcagtgtgccagctctcagaggccctgctggagcttggggaggacgccaagctgccctccacgctcacgggactctatgtcggcctgctgggccgtgcagccctcgacagcccccccggggccctggcagagctggccaagctggcctgggagctgggccgcagacatcaaagtaccctacaggaggaccagttcccatccgcagacgtgaggacctgggcgatggccaaaggcttagtccaacacccaccgcgggccgcagagtccgagctggccttccccagcttcctcctgcaatgcttcctgggggccctgtggctggctctgagtggcgaaatcaaggacaaggagctcccgcagtacctagcattgaccccaaggaagaagaggccctatgacaactggctggagggcgtgccacgctttctggctgggctgatcttccagcctcccgcccgctgcctgggagccctactcgggccatcggcggctgcctcggtggacaggaagcagaaggtgcttgcgaggtacctgaagcggctgcagccggggacactgcgggcgcggcagctgcttgagctgctgcactgcgcccacgaggccgaggaggctggaatttggcagcacgtggtacaggagctccccggccgcctctcttttctgggcacccgcctcacgcctcctgatgcacatgtactgggcaaggccttggaggcggcgggccaagacttctccctggacctccgcagcactggcatttgcccctctggattggggagcctcgtgggactcagctgtgtcacccgtttcaggtggggtgaggggcttggaagagacatccttgtgttgggcattaactgcggtcttggtgccaagcccagtgctctgtggggtccttttagtatgcagagcagccgggtggggcagaatggattctctccatttttaagatgaggatgttgaggctcagagaggggcagccacttgccacacagcaagtgagaggcaatggcattctcccagtcaatatttgaaggcccgccatgtgccagtcactggggtatgtctagaatctgagactgacctgggctcaaatttgttttattctttccaccccctgagcacgccaccgttttcttatgctaagagtaaagccatggcctccccttggactctctgcctccattctctcctcttccactccattttgtattcagcaaccagaccaatcttctcagaacttgaatctgattgtatcccatccctgcttacaatccttcagggacactccaccactgtcaggatgaaggctaaatttcttaatttggtttcattaagtcggtctgcaatctgcttgagcatttcagcttaatcgccagaggattgcttccatatttccccctaaacatactttacccaagctgtaaggtcctacataattgtgccaataatttagcagtgagcttcctggtagccgaagcaaaaagggaaagaaaaccactgtgtgagttgtgagaaagtaggaatcaataaaggctggagtggtcgctgccttgagcgacacggtggcgatggaaggctttctgggaaaggtagaggttgagctaaggaaagaaagtattttaataggtaggaggacccttcatggagctgcccttccattaaggtctagcctggtcaccgtgcctgggtctgaggccctccctccacaggctgtgggagtccctgcggcagcatggggagaccaagctacttcaggcagcagaggagaagttcaccatcgagcctttcaaagccaagtccctgaaggatgtggaagacctgggaaagcttgtgcagactcagaggacgagaagttcctcggaagacacagctggggagctccctgctgttcgggacctaaagaaactggagtttgcgctgggccctgtctcaggcccccaggctttccccaaactggtgcggatcctcacggccttttcctccctgcagcatctggacctggatgcgctgagtgagaacaagatcggggacgagggtgtctcgcagctctcagccaccttcccccagctgaagtccttggaaaccctcaatctgtcccagaacaacatcactgacctgggtgcctacaaactcgccgaggccctgccttcgctcgctgcatccctgctcaggctaagcttgtacaataactgcatctgcgacgtgggagccgagagcttggctcgtgtgcttccggacatggtgtccctccgggtgatggacgtccagtacaacaagttcacggctgccggggcccagcagctcgctgccagccttcggaggtgtcctcatgtggagacgctggcgatgtggacgcccaccatcccattcagtgtccaggaacacctgcaacaacaggattcacggatcagcctgagatgatcccagctgtgctctggacaggcatgttctctgaggacactaaccacgctggaccttgaactgggtacttgtggacacagctcttctccaggctgtatcccatgagcctcagcatcctggcacccggcccctgctggttcagggttggcccctgcccggctgcggaatgaaccacatcttgctctgctgacagacacaggcccggctccaggctcctttagcgcccagttgggtggatgcctggtggcagctgcggtccacccaggagccccgaggccttctctgaaggacattgcggacagccacggccaggccagagggagtgacagaggcagccccattctgcctgcccaggcccctgccaccctggggagaaagtacttctttttttttatttttagacagagtctcactgttgcccaggctggcgtgcagtggtgcgatctgggttcactgcaacctccgcctcttgggttcaagcgattcttctgcttcagcctcccgagtagctgggactacaggcacccaccatcatgtctggctaatttttcatttttagtagagacagggttttgccatgttggccaggctggtctcaaactcttgacctcaggtgatccacccacctcagcctcccaaagtgctgggattacaagcgtgagccactgcaccgggccacagagaaagtacttctccaccctgctctccgaccagacaccttgacagggcacaccgggcactcagaagacactgatgggcaacccccagcctgctaattccccagattgcaacaggctgggcttcagtggcagctgcttttgtctatgggactcaatgcactgacattgttggccaaagccaaagctaggcctggccagatgcaccagcccttagcagggaaacagctaatgggacactaatggggcggtgagaggggaacagactggaagcacagcttcatttcctgtgtcttttttcactacattataaatgtctctttaatgtcacaggcaggtcccagggtttgagttcataccctgttaccattttggggtacccactgctctggttatctaatatgtaacaagccaccccaaatcatagtggcttaaaacaacactcacatttattctgctcacatatctgtcatttgagcagggctcagcggggacagctccttctgtcctactctgtgtcaggtggggcagcttgagggttgggctggtgtcacctgaagactcattcttctgtacgtctgacaggcaatgctggctgttggctgggggcctcagtgcactacggaatagttggctaggacccctccatgtgggctagttgggcttcctcataagtatggtggctgggttggagggtgtcccaaaaagaaaggaggggatagagagagaccacttttcataacctagccttagaagtcacacagtattacttctgctacatatatatgttttaagaggcagggtctcactctgtgcccccagtctggaatccagtggtatgatcacggctcactgcagcctcaacctcctgggctaagtgatcctcccacctcagcctcccgaatagctgggactacaggtgtgagtcaccaaagcccagttaatctttagttttcatttttgtagagccagggtctcactatgttgcccaggcaggtcttgaactcctggcctcaagtgattctcctgcctcagcctcccaaagtgctgggattacaggtgtgaaccaccacacccagcccacttctgccatattctgttggccagtgtgacaaggattgctactgtcctacccaccctcctttccaccacatgtgcacatgcacgtgtgtgcacgtacacacacatacacacacacgcgtgcacacaccagagcccaccttggctcaagtcctcttttctgagaggacttttctttgtggcttcctaaaattcagtggaaaattaattgtttggggatgagaaaggttgaagcaccaaaagcttaccaaggggaatgtttgcctctgcctctgacacacagctctgtcctgggagtgagctggtttttagcggagacggagtcccaccttggctgcagggagtcgaaaggacttggaagctccgctttctacccagcgagcccctggtggcagtgggagctgcctgttcagctccagctcaccagccccagtgcccacaggatcagtctgattcccaagctctgctcctctccccagcaagtgagagctgggtgtcaagagggtctgaggaatccagacccggctgcgtggttgatgatctttgcagacaggcaagcacctcctgcctcgaactggctgcaaagggtatcaggtgctgccatccaggttcagcttgtaaatagctcaggtgtaccctgcacttgcagactctacagaggccatgggctcctgtgtgtgcggctacaggagtgagcactgaggtgtgctctgatcatccactgtgccatgtgccaggtttttggtctgacccactgcttttggtctgtgtgatgatgaaatgaggtcagagcctcgagttattaacactaacgatttgttaatgatagctactgtttattattttatttaatttttttgagacagagttttcactcttatgcccacgctggagtgcagtgagccgagatcacgccactgcactatagcctgggtgacagagtgagactctgtctcaaaaaaacacaaaagtttctcttttcaaaacattttactttaaaaggagccaatttaaagaaaactgttaatagttcaggtaacaggcagatacaggaaaagctgctgacagtgttgtatgaggtttgaggattttgatccaagctggtcccactcagtccatagcagagaatgaaagggcccagagagggtggtgacctctgcctgaagtcacacagtgagtcgaggacagggaggtgaccccaggtttctatgtgtagggcgggaggatgttctgggacacagttcaattctcatttgtcacacactttggctattagagatcaaccccttcgctcctgtgtcttgcaatggcagccttggcaaacgctaaatgaaaatcgtgacaacacttgtgttatgaagcatttactttgtgttcaccttgtactactcgaactcatgtcttaactcacttatccctcaaaaacaactctaggaggtagggccaagtaggaccatcatccctgcatttcacatggagctcagagaggttaagcaagccgtgcaaggccacacagctcataaatgcagagccaggatttgaacccccgtggcctgaccccaaagccgaaaccactcggcactgcaggttcgtcccttttctctgagatgggggtatccaatcttttggcttccctgggccacagtggaagaactgtctggggccacatataaaatatactaatgatagctcatgagctaaaaaataaaacaaaatcacacacacacacacaaaaaaacacaaaccaaaaaaaaa

SEQ ID NO: 614922 - DNA, 7513 bp, Homo sapiens
cctcccaactggtgactggttagtgatgaggctgtgtgcttctgagctgggcatccgaaggcatccttggggaagctgagggcacgaggaggggctgccagactccgggagctgctgcctggctgggattcctacacaatgcgttgcctggctccacgccctgctgggtcctacctgtcagagccccaaggcagctcacagtgtgccaccatggagttggggcccctagaaggtggctacctggagcttcttaacagcgatgctgaccccctgtgcctctaccacttctatgaccagatggacctggctggagaagaagagattgagctctactcagaacccgacacagacaccatcaactgcgaccagttcagcaggctgttgtgtgacatggaaggtgatgaagagaccagggaggcttatgccaatatcgcggaactggaccagtatgtcttccaggactcccagctggagggcctgagcaaggacattttcaagagcacataggaccagatgaagtgatcggtgagagtatggagatgccagcagaagttgggcagaaaagtcagaaaagacccttcccagaggagcttccggcagacctgaagcactggaagccagctgagccccccactgtggtgactggcagtctcctagtgggaccagtgagcgactgctccaccctgccctgcctgccactgcctgcgctgttcaaccaggagccagcctccggccagatgcgcctggagaaaaccgaccagattcccatgcctttctccagttcctcgttgagctgcctgaatctccctgagggacccatccagtttgtccccaccatctccactctgccccatgggctctggcaaatctctgaggctggaacaggggtctccagtatattcatctaccatggtgaggtgccccaggccagccaagtaccccctcccagtggattcactgtccacggcctcccaacatctccagaccggccaggctccaccagccccttcgctccatcagccactgacctgcccagcatgcctgaacctgccctgacctcccgagcaaacatgacagagcacaagacgtcccccacccaatgcccggcagctggagaggtctccaacaagcttccaaaatggcctgagccggtggagcagttctaccgctcactgcaggacacgtatggtgccgagcccgcaggcccggatggcatcctagtggaggtggatctggtgcaggccaggctggagaggagcagcagcaagagcctggagcgggaactggccaccccggactgggcagaacggcagctggcccaaggaggcctggctgaggtgctgttggctgccaaggagcaccggcggccgcgtgagacacgagtgattgctgtgctgggcaaagctggtcagggcaagagctattgggctggggcagtgagccgggcctgggcttgtggccggcttccccagtacgactttgtcttctctgtcccctgccattgcttgaaccgtccgggggatgcctatggcctgcaggatctgctcttctccctgggcccacagccactcgtggcggccgatgaggttttcagccacatcttgaagagacctgaccgcgttctgctcatcctagacgccttcgaggagctggaagcgcaagatggcttcctgcacagcacgtgcggaccggcaccggcggagccctgctccctccgggggctgctggccggccttttccagaagaagctgctccgaggttgcaccctcctcctcacagcccggccccggggccgcctggtccagagcctgagcaaggccgacgccctatttgagctgtccggcttctccatggagcaggcccaggcatacgtgatgcgctactttgagagctcagggatgacagagcaccaagacagagccctgacgctcctccgggaccggccacttcttctcagtcacagccacagccctactttgtgccgggcagtgtgccagctctcagaggccctgctggagcttggggaggacgccaagctgccctccacgctcacgggactctatgtcggcctgctgggccgtgcagccctcgacagcccccccggggccctggcagagctggccaagctggcctgggagctgggccgcagacatcaaagtaccctacaggaggaccagttcccatccgcagacgtgaggacctgggcgatggccaaaggcttagtccaacacccaccgcgggccgcagagtccgagctggccttccccagcttcctcctgcaatgcttcctgggggccctgtggctggctctgagtggcgaaatcaaggacaaggagctcccgcagtacctagcattgaccccaaggaagaagaggccctatgacaactggctggagggcgtgccacgctttctggctgggctgatcttccagcctcccgcccgctgcctgggagccctactcgggccatcggcggctgcctcggtggacaggaagcagaaggtgcttgcgaggtacctgaagcggctgcagccggggacactgcgggcgcggcagctgcttgagctgctgcactgcgcccacgaggccgaggaggctggaatttggcagcacgtggtacaggagctccccggccgcctctcttttctgggcacccgcctcacgcctcctgatgcacatgtactgggcaaggccttggaggcggcgggccaagacttctccctggacctccgcagcactggcatttgcccctctggattggggagcctcgtgggactcagctgtgtcacccgtttcaggtggggtgaggggcttggaagagacatccttgtgttgggcattaactgcggtcttggtgccaagcccagtgctctgtggggtccttttagtatgcagagcagccgggtggggcagaatggattctctccatttttaagatgaggatgttgaggctcagagaggggcagccacttgccacacagcaagtgagaggcaatggcattctcccagtcaatatttgaaggcccgccatgtgccagtcactggggtatgtctagaatctgagactgacctgggctcaaatttgttttattctttccaccccctgagcacgccaccgttttcttatgctaagagtaaagccatggcctccccttggactctctgcctccattctctcctcttccactccattttgtattcagcaaccagaccaatcttctcagaacttgaatctgattgtatcccatccctgcttacaatccttcagggacactccaccactgtcaggatgaaggctaaatttcttaatttggtttcattaagtcggtctgcaatctgcttgagcatttcagcttaatcgccagaggattgcttccatatttccccctaaacatactttacccaagctgtaaggtcctacataattgtgccaataatttagcagtgagcttcctggtagccgaagcaaaaagggaaagaaaaccactgtgtgagttgtgagaaagtaggaatcaataaaggctggagtggtcgctgccttgagcgacacggtggcgatggaaggctttctgggaaaggtagaggttgagctaaggaaagaaagtattttaataggtaggaggacccttcatggagctgcccttccattaaggtctagcctggtcaccgtgcctgggtctgaggccctccctccacaggctgtgggagtccctgcggcagcatggggagaccaagctacttcaggcagcagaggagaagttcaccatcgagcctttcaaagccaagtccctgaaggatgtggaagacctgggaaagcttgtgcagactcagaggacgagaagttcctcggaagacacagctggggagctccctgctgttcgggacctaaagaaactggagtttgcgctgggccctgtctcaggcccccaggctttccccaaactggtgcggatcctcacggccttttcctccctgcagcatctggacctggatgcgctgagtgagaacaagatcggggacgagggtgtctcgcagctctcagccaccttcccccagctgaagtccttggaaaccctcaatctgtcccagaacaacatcactgacctgggtgcctacaaactcgccgaggccctgccttcgctcgctgcatccctgctcaggctaagcttgtacaataactgcatctgcgacgtgggagccgagagcttggctcgtgtgcttccggacatggtgtccctccgggtgatggacgtccagtacaacaagttcacggctgccggggcccagcagctcgctgccagccttcggaggtgtcctcatgtggagacgctggcgatgtggacgcccaccatcccattcagtgtccaggaacacctgcaacaacaggattcacggatcagcctgagatgatcccagctgtgctctggacaggcatgttctctgaggacactaaccacgctggaccttgaactgggtacttgtggacacagctcttctccaggctgtatcccatgagcctcagcatcctggcacccggcccctgctggttcagggttggcccctgcccggctgcggaatgaaccacatcttgctctgctgacagacacaggcccggctccaggctcctttagcgcccagttgggtggatgcctggtggcagctgcggtccacccaggagccccgaggccttctctgaaggacattgcggacagccacggccaggccagagggagtgacagaggcagccccattctgcctgcccaggcccctgccaccctggggagaaagtacttctttttttttatttttagacagagtctcactgttgcccaggctggcgtgcagtggtgcgatctgggttcactgcaacctccgcctcttgggttcaagcgattcttctgcttcagcctcccgagtagctgggactacaggcacccaccatcatgtctggctaatttttcatttttagtagagacagggttttgccatgttggccaggctggtctcaaactcttgacctcaggtgatccacccacctcagcctcccaaagtgctgggattacaagcgtgagccactgcaccgggccacagagaaagtacttctccaccctgctctccgaccagacaccttgacagggcacaccgggcactcagaagacactgatgggcaacccccagcctgctaattccccagattgcaacaggctgggcttcagtggcagctgcttttgtctatgggactcaatgcactgacattgttggccaaagccaaagctaggcctggccagatgcaccagcccttagcagggaaacagctaatgggacactaatggggcggtgagaggggaacagactggaagcacagcttcatttcctgtgtcttttttcactacattataaatgtctctttaatgtcacaggcaggtcccagggtttgagttcataccctgttaccattttggggtacccactgctctggttatctaatatgtaacaagccaccccaaatcatagtggcttaaaacaacactcacatttattctgctcacatatctgtcatttgagcagggctcagcggggacagctccttctgtcctactctgtgtcaggtggggcagcttgagggttgggctggtgtcacctgaagactcattcttctgtacgtctgacaggcaatgctggctgttggctgggggcctcagtgcactacggaatagttggctaggacccctccatgtgggctagttgggcttcctcataagtatggtggctgggttggagggtgtcccaaaaagaaaggaggggatagagagagaccacttttcataacctagccttagaagtcacacagtattacttctgctacatatatatgttttaagaggcagggtctcactctgtgcccccagtctggaatccagtggtatgatcacggctcactgcagcctcaacctcctgggctaagtgatcctcccacctcagcctcccgaatagctgggactacaggtgtgagtcaccaaagcccagttaatctttagttttcatttttgtagagccagggtctcactatgttgcccaggcaggtcttgaactcctggcctcaagtgattctcctgcctcagcctcccaaagtgctgggattacaggtgtgaaccaccacacccagcccacttctgccatattctgttggccagtgtgacaaggattgctactgtcctacccaccctcctttccaccacatgtgcacatgcacgtgtgtgcacgtacacacacatacacacacacgcgtgcacacaccagagcccaccttggctcaagtcctcttttctgagaggacttttctttgtggcttcctaaaattcagtggaaaattaattgtttggggatgagaaaggttgaagcaccaaaagcttaccaaggggaatgtttgcctctgcctctgacacacagctctgtcctgggagtgagctggtttttagcggagacggagtcccaccttggctgcagggagtcgaaaggacttggaagctccgctttctacccagcgagcccctggtggcagtgggagctgcctgttcagctccagctcaccagccccagtgcccacaggatcagtctgattcccaagctctgctcctctccccagcaagtgagagctgggtgtcaagagggtctgaggaatccagacccggctgcgtggttgatgatctttgcagacaggcaagcacctcctgcctcgaactggctgcaaagggtatcaggtgctgccatccaggttcagcttgtaaatagctcaggtgtaccctgcacttgcagactctacagaggccatgggctcctgtgtgtgcggctacaggagtgagcactgaggtgtgctctgatcatccactgtgccatgtgccaggtttttggtctgacccactgcttttggtctgtgtgatgatgaaatgaggtcagagcctcgagttattaacactaacgatttgttaatgatagctactgtttattattttatttaatttttttgagacagagttttcactcttatgcccacgctggagtgcagtgagccgagatcacgccactgcactatagcctgggtgacagagtgagactctgtctcaaaaaaacacaaaagtttctcttttcaaaacattttactttaaaaggagccaatttaaagaaaactgttaatagttcaggtaacaggcagatacaggaaaagctgctgacagtgttgtatgaggtttgaggattttgatccaagctggtcccactcagtccatagcagagaatgaaagggcccagagagggtggtgacctctgcctgaagtcacacagtgagtcgaggacagggaggtgaccccaggtttctatgtgtagggcgggaggatgttctgggacacagttcaattctcatttgtcacacactttggctattagagatcaaccccttcgctcctgtgtcttgcaatggcagccttggcaaacgctaaatgaaaatcgtgacaaca

SEQ ID NO: 614923 - DNA, 5417 bp, Homo sapiens
cctcccaactggtgactggttagtgatgaggctgtgtgcttctgagctgggcatccgaaggcatccttggggaagctgagggcacgaggaggggctgccagactccgggagctgctgcctggctgggattcctacacaatgcgttgcctggctccacgccctgctgggtcctacctgtcagagccccaaggcagctcacagtgtgccaccatggagttggggcccctagaaggtggctacctggagcttcttaacagcgatgctgaccccctgtgcctctaccacttctatgaccagatggacctggctggagaagaagagattgagctctactcagaacccgacacagacaccatcaactgcgaccagttcagcaggctgttgtgtgacatggaaggtgatgaagagaccagggaggcttatgccaatatcgcggaactggaccagtatgtcttccaggactcccagctggagggcctgagcaaggacattttcaagagcacataggaccagatgaagtgatcggtgagagtatggagatgccagcagaagttgggcagaaaagtcagaaaagacccttcccagaggagcttccggcagacctgaagcactggaagccagctgagccccccactgtggtgactggcagtctcctagtgggaccagtgagcgactgctccaccctgccctgcctgccactgcctgcgctgttcaaccaggagccagcctccggccagatgcgcctggagaaaaccgaccagattcccatgcctttctccagttcctcgttgagctgcctgaatctccctgagggacccatccagtttgtccccaccatctccactctgccccatgggctctggcaaatctctgaggctggaacaggggtctccagtatattcatctaccatggtgaggtgccccaggccagccaagtaccccctcccagtggattcactgtccacggcctcccaacatctccagaccggccaggctccaccagccccttcgctccatcagccactgacctgcccagcatgcctgaacctgccctgacctcccgagcaaacatgacagagcacaagacgtcccccacccaatgcccggcagctggagaggtctccaacaagcttccaaaatggcctgagccggtggagcagttctaccgctcactgcaggacacgtatggtgccgagcccgcaggcccggatggcatcctagtggaggtggatctggtgcaggccaggctggagaggagcagcagcaagagcctggagcgggaactggccaccccggactgggcagaacggcagctggcccaaggaggcctggctgaggtgctgttggctgccaaggagcaccggcggccgcgtgagacacgagtgattgctgtgctgggcaaagctggtcagggcaagagctattgggctggggcagtgagccgggcctgggcttgtggccggcttccccagtacgactttgtcttctctgtcccctgccattgcttgaaccgtccgggggatgcctatggcctgcaggatctgctcttctccctgggcccacagccactcgtggcggccgatgaggttttcagccacatcttgaagagacctgaccgcgttctgctcatcctagacgccttcgaggagctggaagcgcaagatggcttcctgcacagcacgtgcggaccggcaccggcggagccctgctccctccgggggctgctggccggccttttccagaagaagctgctccgaggttgcaccctcctcctcacagcccggccccggggccgcctggtccagagcctgagcaaggccgacgccctatttgagctgtccggcttctccatggagcaggcccaggcatacgtgatgcgctactttgagagctcagggatgacagagcaccaagacagagccctgacgctcctccgggaccggccacttcttctcagtcacagccacagccctactttgtgccgggcagtgtgccagctctcagaggccctgctggagcttggggaggacgccaagctgccctccacgctcacgggactctatgtcggcctgctgggccgtgcagccctcgacagcccccccggggccctggcagagctggccaagctggcctgggagctgggccgcagacatcaaagtaccctacaggaggaccagttcccatccgcagacgtgaggacctgggcgatggccaaaggcttagtccaacacccaccgcgggccgcagagtccgagctggccttccccagcttcctcctgcaatgcttcctgggggccctgtggctggctctgagtggcgaaatcaaggacaaggagctcccgcagtacctagcattgaccccaaggaagaagaggccctatgacaactggctggagggcgtgccacgctttctggctgggctgatcttccagcctcccgcccgctgcctgggagccctactcgggccatcggcggctgcctcggtggacaggaagcagaaggtgcttgcgaggtacctgaagcggctgcagccggggacactgcgggcgcggcagctgcttgagctgctgcactgcgcccacgaggccgaggaggctggaatttggcagcacgtggtacaggagctccccggccgcctctcttttctgggcacccgcctcacgcctcctgatgcacatgtactgggcaaggccttggaggcggcgggccaagacttctccctggacctccgcagcactggcatttgcccctctggattggggagcctcgtgggactcagctgtgtcacccgtttcaggtggggtgaggggcttggaagagacatccttgtgttgggcattaactgcggtcttggtgccaagcccagtgctctgtggggtccttttagtatgcagagcagccgggtggggcagaatggattctctccatttttaagatgaggatgttgaggctcagagaggggcagccacttgccacacagcaagtgagaggcaatggcattctcccagtcaatatttgaaggcccgccatgtgccagtcactggggtatgtctagaatctgagactgacctgggctcaaatttgttttattctttccaccccctgagcacgccaccgttttcttatgctaagagtaaagccatggcctccccttggactctctgcctccattctctcctcttccactccattttgtattcagcaaccagaccaatcttctcagaacttgaatctgattgtatcccatccctgcttacaatccttcagggacactccaccactgtcaggatgaaggctaaatttcttaatttggtttcattaagtcggtctgcaatctgcttgagcatttcagcttaatcgccagaggattgcttccatatttccccctaaacatactttacccaagctgtaaggtcctacataattgtgccaataatttagcagtgagcttcctggtagccgaagcaaaaagggaaagaaaaccactgtgtgagttgtgagaaagtaggaatcaataaaggctggagtggtcgctgccttgagcgacacggtggcgatggaaggctttctgggaaaggtagaggttgagctaaggaaagaaagtattttaataggtaggaggacccttcatggagctgcccttccattaaggtctagcctggtcaccgtgcctgggtctgaggccctccctccacaggctgtgggagtccctgcggcagcatggggagaccaagctacttcaggcagcagaggagaagttcaccatcgagcctttcaaagccaagtccctgaaggatgtggaagacctgggaaagcttgtgcagactcagaggacgagaagttcctcggaagacacagctggggagctccctgctgttcgggacctaaagaaactggagtttgcgctgggccctgtctcaggcccccaggctttccccaaactggtgcggatcctcacggccttttcctccctgcagcatctggacctggatgcgctgagtgagaacaagatcggggacgagggtgtctcgcagctctcagccaccttcccccagctgaagtccttggaaaccctcaatctgtcccagaacaacatcactgacctgggtgcctacaaactcgccgaggccctgccttcgctcgctgcatccctgctcaggctaagcttgtacaataactgcatctgcgacgtgggagccgagagcttggctcgtgtgcttccggacatggtgtccctccgggtgatggacgtccagtacaacaagttcacggctgccggggcccagcagctcgctgccagccttcggaggtgtcctcatgtggagacgctggcgatgtggacgcccaccatcccattcagtgtccaggaacacctgcaacaacaggattcacggatcagcctgagatgatcccagctgtgctctggacaggcatgttctctgaggacactaaccacgctggaccttgaactgggtacttgtggacacagctcttctccaggctgtatcccatgagcctcagcatcctggcacccggcccctgctggttcagggttggcccctgcccggctgcggaatgaaccacatcttgctctgctgacagacacaggcccggctccaggctcctttagcgcccagttgggtggatgcctggtggcagctgcggtccacccaggagccccgaggccttctctgaaggacattgcggacagccacggccaggccagagggagtgacagaggcagccccattctgcctgcccaggcccctgccaccctggggagaaagtacttctttttttttatttttagacagagtctcactgttgcccaggctggcgtgcagtggtgcgatctgggttcactgcaacctccgcctcttgggttcaagcgattcttctgcttcagcctcccgagtagctgggactacaggcacccaccatcatgtctggctaatttttcatttttagtagagacagggttttgccatgttggccaggctggtctcaaactcttgacctcaggtgatccacccacctcagcctcccaaagtgctgggattacaagcgtgagccactgcaccgggccacagagaaagtacttctccaccctgctctccgaccagacaccttgacagggcacaccgggcactcagaagacactgatgggcaacccccagcctgctaattccccagattgcaacaggctgggcttcagtggcagctgcttttgtctatgggactcaatgcactgacattgttggccaaagccaaagctaggcctggccagatgcaccagcccttagcagggaaacagctaatgggacactaatggggcggtgagaggggaacagactggaagcacagcttcatttcctgtgtcttttttcactacattataaatgtctctttaatgtcac

SEQ ID NO: 614924 - DNA, 281 bp, Homo sapiens
cgctctgtcacccaggctggagtacagtgcagcgatcatggccttgacctcctgggctcaagtgatcctcccacctcagcctcctgagtagctaatttttgtttttagtggagacgaggttttaccatgttagccaggctggtctcgaattcctggcctcaggtgatctgcccatctcggggggcctcccagagtgctaggattacaggcgtgggccactgtgtccagccaacaaggtttttttgagtagtgagtgagaagagaataatttacttttagtt

SEQ ID NO: 614925 - DNA, 7774 bp, Homo sapiens
cctcccaactggtgactggttagtgatgaggctgtgtgcttctgagctgggcatccgaaggcatccttggggaagctgagggcacgaggaggggctgccagactccgggagctgctgcctggctgggattcctacacaatgcgttgcctggctccacgccctgctgggtcctacctgtcagagccccaaggcagctcacagtgtgccaccatggagttggggcccctagaaggtggctacctggagcttcttaacagcgatgctgaccccctgtgcctctaccacttctatgaccagatggacctggctggagaagaagagattgagctctactcagaacccgacacagacaccatcaactgcgaccagttcagcaggctgttgtgtgacatggaaggtgatgaagagaccagggaggcttatgccaatatcgcggaactggaccagtatgtcttccaggactcccagctggagggcctgagcaaggacattttcaagagcacataggaccagatgaagtgatcggtgagagtatggagatgccagcagaagttgggcagaaaagtcagaaaagacccttcccagaggagcttccggcagacctgaagcactggaagccagtgcctttctccagttcctcgttgagctgcctgaatctccctgagggacccatccagtttgtccccaccatctccactctgccccatgggctctggcaaatctctgaggctggaacaggggtctccagtatattcatctaccatggtgaggtgccccaggccagccaagtaccccctcccagtggattcactgtccacggcctcccaacatctccagaccggccaggctccaccagccccttcgctccatcagccactgacctgcccagcatgcctgaacctgccctgacctcccgagcaaacatgacagagcacaagacgtcccccacccaatgcccggcagctggagaggtctccaacaagcttccaaaatggcctgagccggtggagcagttctaccgctcactgcaggacacgtatggtgccgagcccgcaggcccggatggcatcctagtggaggtggatctggtgcaggccaggctggagaggagcagcagcaagagcctggagcgggaactggccaccccggactgggcagaacggcagctggcccaaggaggcctggctgaggtgctgttggctgccaaggagcaccggcggccgcgtgagacacgagtgattgctgtgctgggcaaagctggtcagggcaagagctattgggctggggcagtgagccgggcctgggcttgtggccggcttccccagtacgactttgtcttctctgtcccctgccattgcttgaaccgtccgggggatgcctatggcctgcaggatctgctcttctccctgggcccacagccactcgtggcggccgatgaggttttcagccacatcttgaagagacctgaccgcgttctgctcatcctagacgccttcgaggagctggaagcgcaagatggcttcctgcacagcacgtgcggaccggcaccggcggagccctgctccctccgggggctgctggccggccttttccagaagaagctgctccgaggttgcaccctcctcctcacagcccggccccggggccgcctggtccagagcctgagcaaggccgacgccctatttgagctgtccggcttctccatggagcaggcccaggcatacgtgatgcgctactttgagagctcagggatgacagagcaccaagacagagccctgacgctcctccgggaccggccacttcttctcagtcacagccacagccctactttgtgccgggcagtgtgccagctctcagaggccctgctggagcttggggaggacgccaagctgccctccacgctcacgggactctatgtcggcctgctgggccgtgcagccctcgacagcccccccggggccctggcagagctggccaagctggcctgggagctgggccgcagacatcaaagtaccctacaggaggaccagttcccatccgcagacgtgaggacctgggcgatggccaaaggcttagtccaacacccaccgcgggccgcagagtccgagctggccttccccagcttcctcctgcaatgcttcctgggggccctgtggctggctctgagtggcgaaatcaaggacaaggagctcccgcagtacctagcattgaccccaaggaagaagaggccctatgacaactggctggagggcgtgccacgctttctggctgggctgatcttccagcctcccgcccgctgcctgggagccctactcgggccatcggcggctgcctcggtggacaggaagcagaaggtgcttgcgaggtacctgaagcggctgcagccggggacactgcgggcgcggcagctgcttgagctgctgcactgcgcccacgaggccgaggaggctggaatttggcagcacgtggtacaggagctccccggccgcctctcttttctgggcacccgcctcacgcctcctgatgcacatgtactgggcaaggccttggaggcggcgggccaagacttctccctggacctccgcagcactggcatttgcccctctggattggggagcctcgtgggactcagctgtgtcacccgtttcaggtggggtgaggggcttggaagagacatccttgtgttgggcattaactgcggtcttggtgccaagcccagtgctctgtggggtccttttagtatgcagagcagccgggtggggcagaatggattctctccatttttaagatgaggatgttgaggctcagagaggggcagccacttgccacacagcaagtgagaggcaatggcattctcccagtcaatatttgaaggcccgccatgtgccagtcactggggtatgtctagaatctgagactgacctgggctcaaatttgttttattctttccaccccctgagcacgccaccgttttcttatgctaagagtaaagccatggcctccccttggactctctgcctccattctctcctcttccactccattttgtattcagcaaccagaccaatcttctcagaacttgaatctgattgtatcccatccctgcttacaatccttcagggacactccaccactgtcaggatgaaggctaaatttcttaatttggtttcattaagtcggtctgcaatctgcttgagcatttcagcttaatcgccagaggattgcttccatatttccccctaaacatactttacccaagctgtaaggtcctacataattgtgccaataatttagcagtgagcttcctggtagccgaagcaaaaagggaaagaaaaccactgtgtgagttgtgagaaagtaggaatcaataaaggctggagtggtcgctgccttgagcgacacggtggcgatggaaggctttctgggaaaggtagaggttgagctaaggaaagaaagtattttaataggtaggaggacccttcatggagctgcccttccattaaggtctagcctggtcaccgtgcctgggtctgaggccctccctccacaggctgtgggagtccctgcggcagcatggggagaccaagctacttcaggcagcagaggagaagttcaccatcgagcctttcaaagccaagtccctgaaggatgtggaagacctgggaaagcttgtgcagactcagaggacgagaagttcctcggaagacacagctggggagctccctgctgttcgggacctaaagaaactggagtttgcgctgggccctgtctcaggcccccaggctttccccaaactggtgcggatcctcacggccttttcctccctgcagcatctggacctggatgcgctgagtgagaacaagatcggggacgagggtgtctcgcagctctcagccaccttcccccagctgaagtccttggaaaccctcaatctgtcccagaacaacatcactgacctgggtgcctacaaactcgccgaggccctgccttcgctcgctgcatccctgctcaggctaagcttgtacaataactgcatctgcgacgtgggagccgagagcttggctcgtgtgcttccggacatggtgtccctccgggtgatggacgtccagtacaacaagttcacggctgccggggcccagcagctcgctgccagccttcggaggtgtcctcatgtggagacgctggcgatgtggacgcccaccatcccattcagtgtccaggaacacctgcaacaacaggattcacggatcagcctgagatgatcccagctgtgctctggacaggcatgttctctgaggacactaaccacgctggaccttgaactgggtacttgtggacacagctcttctccaggctgtatcccatgagcctcagcatcctggcacccggcccctgctggttcagggttggcccctgcccggctgcggaatgaaccacatcttgctctgctgacagacacaggcccggctccaggctcctttagcgcccagttgggtggatgcctggtggcagctgcggtccacccaggagccccgaggccttctctgaaggacattgcggacagccacggccaggccagagggagtgacagaggcagccccattctgcctgcccaggcccctgccaccctggggagaaagtacttctttttttttatttttagacagagtctcactgttgcccaggctggcgtgcagtggtgcgatctgggttcactgcaacctccgcctcttgggttcaagcgattcttctgcttcagcctcccgagtagctgggactacaggcacccaccatcatgtctggctaatttttcatttttagtagagacagggttttgccatgttggccaggctggtctcaaactcttgacctcaggtgatccacccacctcagcctcccaaagtgctgggattacaagcgtgagccactgcaccgggccacagagaaagtacttctccaccctgctctccgaccagacaccttgacagggcacaccgggcactcagaagacactgatgggcaacccccagcctgctaattccccagattgcaacaggctgggcttcagtggcagctgcttttgtctatgggactcaatgcactgacattgttggccaaagccaaagctaggcctggccagatgcaccagcccttagcagggaaacagctaatgggacactaatggggcggtgagaggggaacagactggaagcacagcttcatttcctgtgtcttttttcactacattataaatgtctctttaatgtcacaggcaggtcccagggtttgagttcataccctgttaccattttggggtacccactgctctggttatctaatatgtaacaagccaccccaaatcatagtggcttaaaacaacactcacatttattctgctcacatatctgtcatttgagcagggctcagcggggacagctccttctgtcctactctgtgtcaggtggggcagcttgagggttgggctggtgtcacctgaagactcattcttctgtacgtctgacaggcaatgctggctgttggctgggggcctcagtgcactacggaatagttggctaggacccctccatgtgggctagttgggcttcctcataagtatggtggctgggttggagggtgtcccaaaaagaaaggaggggatagagagagaccacttttcataacctagccttagaagtcacacagtattacttctgctacatatatatgttttaagaggcagggtctcactctgtgcccccagtctggaatccagtggtatgatcacggctcactgcagcctcaacctcctgggctaagtgatcctcccacctcagcctcccgaatagctgggactacaggtgtgagtcaccaaagcccagttaatctttagttttcatttttgtagagccagggtctcactatgttgcccaggcaggtcttgaactcctggcctcaagtgattctcctgcctcagcctcccaaagtgctgggattacaggtgtgaaccaccacacccagcccacttctgccatattctgttggccagtgtgacaaggattgctactgtcctacccaccctcctttccaccacatgtgcacatgcacgtgtgtgcacgtacacacacatacacacacacgcgtgcacacaccagagcccaccttggctcaagtcctcttttctgagaggacttttctttgtggcttcctaaaattcagtggaaaattaattgtttggggatgagaaaggttgaagcaccaaaagcttaccaaggggaatgtttgcctctgcctctgacacacagctctgtcctgggagtgagctggtttttagcggagacggagtcccaccttggctgcagggagtcgaaaggacttggaagctccgctttctacccagcgagcccctggtggcagtgggagctgcctgttcagctccagctcaccagccccagtgcccacaggatcagtctgattcccaagctctgctcctctccccagcaagtgagagctgggtgtcaagagggtctgaggaatccagacccggctgcgtggttgatgatctttgcagacaggcaagcacctcctgcctcgaactggctgcaaagggtatcaggtgctgccatccaggttcagcttgtaaatagctcaggtgtaccctgcacttgcagactctacagaggccatgggctcctgtgtgtgcggctacaggagtgagcactgaggtgtgctctgatcatccactgtgccatgtgccaggtttttggtctgacccactgcttttggtctgtgtgatgatgaaatgaggtcagagcctcgagttattaacactaacgatttgttaatgatagctactgtttattattttatttaatttttttgagacagagttttcactcttatgcccacgctggagtgcagtgagccgagatcacgccactgcactatagcctgggtgacagagtgagactctgtctcaaaaaaacacaaaagtttctcttttcaaaacattttactttaaaaggagccaatttaaagaaaactgttaatagttcaggtaacaggcagatacaggaaaagctgctgacagtgttgtatgaggtttgaggattttgatccaagctggtcccactcagtccatagcagagaatgaaagggcccagagagggtggtgacctctgcctgaagtcacacagtgagtcgaggacagggaggtgaccccaggtttctatgtgtagggcgggaggatgttctgggacacagttcaattctcatttgtcacacactttggctattagagatcaaccccttcgctcctgtgtcttgcaatggcagccttggcaaacgctaaatgaaaatcgtgacaacacttgtgttatgaagcatttactttgtgttcaccttgtactactcgaactcatgtcttaactcacttatccctcaaaaacaactctaggaggtagggccaagtaggaccatcatccctgcatttcacatggagctcagagaggttaagcaagccgtgcaaggccacacagctcataaatgcagagccaggatttgaacccccgtggcctgaccccaaagccgaaaccactcggcactgcaggttcgtcccttttctctgagatgggggtatccaatcttttggcttccctgggccacagtggaagaactgtctggggccacatataaaatatactaatgatagctcatgagctaaaaaataaaacaaaatcacacacacacacacaaaaaaacacaaaccaaaaaaaaa

SEQ ID NO: 614926 - DNA, 208 bp, Homo sapiens
gaagcacatgatcaggagatgacggcatgaagcactcacagtgccgtgcatggagctggcggagcactggagcagacgaagcgggtcttgaggcgatgtgatacctgcccagtgttctgaatgtcagagtgaagaaattccttgatgcgcgtgtaatcgggcgaaagtaaactatgactctcttaatgtgtagccaaattgcctcggt

SEQ ID NO: 614927 - DNA, 5235 bp, Homo sapiens
cctcccaactggtgactggttagtgatgaggctgtgtgcttctgagctgggcatccgaaggcatccttggggaagctgagggcacgaggaggggctgccagactccgggagctgctgcctggctgggattcctacacaatgcgttgcctggctccacgccctgctgggtcctacctgtcagagccccaaggcagctcacagtgtgccaccatggagttggggcccctagaaggtggctacctggagcttcttaacagcgatgctgaccccctgtgcctctaccacttctatgaccagatggacctggctggagaagaagagattgagctctactcagaacccgacacagacaccatcaactgcgaccagttcagcaggctgttgtgtgacatggaaggtgatgaagagaccagggaggcttatgccaatatcgcggaactggaccagtatgtcttccaggactcccagctggagggcctgagcaaggacattttcaagagcacataggaccagatgaagtgatcggtgagagtatggagatgccagcagaagttgggcagaaaagtcagaaaagacccttcccagaggagcttccggcagacctgaagcactggaagccagctgagccccccactgtggtgactggcagtctcctagtgggaccagtgagcgactgctccaccctgccctgcctgccactgcctgcgctgttcaaccaggagccagcctccggccagatgcgcctggagaaaaccgaccagattcccatgcctttctccagttcctcgttgagctgcctgaatctccctgagggacccatccagtttgtccccaccatctccactctgccccatgggctctggcaaatctctgaggctggaacaggggtctccagtatattcatctaccatggtgaggtgccccaggccagccaagtaccccctcccagtggattcactgtccacggcctcccaacatctccagaccggccaggctccaccagccccttcgctccatcagccactgacctgcccagcatgcctgaacctgccctgacctcccgagcaaacatgacagagcacaagacgtcccccacccaatgcccggcagctggagaggtctccaacaagcttccaaaatggcctggacgagaagttcctcggaagacacagctggggagctccctgctgttcgggacctaaagaaactggagtttgcgctgggccctgtctcaggcccccaggctttccccaaactggtgcggatcctcacggccttttcctccctgcagcatctggacctggatgcgctgagtgagaacaagatcggggacgagggtgtctcgcagctctcagccaccttcccccagctgaagtccttggaaaccctcaatctgtcccagaacaacatcactgacctgggtgcctacaaactcgccgaggccctgccttcgctcgctgcatccctgctcaggctaagcttgtacaataactgcatctgcgacgtgggagccgagagcttggctcgtgtgcttccggacatggtgtccctccgggtgatggacgtccagtacaacaagttcacggctgccggggcccagcagctcgctgccagccttcggaggtgtcctcatgtggagacgctggcgatgtggacgcccaccatcccattcagtgtccaggaacacctgcaacaacaggattcacggatcagcctgagatgatcccagctgtgctctggacaggcatgttctctgaggacactaaccacgctggaccttgaactgggtacttgtggacacagctcttctccaggctgtatcccatgagcctcagcatcctggcacccggcccctgctggttcagggttggcccctgcccggctgcggaatgaaccacatcttgctctgctgacagacacaggcccggctccaggctcctttagcgcccagttgggtggatgcctggtggcagctgcggtccacccaggagccccgaggccttctctgaaggacattgcggacagccacggccaggccagagggagtgacagaggcagccccattctgcctgcccaggcccctgccaccctggggagaaagtacttctttttttttatttttagacagagtctcactgttgcccaggctggcgtgcagtggtgcgatctgggttcactgcaacctccgcctcttgggttcaagcgattcttctgcttcagcctcccgagtagctgggactacaggcacccaccatcatgtctggctaatttttcatttttagtagagacagggttttgccatgttggccaggctggtctcaaactcttgacctcaggtgatccacccacctcagcctcccaaagtgctgggattacaagcgtgagccactgcaccgggccacagagaaagtacttctccaccctgctctccgaccagacaccttgacagggcacaccgggcactcagaagacactgatgggcaacccccagcctgctaattccccagattgcaacaggctgggcttcagtggcagctgcttttgtctatgggactcaatgcactgacattgttggccaaagccaaagctaggcctggccagatgcaccagcccttagcagggaaacagctaatgggacactaatggggcggtgagaggggaacagactggaagcacagcttcatttcctgtgtcttttttcactacattataaatgtctctttaatgtcacaggcaggtcccagggtttgagttcataccctgttaccattttggggtacccactgctctggttatctaatatgtaacaagccaccccaaatcatagtggcttaaaacaacactcacatttattctgctcacatatctgtcatttgagcagggctcagcggggacagctccttctgtcctactctgtgtcaggtggggcagcttgagggttgggctggtgtcacctgaagactcattcttctgtacgtctgacaggcaatgctggctgttggctgggggcctcagtgcactacggaatagttggctaggacccctccatgtgggctagttgggcttcctcataagtatggtggctgggttggagggtgtcccaaaaagaaaggaggggatagagagagaccacttttcataacctagccttagaagtcacacagtattacttctgctacatatatatgttttaagaggcagggtctcactctgtgcccccagtctggaatccagtggtatgatcacggctcactgcagcctcaacctcctgggctaagtgatcctcccacctcagcctcccgaatagctgggactacaggtgtgagtcaccaaagcccagttaatctttagttttcatttttgtagagccagggtctcactatgttgcccaggcaggtcttgaactcctggcctcaagtgattctcctgcctcagcctcccaaagtgctgggattacaggtgtgaaccaccacacccagcccacttctgccatattctgttggccagtgtgacaaggattgctactgtcctacccaccctcctttccaccacatgtgcacatgcacgtgtgtgcacgtacacacacatacacacacacgcgtgcacacaccagagcccaccttggctcaagtcctcttttctgagaggacttttctttgtggcttcctaaaattcagtggaaaattaattgtttggggatgagaaaggttgaagcaccaaaagcttaccaaggggaatgtttgcctctgcctctgacacacagctctgtcctgggagtgagctggtttttagcggagacggagtcccaccttggctgcagggagtcgaaaggacttggaagctccgctttctacccagcgagcccctggtggcagtgggagctgcctgttcagctccagctcaccagccccagtgcccacaggatcagtctgattcccaagctctgctcctctccccagcaagtgagagctgggtgtcaagagggtctgaggaatccagacccggctgcgtggttgatgatctttgcagacaggcaagcacctcctgcctcgaactggctgcaaagggtatcaggtgctgccatccaggttcagcttgtaaatagctcaggtgtaccctgcacttgcagactctacagaggccatgggctcctgtgtgtgcggctacaggagtgagcactgaggtgtgctctgatcatccactgtgccatgtgccaggtttttggtctgacccactgcttttggtctgtgtgatgatgaaatgaggtcagagcctcgagttattaacactaacgatttgttaatgatagctactgtttattattttatttaatttttttgagacagagttttcactcttatgcccacgctggagtgcagtgagccgagatcacgccactgcactatagcctgggtgacagagtgagactctgtctcaaaaaaacacaaaagtttctcttttcaaaacattttactttaaaaggagccaatttaaagaaaactgttaatagttcaggtaacaggcagatacaggaaaagctgctgacagtgttgtatgaggtttgaggattttgatccaagctggtcccactcagtccatagcagagaatgaaagggcccagagagggtggtgacctctgcctgaagtcacacagtgagtcgaggacagggaggtgaccccaggtttctatgtgtagggcgggaggatgttctgggacacagttcaattctcatttgtcacacactttggctattagagatcaaccccttcgctcctgtgtcttgcaatggcagccttggcaaacgctaaatgaaaatcgtgacaacacttgtgttatgaagcatttactttgtgttcaccttgtactactcgaactcatgtcttaactcacttatccctcaaaaacaactctaggaggtagggccaagtaggaccatcatccctgcatttcacatggagctcagagaggttaagcaagccgtgcaaggccacacagctcataaatgcagagccaggatttgaacccccgtggcctgaccccaaagccgaaaccactcggcactgcaggttcgtcccttttctctgagatgggggtatccaatcttttggcttccctgggccacagtggaagaactgtctggggccacatataaaatatactaatgatagctcatgagctaaaaaataaaacaaaatcacacacacacacacaaaaaaacacaaaccaaaaaaaaa

SEQ ID NO: 614928 - DNA, 3898 bp, Homo sapiens
cacgaggtcttctaagacgcacagggtgggtcttacaagacccattttacagatgaggaaaataaagcacagagcagttaactaacctttctggggtcacacagcaagtcagctgcagaaccataaaggaatctcgggcctcctaggcttctccttttccccatgacccacaccggtcggtatcttgccaggggaaaagtccccaacgttctaggctgggtggaaggagggatttgggggcagctgtcactggggccccaggccgccctctctcctctaacctggctctgagtcccatccccccttgcaggatgtggacgcccaccatcccattcagtgtccaggaacacctgcaacaacaggattcacggatcagcctgagatgatcccagctgtgctctggacaggcatgttctctgaggacactaaccacgctggaccttgaactgggtacttgtggacacagctcttctccaggctgtatcccatgagcctcagcatcctggcacccggcccctgctggttcagggttggcccctgcccggctgcggaatgaaccacatcttgctctgctgacagacacaggcccggctccaggctcctttagcgcccagttgggtggatgcctggtggcagctgcggtccacccaggagccccgaggccttctctgaaggacattgcggacagccacggccaggccagagggagtgacagaggcagccccattctgcctgcccaggcccctgccaccctggggagaaagtacttctttttttttatttttagacagagtctcactgttgcccaggctggcgtgcagtggtgcgatctgggttcactgcaacctccgcctcttgggttcaagcgattcttctgcttcagcctcccgagtagctgggactacaggcacccaccatcatgtctggctaatttttcatttttagtagagacagggttttgccatgttggccaggctggtctcaaactcttgacctcaggtgatccacccacctcagcctcccaaagtgctgggattacaagcgtgagccactgcaccgggccacagagaaagtacttctccaccctgctctccgaccagacaccttgacagggcacaccgggcactcagaagacactgatgggcaacccccagcctgctaattccccagattgcaacaggctgggcttcagtggcagctgcttttgtctatgggactcaatgcactgacattgttggccaaagccaaagctaggcctggccagatgcaccagcccttagcagggaaacagctaatgggacactaatggggcggtgagaggggaacagactggaagcacagcttcatttcctgtgtcttttttcactacattataaatgtctctttaatgtcacaggcaggtcccagggtttgagttcataccctgttaccattttggggtacccactgctctggttatctaatatgtaacaagccaccccaaatcatagtggcttaaaacaacactcacatttattctgctcacatatctgtcatttgagcagggctcagcggggacagctccttctgtcctactctgtgtcaggtggggcagcttgagggttgggctggtgtcacctgaagactcattcttctgtacgtctgacaggcaatgctggctgttggctgggggcctcagtgcactacggaatagttggctaggacccctccatgtgggctagttgggcttcctcataagtatggtggctgggttggagggtgtcccaaaaagaaaggaggggatagagagagaccacttttcataacctagccttagaagtcacacagtattacttctgctacatatatatgttttaagaggcagggtctcactctgtgcccccagtctggaatccagtggtatgatcacggctcactgcagcctcaacctcctgggctaagtgatcctcccacctcagcctcccgaatagctgggactacaggtgtgagtcaccaaagcccagttaatctttagttttcatttttgtagagccagggtctcactatgttgcccaggcaggtcttgaactcctggcctcaagtgattctcctgcctcagcctcccaaagtgctgggattacaggtgtgaaccaccacacccagcccacttctgccatattctgttggccagtgtgacaaggattgctactgtcctacccaccctcctttccaccacatgtgcacatgcacgtgtgtgcacgtacacacacatacacacacacgcgtgcacacaccagagcccaccttggctcaagtcctcttttctgagaggacttttctttgtggcttcctaaaattcagtggaaaattaattgtttggggatgagaaaggttgaagcaccaaaagcttaccaaggggaatgtttgcctctgcctctgacacacagctctgtcctgggagtgagctggtttttagcggagacggagtcccaccttggctgcagggagtcgaaaggacttggaagctccgctttctacccagcgagcccctggtggcagtgggagctgcctgttcagctccagctcaccagccccagtgcccacaggatcagtctgattcccaagctctgctcctctccccagcaagtgagagctgggtgtcaagagggtctgaggaatccagacccggctgcgtggttgatgatctttgcagacaggcaagcacctcctgcctcgaactggctgcaaagggtatcaggtgctgccatccaggttcagcttgtaaatagctcaggtgtaccctgcacttgcagactctacagaggccatgggctcctgtgtgtgcggctacaggagtgagcactgaggtgtgctctgatcatccactgtgccatgtgccaggtttttggtctgacccactgcttttggtctgtgtgatgatgaaatgaggtcagagcctcgagttattaacactaacgatttgttaatgatagctactgtttattattttatttaatttttttgagacagagttttcactcttatgcccacgctggagtgcagtgagccgagatcacgccactgcactatagcctgggtgacagagtgagactctgtctcaaaaaaacacaaaagtttctcttttcaaaacattttactttaaaaggagccaatttaaagaaaactgttaatagttcaggtaacaggcagatacaggaaaagctgctgacagtgttgtatgaggtttgaggattttgatccaagctggtcccactcagtccatagcagagaatgaaagggcccagagagggtggtgacctctgcctgaagtcacacagtgagtcgaggacagggaggtgaccccaggtttctatgtgtagggcgggaggatgttctgggacacagttcaattctcatttgtcacacactttggctattagagatcaaccccttcgctcctgtgtcttgcaatggcagccttggcaaacgctaaatgaaaatcgtgacaacacttgtgttatgaagcatttactttgtgttcaccttgtactactcgaactcatgtcttaactcacttatccctcaaaaacaactctaggaggtagggccaagtaggaccatcatccctgcatttcacatggagctcagagaggttaagcaagccgtgcaaggccacacagctcataaatgcagagccaggatttgaacccccgtggcctgaccccaaagccgaaaccactcggcactgcaggttcgtcccttttctctgagatgggggtatccaatcttttggcttccctgggccacagtggaagaactgtctggggccacatataaaatatactaatgatagctcatgagctaaaaaataaaacaaaatcacacacacacacacaaaaaaacacaaaccaaaaaaaaa

SEQ ID NO: 614929 - DNA, 212 bp, Homo sapiens
  misc_feature (4)..(4): n is a, c, g, or t
  misc_feature (158)..(158): n is a, c, g, or t
cttncactaccacccaagagcaaatgagtgtggctctttaggttcttgggccaaagccctgggtcctcctgtgttgcccagaggagatgggaacccacaggccactgctgaagggtcttcagcggtgttaggatgtccttggagggagcagggaattncaggggacaaatgcttggtgtcattccgagggtgggtgcacagggcccccagca

SEQ ID NO: 614930 - DNA, 3051 bp, Homo sapiens
ccagtcttgctcccatcaggagcactcacctcatctacagagcaaacacttgtttgattggcacatctttattttatttatttatttatttatttatttatttattgagatggagttgggtttcagccaggatggctggatctcctgacctcgtgatctgcccgccttggcctcccaaagtgctgggattacaagcgtgagccactgcaccgggccacagagaaagtacttctccaccctgctctccgaccagacaccttgacagggcacaccgggcactcagaagacactgatgggcaacccccagcctgctaattccccagattgcaacaggctgggcttcagtggcagctgcttttgtctatgggactcaatgcactgacattgttggccaaagccaaagctaggcctggccagatgcaccagcccttagcagggaaacagctaatgggacactaatggggcggtgagaggggaacagactggaagcacagcttcatttcctgtgtcttttttcactacattataaatgtctctttaatgtcacaggcaggtcccagggtttgagttcataccctgttaccattttggggtacccactgctctggttatctaatatgtaacaagccaccccaaatcatagtggcttaaaacaacactcacatttattctgctcacatatctgtcatttgagcagggctcagcggggacagctccttctgtcctactctgtgtcaggtggggcagcttgagggttgggctggtgtcacctgaagactcattcttctgtacgtctgacaggcaatgctggctgttggctgggggcctcagtgcactacggaatagttggctaggacccctccatgtgggctagttgggcttcctcataagtatggtggctgggttggagggtgtcccaaaaagaaaggaggggatagagagagaccacttttcataacctagccttagaagtcacacagtattacttctgctacatatatatgttttaagaggcagggtctcactctgtgcccccagtctggaatccagtggtatgatcacggctcactgcagcctcaacctcctgggctaagtgatcctcccacctcagcctcccgaatagctgggactacaggtgtgagtcaccaaagcccagttaatctttagttttcatttttgtagagccagggtctcactatgttgcccaggcaggtcttgaactcctggcctcaagtgattctcctgcctcagcctcccaaagtgctgggattacaggtgtgaaccaccacacccagcccacttctgccatattctgttggccagtgtgacaaggattgctactgtcctacccaccctcctttccaccacatgtgcacatgcacgtgtgtgcacgtacacacacatacacacacacgcgtgcacacaccagagcccaccttggctcaagtcctcttttctgagaggacttttctttgtggcttcctaaaattcagtggaaaattaattgtttggggatgagaaaggttgaagcaccaaaagcttaccaaggggaatgtttgcctctgcctctgacacacagctctgtcctgggagtgagctggtttttagcggagacggagtcccaccttggctgcagggagtcgaaaggacttggaagctccgctttctacccagcgagcccctggtggcagtgggagctgcctgttcagctccagctcaccagccccagtgcccacaggatcagtctgattcccaagctctgctcctctccccagcaagtgagagctgggtgtcaagagggtctgaggaatccagacccggctgcgtggttgatgatctttgcagacaggcaagcacctcctgcctcgaactggctgcaaagggtatcaggtgctgccatccaggttcagcttgtaaatagctcaggtgtaccctgcacttgcagactctacagaggccatgggctcctgtgtgtgcggctacaggagtgagcactgaggtgtgctctgatcatccactgtgccatgtgccaggtttttggtctgacccactgcttttggtctgtgtgatgatgaaatgaggtcagagcctcgagttattaacactaacgatttgttaatgatagctactgtttattattttatttaatttttttgagacagagttttcactcttatgcccacgctggagtgcagtgagccgagatcacgccactgcactatagcctgggtgacagagtgagactctgtctcaaaaaaacacaaaagtttctcttttcaaaacattttactttaaaaggagccaatttaaagaaaactgttaatagttcaggtaacaggcagatacaggaaaagctgctgacagtgttgtatgaggtttgaggattttgatccaagctggtcccactcagtccatagcagagaatgaaagggcccagagagggtggtgacctctgcctgaagtcacacagtgagtcgaggacagggaggtgaccccaggtttctatgtgtagggcgggaggatgttctgggacacagttcaattctcatttgtcacacactttggctattagagatcaaccccttcgctcctgtgtcttgcaatggcagccttggcaaacgctaaatgaaaatcgtgacaacacttgtgttatgaagcatttactttgtgttcaccttgtactactcgaactcatgtcttaactcacttatccctcaaaaacaactctaggaggtagggccaagtaggaccatcatccctgcatttcacatggagctcagagaggttaagcaagccgtgcaaggccacacagctcataaatgcagagccaggatttgaacccccgtggcctgaccccaaagccgaaaccactcggcactgcaggttcgtcccttttctctgagatgggggtatccaatcttttggcttccctgggccacagtggaagaactgtctggggccacatataaaatatactaatgatagctcatgagctaaaaaataaaacaaaatcacacacacacacacaaaaaaacacaaaccaaaaaaaaa

SEQ ID NO: 614931 - DNA, 558 bp, Homo sapiens
atctagaaaagctatggatctcgcttggtcgccaggagggagtgcaggggcgtgatctcggctcacggcaacctccacctcccaggttcaagtgattctccggccttagcctcccgagtagctgggattacaggcacgcgccaccacgcccagctaattttggtatttttagtagagacagggtttcatcatgtgggccaggatgatctctatctctggacctcgcgatctgcccgcctcggcctcccaaagggcggggattacaggcttgagccacggcgcccagctacaaattctattttcttttggttcctgggaaagcatcgcggggcatttatccggtcccagtattggagtgaaacttctcagcatttcagagcagggaccatgatacaccctttcctttccttctccttaggggaaactccgttctaacccagaggactggggctccaggacccagtaacggagccctggattggaccctaaaagggagtaaagacaacggtgaagttcagtccggggttcagggctgccaaagctcatagcgtggagctt

SEQ ID NO: 614932 - DNA, 390 bp, Homo sapiens
tcccgggttgtaatgtaaacgggattattccagtgacatcatcttatcaggtttacagtaaagaacacaatactaagctcccaactcataagaagtaattaggaacttcactggcctagtttctggacataaaggtacagattcaatagttgtaagtttcctctaaattcggccagttatttctagggatctgccttcatcaggttacatgtaaatacccattttaaacagagataattgctccatgaatatattaattcaaggtagattgtgaataatatgactgttcagcttcatttctatcgccaagttatgtatcagaaagaacatcacagcctatggagactgaactagattgaagattttggatctaaacatacagaataattt

SEQ ID NO: 614933 - DNA, 105 bp, Homo sapiens
gcgctctcaaatcacggtctttcacatattttaacaacataacccacctcaattttttggggtttatttcctatgttggcaagatattccatttttaaaaatggt

SEQ ID NO: 614934 - DNA, 313 bp, Homo sapiens
cccccccccttaccccaatggggggggggggggggcggggggggggttttttaaaccaagccccttttgtggacccgccggtggcccggggacccccccccccctgtttttgcccccctagaaggccccggggccggtcccccccccgggcttttgcctgggccccgggggggggtaccctttccccccggggacccctttgcccccttgggcccttttgggggcccccttgacccaggttgggccaaaaagccggggggggccgggcccggtttcccgggggtttggcgccccccggggcccccctcttcca

SEQ ID NO: 614935 - DNA, 357 bp, Homo sapiens
  misc_feature (27)..(27): n is a, c, g, or t
  misc_feature (134)..(134): n is a, c, g, or t
  misc_feature (139)..(139): n is a, c, g, or t
  misc_feature (143)..(143): n is a, c, g, or t
  misc_feature (174)..(174): n is a, c, g, or t
  misc_feature (178)..(178): n is a, c, g, or t
  misc_feature (331)..(331): n is a, c, g, or t
aagttaaagaaaagaatggaatgcctntagtttcagagcgataaatatttcaaaagaaatagaccttttgagctcaggaaaggtgttttagaggaacaggtgtgattgtaggttaatgagtgggctttgaccancagcnaccnggactgtaattggggtggggttaaaaaggtncatnaagtgggccaatttaatcctgggtcttttggaactgttttcatattagaaagccattaaacaaagagttcacttcgaaccttattatcagttttctaaagaaagattgggattgaaaaggcaagaaaattaaagcccagggccttcggcaggnagtggggaggggcacagttttctctt

SEQ ID NO: 614936 - DNA, 125 bp, Homo sapiens
  misc_feature (101)..(101): n is a, c, g, or t
tgaacatctgtacagccgccctctgcagagtggggcatgaagatgtcatggacttggctgggcacctaccaactacgaacttgtgtgtgtgtgggtgtacnctgatgctctgaattctgtaatca

SEQ ID NO: 614937 - DNA, 212 bp, Homo sapiens
ccccgcgatatttttacaagatactatccaagtgtttgtgttgatgtgtatttagatggcagaaaggagcaatctgtgagctgagagaggatcatgacagctggtaatttatttccagtttattaatgttttcctatatctttgaaaattatttgtttaggaggaattgagcacttaggtaaaattccctttgtagagctttgtagtcaatg

SEQ ID NO: 614938 - DNA, 720 bp, Homo sapiens
ctcttccactgaaggaagatccgccctgtcctggtggcagcttcatttcaaagcacctctgtcaagagcccccagactggggtccccaccctatacaggaaaggctggagcatgtccagagccgagtgaagagtctctgggtggaagagttccgcaaggaaaccaagtgggaaatgcccacggctttttagaagaatgggaatgtgggaagaaaccacctggccgaaaccaagaatcttaaggagagaccggccgatagagaagttaggaaggtcatagctttggagatcggagaatgagaatcttgtagacaaatggttgcagactccgatgaagatgattacagcttcctccacgaccatggtccaccaggaccccagtctctgaaatggctcgaggttttgttagaccacacctttgctgaagaattccctactcagatcaggaatccccggatgctggaactctgggagggagaactggtcaaagagctctctgtggaagaacccagataaagagcaaatcggtattatgatgaggatgaggattaagacgtcgaccaattgtccatcgatgctgggccttaaattcatgttagtcgttagcgacgcccctgccctttgtccaaatgtgatgcacattagccggtatccccccatgaaatgtaatttacttggaagttactttgggaaagaattccttttttaaaatccgaaacca

SEQ ID NO: 614939 - DNA, 468 bp, Homo sapiens
aggcagtctgtgtgtgtgtgtgtgtgttatgggattgggggagtaggcagtctgtgtgtgtgttacgggattgggggagtaggcagtctgcgtgtgtgtgtgtgtgttatgggattgggggagtaggctgagtgtgtgtgtgtgtgtgttacaggattgggggagtaggcagttagcttggttgcatgttggaagctactcatgcagttgatctcgcttatgactgacttgagttccatagctgttggctgcgtgctctttgatcccttctttattatcatgcgctttcagtagtgctctcagtctgatggtgtactgcgtgcttggagcatgcttgagtgccaggtctctatctcggtgctcgatgttacaggttgctatggctctctctgctgtgatgctacctggtcactgatacctttgttttgcctatgatatctgtctgtgcatcctgaaccacatgtgatt

SEQ ID NO: 614940 - DNA, 985 bp, Homo sapiens
ggggggcctcgcttgaaagagtgaggacaggctgcgggaggagctgcaggactgaggtacagaggccaaggggccatggagtgacccagcgtgggattgatccctgtggatcccatgtgaggcgcacacccctttcgtcaccgacccgagtgagcgcgtgcgcccttcgagatgagacctctgttttgctccccgtgtggcgagggccagaggcgaggcgcgtgggtctcgggtggaaggcccccgattggtggtggtggttgggtgcccccgttgaaaggagggaagcgccggtggggctgtgggggctggaatccccgcgttggcccgggttccgggcggtttccaaccttgtggggaacgcggcgggtgcccccggcgggggacgggccgcctggggggttgcgcccggacgcccttggtgcccgggacattggtttgcgcgccccggtggtgggcccccccaaagggcaggccaatttggttgggaccttcgcttgggttgggctggcaacaagttcccttggagggcggcgattgccctgcctgagaaagcggcagtgcctggggtgtgtgcacaggccgggtagccccgataacggtggggcaagagagctcgggtgcgcccttgttgggagggaccctggggggggccaagcaagagccctccccccggtatgtggttcgtcgagcgaccggggggttgcctgcgggtttgttcacgacgcgccctggggcgcccacatggtgtggaacggcggcgccatggagatttgatccctttaggcgaggccaccggccctggtggtggagggggccggtcgcttggggactcccagggcttgtggcgccttaagagaggtgaccgagtagcccctgtgggctggctcgcgcgctcacaagggcgggacattcttggccgttgtgggaattgctggaccagtctctgtgggcaccgggcctttgggagaccgcctcgcagtgg

SEQ ID NO: 614941 - DNA, 568 bp, Homo sapiens
tggaaagggagtctcgctctgtgtggcccaggcgggagtgcaggggccgatctcggtcacagaacctccacctcccgaggttcaagcgattctcctgcctcagcctccagaagtagtgggatcacaggcttgcttcaccacgccgggctaattgttggtattgtctacaaaagacagggtgttctccgggtggatcaggcgggtctcaaactccgtgatctcaggtgacaccacccgtctaggcctcccacaggtgcggggataacaggcgtgagccacacgcacccggcctgacgaactcttgagctcaggcaatctgcctgcctaagcctcccaaagatgctaggattacaggcggtgagtcaccaggcccggagggctcatggagtatttaaattggtaaaagtacaccccaaaaagttctttggattccaggagatggaatttctctcagtcatacacctctcttggtggaccagagcatgctaaacatcaataggtataatagaaggtgataatgacccctggacaagtgtacatctagataacactcccggttgagacactc

SEQ ID NO: 614942 - DNA, 745 bp, Homo sapiens
actggggtgaaagtggataaagcatcataaatggctgacagctatggacctagggctgaggagtatgagttgctaactccacttaaggagggtcccaaggtcatgctggtacgaggcacgtaccacaacaagagcttcttgaccgccgatgacatgcaagaccacctcagctgggagggggacctgtcaattaagaaggagtggccagaatgaatgcatccaccatatttccccaccctagacacataggaagaactgtcttaggcatagaacagcaaccatgcactctcctacctaaaacacagttgagtccatttacaacactgacacatcagcttatagaggcatttctttgccaccctgtcactgaacgtggtccatgaaacaagagactcagaaacgtgcttcgcccaacctgctccctctgatcctccatcagggccagatcttccacgtccccatctaagttcacattgatttaatatttgcctgtgttacccctattcaggcaactagagcgcacaacctggacaagagtctaataacaggtctttgcctaagtttcaaccgttgattctaatgactacattctgttaccgcagttactggcccaatgagacactagcatatcccagtgcgagagataggccaaaagtctcgaaagaaacttccttccaaacaggggaacaaccatgaaggaaaaacggaatgggaagcggctattaataagaaaaaatacgcgata

SEQ ID NO: 614943 - DNA, 926 bp, Homo sapiens
tgcacgcgcactgtgagcagcaggcaggccaaaccaccttttctgcccgcacgtggtgcgcatgtgtgttctcctctctccccacccccgccatggaggcggtgtggcatgtgtggcgtggcatggcatccacagtgaggacaagagaagagctccgttccctcaggaccccactgggtgccgctggcagcttccagatgacctgggcccctgtcctggggaagaaacagctcccgtccccggtgctgactgctgaggagggagcttccttctgtgcgggcttctccacagcgcgactgctccagcatttttccttcaaggttcatccatgtgttccaaatgagaaggacatgatttgcatgtggccgaggagtatgtgttgtgcggatatcccacagtttcctcatcccttcacctgtggatggtcaggttcaaccatgtggctcccgatgacatgatttcagtatctgtgtctggctgaagagtgttccattgtgaatggacactatggtttctgtatcccatcatctgtggatggatagggcaccctcatccagcatcggacggagcacctgctgcacagcaacatgaccagcggtgacatccttctgtgctacatcacggaaatcttggggccttacttcagggaggagagcctgctgtaaggcagatgacttctcgtgtgcaaagcggcagagatgcgctttgatgatggccagcagttcccctcaggtggatgactcaaggctgagcgtatcagggccatgggcgatgtgcagctcaccgaaaacggggggcatcatgccggggagtgacgacgctcacccgggtcggagccggaaccgacaagggcttgggacggggggaaccgtgtcccataacaggcggggaggggcccgaaacggccccccaaggaaagagacccg

SEQ ID NO: 614944 - DNA, 730 bp, Homo sapiens
tggaaacagtcttgctgtatggcccaggctggagtgtggtggcacaatcacagctcatggcatcctcaatcacccaggcctaagcaatcctcccaccttgtagctgggactacagctcacagcacaccttggctaaaattttttttttggtggagacgggattctctatgttggcccaggcgggtctcaggctccggggctcagatggtcctcctgcctcagcttccaaaggcacaggccaagttgtagcttggtcccttgccatacatgcccaacaagaggttctatacctttaatgaatggacttcataaatgggtatatgtgggggggcaagttcttaaagctggggaaattggtaaattcctcctgaaatggttttttcatgcagttaccatgaactattactacaataagggagggtctggggtgtcaaaaaaaaaaaaaaaaaaaaaaaaaaaaaaaaaaaaaaaaagaaaaaaaggaaaaaagaaaaaaaacacaacagaaaaaaccagaacagcaacccacgcaacaattaggaaaaagtaagcaggcgcacgacgaaaaccaccaacacaacacaaccatcacggacaagccaacacacacaaacaatgaggaggggcaacaaacacgaggacgccgggcgcacacacagaacgcagcagcgaaaatcagaacgcgaccagagagaagagaactaacacggggaagggaaaaacagcaaag

SEQ ID NO: 614945 - DNA, 214 bp, Homo sapiens
cacgaggaaggacaccgctgcccaagccttcctggctgaagcctcagtcatgacgcagctgcggcataacaacctggtgcagctcctgggcgtgatcgtggaggataagggcgggctctacatcgtcactgagtacatggccaaggggagccttgtggactacctgcggtctaagggtcggtcagtgctgggcggagactgtctcctcaagttc

SEQ ID NO: 614946 - DNA, 960 bp, Homo sapiens
taaaaaccccggggaccccctttcggggaaaagaaaaaaaagggaaaaaagggccaaaaggggggggaaaaaggggccggtgtcccaccccggcggggaaaggaatgagggcccgcaccccaacctcccctcggaggagcagccgcgttgtaataaaaaaaagtgctccccgcgggggggacgaccaaagaggcggtggtgacaacacatacccccgagggttcatagtcagggggggtagaagagagaacggcaaggaggaggagtggtggtacagcaggagtttctcgaaaacagtttcgccgagtcgtggtggggccctcacccaagaaggaaggccgacggggggttattacaacacagactggtggtgcagaacaagaagcggtggtgggctgccccccacccaacgcgcggggggtgggcgaacaacaagagtggtggtggtcccccacatagcgccgcaagacaatcctcacagcgctctccttacacacaaaaaccgcgacaaagtatctcacagcagggtggtaataatagaagcaaacacaacgaatgattggcagcaccacaacaaggacgttagttcgcggcaacacaaaagcaatgtggctccgtcgctaaccaaagcggccacaaattaaaaagagggggggggcaacacaacacggggggcaacaaccgacagcggacagtcaaacatcacgagcgccgacagacgggcgcgccaaacaagaaggtgttggcacacccccctcataaaatagataacaacccaggcggtggcctcccccccaaaaagagtgtgtgatacccaaacaaccaccaaataacaaacctcctcgttgaacccccaggggggatataacccccccaaaatagtgggcggccacaaaacaagcaagctgcatacaggtgggtcacacaacaaaacagccacccttctgtgggcagaccgaa

SEQ ID NO: 614947 - DNA, 152 bp, Homo sapiens
tggagaggaccatatactagccaggcagacttacactatggtggcatggacaccagctcttgaatcagggcaagaattggacactatacattctccgacagtagctagaggtttcacagacctctttgacctgctggaggctcggccttacc

SEQ ID NO: 614948 - DNA, 169 bp, Homo sapiens
gccgcagacaaggcaaagcgaaattggtcattctcgctaacaactgcccagctttaggaaatctgaatagagtctatctatttggctaaactggtgtcatcactacgtgcatatatgactggcagcatcgaatactacgagtgtgcacctgctatatgtcagtactctg

SEQ ID NO: 614949 - DNA, 135 bp, Homo sapiens
ggtatcccaccccaactaggaggaactctgttttcaacgagagatgctgtctgtgcttggatagtcaggcaattatttgtgtatgaaacaatgtacaaatccatgttttgggaaataatgatctccagactttct

SEQ ID NO: 614950 - DNA, 293 bp, Homo sapiens
tactactactaaattagcgccgctcgactttttttttctttgacagagtcttgctctgttggtaggtgatctcagctcactgcaacctctgcctcctgagttcaaacaattcccctgcctcagcctcccgagtagctgggaacataggcatgcgccaccatgcctgggtaattgtttttgtattttagtagagatggggtttcaccatgttggccaggatgctcgaatctcctgaacttgtgatctgcctgcctgggcctcctaaagtgctgggattacaggtgtgagccact

SEQ ID NO: 614951 - DNA, 301 bp, Homo sapiens
  misc_feature (184)..(184): n is a, c, g, or t
accctaactagttcttatgtcctgtggtaagcctgagcaatagcagaagtcataagaatggcaggaaatatctttcttccacttgagacccattgttcagcatgcggcatcagtgctatgtttctgtttaacatcacagtgagggttacttctgctagcacagcgaacggtgatccagcttggnttcatgtttataaagcattcttctagcagttcatggggaccctctaaggccaaatgccttcagtaaaattgcttaggcgtcgacgcggccgcgaatttagtagtagtaggcggccgc

SEQ ID NO: 614952 - DNA, 149 bp, Homo sapiens
caggaagtcggggtagcgaacctcgtcgttgagattgccgtgaaagacctcttcctcatcatcccctgggaatggggactcgcaaaccagcatctcgtagagcagcacacccagtccccaccagtccacagctcgcgtgtacgacgtgt

SEQ ID NO: 614953 - DNA, 270 bp, Homo sapiens
agaatagcttgaactgggaggctgaacctgggagcttgaacctgggaagttacagtgagccgagatcatgccactgcactccaggctgggcaacaagggcaaaacccctctctaccaaaaacacaaaatttagctgggcatagtagcatacatctgtaatcccagctactcaggaggctgaggtgggaggatcaccttaggtggcaagtcgaggctgcagtgagccaaggtcttgctactgcactgcagcctgggcggtggcagtaagac

SEQ ID NO: 614954 - DNA, 1112 bp, Homo sapiens
  misc_feature (90)..(90): n is a, c, g, or t
  misc_feature (220)..(220): n is a, c, g, or t
tccaggatcatgatgtgcggctgggagctcgcgtccacggtgcggtacactgtacggtggtgtgccatcttcgcgggtgccgtatgtccnatgaaggaggatggactgagcacgatgctcaacggtgcagaccgaagaacagctagcgtacgttcggtggagctggactcccgcaacaaggggagcgacggtccgggtgcgacattctccgccccgaggncgtgaacgatgtcggccaactttcactcgggctagacgacgcacgggcctagtccatggtaagctgattctaagtggcattctcgcgagtcaagttcacagtgcctagtgttcctggcgtctagagtgccttccgtgcactttggtactagcggggcgatgcggctacttgggaccgcacgcactgtgcacgattcctacccgcagaggcccgcaagaagcagaacattgataccgacgcgtgtgtcgtaccagacgcttaccaaggccaagtaacccacgtgaacgcctacgggccgaacggaaccaaaggggggacgttcggacgcgcagcgaggcatggggccgaagggacacgacggcagttatgaatgcacccccgccgacaacagtggctcagcgggaaaagccggcagtgccaggaaaagctgacgggggggtcggggacggagacttcccctgggggacgcataactctgggcacgtcggaacgggacaaggaagcaatgggtgctacttttagcgttgtgccgctggtggtctcctgggtgcttcttcacttgtttgcctggtccactttttttttttccttttttttgtacatatttgagtgaccattcacatggtaaccattttggagatattttcctcgagatttacttgtttggtaatgggctaaacattccacataaaacggtttgtggtccggaaatggtggttcctcttcttttcctctttccgtttttctcctttattaacggattttaatggttacttttctggaagcacatgggattggagattcttcctttaagaaaaagcacaggggtagggtaaaaggtcaatgaaattatccttagggatgggtaaatgaccaataagtagatggggaa

SEQ ID NO: 614955 - DNA, 334 bp, Homo sapiens
  misc_feature (262)..(262): n is a, c, g, or t
cattatcttctataagcaaatcgtagtacatgctttacaatattaattactctggaagtttttgaactctgtatagtatcagatctcctttcttgatagtttcttggtactggcagttcttgtcttatcaggtctgttgttgctactatttcattcactttatctattttgcagagtaagtctcccggcagctataaagctggacaggttcctgatcaatgaattccgataaacaagatcaaaagcttctgccatatagccnagggttaatgaactatatgataccagcagctgactgtatgcgtgaatactcatttctcttacatagtatcga

SEQ ID NO: 614956 - DNA, 539 bp, Homo sapiens
gccgctctcccaactccaaaccctcgccgactcagatccagctaccccgcgcgccgtcggcatgccgttcactccgggcccctactctggcgtcagcaccctcgcccttgtggcgagggcgtcggccttcagcgtcggtgtcgtctacgggagcatcaagctctcaatcctcaaggcaacaaaacctaaaaaggaggaagcacatgctcatgctcatcactaaggacgatgggctgctacatgttaattcatgtggaaggatgttataaattggcagtgcacccttttctccataggtgcaatttggtttatgatttgtggacctcttgtctgtaacacacctgctgagttaccttagttttgtgtcataataaattcttatcaaatgacttgaaatcagtaaggaaggggaaaagtcaaaagaacccactcttgttttgtgaggttgcaaagttaggacatggcctcttgaatatcggtcacgaggatctgccttcctgattctgttttgttgcgacgatgtgcaatggatggtttct

SEQ ID NO: 614957 - DNA, 172 bp, Homo sapiens
tgagagagttttgagaactcagtcgtggatactgtggcataagtaataacgattggtggcgtatgacgttctatagcaaaaatatatttcgaacttgcaagggtaggctggagctaggtggctgagcagatagttaaatatagaagacttctgtgagccagttattaaacta

SEQ ID NO: 614958 - DNA, 1232 bp, Homo sapiens
tctcaggggtcactggaggctttttattttggagcacaaagacccccggggatctagccgggggccacccgcggaaaatgaacacgagaggctcacagtgaactctaaaacactggggggaagagggggagggcgagaaaaaacaaggactggggccaattacagcgaacggcaaagctagaagcggccaacgagggcctccaggggacgcggggcttctcaggatgaagaagtctcataagggaacgcgggtcacagaacctccacgggcggggggggggcggcataactaacgcaggggacccctggcgaaggggtgggccgggggggcctccagaagctggcctgagagcgctggacaccagagggggagggggtcctcgggtgtgacccaaacaggtggagaccagaagggaggtttggctctggccccaaaggtttaatctggggggccaaggggtgtgtttctgagaatgttcccttgggccgggggaatatttttaaagctctgtggtgtggccacaaggtctctctcttacatatttctagagaaagagagagctgggtgtggccactgtggggcccaaaagcgcgctcaagagatccggagcacagggggggggcaccacaagtgcttggggatctcgtggccacgtgtggcgacaaagcccccccaaaaacccaggggccaccgcgagatggaagggggagaatctctttaaaggtatcttccccccccgggaaacgggagtgagaatgaacccatccctgatgtggagagggcccccaaaaaacacatttgggggtgccccggtgtgggcccaatatcttttgagcgaacgcgcctttggagaaaaaaaaagaaccttcgggtgtaccaccggggagggccaaatttcggggggtgccaggccttttgagaacgccagcggcaaggccgcaatgtttcgacaagggaaatactccacaggaaccacacagggggccttggggggagaacccaccattggggggatggggacccctgtctggaaagataaatcccccaaaataacgcggagagattccctagggaacgtgggctgtgagaaacactttcggcgcaaaggtcccccccaaaaaacacccgtgggggaccagggggaggtcctctcgggatagacaccccgcgggcgataacctagggaaaaaacaggcactgtcccacagggccacagcccaatctgggtcag

SEQ ID NO: 614959 - DNA, 106 bp, Homo sapiens
ggatttgctggtgcagtacaactaggcttaatagggctcgaattcgaggctgaattcaagcttttaacgttagaagcttgaattcgagcagtagtagtagtaggcg

SEQ ID NO: 614960 - DNA, 202 bp, Homo sapiens
gtcacatgaccagctaccagatcttttatgcagttcgacgtacaaggtgacatcaaggtacgacaaatgaagtccagtttggggcctccatctccctccccggagtcctgatccagggagtgccaaaaccagaaagagctggggtagggtgctcgatcatggggaaggctgtaggggttcgtccggcagatggtcgtgtgag

SEQ ID NO: 614961 - DNA, 1276 bp, Homo sapiens
tcctccatttaacctttttaaatggggtctccaaaattctgtgacaaattttgggccaattggttcccattaaaaagttacgtgattttaaaaactaattaacttaaaacgtgccacacgccaaaaaaaaaaaccaaagtgtggctccacaaaacatttcctccttttccttcgtaaaggtttacgatgcatttgttactcattacccagttcttttatacttacttaaactttaaatgtggccaattgtgaacacaaacagttctcgtgagacaccgttctctttccaccacgtgatttaaaaggtggggtgtgcgcaggtctatttaggggaattaattattctcacttttacccttttcgtggagccttttcgtgggggcaagaatttgtgggtgcaccttgtgccaagcctccaagcaagcccttttcttgtgttcccatgtgctttgggagtgaacaccccaacgcgaaacacgtggtcgtgctcctcaattatccacgaaaccgagcaaaagggagacccaaaagggcgtgggatatagttccgttgaaaaaaggcttcctcaaaccacacatgtgggcgcttgtgcccggaggaaccccttttttcaccccaatgtgcgccaggaatcttcaccacaaaacctcttcaaacagaaattttttagggggccaactctctccccacgctttgtcttcaccccacgacacggcggaaatccactcctttttttcctttacaggttctcagccaaacattttgggctttggcacttgtgttagaccccctgtgtcggggcaactccccattaaccggggggggcttttaacgcccgggggcttaattttggggcctgggcgattggtcccagggattaattcacccttggatgccagttgaaagcccaagcattgtctacccatagggggggcccacaactttatgagctggatcccccaccaatcgttgtgccccgcgaaaaaaaacacctgttagacgacacccatcttttgccaatttataagccccattgtcccccagaaagagcttctctcaaaagcgttcagggcgactttccaaccgaattatatctcgggaaaaccgtatcgtgggacatgtgtaccccacacccggggtggtaaaaccacagttcactgggcgagagaacatgccactaaccccatggtgaaacttcgcaaaagacacaaggagataagagagacgtacagggaaacccaaacaccgaggatcgcagtaagaccatgaacactc

SEQ ID NO: 614962 - DNA, 1804 bp, Homo sapiens
aactcgcacccgggtcctggctgcaccgcatcccctcctgcaccccctggatggcccttcagccaacgggggcctgggcgatggtcgaccacggagctgcgcaaggaaaagtcccgggatgcggcccgcagccggcgcagccaggagaccgaggtgctgtaccagctggctcacacgctgcccttcgcccgcggcgtcagcgcccacctggacaaggcctctatcatgcgcctcaccatcagctacctgcgcatgcaccgcctctgcgccgcaagaggagcttcaggacgccctgaccccccagcagaccctgtccaggaggaaggtggaggcccccacggagcggtgcttctccttgcgcatgaagagtacgctcaccagccgcgggcgcaccctcaacctcaaggcggccacctggaaggtgctgaactgctctggacatatgagggcctacaagccacctgcgcagacttctccagctgggagccctgactcagagcccccgctgcagtgcctggtgctcatctgcgaagccatcccccacccaggcagcctggagggcttcgtcatggtgctcaccgccgagggagacatggcttacctgtcggagaatgtcagcaatcacctgggcctcagtcagctggagctcattggacacagcatctttgatttcatccacccctgtgaccaagaggagcttcaggacgccctgaccccccacctcaacaccagctccctgctccccaagccccaaggaactgtctccttccttgccccctcatacccagtccccagatctttctctccccatttgcccccttggtggccctgatccctcccgatccccctcctcagtgctgagcaagggccaggcagtaacagggcagtatcgcttcctggcccggagtggtggctacctgtggacccagacccaggccacagtggtgtcagggggacggggcccccagtcggagagtatcgtctgtgtccattttttaatcaggtaagcaggaggaggggctggggtggctgtgtgtgggcctgatctgcatgtgtggacaggtgtgtgtgtgtgtgtgtgtgtgtgtgtgtgtgcgtatgagcatgcatgtgtatcatgcataagtgtatgtgagggagtgtgcacgtgtacacatatgaggaatgtgtgtcaccatgtaaatgccggtgtgtgtgtctgcatggacacaggtatgtgtatgggtgtgtagactgttaattttttttttttttttttttttgcgtgaacctctgcttaagtggattgttaattcaaattagaaaggggtctttatttggcctggcatggtggctcatgcctgtaatcctagcactttgggaggctgaggtgggcggattgcctgagctcaggagttcgaaaccagcctgggcaacatgacgaaatgctgtttctactaataataccaaaaattagccgggtgtggtgacacatgcctgtaatcccagctactcgggaggctgaggcacgagaatcattagaacccaggtggtggaggctgcagtgagccgagattgcgtcagtgcactctggcctcggcaacagagcgagactctgtctcaaacaaacaaacaaacaaacaaaaggactctatattcaagttaaaataagaagtgtaacagaatcatggggtcttttttgctttttaaattttgatgtggctcacacctgtaaatcccagaactttgggaggccaggggaggaggattgctagagcctgggggttcaagaccagcctgggcaaagtggttaggacccattctc

SEQ ID NO: 614963 - DNA, 325 bp, Homo sapiens
ggaatttgggacagggtcaagaccccacacactttggacaaagtagagggcaccctctatatacagcctctttctctttagatcgacttattccacaggtgtgtgtctccgcgatacacacacaaatgagggtgttcaacggcacaaagaactctgagagagaaaagtcaaagagcctaggcttatggctttgtttgcttcctcacagtggcatttagagtgatgtcaatttgtgaggcagacccgtatctcgctgtggttccgctcctcttctgtggtttgcaaaccacagggcgggttaagcttgggcccacgacccggagtt

SEQ ID NO: 614964 - DNA, 192 bp, Homo sapiens
tgaatagtctcccttttaaactgtcagatgtagctaaagattcttcatatttatgttgatcttttcaatgaaccaacttataggttacattaaagagtcagctgtagtcagtaataacttttttagacccacacaatcaggtacacacagtaaaaaagcaagccagcttaagcagctgagaggaactggtct

SEQ ID NO: 614965 - DNA, 101 bp, Homo sapiens
cacttgcctccgaccaattcgtattgaaatttccaaagctgtccaaagtaaaatctccctcggactgcgaatcgttcccgaaaatgagcgtaatatatttt

SEQ ID NO: 614966 - DNA, 268 bp, Homo sapiens
cggctggaccgcgctgcaggcatccgcaggtggcggcaagatggaggtgacgggggtgtcggcacccacggtgagcgtacatcagcagtccctcggaaccgttccgctccgagaagcgatacaggcctgaagctcagccatcggtgaggttcaagtgtaacgtggagttgctggtgggcagccctgttcctgcatggaacgtggagctgtattggagttgacgacaaggttctacagcaagcttggatcaagaggatgcgctcctggg

SEQ ID NO: 614967 - DNA, 198 bp, Homo sapiens
gggctcggctgcccaagaatctagaccatgggaaaaatgtgaacgaaggagatgggtttgaatatttcaagtcagcaagttgccacacatccaaaaaacagtggggacggggagcaaaggccccaggagggaggccggataaccagggttggaaggtacggagggaatttttaggatcatccagggccatattccaca

SEQ ID NO: 614968 - DNA, 119 bp, Homo sapiens
ttagcttctgagtagctgggacacaggcatacaccgtgccagcataatttttgtatttttagtagagacggggtttagccatgttggacaggttgatctcaaactcctgacctcaggtg

SEQ ID NO: 614969 - DNA, 326 bp, Homo sapiens
  misc_feature (165)..(165): n is a, c, g, or t
tgagttaatactgtactacttcacttaaaaggtagaatcttcataatcatataccctcaccctattcctgatgccacagttgttgtatgtattatattaacaaaagtaataagcctcagcacacaattttaatatttgtgcttaaaatggttatatatatttganagacattaagaggaaaatattgaccttaacatttatccacatatttaccatttgtaatgccctttcctctctgatgatcagatatctatttgatactgttttcttcagcctctacaacagcctattatcattataggtatagggtctgtctgtggaaaaaa

SEQ ID NO: 614970 - DNA, 155 bp, Homo sapiens
gggtgatctattgctcatcattatgagaatactggtcttcctgccttaagttacattcgtgcttccgctcagattcggatcatggtccattagagagtgttcgcagacatcgtttctgaaagattagagaataatcccctcgccaagtagcctgt

SEQ ID NO: 614971 - DNA, 1441 bp, Homo sapiens
  misc_feature (878)..(878): n is a, c, g, or t
  misc_feature (891)..(891): n is a, c, g, or t
  misc_feature (1176)..(1176): n is a, c, g, or t
  misc_feature (1189)..(1189): n is a, c, g, or t
  misc_feature (1232)..(1233): n is a, c, g, or t
  misc_feature (1248)..(1248): n is a, c, g, or t
  misc_feature (1419)..(1419): n is a, c, g, or t
  misc_feature (1438)..(1438): n is a, c, g, or t
gattcgccagtgcgccactagttttggtccttcttaaggggagacaccccgaagtctattggcgaatttatctatcttgtataaaagtaaacaacttgtgggttccagtaattcaaccatggggcctttcagaggttgacgactgaaggggccaagtttttctgttgataagggtggcaatatgcctattcgcgtggtcgatttgtgccctgcgaaaagttgtgggggcccgtcacttggagtcgcacgcagtaagaggataatcttggcgctttcaggcaggagttaaacgccatttggtacccggtggaccatggagtgttagcccttggggtaaagatccgttggtaatttgtagaaaaaaggtacccaagaagggagtatgcagtgtagagctttcggaaggcttctcgagactgtgatgtaactacacggtgccgatagtgattgaagtgacacggaaaagtgggtgcacgagctgaagtgtggaaggggttcctaaggactgagggttgtatctgaaccctgttaccatcaacaagttctgcaatagccacatgtttgggagccccccccagagcgcccgggcctaacctgaatatcttctaatgagtttttgtgaatactgggttggtgaatataagtattgcagttagccaactgcacggtagcccggaatttggcaataatttggagagttgagcagcgcttagcacatttgctgaaacgtcagcccctcggttgagctccccttgagccaggttccaatctgaaatcggaatttgcaattcaaacagtttaaatgccaacccaagtaggtctgaactaaatgtataaaactcagcgccgccgccgccacccctaactttcaagggcanctgctcggggaanccggtttttttttttggccattttgcaaacaaaaccaacccacacccgttatcgcagagcacccaaggcccatggcaacttggttccacaagggagagccttccaaggccatattgtcagtctaattaatatgagctttttttttttttttcagtgctgcctatgtttccttgtgctggtagaagtggtggcattattaaggttgctgcaaaaaaaaaaaaataaaagaaaagaaaaaaagaaaatccgaaacacccctcccccgaaccacccccaatatgctgngtggaatgaatcngcatgttcctagagtttgtctcccttttttttcgtcatcatcnnttcggcaggagtcantcgtgtgagaggcctcagtgtagagtgcagcattgggaccttttgaaaaagaccaaaacggaagttttctgacttagagaaactggtgagtctgaaggagaggaagagtgacgaagctacaacgagaaatgacattcgcttggataatacacctttcatcacacaggtacngtttagcccccagaggccngcc

SEQ ID NO: 614972 - DNA, 412 bp, Homo sapiens
ctactactactaaattctgcggccgctcgacgggtgacacagcaaggctctgtctcccaggctggagtgcagtggtgcgatctcagctcactgcaacctccgcgcctacgggttcaagtgattctcctgcctcagcctcctgagtagctgggactacaagggtgcagcaccaccacgcccagctaattttttgtacttttagtagacacagggtttcaccgtgttagccaggatggtctcgatctcctgacctcatgatccacctgcctcggcctcccaaagtgctaggattacaggtgtgagctgccacgcccagcccagaaggttttcagtggactttgccagatctctcagaggaatcactatctatggcagctccagttaagtaatgtatttcgtcgacgcggccgcg

SEQ ID NO: 614973 - DNA, 124 bp, Homo sapiens
acatttcaacaatagcctggcgtagcctaaccgctaacattactgcaggccactactcatgcacctatatggaagcgccacctagcaatatcaaccattaaccttccctctacacttatcatct

SEQ ID NO: 614974 - DNA, 819 bp, Homo sapiens
  misc_feature (312)..(312): n is a, c, g, or t
  misc_feature (439)..(439): n is a, c, g, or t
ggcacattaagatcacagtacttcgggctgtgcaacggaggggatcaaggtacggtgccaccatgaatgaccttttgcggcagcacctgagtacctggcccccgaggtgctcggatggacaatagactatcggccgtagcagttggactgggtgtgtgcggctgggccgtggtcgatgtcactgtagactggatcgtgcgggtcgcctcgtgcccttcgtaccacaaccaggcacctagtgaggaagaccttcttcccgagctccatccgtcgaactgggagcgacgatccggcgttctccgcggctacgcntttggatccgcgtgaggcgcaagctccctatgacatcttgcacggggcatggcatcagaggatatggagctccctaatgcctaggtatggcctttgggccgtgtgtggcctcccgtagcgtagccgncctaaaggtagaaatccaatgtcagacgagtcaggcatatcctttcttgccctgggtatcggttggttggtccaagctagcagtggtaactacgcacacgaacgcgtcagactcgcgatcccttgctaagcgccccaggtctagcgtcggcacgacgtgacacgcaggtgatttttgagtgagcgcagttcgcggtcccagatgatcaccatcgacacctgctgaccaaggattgacttgccatggacgttgttgtcggcacagcgagcgcaggtccccactttcccccagggatctcctactccgggcattcgggacggctgaagcggcggtggactgtgcttggcgagaagcctgggggggttgggatgggggcttgt

SEQ ID NO: 614975 - DNA, 106 bp, Homo sapiens
cgtcaaaggttcattggtacatgctgacttcttgtatctatcggctacttccttcttgagatactgtagtgtgtcagctaattctatatggaacgagttggacagc

SEQ ID NO: 614976 - DNA, 274 bp, Homo sapiens
gtcgaccccacgggcttttaagtcttggaagcacccggtccatgactctacggattccgaggttgctacctgcattcccagcagttctcggtagccgtcgttgttgacacctgtagccaccagcacactggttttgaccacacgccccccttcgcgaactttcatcgtcagtgcgtcacaagacaggtagtaatacggacctgaatccagcggccgggtgcggaagtcttcgaccatggcgtcgagttctttggccatgtcagatacgtcgacg

SEQ ID NO: 614977 - DNA, 189 bp, Homo sapiens
attaagagatagctcactggaactcaacttcacgagctcaggaatcctcccattctgctcctgagtggttgggactgcaggcacacatgcaccaccatgcctggctaatttttgcattttttgtagagatggggtctcgccgtgttgcccaggctggtctcaaactcctgggctcaaccagactgcctg

SEQ ID NO: 614978 - DNA, 498 bp, Homo sapiens
gctggagaaactcacagtcatactgaatagccgtacttgacgcttctgaccacaaacttcaagggggcgctcagcttgcccagtaatcttactatatttctctactaaattcactgcgccactctccagataagtgtttcacatcttctccagccctcaacaccctcccttagtttctcgctgttagttaaagatcttgcttcttattttgctgagaaactaaatgtcatctgctggaacgtacgtgcctctcaccatcagatctcccagggtgcctgcatctatgcccgctgctacctttcttcctcacaatggatgcatgcatggatagatggatggatggatggatggacggaaggatagatgaacagacggacagatggatggatggatggatgggtggacagacggacggacggacagacggattgatggacagacagatggacagatggatagatggatggacagatggagggatggccttctcttgcatcc

SEQ ID NO: 614979 - DNA, 306 bp, Homo sapiens
agggagttgggagaccaactggccaatgtggtgaggacctgtctctacaaaaaatgaaaaaattagctggtgtggtggcaatcactgtgtcccagctacttgggaggctgaggtgaaggatcactcgagccctgcaggtcaaggctcacacttaccgttatacttctagagatgcaggaggtacaatcgttagctattctatatatcatatgaccactcttggattagcactagtttaaaatgctatattcctgtcatctattcataagaatgccagaattcctattagaactaacctaagacttc

SEQ ID NO: 614980 - DNA, 146 bp, Homo sapiens
gcgcggtgtctgagcgtgcatcatggtggctacacgcccggatattccatgtactgtggaggctgaggtgggagaattgcttgagcccaggaggtgcaggctgcactgagtcaagattgcaccattgcactccagccggggtgaca

SEQ ID NO: 614981 - DNA, 196 bp, Homo sapiens
gctggtacccggtagagcggtctcatcccctgtgtgtggttggggggtcagctggatggggaaagcagtccaaaagtcccagttagtaaagcagccgaccctgaagaaagcactttcctttctttgtgtccctttaagttttcatttcccttttgagaaagtggtcagttcttgagcgtctcatgattttcatgcc

SEQ ID NO: 614982 - DNA, 332 bp, Homo sapiens
  misc_feature (84)..(84): n is a, c, g, or t
  misc_feature (230)..(230): n is a, c, g, or t
  misc_feature (274)..(274): n is a, c, g, or t
tggagacgcatttcgctcgcacttgtcacccaggctggagtgcaatggcgctatctcggctcactgcaacctctgcctcccggnttcaagcaattctcctgcctcagcctcccaagtagctgggattacaggcacgtgccaccacgcccggctaatttttgtatttttaatagagacagggttttgtgtggggctggtctcaaactcccgacctcaggtgatccacccanctcgacctcccaaagtgctagaatacaggtgtgagccacctagnccagccgtaaattttaacttatataaattatatctcaatattttcaaaagggccacct

SEQ ID NO: 614983 - DNA, 1175 bp, Homo sapiens
gtgacatctcaggctgatttgtgctgtcctgattgttgcgtgctggtgttggtggaattgtgaagctggtatctccagatgaatggtgcaagaacccgagtagcatgccgctttcatgggcttacacacctgggctgtgaacatcagactaatctgtcggctgctttaatgaaaagtggattccactgagccacccatacagcacagaagtagatatgagggcagattgttcaacggcaagtccagcactttacgtgtataggaaagattggcctacaaccccgtacacatgttagcatattgtgcgcaatctttctgtgttggaaatggtgatcaatcaatgcctggaagcctaatgatgcttaacgattgctcttggtttcatagggagtggagaaggtcactccgtagaggatggctaatagctcgagctggaacacagctgctgcattgatggctctgggaactggtactcacttactcgaccaagcgtacgtccaagctgtacaaagcacctatgcgtcctgctctctccagtgatgtctactaaacattggtaggtattggtactgtgtcctgttggccgagtggagactgtgagttctcaagatccgggtatggtggtcacctttgctccagtcaacgttacaacgggagtcgaatctgtcgagatggaccatgaagctttgagtgaaggtcttcctggggacaatgtgggcttcaatgtccagaatgtgtctgtcacaggatgttcgtcgtggcaaggttgctggtgacagcaaaattgacacacaatggaagcagtggtttcactgctcagtgattatcctgaacatcaggcaaataagggccggtagcccgtttgggttgcccaggtccaattggttgcaattgtgaagcctagggaaaattagcgccgtctggtgaaaacggggaagaagggccgcaaatactcggaccggggagacgggccagtaggaacagtcacgggacccccatggttgcagtcagtcccaaaataacaccggcagcgacagtcagcatgtaaacacatgggggaggtaaaaagagcaaaaggtgcgagcactaagcgagaaaaaggagaaatagacacaaagacaaataggatagactaataggtcgcatgagtgtctgacatacatctatgatgcggc

SEQ ID NO: 614984 - DNA, 320 bp, Homo sapiens
gaatttgcccacagaaccctctaaatccccttgtaaatttagctgtttagttccaaaggggaaccagcctcttctggaacactaggaaaaaacccttgttagagagagtaaaaaatttagacacccattaggtaggcctaaaagacagccaccaattaagaaagcgttcaagctcaccacccactacctaaaaaatcccaaccatatacctgacctccgcacacccaattggaccatctatcaccctatagagggacctaatgttagtatatgtaccatgaaaccattctcctccccataagcctccgtcagattaaacc

SEQ ID NO: 614985 - DNA, 241 bp, Homo sapiens
ggcagggactgggaagagacaggctgagaggtagcaagggggatcatttaaggtctcactagcaattcgaattatagactttattctaagaataatacaaaccgaattaaaaagcaaatagttggtaacaacctataatagttaatatttgtaatacatcgagggtacacaaagtgaaaagaatagctcataaaacggacatacgattgacagtgagtgtcgcacaactggtcgacgactt

SEQ ID NO: 614986 - DNA, 90 bp, Homo sapiens
gggggggggggggggggggagccttcccggggcctccccttccctggtgaaggggttttggagagaaacaataaagagtttcccccccca

SEQ ID NO: 614987 - DNA, 1358 bp, Homo sapiens
ttgttttatgttatattgtttttggatggatatgaagatagattgtaattgttatagaagtattatttatggaattgtatatacttcatattcattaattgtatcttagttagtgtgttttttttgtgttgtgttgttttttgttttggttgggatgcgaggctattatttgtataatattaagtgtatatgtgtatttatatttctgtatagattatttttatttttggatgacgatataatgtagttttattaatttatatatttaagatttatattgtatgacttatatatataagtaagtgggtaaggtaatatgatagttattatgttttatttttgtttggagttggagtagttgtgttatggttggtgtctacttatgtatcttgtttgttgatggtattttttttcttgttttctcttttgttgtttgtttatgtgtattgtaatatttcttgttagtattatatatgtttattttgttgtgttgttaattaattttgttggtttgttgcgttgatagtatcatatattatgtgtgtgtctgtactatttattttatctagttgctcattggtatggagttaagatgatatttatgatcttatttttatttataagtattgaattagttgctcttgttcgtccttttgcgtttttctctcttctctttctcttgtctgtctttgtctcgcctcgcgctcactctgttttgtttgtgttctctctcgcgctctctcatttcttgtgtgttgtggagtagggggtgtggtgttgtcgctcctcctcctctctcttttattactcaattgttctatgtctctgtcgtctcctcgctctctctgtctgttcttgttatgtgtgtgtgtctcgtctctcgttctactgctctcctctgctctctcactacacacacacacacacataatagtatatgatgtagtatataaattataacacacagagactctcgctcgctctctcctctcctctctctgtggtgtcctgctgctgctctctctctctctctctcctcctctcctccctccgtccccgtcgacgatactgacacccgcccctctctctcctcccgcgccctctctctctctctctcctctcctctccttccacattacccacccctctcctcgtttggtgcagcaggcaggattctctttttctattatgggtgtgtgtgtggtgtgtgatgatatatatatatatactactactactacacacacatgccgcccgccccctcctttcttgtctctacaagatatattttttttttgtgttttttttatatataagaggcgcgcgccgcccctctctcttttttttttttgtggtga

SEQ ID NO: 614988 - DNA, 230 bp, Homo sapiens
  misc_feature (89)..(89): n is a, c, g, or t
  misc_feature (101)..(101): n is a, c, g, or t
  misc_feature (149)..(149): n is a, c, g, or t
  misc_feature (155)..(155): n is a, c, g, or t
catactgaagacagcaacagaagtcacgttcagggactggctcacacctgtaatcccagcactttgggagatggaggtaaaaggttctnttgagcccaggngttcaagaccagcttgggcaacatagcaagactccatctcttaaaaantaaaantagtaacattagccaggtgtagcagcacacatctgcagcagctactcaggaggctgaggtggaaagatcgcttgt

SEQ ID NO: 614989 - DNA, 1475 bp, Homo sapiens
  misc_feature (1015)..(1015): n is a, c, g, or t
  misc_feature (1023)..(1023): n is a, c, g, or t
gtgattgtgtgttacaaaaaagggaataatgtttttgtttcgtgcgcgcggggggcacaaaaaacagatgttgttgtctgggggggggaaaccacggccggcctacatataatgtgtggccccccccgccccccccaggtggggtagtaaacaccaacaccctgcgggttttttgtttcatcctcttgggttgttctacacgacgaggggtagttttgaatgtctcttgggttggacccccaccttcgtcctccacacgcggcgctctccatcaatatattagggtcgtctcccctgcgcgtcttttatagctcccccccccccggtgtgtatttttgtgggaatattcgcccccacccacacaacagggggggtgtctccaccacaagagtgcgcacaatagccctcacaagagtgttgtggtcgcgtgtggagaagcgcggtgagaagaggggatatatagaagagtagtggtgagtctctccccgcggttgttgtctcggcggggatgaaaaataaagactgctggatgatagagtagggcgcccccctcctctatataatgttcttcttctggagaatagtattctcggggggtagagtatagtctctggctccactctgctgtgtgagagtaatagtagagcggtgtgcgtcttctcggcgacacaacgggcatcacacagtgtggtgtgtgttgtgagagagagctttgtctctctcgagagactttactactcgcacaccctctctgtggggtgtcgtctctctgtgtgtctctgtgtgtctcgtgagagagtatagagagagacgactacacgacgacactactgtgtgtccgggggggggtgtgtgtcactctcacacagcagcacacagctggtggagacaccacagagagagagtgtgctgtgctgcggggagagagctgcgcgcgcatcacagagtgtcacacaccacacagtgtgctgctgcgctcccacagcagagagagagctctgcacagagagagagngatcatanaaaaggagagatatatatattattctctctcttatatacactctctgtcgcacacacgcgcacacgctgctgttagtatactacacaggtggggtgtgagagagagacacagggtctctcacagagaccactctgtgtgtgtgtgtgtgtcacacatgtggcgcacactgtatgagagtgtgtgagagtagagtataaaagagactgggtgataatgagagaaccacacagcacttggtaaacaccctcacagagaaggagaaagagagagagaatatttttggggagacccccttgggtttttctttttggcgcgggggcacgcttttataaggtatattatgttttttaaaatccgtgactttttataatgggaaaccacacttgagccccaaaatttgtcacccgagaattttgaggagaccccctttaaaaaagtttaaatgaggaaa

SEQ ID NO: 614990 - DNA, 106 bp, Homo sapiens
tctacaggatctctgtgctttgggacggcgcgagctcagtgataagaagcggcagagacggtcgcacccagttcaagatagagcctcctgcagcttgtggagatcc

SEQ ID NO: 614991 - DNA, 416 bp, Homo sapiens
  misc_feature (327)..(327): n is a, c, g, or t
  misc_feature (359)..(359): n is a, c, g, or t
  misc_feature (376)..(376): n is a, c, g, or t
  misc_feature (385)..(385): n is a, c, g, or t
  misc_feature (404)..(404): n is a, c, g, or t
cttgtgatagaagtagcatgttgctgccagaatacaagcattgcttcgggcaaattaaaatgcatgtcctttcttaatacactaggaaggagaaataaagtccacaagtccaagcctgcactttcaatactttttccatgcagagttgtgcacatgggagagggtatccggtttgtccagtgattgttctttagagagttggaccactatattgtgtgtttgctaatcattgactgtaagtcccaaaaaaagcctccgtggaaatgttaatgccctaatgtaacagcagagtaacattaaaaattaaaactaccattttaataaaanccattaataatggccttggtaacaatggcatncccatatttttaaggancagaatttnctacttttgaaaggctttngccgtttccccg

SEQ ID NO: 614992 - DNA, 816 bp, Homo sapiens
ggcggctctttgttgtcaccctcggcgtcggggcattaacaatatcttcgtcattcgcgctgcggcaggctcgcctctccgcttttttatttcgtgttgccacacttccggcaaaaccttttatcgggggccccctccgctcttaacaacgcatttcgggggggaccccccattgattgaagggagggactctcaagtgtgtggtgtcgcgctcgttattagtgggtgccacccgcaccacatagaggggtcttccgccacactgtgtgtggccccccgctacagcatttctctgcattctttcggacagttactttcctttatcaaagaatccccaagccgtctattggaagggacacaagagaactaatgggcggattctcttaggagagtaccgggcgaaggagtcttctcatacggtgcgctcacccggaattcgaggcgagctgtgcgagttaggagcgtagataccacacagatgcacgctacgatagtgggtggagacaaacaactatttacatgtctcctccgcacccttcttcagtgcgtcaaataaattggaggaacccgggaatcttttataaattagttctccacaatgcctacaaaaatgcagtcgtctttaacattcttcccccccccaactaatacgcaattaaatgttttacactgttctgtaacaacaactgggctgctcctctgattgtgctccatagcaccgctgtatatactccggtattatgtcaacatgttcccgctttttgccccacaaaaataaatccatgtttctatcagtactccaccccatcattaaca

SEQ ID NO: 614993 - DNA, 813 bp, Homo sapiens
  misc_feature (371)..(371): n is a, c, g, or t
atcataaagatcatttggataacaataataataacagatatatgtatgacacgtctacatcatctgaataatggtgaggcagaatgaccatctattatagaaattacttgactctgataatgcctgtggtcgatgtgaaagcgaattgacacctgacagaagtgactgtatgaagatttgagagagtgatgaatgattagagtctaggacatgctcaggaggttaccttgggtagtactttgaattctgaaaaacgagctcagtgtcgagggaatgtactaggcaaatgtgttctgacatgaaatgagagctgagaggatgcatggtgcttggtgaggttcccttggtgccagccctgcgtcccgaacaangcaatagaccttcaagtcgaggagtgccgttaggcggtcaaagaggggcgtccacggttccaagtctaggtctgctcctggatatcaaactctacttcaacacattcaacagcgaatgccatctcacatagaagctccaagattgacacgtaatcctgttgctaagcaccgggatattcactgcatttatccaatgaaagaatgtagagacattattcaattgtgtatgatgactatgattctgtatatcaacattcatacaatagtggcatggttggatttaagggatttctggaaaggatgtcaaacttgtgacatggtgagacgagagaagctgccgtaataagtgaaagccacaggttttgatgctctgagacgcatcaatgtgcagtaaagactgtgttgccagaggggaggtgcagtcagacacgagtcactgtga

SEQ ID NO: 614994 - DNA, 118 bp, Homo sapiens
tcatcaacccttaaaattgtgccatttaaaaagacaattagacccttcctcaactcatgttcacccaagtgcagaggaccagctctctctgcgcgcctcaatatgtcctggtagaggg

SEQ ID NO: 614995 - DNA, 294 bp, Homo sapiens
  misc_feature (191)..(191): n is a, c, g, or t
gctactcctaccgtacgtttgtgctccttatctcgtcaaactgaagagtatattgatagcacattgcttggtatgaagattacatacattatcatccacttaagtgcttatgatagtgcctgacatcttaggtctgtcgctcatagcctggctgagtaccgatgctcgaagttcatagctcgtggctacantatctttagcagtagatgctgaacaccctggtctttcagagaattggatgcggtcaaagcctgatcccggtcacatcaaggtcacactccacctttcatgtgc

SEQ ID NO: 614996 - DNA, 927 bp, Homo sapiens
gtggagctgtcgccatgaacgtcgagctgtgcagattttaggcgtggtacaagatctaccccgggacacgggaggctgctagcgctagcgtaccgacgggcaaggttattccagcttctcttaagtgcgaagatgcgagatcggcttatcctttccaagaggaatcctcggcaggataatacctgtgtacttgtccctctacgagaagggaagcacgaaaagagggacagtactggagaggatagagttcaagataggaaaatgaaccccgccgcagctagtcatggttccagacggggccattactggtgcatctcttgctgatataatgcgccaaggatggcacatcacgaaaactcggaaagttatgaaatggctcacacgagaactacgctatcaggggctgctagatggagagcatagataagagggctatatgcaaggcatctacatatatgacctcgtcgataggcattgcatgactaagggcagccctagcataaggcaggcagcctaatgcataaagattgtgaatgcctgtgaaaggtgttcagctgcccgagtggggtggagaaagcttaaactggcagtattagattatttagacagtaaatgattggagttagtaagctctatacactgaaactgtggattataattgcattgaaggggctggcgtcagaaatacattcttctcgctccgggggacctcaagtagttgcgttgaacgccggggtactacttgagtcagaagctggtacccgaaattctggggtcggtaacaacaagaagcattagagcccttgggccagagagtaaaaaaagccttgactgatgggcaacgtaacggagagtattgcgaaatgccttagcaatgggcccggtacctacgagggcggagcaagttgctggcactcgggtccctga

SEQ ID NO: 614997 - DNA, 342 bp, Homo sapiens
ttttttttaaggtatgatcttactctgtcacccaaggtaagagtgcagtggacaatcatgattcactgcagcctcaacctcctgggcttaagcaatccttccacctcagcttcccaagtagctgggaccacaggcatgcaccaccatgcccagctaattcaaaaaaatctttttgtgcagatgtggtctcctatgttgctcaagctggtcttgaactcttgggctcaagtgatcctcctaccttggcctcccaaagccaagacggaataccgccactggtgctagtgcgaactcattctaagcgaatcggcttttaacccgcgtcgataacggttggcccct

SEQ ID NO: 614998 - DNA, 949 bp, Homo sapiens
  misc_feature (282)..(282): n is a, c, g, or t
  misc_feature (891)..(891): n is a, c, g, or t
ctgagctcccctcctgcctcgagaagggcaggtcttctcagagtgcttggtgggaacaagaacggagggaggggatctgcgctgagatataaaagccggttttcggggctttatctaactcgctgtagtaattccagctgagagtgcagagtggagcgagctggggcaggccaggcatagtgagtgtgaagaagcctgggtgctgagacagagctgaagactgcgagagctgtccttgggagaagtggagatccaggagacgaaataggggagcttacagcnctcatggacccagccctcccagctgatccacccagacacagacgagtccgcaaataccattgacactgcaaatcacaacagaaaaacttttgcacccactagcaaacagtggctggtgcaacatatttgacactgtgaacttaacaacaccactgatgcaataggacatgctgacactctcccagaactgcggggtgggcaggagcatatatcatatgccgcaattttaggtgtgacaacatttccccctgacaaggaattgaccaagggaacacacagacatatacatactatgaaaagaagggctactaacactatgacaatgacttgacttaagaccggctcggatattaaatatacagggagtaaagattgggagaaaaaccagacaagaacttccccgcaagacgatagcgcacccttcgaacgataaagcatatcaaccaaacaaggaaactattgaacccttcgtataaacgaactacggatagaaagaccgatatatctaactagaggacgaaaggaggacgaaattatattaccagacaaaagaaggaagagacgagcttagaagaccccgggagcccagcagagggatattggaaaganatacgaagctgatgtgaagagaggacacttaaacccaaaaagacagacaagaatagac

SEQ ID NO: 614999 - DNA, 1355 bp, Homo sapiens
ggggggatatgatcggccggcgaaatcgtggttctcgttttcctccttggctgtctgcaagcatcagatcagcccatccatgcaacgacaccgtcaactatccgccactcagcacacagttccatgcaccttataccgcactcacttccagaggcaaaccacaatggtcaattagcatgatccctatccaccccagtggacaaggcgcacaagtagccatcacagcaccagcacacattccaggggcaccacaccactcagcccacacaccatgtacgaagcacacaaccgggcatggtcatctatatgtcatttgggattcaagcacactcaatattaaggataggttgcgccaagccaccacacttggcatctggggcacatgcattttcatgcaattccccatggcattcaatgtcaaaaggcacaaaattgcaaaccgcaaaccaatagcacttggcacagcaccctgtggaccctaggtacatagcagaacaggaacacacagcaaccctccaacagaacaacgccaacgcgcaccacgggacacacagcccaagaacaacaggccatggacacgaccaacgttcaacgggaggaaccgtcggccacaaagggccccacatggtcagggagcgcctgggaacaacaagacgccccgaccagggaggcacaacaaggggtggcatggacaaaaaaggcactggaccacgccatggtgggacccaacaatggatgagcacttaaataaccggagacagcacaccacatgaaacacacacacactaacacacaccacgacacgtggccgacacaacaacaacacaccgaacacaacacaagccacagcagaaaaacaaacaatgatactgacagaacacaagaggcccacaacgaagaaaagcgaatgaacagagaaacaaaacgtgaagagacagacaagggagcacaaagagagggaaaagaagaacaatgacacacacgcagcgtgtaacccaggagaaacaacgggagacaacaaccacacgaataagagaaaaaagaacacaacaaaaaacaaccccagtgagaaaaacaaagagagagagcagagacaaacaaaaagaagagcaaaatcgaagaggacacacaacagagaacttaccacaaagagaacacacaacaaagaacaacaaacaaagtaagagacaaacgcacgaggaggaagaagaagaaagaaaaacaaacacaaagaagacagcaaaagacacaaaaaagacaagaaacaaaacaagaggaaaacaaaaaaagaagcgaggaactgaaccaaacaccaaggaaacaacgaaaaagacaacaacgaaagaagcaaagaa

SEQ ID NO: 615000 - DNA, 279 bp, Homo sapiens
ccatttattattcagtacatcatcatcaaagatgctttcattagcagatataagtacacttgataattacatcttcaaaatacattctgaaatgttgatctcggtttttccttactttctgaaacgatatactttacatgtatattgttttacccgtttactagacccacattactcacatattaacacttttggtcaaacctaccaaccaaacgactgtaacctgcttcacatacaccttgcctactagataacttcttcctacgccatgccactctt

SEQ ID NO: 615001 - DNA, 235 bp, Homo sapiens
ctgcgcccgctcataaggtgatggccatggctaggattatagatagttgcgtggttgttgtaaatgagtgaggctgtagtccgaggaggttagttgtggcaataaaaatgactaaggatactagtataagagatcaggctcgacctttagcgcagtgtatgcatattatttgatccgagggcagtttgattaggcattgctgagctgtagtaacgccaggtgtggatgagatatt

SEQ ID NO: 615002 - DNA, 114 bp, Homo sapiens
agaattgtgtaggcgaaaggaaatatcattcgggcttgatgtggggagggtgtttaaggggttggctacgtatcattgtctgggtcgcctaagaggtctggtgagaatagtgtt

SEQ ID NO: 615003 - DNA, 603 bp, Homo sapiens
ccccccctaaccccttttttaatgccatccaggggggggccccagtttggggggggggggttggaaaccaaaagcaactttttttgggggggaataccccctttttcccaaaaaagggggaaatttgttttttttttaactcattaaaaaaaaaaggggtttgttgaatttccccccgggggggaaaaacatgggtttggcctttaaaaaaatggcccaaaatttttaaaccctttttttggtgaggggaaccaaacccttttccccggccttggaaaacttaagggggccctcctttgggcccccggaggggccaccccctttgttgaaaacctttgggtggcccaatgtgcccaggaccctttttaaaaaatgggtcccagaatgggaccgtttggtgaaatttaaaccggccaaccttttttttttattttccagaaacttgtgagaaatatcgggggggagttctttttccaggggctcggagttcccctctaaaaggaaaaaaaaaaaagggggggctttcccacagttttttattaacaccccccaccggggacaggtttttacgggggtggtgttaacaacctccctaaccccttt

SEQ ID NO: 615004 - DNA, 404 bp, Homo sapiens
tcacgaggaaggtcataaaagcttcattctagaggtacctcactgtactggaggacaggaacatccttattctaacgacacagagatgccaagaagcatctgaacaaacaggcctagctaaactcccttaagtttattaccagttagatcacatcctttgtgtcccccaatacatactctctgcacaactgatgcattcttatatccaaacctcaagccataacaatatgcagcatttctctagtttctcttgcggtcttacttttctgcaagcctccccatgtccatgccaaaacttcatatttgcacattcaatttgtcatgctctatctccttgttaaaacatctgtcttcttgttcgtaggcagggcaaggcatggggcatcctcatagcagtccgcacc

SEQ ID NO: 615005 - DNA, 591 bp, Homo sapiens
  misc_feature (77)..(77): n is a, c, g, or t
  misc_feature (273)..(273): n is a, c, g, or t
  misc_feature (390)..(390): n is a, c, g, or t
  misc_feature (475)..(475): n is a, c, g, or t
  misc_feature (500)..(500): n is a, c, g, or t
  misc_feature (511)..(511): n is a, c, g, or t
  misc_feature (555)..(555): n is a, c, g, or t
tacagaaactcaaactcgagatgtaatttatataacataaaatttcccataatacaaaacccaccattttaaagtanacaattcggggccttttagtctacttacaaaattgtacaaccaacaccatcatccaattccagaacattttcatcatccccaaaaggaaccccataccttttagcaagtcactgctaattgtcccttttccatagccccataaactaatatactttctgtctctatgggatttgcctattctgaaacagttcatanaaagtggatcacacagtgtggtgtgtgggcctctttctccttttaattaagcataatgttttcaaagtgtatccatggctgtagtatgtggtcaggtacttcattacttttaagggntggaatattattccattggtgtggggtatactacaaatttggtttgcccaacaacctgagtaagatattgggaattggaattccnatttatttcttgcttggcacaagangcctcaagggnccaacctagggggccttctcaagaattctttccctggaggcaanagggggacagcccctaatggcataaggggggggggg

SEQ ID NO: 615006 - DNA, 286 bp, Homo sapiens
tcaccgtcgtcgtccatcctcaatccatcgtccactcgatggtggagttctgggatggcgccactattgctcaggcttcgcctcccgacatgagattgccgattgccttgggactgtcttggccggatcgccttcctgacgcagctgccggctgcgactggtcgacggctactcagtggaccttcgaaccccttgacaacgacactttcggggccgtcgaactagcccgacgcgctggtcatgctgcgggtactgcgccggccgtgttcaatgccgctaacgagtc

SEQ ID NO: 615007 - DNA, 435 bp, Homo sapiens
ctcccaggaaagccgatcaccttgctattgagctcatacgtgggtctacaaagtcctgccgggaaaggtgtaatggttggctcttggtaactgttttggagctgctctgcagtggtcctgggcccaggccagaagaaagaagctcccaagttcctatcctgcccagggcaggctgacctgccttcatttccttcctgtaggctacctggccagtgcattgaaaggtctccaggcctagagaatcttagataaaaggcactggaaccagatcaaagcccatcttttcagctggctgcaacccttgggccagggaggcacaaacctaactgtacccctgctacaggcagggtggatagacagagacccattgtcccttccatgtcctttgttccctcctagggaatctgagcagtcctccgggaacatcagggtggc

SEQ ID NO: 615008 - DNA, 331 bp, Homo sapiens
ctactactactaaataagcggccggtcgacgacggacgctcgcttctttgcccaggttagagtgcaatggcacaatcttggctcactgcaacctccgcctcccgggttcaagcaattctcctgcctcacctcaccagtagctgggattacaggtgcccaccaccacgaccaactaaattttgtattttttagtagagatggggtttcaccctgttgcccaggctggtgtcaaactcctgacttcaagtgatccacctacctcggcctcccaaagtgctgggattacaggcatgagccactgcacccagccaactaggtcgacgcggccgcg

SEQ ID NO: 615009 - DNA, 256 bp, Homo sapiens
tcccccccctttgggggggtggggggggggggtcccccaaagtcggggggttgggcccccccgggccccccggggggaccccccttttttttaaaaaaacaaaaacaagccgggggggggggggggcccccgttttccccccccccccggggggggggggctaaaaattggtttaccctggggaagggggggttttgggggcccaggtggcccccccgcccccccgcggggggggcaggggggggttttgttccca

SEQ ID NO: 615010 - DNA, 216 bp, Homo sapiens
tagcattccattagatattcctctccgggcattaaggtctcatctttaaattggagatttctcactagggatcacaacggtaactttaacttaaaacaatctttccagagttaatgttctacctactaaatgtcaagaacccaactggtgtgccacacatacttgtactacacatgccaccactgcatgcatagtatttaaaaacggccaaaaatg

SEQ ID NO: 615011 - DNA, 784 bp, Homo sapiens
agagcggcggagtcggagggagtaacaccaactggaaaaccttgtatgaggtcaaatccgagaagccatggtgccaaaggcgacaagaccggactactttagttctgtggccacaggtgtgtgtatcttcgacaagagagaactgctatgtaccaagcctgcccgactcaggactgcaattaagatataggtgattgatcaactagaatggatcgtaccgcatgtgagacgtgcgacaccgaatttcccactttcaggtaccgcgatgatcctgtcagtaaactacttgcagattttcaagagaactcagtgggtgacttgtatccaggtagtctgctgtacagctagtccttggagccgagaaattgctgacttactctcctgtggcggacagttgacatacaccacaaggaacttgaacaggcatttgaagaagttttccagaatgccaacttccgatctttcatgattcagagctcagggtcaatagtggtagacctacaacgacgagtctcgaattaaagggccacgtgtgagtgtgacgttgaagcccgtgtgactacagagagtatggccgaaggtggttcatgagcatcaggagcaagtgcgtcgaatgtgagaggcagcgtgccgatcggccagaagtctgcactgggctgacggaatcgatttcctcccactccgttgacgatcctgtttagctaccaggcaaggttctggtggggcctaaacttgctccctgtggttttggacctcgtccagggatcccgtgggggaagtcgga

SEQ ID NO: 615012 - DNA, 263 bp, Homo sapiens
aaacttcgatttttttttaaaaaaattagattttagctggggcttttgtctaatgtaaagtaaatgcccaacccccgccttgatagggatgtttttgtaagttaattttttaagactttttcacatccaaagtgatgctttgctttgggttttaactgtttggccccggcgggggtgggggcggggggttggtacaaaaacttgaaactgtttgtgatatgtacaactcaaatgtttttcattaaaaaacaaaattagcccga

SEQ ID NO: 615013 - DNA, 233 bp, Homo sapiens
agcattctaaagacgtcctgagctatcaagaaattctccttgcctcagcatcctgtgtagctaggataacaggtgcctcccaccatgcccgctaatttttgtacttttagtaagatgaggctccaccatgctggccaggttggtctcaaactcctggcctcaagtgatctgcctgtctcgggctcccagagtgctaagataacaggcatgagccattgcaacagggtctctca

SEQ ID NO: 615014 - DNA, 530 bp, Homo sapiens
agaggagtcccgtcagtaaggtgtgccaggaattgaggctgagggaactagtgatcacaccactgcactctagcctgggtttattgttatctctataaaaaataaaaccagtccagcacagtggctcacgtctgtaatcccagcactttgggaggtcgaggcagtggatcacttgaggtcgggagttcaagaccagcctgaccaatatggtgaaaccccatctctactaaaaatacaaaaattagccaggtgtagtggcacgctcctgtagtcccagctccataatgtgtgcccattggggaccagagatattattggggacagagagaatattagaaatcagagaggataaaggccgggcgcggtggctcatgcctgtgatcccagcacttggggaggccaaggcgggcggatgacgaggtcaggagatggagaccatcctggccaatatggtgaagctccgtctctgctaaagtgcagaaattagctggacgtggtggagcatgcctgtaaacccagctctgtaatcc

SEQ ID NO: 615015 - DNA, 431 bp, Homo sapiens
gaagcagtctttataaggcagtcgtcttcctccatagattcacgggttagtatctgacacccattaataatttctagagcaccattggtacttctctgtggtttggccgagcaagtcttcgatgatgcagtccacccttccataaaaacgtactccaattttcctagattctactttcattgttttgtgaatcaagttagaaggtacataacttagcctgatgagatggcattcataaggttaggatagcagagttgcctaactaatcttcctgttgcaatgaaataaaagaatgatatctaagttgaccaaccttgtaaaaggtaattttacaagaggcctccaaaaataacggactaggactggccagagaagaaaataaacccctcatcctcaatccagaacccagagtttgtcatcagacaatgtat

SEQ ID NO: 615016 - DNA, 569 bp, Homo sapiens
tctccgcttacatcattgctgggtcctcccactaagtggttcacccagatcttgctccacacaacactgttgccacaacaccgctttgctgacccatgaacactcaatagttcctctgcagccttgtctgctcttcttccccaacgtgtctgcttcactccagcagggctggtctcatcctctcctgcacttgtaaggctctttcctgcttatgctcaaactacatcccctgcccagaaagcctttcactttccaaactctgaaccgccttttcttggagatccagttcaagacttacctctgctgggattactctggctcatgcctttacctctcctcaactcctaataagctcacagcaagtaccatagctctccattctcctcagtcagttgccaatggttctctttactgagcttagtagcttactgaagttaatgaaagcaatgctgcaggcattaacagtatctatttcataggatgctgtgcagattatcggatgcccagcacttagcagtgcctaacacaaagaaggtaaggtactcagtcagtgctgaccatggcggagg

SEQ ID NO: 615017 - DNA, 183 bp, Homo sapiens
gatcagaacatcctccaaaataataaatatagtagcggggcatggtggtacacatctgtagtcccagctacttgggaggctgaggcaggagaatcacttgaacccaggagttcgaggctgcggtgagctatatgattgcaccaccacactctagccctagcaacagagtgagatgctgtgtct

SEQ ID NO: 615018 - DNA, 504 bp, Homo sapiens
  misc_feature (244)..(244): n is a, c, g, or t
cacgaggaaaaaccagttatttggactttctggatatgatgtgtatgatgtacatgtatttaattgccatactcccttcctaatagtttcagactcctacttaaatgactgaaacaatatttattaaaatagagaaaatctacatagtcctattatttgaaaggggtcattgcgtgccagaaacttttcataattcctgaaaacagagctaaaacaagattgagaaaatcaacaaaaattcctnacttgcaatgcactgtgaaaacaagaaacctgggaaacaaatagacaagaccctagaaaaacctccctgtaaacttctctgtctttggctacagcgggttgagacacaatttgaggagcaaagctcaattcccttagtatgtcagcaagctcactggtatcctggaaccacgcctcagcaatcttgcctccacttcgtggatgcgccaggttaaaggtggaaacaaaattgattgttggttaagaagctcatgtttcctt

SEQ ID NO: 615019 - DNA, 314 bp, Homo sapiens
  misc_feature (7)..(7): n is a, c, g, or t
gagctanagcatcctaacaggaagcgtggtacttcgcatctgggctcaacctgggcgggactcttgccatcctgagccttcacagattactccaactctctaagactcagtttcctctcatactatatgagaaaacttcacaggattgtcataaacgatcacatacaacagggcatcaaagttcttcacaacaaggccacagtgggtaggcaaagaaatggccactaccatcatcaccgtcatcatcaccaccaccattttgctttgcagggggcaaattttcagaaaagagtccaagtgcaagagattctttt

SEQ ID NO: 615020 - DNA, 118 bp, Homo sapiens
cgccatattacagtgcaaaatgtgcaacagaatcaatacatgtgtcttagctctgagagcccaaattggtgataacttactacctgtaccatcagttgggcactgtgcccctataccg

SEQ ID NO: 615021 - DNA, 955 bp, Homo sapiens
  misc_feature (129)..(129): n is a, c, g, or t
ctgaagtactacgacgtgttgtgtaccgcacacgtattttttgctctcgtccagatgggcccctacttcgatcggcccaatttcatgttgcaccacagtatgctgctctacacgcggtcacaccttgcnaaccccattgtccctgggaacaccgtggtttccccgattttcggcgtgataactagccacgagtgcccagcagtccctcctaatgtttccccccgggtgaagtctaaaagtagtgctcgcgcctgggagcttaccccagctttatttcataggagactgggatctataatttagtttggtaagcgcacacccctgcccctctacggtgcttgaagcacacacagagccctggtatttcataccccacgattacccccccttggttcgcccgccgaccccccaatatccatgtttgcagttacacgtgatggttgaatagtgccgcttccatccaagatgcgggctcggagaaaatcccacttgtgtaagaatcaggttctctagtcaaacacagcacgcgggtggtcaccacagggagaaaacagagaataatccacccttgggcatgtgttaggagaaaaaaaaaagcgagcacatttcgtgcgcctactaatcgtggtaccaaagtcttattgtcgtgttacgaccctagagcagtgactggccacttcccccacttcacgttgggagtggagaatggtgagacctcagcatcctcccaacgaagtagtgtggtacaccttgagcaacgtttaataactgttgtcctcaagtgtaaacccccgtgtcgtatgagattcccacaaggggagattattcaggtccacatgtgggctatgggttccaatatagtactaggactagacaccctgtttagcacataaccacaacacggagctgctttgttcaaaaaaaacttaaaacatgattttcgtcccacaaaaca

SEQ ID NO: 615022 - DNA, 121 bp, Homo sapiens
ttgaagaaatacgagattacttcatttctgggcttgacttggacctgcttcttctttgagatgtacttggataatgtattaatcctgctctgcaaggatgagccacgatctgccgtcttct

SEQ ID NO: 615023 - DNA, 168 bp, Homo sapiens
ttaaaatgggcacagaaattgccttccttgtccctcccttaaatctcattatctatctcagacaactgaggaatgcaaccacacctgatcgacctgttacaagatagtgcctgcctctcaggctcatacgaatttcaaagagaatcatttacaaggttggtttctgtg

SEQ ID NO: 615024 - DNA, 417 bp, Homo sapiens
tggccttgtaccaaccagctcttctgcaaccggagtttttacagtctgcgcgggacttttccgatgaggacattttatccataggacagattccgatgacacaagagcttgaaaaatctagaccacaggacacgaacatactgattactggtgagctagcaacgtcattacagtcgctgaagacttcaagagaacatatcaagacctaaaaaattcgccagaggaaggaaacggttaaaagcgcataaaacatgtatcaagatgagatgaaactgcttcaatcagacacaaacgtatttaaaagataatagttcgaccgcaacactgagaccctggtagaatcaacgaatcagctacgctacaagactgaagcccgagcaaatagataaagcctagattatacaaaccagctgatct

SEQ ID NO: 615025 - DNA, 207 bp, Homo sapiens
agtgtcgagaaggtgctgtcttgcagaagacacgctgatccctggaggctcagaatcacttgtctataccaccttggtctggaggaattggcatccgttgtgccattcacgtcccagtgaggaccactgacttcttccagtcatgtgtgaaatgcaccatgcggtctgatacatcccctctctctgtgtggcgggaccacgctcaga

SEQ ID NO: 615026 - DNA, 331 bp, Homo sapiens
gagacagggtctcattctgtcactcaggctagagtgcagtggcacaattatggctcactgtagccttggccacctcccaggctcaattgatcctcccacatcagcttcgtgagtaactgggactacagttatgcaccaccacacccagctaatttttaaattttttgtagagatggggttttaccacgttacccaggctgttctggaactcctgaactcaagcgatgctcctgcctctgcctcccaaaatgctgggattacaggcgtaaaccactatgcctggactcaagccgactttttaacatgaacaataagtctctttattcatctc

SEQ ID NO: 615027 - DNA, 80 bp, Homo sapiens
  misc_feature (22)..(22): n is a, c, g, or t
  misc_feature (46)..(46): n is a, c, g, or t
  misc_feature (52)..(52): n is a, c, g, or t
tgatatcaaagactcattgctnaattctaagacttttgaattttcntttttnaaaaagatgtacaaaacagtttgaaata

SEQ ID NO: 615028 - DNA, 816 bp, Homo sapiens
ctcccctcaccgtggtccccccgggggggaccctttccctgccccttcttgggggtgccttttttggagccctggggaaatattttggggcagtgggttcaactgggattgagctatgtggctttcgggggtcttcccttgcaacaactttctgggggagccaccggggggccccacaaaaactcctttcacggggctctctcgaggatttttgcggattgcccctgtgcgcgtctgtgagggaaacacagggggtgttacacaacagagggttatctgccgctcttcatacccccccccctgtttctaactcacttgtccccccctcttctagggctttttggaaccccgcccagatgtgggggggaaataatggtgttctctttggtgttctccccccgcgtgtactctggctctgggcctttccccccgttgttccccggggggcacgcgttcccacggttacccctcggggaatttttatgcccccccctcgggggagagtagttatcacacacacccacacccgtgggttattatttggcggcgctgtatattgttggggggaatagttgttgtgggccaccgctgcgtgtctgtgtgtgtgtgttgtgtggtgtgttttgtgagcctcctgtccccactggtacgtcccacaccctgtccccacgagatcccctatttctcctccaccacaatataccacgaaacacctccccgggagactttggggagagagaggctggggaccaatacccgctgtcactcccgaggacatctttttttagccataaaattgagtgtccacatatttta

SEQ ID NO: 615029 - DNA, 169 bp, Homo sapiens
tgcggtcttgtgcggcgctcctgctactcttccccctgctgtcctccctctcccggctggcgtctccctccctgccctcgactgacgtgtgtgcccccgaccgggtactggcggcctcgaccgggctgcgtgctgtggtgatcgacatgaccacgtcgacggaccccac

SEQ ID NO: 615030 - DNA, 245 bp, Homo sapiens
  misc_feature (132)..(132): n is a, c, g, or t
  misc_feature (186)..(186): n is a, c, g, or t
catgtactgtgacctgagatgcagccagaatgaagcagcagttgacaggaattcaaagcgtgtggtggttccgtcatgagctcatcaggctgtgaagcatgaagggaacagaatgggtagaaccacgaggancccacagtcattgctgagaatgagctcctgggagctgcagccgccattgaggcntgcagccaaaaagctagagcagctgaagcccgggccacacccaaggaggcagatgagtc

SEQ ID NO: 615031 - DNA, 137 bp, Homo sapiens
cattttaaaatcttatttgactggcgaatcatggaagaatgaagtgcaacttggctcagagttctgtgtgtctaccctttctgaaccagtgtactccatttcttcagggccaggctctctcctgcgttgagaagctt

SEQ ID NO: 615032 - DNA, 817 bp, Homo sapiens
  misc_feature (64)..(64): n is a, c, g, or t
  misc_feature (98)..(98): n is a, c, g, or t
  misc_feature (101)..(101): n is a, c, g, or t
  misc_feature (158)..(158): n is a, c, g, or t
  misc_feature (188)..(188): n is a, c, g, or t
tgggccgcacgggagcctttgcactgctctatgcagctgtgcaggaggtggaggctgggaacgnaatccctagctgctcagtgtgcggcgcatgcggnagngagaaagcacatgctgcaggagaagctgcacctcaggttctgctatgaggcagtggngagacacgtggagcaggtcctgcagcgccntggtgtgcctcctccatgcaaacccttggccagtgcaagcatcagccagaagaaccaccttcctcaggactcccaggacctggtcctcggtggggatgtgcccatcagctccatccaggccaccattgccaagctcagcattcggcctcctggggggttggagtccccggttgccagcttgccaggcctgaagagcccccaggcctccggccagccaagcctcccagagtctaccccaatcccatcttttcctccgcaaccccccttttttcctcccaattaccttgaggctccccagcctaggggaggagccgccagttgcttgaaaagccccccagctcggggggcccccccttactcctccctggaaattgcttggcctcctttgacccccagaggtctttctccctggacagactccctgcgggggcaaaaccagcgcgatgaggcaagcaataatttttctgcagggccaataacggggcaaggggttgggggggcacccggccctcttgaacgacccctacagccttctggaatccactcctggacactcaacaagacctgaaacaggtttggcctacctggtccttacactacatcatcattcatctcaatgcccacttgta

SEQ ID NO: 615033 - DNA, 332 bp, Homo sapiens
  misc_feature (64)..(64): n is a, c, g, or t
ccagggcactctgcgtgcaggaggcacgtaatgtttagaaagagaagtggaggccgggcgcggnggctcacgtctgtaatcccagcactttgggagactaaggcgggcatatcacgaggtcaggagttcgagaccagactggccaatatggtgaaaccctgtttctactaaaaatacaaaaattagccagacatagtggcgcacggctgtaatctcagctactcaggaggctgaggcaggagaattgcttgaacccgagaggcagaggttgtggtgagccgagatcgcgccactgtactccagcctgggtgacagtgggagactctgtctcg

SEQ ID NO: 615034 - DNA, 705 bp, Homo sapiens
tctaccgactgcttagggagccttagcctgtgcagtgcaatcatcagccagaaggtgaggcaggttcgtggaagctgtgggagagcatagcttgggactccctctcctcactcactctgtctactcagaaccaccttcctcaggactcccaggacctggtcctcggtggggatgtgcccatcagctccatccaggccaccattgccaagctcagcattcggcctcctggggggttggagtccccggttgccagcttgccaggcctgaagagcccccaggcctccggccagccaagcctcccagagtctaccccaatcccatcttttcctccgcaaccccccttttttcctcccaattaccttgaggctccccagcctaggggaggagccgccagttgcttgaaaagccccccagctcggggggcccccccttactcctccctggaaattgcttggcctcctttgacccccagaggtctttctccctggacagactccctgcgggggcaaaaccagcgcgatgaggcaagcaataatttttctgcagggccaataacggggcaaggggttgggggggcacccggccctcttgaacgacccctacagccttctggaatccactcctggacactcaacaagacctgaaacaggtttggcctacctggtccttacactacatcatcattcatctcaatgcccacttgta

SEQ ID NO: 615035 - DNA, 199 bp, Homo sapiens
taagatgaggacagacagacagcagcatgaagtgctctacatgacagagaccctctgccaccagagacctgtcctcaccacctgtcctcacatgctccactgaagccagccttcttcaatcccaggacaccacacccagactcagtcctcccctcacagactctgacccctcatcactggacatactccatggtgctga

SEQ ID NO: 615036 - DNA, 422 bp, Homo sapiens
actacccagtgttcggtaagaacagcgcgcattctgcgcacatcatctttgtaggtcagttttaccgagtggtattgcgggaattgcattcgttgactggaattatccatggaaattctcttaaaggtggttggtttaggccggctcatagcgaccatggtcgtactcctccatcacctccttttccgttagtgagcgaacacgcacaacgccatcgatcattctgctgcggtctttgaagtacaccactttgagcggcaattcaggaatcgaccggtcgagtgccaaaacccacgcctccaccagttgaccctcaggggtgtactggcgaccagtgttgaactcgattgagttcaattgggcatccgggccgggtttgctgatgatgtcgccaaactcggcgaccaatgaggcgtaatgat

SEQ ID NO: 615037 - DNA, 529 bp, Homo sapiens
ggttcataatgtggccgaggctggtcttgaactccggggctcaagtgctgtaccggcctgggcctctcaaagtgcaaaggcatgagctaccacgcccagccattattattattatttggagacagagtctggctctgtcacccaggctggagtgcagtggcgtgatctgggctcatggcaacctcggcatcccggcttctaagggattctccggcctcagcctcctaagtagccggcactacaggcgtgcgccaccatgccaagctaatttggtatctgaaggggagacagggttcaccaggtgggccaggcgggtctcgaactcccgacctcagatgatccaccagcctcggcctcccaaagggctgcgattacaggcgtgagccaccagaccgggctcctacccttttttttccagacatgatctcgctcttacatgcaggcgggagagtggtggcatgatcatggctcacggcagcctcgacctctggggctcacgtgattctcttgcctcagcctcctgagtact

SEQ ID NO: 615038 - DNA, 675 bp, Homo sapiens
  misc_feature (553)..(553): n is a, c, g, or t
  misc_feature (576)..(576): n is a, c, g, or t
aaaatggacaattcaatggtttttagtatagtcagagttgtgaaaccatcactgcagtctattttagaacattttcatcaccccaaaaagaaactattcactcccaagccccttccagccttagacaacagttaatctactttctgtctctataaactagcctattctgaatatttcctgtacatggaagcatatactatgttgtctttttgtgactggcttctttcacatagcatattgttttcaaagttctatgtggtagcatatatcagtattcaatttcttcttattgctaaatatttcattatttggatatatcacttcttaccatttattgatcaacatttgggttgtttctactttttggctgttataaataattcagctgttggtcaggtgtggtggcttacgcctggaatcccagcgttttgggaggctgagacgggcatattgctcgagcccaggatttcgagaccagcttacacaacccagtgagactgcttgtctcaaaaaaatagaaacaattatccgggcatggtggcatgcacctgtngccctagctactcgggaggctgnggtgggaggatcacttgagcctggaaagtcaaggcttcagtgagccatgatcacatcactgcattccacccttggtgacagagtgagaccctgtctcaa

SEQ ID NO: 615039 - DNA, 513 bp, Homo sapiens
agaacaatactctggcattgtggttatagttgtgctatggcagggtcactctgttagaagtttactctttcccactgaagtagaaccccatcatacggctttctgtgtccagaaaccaaggcgattttagtttctagacggtgggcgctggtgttgcttcccaggtgctcaactctgggcagtaacaagcctgcatggtctggacatggtggctcacacctagaatatcagctacctgggaggccgatgcaagaggactgcttgagcccaggagttcgaagccgaagtgcagacgcattcaagctggtcgagccgggaacgcacctgcactccagcctgggcaacagagcgaggccctgtctcaaaggaaaaaaaaaagctttggcagcagggaacttggagaacatgggctgaaacgataagtcttttcgtgctacagatcctgggtctccacgggatgtaaacctgttcactgtccaacaacagcagcaatcaacacttccagagcacttg

SEQ ID NO: 615040 - DNA, 134 bp, Homo sapiens
ggtagtatccggggactctaagaatatcctctttgtcatacacaaaaccagcatgtctactatagcccatgcttcagatacttacatagtttatggggaagccatgatcgaagatttatcccagataagcacaa

SEQ ID NO: 615041 - DNA, 156 bp, Homo sapiens
ctcgttatgatgtcgaagaaccaattgcttgatcgggcttcaagctgggcaacgtgcgagatcccctctcgacaaaaatacaaaaattagccaggcgatgtgggaggcatctctactcccaactactcaggaggctgaggcgggaggaaatcataa

SEQ ID NO: 615042 - DNA, 507 bp, Homo sapiens
atacggtagctaggttcctaggagcatggcaaaatagggaaataaaggccagttaatatctatacttactataatcttaactaattctactctctctccttcctatccttccttccttaccttctaacctatactttacttaatctatatcttaattgagacagagtatcgctctagtagcccaggataggagtagcagaggtacaaacttggctcaccgcaacctaccacctacccgggttcaagagatacctacctagcttaagcctacctgagtagctaggataacaggcatagcaccaactatgcccagctaattatgtaatcgttagtagagacaggtaatctacatgtatgatacagactaggtcccaaactacccaacctacaggtaatactagcctagcctcggcctgccaaagtagctgggatatgcaggtagtaagccaccgtgcccggcccaggccagtatcattacactgcagtgagtatggcacttcagaaaac

SEQ ID NO: 615043 - DNA, 296 bp, Homo sapiens
cagaactctcagttcccagtctgctagagaactgaagtcctggacagtcacagggtacagagacccaggcagctccagcatctagctgcttgagagacggtggctgggtggaccagcttgtagagtctcaatgggccaatcaaaccggtgtgcaggaagctgagctactggcttcattcctgaccacagctgagaagtatctgtcttccatacattctatctcgagttttgttttattttttaaaaattttgcttaaaacagcatgttttataaaataaaagtatttttatctcat

SEQ ID NO: 615044 - DNA, 1005 bp, Homo sapiens
  misc_feature (33)..(33): n is a, c, g, or t
  misc_feature (86)..(86): n is a, c, g, or t
  misc_feature (105)..(105): n is a, c, g, or t
  misc_feature (155)..(155): n is a, c, g, or t
  misc_feature (161)..(161): n is a, c, g, or t
  misc_feature (167)..(169): n is a, c, g, or t
  misc_feature (190)..(190): n is a, c, g, or t
  misc_feature (262)..(262): n is a, c, g, or t
  misc_feature (282)..(282): n is a, c, g, or t
  misc_feature (288)..(290): n is a, c, g, or t
  misc_feature (302)..(302): n is a, c, g, or t
  misc_feature (306)..(306): n is a, c, g, or t
  misc_feature (310)..(310): n is a, c, g, or t
  misc_feature (316)..(316): n is a, c, g, or t
  misc_feature (332)..(332): n is a, c, g, or t
  misc_feature (337)..(337): n is a, c, g, or t
  misc_feature (368)..(370): n is a, c, g, or t
  misc_feature (372)..(372): n is a, c, g, or t
  misc_feature (395)..(395): n is a, c, g, or t
  misc_feature (399)..(399): n is a, c, g, or t
  misc_feature (401)..(401): n is a, c, g, or t
  misc_feature (412)..(412): n is a, c, g, or t
  misc_feature (484)..(484): n is a, c, g, or t
  misc_feature (502)..(502): n is a, c, g, or t
  misc_feature (504)..(504): n is a, c, g, or t
  misc_feature (506)..(506): n is a, c, g, or t
  misc_feature (512)..(512): n is a, c, g, or t
  misc_feature (514)..(514): n is a, c, g, or t
  misc_feature (518)..(518): n is a, c, g, or t
  misc_feature (529)..(529): n is a, c, g, or t
  misc_feature (572)..(572): n is a, c, g, or t
  misc_feature (705)..(705): n is a, c, g, or t
  misc_feature (709)..(709): n is a, c, g, or t
  misc_feature (720)..(720): n is a, c, g, or t
  misc_feature (757)..(757): n is a, c, g, or t
  misc_feature (811)..(811): n is a, c, g, or t
  misc_feature (879)..(879): n is a, c, g, or t
  misc_feature (893)..(893): n is a, c, g, or t
  misc_feature (899)..(899): n is a, c, g, or t
  misc_feature (909)..(909): n is a, c, g, or t
  misc_feature (911)..(911): n is a, c, g, or t
  misc_feature (952)..(952): n is a, c, g, or t
acggcggcgagcaggctgcaggccgcggggatncggggcgcggggggcgccgggcctgatcgccgcctctcgcggtgcccgcaggnccccgggcgcgcactctcnccccgccgccgcctgccccgggccccggagcgcggtggagaagcccccgnaggagngggggnnncgcgccccgcgccccccaganatggtgggccacctgcatctgcagggcatggaggacagcctgaaggagcagggccgggagggcttgctgganagccccgactccgggctgcnccccannnccagccccagcncgcncttntactcnctggcgcccggcatcntcgangcgcgcgcggggggcgccggcgcctcctcgnnncncccgggacccaacaaagccaaancgcncncctcccaactnccaaatcccccggcgtcggagatgaggccccggatgctgccagtgttctttggggagagcatcaaagtgaanaggaacacaaaatgaaanangntgaaantntgangtcaagtacgnctcggagaagcatttccaggacaaggtcttctatgcgcccgtncccaccgtcacggcctacagcgagaccatcgtggcagcacccaactgcacgtggcgcaactaccgcagccagctgaccctggagccacgcccgcgcgccctgcgcttccgcagcaccaccatcatcttccccnagcntgccaggagcnctttccggaccaccctgcactgcagcctgggccggcncagccgctggttcaccgccagcgtgcagctgcagctttgccaggaccctgcccncagcctcctggggccctgccacgctctgacggggctggggccgcccggggtgctggacgagccgggancctggggagacgcnggacgntgacacgatnantcggctggcactcgggaggagcgggaaggaggctgcagacnaggaccgtgtggaggaggcgctcccgctgctgcctgactaacgctagttgtgt

SEQ ID NO: 615045 - DNA, 293 bp, Homo sapiens
  misc_feature (139)..(139): n is a, c, g, or t
tagcggatacgacttcatggcacgtctgctgtctatatcaacaaacaacctttttccaggggtctccttggaactggaaggcccgtcggatcggcgcttaaccgcgtaggtcatccgcacgcagtctgctacaaagtgncactaggactcgcatccagccgtgtccagccaggaccgggttcttaccatatacagttgagactaggttgagaccgtttcggccccaagagctctaatcattcgctttaccggataaaactgcccgccggagaaggctggggtaccgaggctcg

SEQ ID NO: 615046 - DNA, 1196 bp, Homo sapiens
  misc_feature (436)..(436): n is a, c, g, or t
  misc_feature (482)..(482): n is a, c, g, or t
  misc_feature (505)..(505): n is a, c, g, or t
  misc_feature (665)..(665): n is a, c, g, or t
  misc_feature (932)..(932): n is a, c, g, or t
tgtcgctcatgcttgcactttaggtcgatgctggcttgttggcttgtatagctacgtagtgcttagtctagggtgatttgctcgactctcgggtagttttgtttgctgtctctttgttggtgtcgtcgagtcgtgctcgttgattgtagtggttgcgagtcggcgtagctgcgtcgcacgacattgtgttcctcggtattccgtcgcggttggggcggacccgccgggtctccgccgtactgcctgggtttgtacccgctcccctgcggttctttgtttagattcctcctccacattaatgggctcagttattctcctccagtctgtgtgatgtccggcgcgccccgatgtcctacttgtgcctggggagaccctggcccggtcagtttctcgggtgtgcggagcactcctctttacccgacgtttcacgtcctcntccggttctccggacaaaatatttccccgggtcttttcggctccanctttctcgcccgcccggacgggntttttttcattcccgccacatattacgtggcgttcttcctttgtatgacagaccccttctcctgggttccccgcgaccttcttttaaaagaagaaaccaatcgtttctgggtgagcacgtcgttggtgtgcccacggagcagccaccttatttctcctcnggatattaaataccgggcgttgtttctcctccgtaaccccaaagggggctacccccccgctctcttttttgtcaacaaatgaggaagggtccgtcttactcccgccgcggagtgggcacacccgacatttctatatttctgcggccaaacagatatgcgcgcgtgttattattgatttatattacgccacagaggctcaccactccggtgtacattcctcgtgcgtgcgactaatcccactcaccgcagcctgcgtcgtccttcctntgggggtaaatacatacttctcggcgcccgacggcgaacgacagcggactcgtgggtgtgacgcacacacgtctcggcgaagccaacatctttctcctcgtcaaggatcgcccttcgtgcaccaccacgacatgccgcggtagttgccgttcccccccaggcgagtttcacggaccataccgacaaacctaacgaaaaaaaaaaggggcaatggccttcttcatttttcaagggggcgtaaaaactttcccccctgacaaaaca

SEQ ID NO: 615047 - DNA, 125 bp, Homo sapiens
  misc_feature (31)..(31): n is a, c, g, or t
  misc_feature (80)..(80): n is a, c, g, or t
  misc_feature (105)..(105): n is a, c, g, or t
aacgctgatggggaggctggaagatggcagncccggactgggcagatcttcaagcagacctacagcaagttcgacacctnacacaacgatgacgcactactcaanctacgggctgctctctgctt

SEQ ID NO: 615048 - DNA, 235 bp, Homo sapiens
catatcagacaccagcacgcaagagctatacacacggtgcatatcagacaccaggacgcgcagtgctataacacggggtataatcagacaccaggacgcagagagcttacacacggtgcatatcagacaccaagacgcagagagcttcacacggtgcctgtcagacaccaggacgccgagcgctaacacaccggtgcactatcagacaccaagacgcagacacgcttcacacggt

SEQ ID NO: 615049 - DNA, 119 bp, Homo sapiens
ggtactgctacctagtgggggactgctacctagtgggacaactggccacccgagagtgaccgcaaggtgcccattctggaggacactgctgatgcgcatcctggtcatctgggctgtcc

SEQ ID NO: 615050 - DNA, 203 bp, Homo sapiens
ccacttttgtagctttccgcgtgagtgagaacatgctcctctttctgggcctggcttatttcactgaacataatgtcttccagattcatctgtgttgctgaacttggtacaatttccttctttttatgcctgaatattatttcattgtgtatatagaccacatgttccttatccattcatccattgatggacgcgtctcgcat

SEQ ID NO: 615051 - DNA, 882 bp, Homo sapiens
tgatgaactcctaagtcactgacagtgtgatttgggtcaattgtcggcatgaggtgcttgctcttacttccagtgtattgatccactggtaaaatttggcctatgtgtggctgtggatgaatccgatgtagagagaggtgagcttgtacgtgtaagagatgctgtcagacatagcgatgggtaggcatctaggagaggaagtggccgtagattttttaaattgagttcttgaagatgtgggatatgcacgtggttgtctgtggcggatgaattcatagtagagctagtgctgttgtgatgctgtctaataacggcctgatgccgtattgactttaatagttgattcagcttttaaatgatgaagatctaatgggatccaattgacagttgagtttgcaatttagccacagatgtttccctggtaccagttggaatcgagacaggtcacgaggcatctttcaggacacttcagtgttatatgcacacagtacttgtaagacgtctgcgtgtgtctggaggagttgacaacacaaatggcatgcaatggtcatgatggattatcttgttaaacctgccctttctgtaaaaaatagttcatatgtcccacaatagcaggaatgtgtggaatcctttattactaaattgccagcaattgttgctgttaaacatcactgtgagtgcacttgccggcaaagttgcggattcggagccaaggtattctaaagaccttagctagaagggtggccccttgtaaggtaacgccgacggaatgtaaaaacgctaatggaggaccgcgagccaccacgggagaaaggggcggccacaacaagacaaagggcccaagataacataacatctctctcttattttttctttattatt

SEQ ID NO: 615052 - DNA, 756 bp, Homo sapiens
  misc_feature (25)..(25): n is a, c, g, or t
  misc_feature (62)..(62): n is a, c, g, or t
  misc_feature (102)..(102): n is a, c, g, or t
  misc_feature (233)..(233): n is a, c, g, or t
  misc_feature (271)..(271): n is a, c, g, or t
  misc_feature (273)..(273): n is a, c, g, or t
  misc_feature (276)..(276): n is a, c, g, or t
  misc_feature (318)..(318): n is a, c, g, or t
  misc_feature (338)..(338): n is a, c, g, or t
  misc_feature (348)..(348): n is a, c, g, or t
  misc_feature (471)..(471): n is a, c, g, or t
  misc_feature (554)..(554): n is a, c, g, or t
  misc_feature (562)..(562): n is a, c, g, or t
  misc_feature (583)..(583): n is a, c, g, or t
  misc_feature (756)..(756): n is a, c, g, or t
ggacaatggagagagcttcccctgngatttttttttaggaagctagcttctctacggtcatntttgcttagagtatactttaacctggcttttaaagcagtngtaactgccccaccaaaggtcttaaaagccatttttggagcctattgcactgtgttctcctactgcaaatattttcatatgggaggatggttttctcttcatgtaagtccttggaattgattctaaggtgntgttcttagcactttaattcctgtcaaattttttgttncnccncttctgccatcttaaatgtaagctgaaactggtctactgtgnctctagggttaagccaaaangcaaaaaaanttttactacttttgagattgccccaatgtacagaattatataattctagcgcttaaatcatgtgaaagggttgctgctgtcagccttgcccactgtgacttcaaacccaaggaggaactcttnatcaagatgcccaaccctgtgatcagaacctccaaatactgccatgagaaactagagggcaggtcttcataaaagccctttgnaccccctncctgcgcctgtgttaggaganagggatattggcccctcactgcagctgccagcacttggtcagtcactctcagccatagcactttgttcactgtcctgtgtcagagcactgagctccacccttttctgagagttattacagccagaaagtgtgggctgaagatggttggtttcatgtttttgtattatgtatcn

SEQ ID NO: 615053 - DNA, 383 bp, Homo sapiens
  misc_feature (218)..(218): n is a, c, g, or t
  misc_feature (239)..(239): n is a, c, g, or t
  misc_feature (243)..(244): n is a, c, g, or t
  misc_feature (249)..(250): n is a, c, g, or t
gcaggaacaggaggctgaaggggtggctgccctgcgacccagagatggtcaccttactctgcaactagcagcaccatggggcaggtgggacggcagctcgcatcatcggggacgacatcaaccgacgctatgactcagagttccagaccatgttgcagcacctgcagcccacggcagagaatgcctatgagtacttcaccaagattgccaccagcctngtttgaaaacgccaccgcttngggnncatcnnaactggggccgtgtggtggctcttctgggcttcggctaccgtctggccctacacgtctaccagcatggcctgactggcttcctaggccaggtgacccgcttcgtggtcgacttcatgctgcatcactgcattg

SEQ ID NO: 615054 - DNA, 120 bp, Homo sapiens
agcattgtgtcgacgtggtgcgtctgttaaacgactttgtgttttaatatcccaaacattgggaagattaggtgtgatacatggtaacccctccttgggtagtcacaggctgggtagtca

SEQ ID NO: 615055 - DNA, 128 bp, Homo sapiens
ttgggacggcggggagctcatcatctctactgtgtggccatgccatcattagccagctgtttgttggtttgactgagagacggcattgtgaaggccccatcctgtatgttacagccagggctgtgtgg

SEQ ID NO: 615056 - DNA, 347 bp, Homo sapiens
  misc_feature (135)..(135): n is a, c, g, or t
ctgccttctgtaacatctagaggccagcggtttgcactggcagctgtcttgctcaatgcaggaaactgtcagttcctctctcaccatactgtactctttgctgattctggtagggccccccactgtgtgtggctnaccctgatagctgccctttttaaaatttttttcctaaattattcctgactcaagggcagggcagagacctactgcctagacctgagcccaggtctgggctgctatctagtacaagcagatggtgagaggcagagagagcacagggcagctagagagagtgctagaggaaaggagggtgagggcatgcttcttctttgataggttttctgaag

SEQ ID NO: 615057 - DNA, 102 bp, Homo sapiens
tccccctggtatccccaccccattgtctatcactgatgacctccttctgcctgcagatgaagtaaacatgccccatcaatgggtagaaggaaacatgcctgt

SEQ ID NO: 615058 - DNA, 338 bp, Homo sapiens
gtattagtaattctagtccaccctgaccttgtgatctcgccatgaccttctgtactgtgatcttttgtatgccttgaagcatgtgatctctgtgactcaccctattcatacactccctcccctttgaaaattgctaaaaaacttgctggttttacagctcaggggacatcacggaatctgccgacatgtgatagctcccccggacatccagctttaaaatttctctcttttgtactgttcccctttatttttcagagcggacgacacttagggcaaatagaaaagaacctacgttgaaatattgggggttggttcccccaataaactcccctaatctg

SEQ ID NO: 615059 - DNA, 1243 bp, Homo sapiens
ggctcgctccctgacaagatgccaggtcgctggtgttcatgagcgcgcgttgcgctaacgaggcgggccatcagccggcggtgcatgagaagaccttgcagtcggtgtgccgcttgagctgtccgagggcgtcgcgacgacggatgtacaggtgtctggcacgatggcagtgtgatcgcttggcgcagcagagtgaccgcaagggggctgatacggccgatttctggctcggtgataaggacgtagggatggtaacatcctggctgactgcgctctcgagtggacagctgtgaccgccgttgagattcggcgcagtctgaaggttcggtcactcacttgagaacttagcgtcaagcgtaggaggtcatagatggtggtattccagtgtagcggatcgtcttataccttgtacttgtgcatcgcagcggggcggtcgcaggcaccccggtattcgtggccccgttgcccttcttagctgtttgcttttaccagggaccacccgcgacgagacccctgaactaccaggcaggggtaaggcttccatgagcttgcagagggtgccggcgcacatgggaaggacatctccgtatggtcccgggaaacacgtacaaattgcctgtacttatggggtctgggacaacttgacgacttagtatgcttagcgcactgtgggacggaaagcccagcatggtccgccgtagggcgttgaaacctacaacgggatcacttcgaggtggtccatacgttgaagtgttagattggcgttaggcattcgtggctccgataaggacttgcgaatacgatgtccccaaggggactcgaatggtgtacaccccaaatgggaagcccttgggtcagacgtcagacacgaacattccaagcgggagcatagcggggaagcttcgtcccagagggtccttttggttaacaattcgcgggcaatttcacagatggaacaggttcgtaggcaagatgcgacttggaggtcaccggtgtaggccatatttaaagttccatacccagaataggttcccttggaatgggagcctgtataccatgcatgccgcgtttctggcagtgcctatcctggtaaatctccttcgggataagttcgagtgggggaccccttgcctgattataactatccgactttatcgtgaaaggcgtactaagtagaggcatgcccagttttgctcaccctttgtcggaggagttttcccgagttcttgccacctgatatcga

SEQ ID NO: 615060 - DNA, 319 bp, Homo sapiens
  misc_feature (100)..(100): n is a, c, g, or t
gggggggggggggggggggggggggtttttttttacccgggcgttttttttgggggggggttttttttggaacccccccccccggtttttttcccccccnagggaacccggggcccctttttttctccccctttttatttggcggggggggggggatatttttttttcccgggggggccttgggccctttggcctttttttgggggccctttttcccggtttttgccccaaaacgggggggggccgggccggttttttccgggttttttggcccccccgggcccccatttccaaggaatttttagacccccggggccca

SEQ ID NO: 615061 - DNA, 104 bp, Homo sapiens
tgcgccacgttatcttggcatcgagaaaggctgccctgagtctcggccacccggcacgcggtgtcgacgttgcagctcccggattcgccgatcttctccagcag

SEQ ID NO: 615062 - DNA, 198 bp, Homo sapiens
tacgatgattcgcccgttttcgatgatggagacggtgtcacacacgccgtctgctcgtcaaggtggtgggtggtgtcagagttgtcatgtgcagcaggtcggtcgattgcagcagggagaccagaccagcgcgagcttctgggtccagaccggcagtgggttcgtcgaggaacaggacagcgggacgatgcactaggg

SEQ ID NO: 615063 - DNA, 596 bp, Homo sapiens
  misc_feature (275)..(275): n is a, c, g, or t
  misc_feature (288)..(288): n is a, c, g, or t
  misc_feature (387)..(387): n is a, c, g, or t
  misc_feature (425)..(425): n is a, c, g, or t
  misc_feature (459)..(459): n is a, c, g, or t
tggtcccatatctggtaggaccagtggtggctggtgccccggcattgcagctgtttgagtcccctgcagggcatcttggcccacagctcttcaaccagtttgcactgccttacatccgtgatgtggcccagccagtgaaggcccggttgcgggaggcaggcctggcacccgtgcccctgatcatctttgctaaggatgggcacttttgccctggaggaactggccccagctggctaatgagcgtggtatgggcgttgaactggacacgctggccncccacagaaagcnccgcggagtgtgttggggaaagacggtgaccattgcacgggcacacctggaacccctgtgccttgtatgcactctgaggaggaatcgggagttggtgancagatgtggatgactttggaccaatcgctacattgccnacctgggccatggctttatcctgacatggacccngaacatgtgggcgcctttgtggatgctgtgataaacactcacgtctgcttcgacagaactgagtgtatacctttaccctcaagtacccctacacagatgattgatcgtttcccggaccatcaaagtttcgaagttga

SEQ ID NO: 615064 - DNA, 279 bp, Homo sapiens
gattttctttatcaacagactgttttcttagcaaaaagggaggacgctactgatgtcactgctttccacttctactaagctcggtataagtgttcagacttctagggattcctgcttgcccgaaccgtccacttcatctttcacctcgctaactcgtcccacacagccctgctgaaggctaggactaactcatcccctatcccaacaactcaggtacagcgaacgacctacggagcagcactacaccctgaccactgctacacgcccccctcaagccca

SEQ ID NO: 615065 - DNA, 444 bp, Homo sapiens
  misc_feature (235)..(235): n is a, c, g, or t
  misc_feature (273)..(273): n is a, c, g, or t
  misc_feature (307)..(307): n is a, c, g, or t
tcttctactctgtacaacataagccctagaaagaccggactttttgttgctgttgttcatttgtgtttatgcttcatgcctgggtccatactagggatctgataaatttattgaatgctgaatacactgagtaaacatgcctacatatgcgttgtcactagtaaatagggagacaaaggcttgtggtcctcctgacctccctgttggtcccccagaggaatcgggagttggtgancagatgtggatgactttggaccaatcgctacattgccnacctgggccatggctttatcctgacatggacccngaacatgtgggcgcctttgtggatgctgtgataaacactcacgtctgcttcgacagaactgagtgtatacctttaccctcaagtacccctacacagatgattgatcgtttcccggaccatcaaagtttcgaagttga

SEQ ID NO: 615066 - DNA, 145 bp, Homo sapiens
  misc_feature (105)..(105): n is a, c, g, or t
aaactggtttttaatctttaattttccttaaaccctaacccctggttttaaatttttttaaaaaacaattttttttgcctttttccccttttttaaatttttggntcccctccaacctgggggggaattgtttgggaaagccaca

SEQ ID NO: 615067 - DNA, 169 bp, Homo sapiens
cagaaaatggacgaacttcacctccctaaaatcaccagtagtctcacaagctgaatgctaagggtgtcacacatgccttccacaaatgtgctcaaaacatatcaaaatcttcatttggcaaattgcatcatgctagaaaattccacccccaaacatttaaaacgtgccg

SEQ ID NO: 615068 - DNA, 309 bp, Homo sapiens
ttacatgatgaggtgctctaaggtcttatatatcgtggggttattgactctattgtctgaaagtctctgatgtatgtttatgctgtctgtttattcaaattcagtctatgtgaaagtagaaacatgtttatctagattcctgctgtagcctatagccatgactggtttgagatacccattccatcagagaaactgttggtagcaagtcttatctttattttgcacttccctttctgtttttttttttctctttttcttttcatttttcttctatctcccctgccttttcatttttttcttcttatttac

SEQ ID NO: 615069 - DNA, 460 bp, Homo sapiens
  misc_feature (450)..(450): n is a, c, g, or t
gctcccttagctattcatagcatgcaggtacataaagaaacaatagacgccgtactttatgcaatacctggaagaacagacatagaggtgggaatatatggtatggaaggtattccagacaacgacatgcatgaaagacgacgacttcttgaacagaaaacacatgaaagtcaaaaaaagaagcaacaagatgattctgatgaatatgatgatgacgactctgcagcctcaacttcatttcagccacagcctgttcaacctcagcaaggttatattcctccaatggcacagccaggactgccaccagtaccaggagcaccaggaatgcctccaggcatacctccattaatgccaggtgttcctcctctgatgccaggaatgccaccagttatgccaggcatgccacctggattgcatcatcagagaaaatacacccagtcattttgcggngaaaacataa

SEQ ID NO: 615070 - DNA, 118 bp, Homo sapiens
atttcttctcccactcaagagccactcaagtatgtgaagacaataagctgccctggtagcatctcaaggtctaaagctgcactccagcctgggcaatggagtgagactctttctcaaa

SEQ ID NO: 615071 - DNA, 331 bp, Homo sapiens
tctggaaaagctgaattgggttttggtctgaatcaataggaaacagaaaaaaaaaagagagagagacagagagtaaagataatggatccttgaggaatcaccacactgtcttccacaatggttgaactagtttacagtcccaccaacagtgtaaaagacccattatacaggctgcctttccagctctccaatcatacttccaagaaaactgctcactctcagaaccaaggttcaagttgtacattgggatttgggtagaggtaagaggaaacaccctcaaatagatttggatcattccagatgtcctataaatgaagtttgacatttaaaa

SEQ ID NO: 615072 - DNA, 365 bp, Homo sapiens
  misc_feature (7)..(7): n is a, c, g, or t
  misc_feature (160)..(160): n is a, c, g, or t
  misc_feature (204)..(204): n is a, c, g, or t
ggaattnggcacgagttcaaacttgaatgtcaagccgtctcgtcaaaccgttgatgctaatttattaattaagcctatggaatattctaaatcctctgttgtcatttcaacaatgttcacagcatcttcacctggagtaagttgtatcttaataaaccgnttcctttgtttatccctaagaagcagcttctcatcctttcatgnttgttttgcaagattgtagcagctcaatcacatcttcgggcttcacttcaaattctagttctcccactgtgtctaccacattggcaattacttcctccattgaagtctggaagccctcaagctcatccatgagagtcaaaaaatcaacttcctccgaactc

SEQ ID NO: 615073 - DNA, 216 bp, Homo sapiens
  misc_feature (175)..(175): n is a, c, g, or t
ctctagaccactgtttatgaggaggagctgaagactcgctggaagtataggattggccagatgcttgcttgggaggaaaggtgggcatctcgcctccagcaggcggggtaggtggcaatctcctgctccagccgcgtcttcacatccagcaatgatctggtactccgtggctctngctgctccatcttcaacagcgtagcgtgggcccagcttgct

SEQ ID NO: 615074 - DNA, 127 bp, Homo sapiens
gcgaattcactagtgattggagggcaggggaaagccgcagagcaactatctgatctcatatctactaaaaatacaaaaattagccaggtgaggcggggggcagtggctcacgcctgtaatcccagta

SEQ ID NO: 615075 - DNA, 721 bp, Homo sapiens
  misc_feature (14)..(14): n is a, c, g, or t
  misc_feature (70)..(70): n is a, c, g, or t
  misc_feature (72)..(72): n is a, c, g, or t
  misc_feature (80)..(80): n is a, c, g, or t
  misc_feature (91)..(91): n is a, c, g, or t
  misc_feature (94)..(94): n is a, c, g, or t
  misc_feature (98)..(98): n is a, c, g, or t
  misc_feature (110)..(110): n is a, c, g, or t
  misc_feature (168)..(169): n is a, c, g, or t
  misc_feature (176)..(176): n is a, c, g, or t
  misc_feature (264)..(264): n is a, c, g, or t
  misc_feature (307)..(307): n is a, c, g, or t
  misc_feature (410)..(410): n is a, c, g, or t
  misc_feature (471)..(471): n is a, c, g, or t
  misc_feature (514)..(514): n is a, c, g, or t
  misc_feature (707)..(707): n is a, c, g, or t
gttatttcctcctngcggcgcgcttacagtattaagtgcctctcctccagtctccatcccacaccggtgncncagagtgnttaggccagcngcnaganggaaggaataanaacagtgacattaccgtgggagggcacacaggccaccatctttggccctcaggttctnnagaaggncacggcgacacgtggccatggttacccctggcagacgatatcgtcctcgcagtgataggaatctcttccacagaggcagcagagaagnggtttagtgccatggatagggagcgcaaagataggacgccgcntgcccagaaggtgactggctgtgccttaggccttaagcccaggagtgtgtttatattctgtctgcaaggacaaaaatagaattcggggaaaataaggtgagtnacatctaaaacacttgtagcaggaaagacgtggagaagagcaattgcaaaggacagggtanactgcttgctggataatatttgcctttaaagagatgcattggnccacagcaactggaaaaggggtgtagcaagaagaatggaaagaagagaagcaaggccctctaattccacttacctcaaaagactgagccctgaggactatgtgaatacacaccctaaaggcaaggctctcactcaacatccctttctcacaaagcatctggtgtgcatctctcccacagtagggtattggccncagcagaaacagaa

SEQ ID NO: 615076 - DNA, 151 bp, Homo sapiens
acatacatcccaagttgggggacaaaaaagggggaagggggggcacgaaggtctttcattcaaaataaaacaaaataaaaaagtattgaggcgattattaaaaaaattttgcattacataatttacacgaaagcaatgctatcatctcccc

SEQ ID NO: 615077 - DNA, 492 bp, Homo sapiens
acagtaaccggcgctcgagcgccaaggcgagtattgcttgaatgttcatccaaagcacacaaccagcgagccccaagaaacagctagggaaataacagatgggtcgccctgacgctgcgccgcaaaaactatatatatacctaatgccacaggggacgctattctgcgtgcagacacaaggacacaactgttggcgtagcaagacctattctgagagcataaaaggagcgcccggaccaggagtccatccctcatgaaaaccacaattcaattgggggccgatcttacgatatacgcagtatttccggtacagtggagaaagactggggggccacaaccatatcacgccacgagcaaaccgggagatcacacccgcctttaccaagcgtccaaaagctcctagagcctgccaagtcaggatttcaccgcctaaagcaacgcccactacgcagcaccggcagcccttcttgccggtcctcggaacaaaccaac

SEQ ID NO: 615078 - DNA, 1313 bp, Homo sapiens
  misc_feature (248)..(248): n is a, c, g, or t
tggctgtgcccaactgttaattacaggggccctaaagggttggtgcgtgaacttgcaaaaaattcgggcccaaaacgtttaaccggccggttccaaacgccccggggcggcaaaaccacagcgccaggagagcatcccttggccaccaatgtgggcgccaccgtgtcaagcgggccccaaaggagaccatgccagatagtgtcgccccggggccagatggccacgttgggtgtcagtgttgtcacccnctacgctcgagggcgtcagatgtagatgagagtgcggtgaacccccacaggtatattcctctgtgtgtgtcccccccatatttgttcgccgcagagagaggcgcccagagggggggcggctctgggaggttcccccatctctgcgctactgtggcgccaccccccgtgttggcacagcgggactatcaacaggtctgcgctgtgagacccaggtgttttgggttgttgtaagaccctttttgtaggcgcggtgggctctctgggtgttgtgtccccctcttactctaagagggcgcgtaaacatctgtgtgcttataagaggatatttcttaccaaactcttttctacccccgtatcgcggcggacaaaaaaagtgcgtcccaatagaaggccttctggtggcaatatttgtcccccaacagagggggggcccccccgagtgaggcccccccaagttggacaccccccgaagaagaacaaccttaaaaaagggcccctaattgggtgttgtgcgaagagcgccctacgggggaaaaacaaacatagtgtgttctgccagaaaagcgccccttttgtggagcgccaaaagtgtgcgccctttgagatgaggaccagcccactttgtggtacgcctttgaggggagaaaccccccccaaaggggctaatatcagaatcaggggtaaggccggcccacatcctcatcattattaggccgctgtagaaatgacacaggaaaagatatctccccagtagtgcacacaccgggggggagacaccttttgtaaagcaacccccccagtgtgagtgttgtttggaccccccaacatattctacctgatatgatgcgcggcaaagcacgctgtggtgcccccgataaaccaggtaatttgtttgttgtcaaaaagaagaggagggggctcgccccccaaagaaatgtgtgttttagcccggttaggtagcgcgggagttacacaccatacacggcatcccccacctgagattgtgtgagataaaaaaaaaacgcctgccccttggttgtgatgtacaaccgccgagtagtcgcc

SEQ ID NO: 615079 - DNA, 130 bp, Homo sapiens
cactgattaccaacacaggcatgctcataaggaaaggttaaaacagtaaaaggaactcggcaaatcttaccccgacctgtataccaaaaacatcacctctagcatcacgcagtattacgaggcaccgctc

SEQ ID NO: 615080 - DNA, 148 bp, Homo sapiens
atttggctggacctcggcgtgtgcagtgtggacattcggcgtgtgcacgtgaagatcggcgatttcggtttgggttctcggcgtgtgcaacacgccgaggccccatactgcacacgccgagtcaccaaaccgttatcgccgatcttca

SEQ ID NO: 615081 - DNA, 705 bp, Homo sapiens
cgttctagcagcgagcggcgagcgagccagggccgacgcttcaccacttacttcccttattccactcggcaagctggcgcctcgtgcactttcaacctctgtttccccgcttcactggcaaacccccgtcatttaacacaacgacgcagggcacctgtgagcgcaggagcgagcctaaggccacccagcggcagcgcccgtgtcctgggcactcagcgtgctgcggcagagcaggtgcgatggctcccggactgtgcagggcagccgatacgtttgctgatagcaactactggaaccaccgggtgcgatggcagtgaggagactgcccagtgcctctggggctgtgcttgccactaacgacacgactttcctggcaaaggcagtctgcaacaagagggtaaccggtgacctcagcaaagaccgaatgttccggcactttaccccaaatgtgccatcacatagtgcttttctcttgccttcgctggtcgatctcccatcatgtaatcaactctcctccaacgcacacatgtcatcggaccccgctggctgcccctaactccagcattactaccggaaccacgcgactatggcgaaaggacaaccacacacattatttaacacaaaccccggaccaccccaccacccacacccaactcaccccaccccccagcacctccgggccaacacacctatttctacctcacc

SEQ ID NO: 615082 - DNA, 421 bp, Homo sapiens
  misc_feature (40)..(40): n is a, c, g, or t
aaattcaacctgtgttgtggccatgtgtcaagcattttcntccgtttttaaggatgaatagtattgccagtgtgtgtgtgtatgtgtgtgtgtgtgtgtgtgtgtgcgctttcaccccaggctggagtgctgtggcacaattatggctcactgcaaccttgaccttcccaggattaagccatcctcccacttcagcctctgaagtagctgggactatggcacatgcccaccgtgcctgtcttcactaaaaatacaaaaaaaacccaactaaacaaaaaaaacaaaaacaaaaacaaaactagctgggtgtggtggcacacacctgtggtcccagctacttgggaggctgaggcatgagaatcacttgaacctgggaggcacacgtggcagtgagctgagatcgcaccactgcactccagcc

SEQ ID NO: 615083 - DNA, 373 bp, Homo sapiens
attcgcaggagccaaagtcatctcatctgacatgtaactaagagcgcgggaggtggatagcggagtatagagagccaggtctcggactgcagcagctctacaggcagcagtgccatcagctctacagacctctttaggggacatggatggagctcacggagcaggaagtgtatctctggggaacgtgctgcctacagcggacattgccccgtttaagcagggtgtccagtctgtggctgggcaaatggctgtgctggccaatggtgtgatgaattccttgcaggatcgctacggttcctactgatccgagctctgtgactcaggcttacgatggtgacggccacaagagctccacagttcccaggctggggat

SEQ ID NO: 615084 - DNA, 380 bp, Homo sapiens
tcatcgtgctcaagcattctcagaagaactgtgcaagtcaatgagtcgcttgtggattctcatctggaagggaccccacgtcttagaaccttcaccacaaggactttttctgtagtgatgctcaaggtctgggcaggtatgcgaactggtcctttcatttggagattctatgcctcggctcctatgatgaagtcagcacacaccttttccagggctgtgatgttgcggctcgtcacagtagatcaattccggtgaactgccatcgtccagttccacgcgtgtcgtgccggtacgcttcacagccagagctgatgtagcggttcctgacctgaattctccgttgcggaggtccggtggggcgctgggaggacccggtccca

SEQ ID NO: 615085 - DNA, 305 bp, Homo sapiens
  misc_feature (23)..(25): n is a, c, g, or t
  misc_feature (39)..(39): n is a, c, g, or t
  misc_feature (66)..(66): n is a, c, g, or t
  misc_feature (103)..(103): n is a, c, g, or t
  misc_feature (111)..(111): n is a, c, g, or t
  misc_feature (120)..(120): n is a, c, g, or t
  misc_feature (142)..(142): n is a, c, g, or t
  misc_feature (150)..(150): n is a, c, g, or t
  misc_feature (163)..(163): n is a, c, g, or t
  misc_feature (169)..(169): n is a, c, g, or t
  misc_feature (171)..(171): n is a, c, g, or t
  misc_feature (189)..(189): n is a, c, g, or t
  misc_feature (221)..(221): n is a, c, g, or t
  misc_feature (226)..(226): n is a, c, g, or t
  misc_feature (228)..(228): n is a, c, g, or t
  misc_feature (230)..(230): n is a, c, g, or t
  misc_feature (232)..(232): n is a, c, g, or t
  misc_feature (260)..(260): n is a, c, g, or t
  misc_feature (298)..(298): n is a, c, g, or t
attttccgatcggtccctaacannntggggggggccctngccctattactatccatcctcatcctngcaataatccccatcctccatatatccaaacaacaangcataatntttggcccnttaagccaatccctttattgantcctagcngcagccctcctcnttttancntgaatggggggacacccngtaagctccccttttcccatcattggacaagnggcancngnantatatttcccaccaatcctaatcctaancccaactttttccctaattgaaaacaaaatactcaaangggccta

SEQ ID NO: 615086 - DNA, 193 bp, Homo sapiens
atttcaagtctttgaaatcaaatctcccttgaggcaaacttggcaccattcttcctctttcctctcatgcaggtaacaaggagatgagcagaggtggccttggtcctcgtcatgttgtgcatgggtctttcctctctctgctgtccatcctttgcatgtccagagagtccaaaaggctgatgagtggacaatc

SEQ ID NO: 615087 - DNA, 192 bp, Homo sapiens
tcgatacagactaatttttttgtatttttagtagagacagggtttcaccatgttggccaggctgatcttgaactcctgacctcaggtgatgcatctgcctcagtctcccaaagtgctgggattacaggtgtgagccaccacgcccggccctatgttgtattttttaaggaacctcccttctgtcgtcttctc

SEQ ID NO: 615088 - DNA, 97 bp, Homo sapiens
tagagacggattcccactgttgccccgctggattgcagtggggtaatctcagcccatggcaccctcgtttcccccaggtccacgtgattctcctgcc

SEQ ID NO: 615089 - DNA, 433 bp, Homo sapiens
  misc_feature (30)..(30): n is a, c, g, or t
  misc_feature (417)..(417): n is a, c, g, or t
  misc_feature (419)..(419): n is a, c, g, or t
  misc_feature (422)..(422): n is a, c, g, or t
accctgccccctgtctttcccctcctaggnataaagacagacatcccctgccctctgctcccccctaccacttagtgtacacccttgttacagagcctcagaacactgaattatggcccatttatttgaaaaatccttcctggccgggcatggtggctcatgccctgtattcccagtactttgggaggccgaggtgggctgatcacttgaggtcaggagttcaagacccagcttggcccaacatggtgaaatcccgtctatactaaagatagaaaaattagccggtcatggtgttgtgcatctgtagtcctaggtactctactcgagaggctgaggcaggagaatctcttgaacccaggaggtggaggttgcagtgagctgagattgcgccactgcacttcagcctgggcgacagananggntattctatctc

SEQ ID NO: 615090 - DNA, 131 bp, Homo sapiens
actctattaactatacctcctaaacgtattccaaatccatttatatctctccattttcaatgccatcaccctattcaaagtgatatagtgagtataagtaactgcggtttttgccattaatagtatgtatg

SEQ ID NO: 615091 - DNA, 133 bp, Homo sapiens
tgccccagctgaatggcatataggagtagttactgcagagcgtgtagacacagcactgactccatcacaattaaaaactttattaataatcatgtatttttactgatcacattctgatatgccattcttgctg

SEQ ID NO: 615092 - DNA, 426 bp, Homo sapiens
agcagctttgtcgacccacaagaagagaggtgtgtaggatatggtaatcctggatgctgtcattgaagccaaatcgttgccccagggcacttcagcccgcaagaccaaactcattgctttaattctggcctttgagctaagtgaaggtaagactgtaaacatttacactgactcttggtatgcctttttaactctccaactgcgtggggcattctacaaggaaaaagccctgttgaacgctgggagaaaagacataaagtatcagcaagagatcctgcaattattagaggcagtgtggaagccccaaaaggtggctcatgcactgcagaggacaccagcgagcttctacctcgattgccttggagaacccccaagctgactcagaggctcgaaaagcagcatccacccactaccaggcatcagtca

SEQ ID NO: 615093 - DNA, 185 bp, Homo sapiens
ttacatcttgaccttctgggtctctgaagtatacagcacacagtcagcccagatcagagctacccgggcggggagcaccaggtggttcattcatttagaccatcataccaagcgctacacttagaggaggcatctctttaagattgataacaccacgattcaactcatttcagtggatataaagt

SEQ ID NO: 615094 - DNA, 390 bp, Homo sapiens
  misc_feature (104)..(104): n is a, c, g, or t
  misc_feature (110)..(110): n is a, c, g, or t
  misc_feature (191)..(191): n is a, c, g, or t
gagccggcccgaaataagagaaagaaggaagggacgttgggaaatgtatctagcgatgcacccagcaagagagcactggtgaatagctagccagtctcagccangctacngtatgtagatctaagttcatttgcatttaggtgtaagatagctttataacttttaaagagttaaaaattaattatgggttnatgtttttaattctgtgtaaggcctccttcccaaacccaaccttttttgttcacaaagaaggcagcttagaatcctccatggatcccataggaatcttttttctttgactttaaacactcatttcccgagctccatactccattgagcatttcttcagttgggataactaagtgcagtccctttggagctcatcaaagt

SEQ ID NO: 615095 - DNA, 594 bp, Homo sapiens
  misc_feature (42)..(42): n is a, c, g, or t
  misc_feature (50)..(50): n is a, c, g, or t
  misc_feature (68)..(68): n is a, c, g, or t
  misc_feature (155)..(155): n is a, c, g, or t
  misc_feature (162)..(162): n is a, c, g, or t
  misc_feature (205)..(205): n is a, c, g, or t
gatttattttatatttaagataattggaaaggattttgaaantttgaagnttagtaatattaatattnttttttaaaaagtggatgaaattaggttgaagatgaaggtgttttttagaggaagtttttggatggtaatgagtttatttggtgatngtaattngtgttaaagttatatatagtataggtggtgtgtaagaagtatnggggatttattatttttgaggttttttggggagtgtattggtatttgagtaatgtttatgtttgggaagaatttgtttttatttgtttagatgatgaggagattgagtttgtttatgagtaagtggtaaaggtttttaaataagttttttttgggatttttttaattttttttattttttttataaaggttttggtggtttttatattgttatttaatggatatattttaaaatggttagtgggtagggaattttggagtatttgttttgggatggtgtggtggaagaggggatgagggaaagaaatggggggtttgggttagatttttattgtggggtgggatgagtaggataatatattttagtaataaaatatagaataaaaatta

SEQ ID NO: 615096 - DNA, 227 bp, Homo sapiens
actgacgaagccgtacaaagggagatggcagttgacttgatggtgatgcgaccgctcctgctcgtccttccgggttcagtgaagcgtgtctccccggtcccgggccggaggctgatatgcccgccttgcacaccaggaagtctgtcagcgtggacttgccagtggtccacgtgggctatgacagacatcttgcggatgttggccttcttctacggcttcgtcggtca

SEQ ID NO: 615097 - DNA, 166 bp, Homo sapiens
agatcaccgggacggcaccagagcgaggtgaacttgcagttcctcacacactttatgtaaacttagcttaaggacggggcctacaaaagtgttcgtcttgtgccgttaaacactgctaagcaccaggacagccagcacccgcagagactcctccccagtgctccat

SEQ ID NO: 615098 - DNA, 621 bp, Homo sapiens
agcgggtcgtgtccgccgcggcgcttgcgggagtggcctggtgtgagcgcagagtcgggccctgggcagcagcggctgcgcggtaggacctcggcgcagcgtccgcgggctccggggcgggggcgccggcggcgaagccccctccccggggaggcgggacctgggtggagctcccgagtcctggggagcgtctggcggccgggaacgactgcagtcagaagctgtgtgaatcgagcgcgtcattatcactcgtagcgtgggcatgctacacagtacttgtgcacggtccttgtgttgcacccgtgtgcattcacgtctgtaccgacctttactgagcaagatcccgcgggggtcgccttcggaaggaacaaactctcggatagccgatctatgcagaagcggggtttaccaggtgcccgtaaccttggcccggtcacaggcttgatgtactcaagagagttatgtatgtacttctggagtctagagtgtagcacagtagaagcatctggacgtcagtttgcctggagttgcgtttctcgttacttcaccgcttgggaactagtattgaccatgttgagcatctgtcgttaccgttcaggcaaggtgcagtcctacgaagaa

SEQ ID NO: 615099 - DNA, 138 bp, Homo sapiens
ggctagtcccacctcctgtatcagtaatcctccaacttcagcctccaaaagtgctgggataatataagtgagccacggcgtctgggcttgggatggccggattctatggtagctctatttttaattttttggaggaac

SEQ ID NO: 615100 - DNA, 443 bp, Homo sapiens
taaacccccatccttgaacctgcaccccgcccctgacttgctggctagtatgcagctgcacaaacttaatagccagtatcaggggatggctgctgccactccaggccaacccggggaggcaggacccctgcaaaactgggactttggggcccatgcgggaggggcagaatcactctctccttctgctggtgcccagagccctgctatcatcgattcggaccctgtggatgaggaacagctgttgtcacttgcggaggaactggggttggaccgagccaatgagcttacggagctgaggctgtggcagaatgagtttgccttcactgcggactttccatctagctgctaatgccacgtgtgcgtagggacggaggactaaagccaccaattttggtgtaaataaaaataacgtcccttacaaagtgtccgacctgaagactgga

SEQ ID NO: 615101 - DNA, 138 bp, Homo sapiens
aaaagaagagatgaatataaggaaagaaatcataaagagaaagggagcttctctgacacaggctcatgactagcatgagctgtggtttgacatgtttagttcaatggtttcacactgaacactgacccgacaaatggg

SEQ ID NO: 615102 - DNA, 153 bp, Homo sapiens
ttcatatccagtgctttcatgccaatcaggaagagggaagccagtgaggagttggggaggacggcaaaggcctggacatccacggcaggttagaatgtaaggccggtgggctgcacatgacaggtgtggcggcatgaaagcactcgacatgaa

SEQ ID NO: 615103 - DNA, 450 bp, Homo sapiens
  misc_feature (163)..(163): n is a, c, g, or t
agggggggggaggggggtgtcccgggggtttctccctccccccccctctccccacagggggggtgtttttggcccaatcatcgggggtttcctcaaggtgggtttccccccccccccctttcgccctagggggggggggggtgtggggggggggtttttttanaagagcctctttttttcacccccccactccccggggggggccccccccccttttttttccccctttggagacaccggggggcccccccccccccgccttttcctttgggccggggggggggttatatttttccccggggacccccttggcccctttggcctttttcaaaaacttttttggggccccctttgggggggccccccggggggcccggcggggttttccggggggccccccccccccggggaaaaaggaaaaaaattttttttttggggtccggttttata

SEQ ID NO: 615104 - DNA, 96 bp, Homo sapiens
aggtgaggcaggagaatcgttaacctgggagacagaggtgtttgagctgagtcaggcattgcatccagcccggacaacagacacggactccatctc

SEQ ID NO: 615105 - DNA, 395 bp, Homo sapiens
cggcttggaggatttcggaacaaggcccactgtaggaggctaaaaggattccttggcttcaaccaatccttagccagaagttccaagtcgaccaccagccaaaatggtttccaaattttgccaagcttcccaaggtagcaaccttgaaaacttgacctaaaagctttggggcttcttaaaaccttgccaccccaagggcatgggttggttggcggcctattcggacttacagtggtctcaatgggcagacgcctgggcaccccttggggcctgtgcacaaatggccatgggccaggtctctaaacccgaatggttttccaaggcctgggagatttgctctacaggacggttggcaccttctctggggcgcggcccacacgcacccccaccccccc

SEQ ID NO: 615106 - DNA, 280 bp, Homo sapiens
  misc_feature (222)..(222): n is a, c, g, or t
cggcacgaggcggactctcagtcctgcaggggccgcggacacaggtggggaggagtgggggagtttttccctgggagaaatgggaagcgtcgaaggattttaaggagtgcggctggtcgggtttgcattcggggaggtcgctttgtctcttgagtggagaatgaggaggtggcaacagcaggggagtcaccaggaagcagccctccccagacactgctgggnccttgatcttggactccacagcctccagaacaatgagaataaatttctgttgtttgta

SEQ ID NO: 615107 - DNA, 448 bp, Homo sapiens
  misc_feature (26)..(26): n is a, c, g, or t
  misc_feature (34)..(34): n is a, c, g, or t
  misc_feature (45)..(45): n is a, c, g, or t
  misc_feature (82)..(82): n is a, c, g, or t
tccaaaagaaatatgaacaagatttnaaaatggnaaaaaaaaaantagccagcacccccatcccatttccctccccctatantggtaactgttgaaggaatggccagcctagtagcccactgtggcctccttgagcacttgaaatgtccctttgtccctaactgagaagtattggcccaggagtggtggctcacacctgtaatccctagcagtttggaaggctgaggtgggaggatcacctgagccccaggagtttgagaccagcctgggcaatatagtgagaccctttctgtatttaaaaataaataggctgggcacggtggctcatgcctgtaatcccatctctcagggaggcagaggcgggaggatagcttgagcccaggagtttgagaacctgccttgggcaacatagcaagactctgttctccacgaaaaggaagaaaaaaaa

SEQ ID NO: 615108 - DNA, 536 bp, Homo sapiens
gaggggggcaagaattattaggtattctagaatcaagttcttgatacctgttgtggcaagtatttttaccaaatatatggctttttcactttcgtgtctttagaagagagaaatatttttgaagtccaatttattgatgtttttcatttataatttatgctttgtgtatattgtttaaaactctttgccaaaccaaagatcattaagattctctcttatgttttttttctataagctttttgtacgctttagcccctgacacctgggccccagtgatccactttcaacattaaacttttgctatgtaacttcgagcatacaagggctcaaggctctcactttctctcatgaccttaactcctcgacatcacatctctcgtgtcccactctccttaggccgcctctactctagctcatgctggcctttaacatatcactctgtactacttaactgaactcccaacattacaacctctagccacaaactgcctattccaagagcatatctcaagccatgtccaaaactaagccgttaa

SEQ ID NO: 615109 - DNA, 366 bp, Homo sapiens
ctattcgtcgccctgtagatcaggaacttggggagccttcctggtttcttattataatttcccccagatttatacatggtggaaagattctgggtcatttggatggtacttttggcacctggtaaccaaatcagcaggaagcccaggtaattaacggggacccttatgatcatggtgttttgtgcagaattttgcacgaggaaatagtttcgagtttttttttttttttttttttttttttttttttttttttttttttttttttttttttttttttttttttttttttttttttttttttttaaatggaataaacttttaatcatacagagaaaataatttttgagaatcaggacaggatcttcc

SEQ ID NO: 615110 - DNA, 304 bp, Homo sapiens
tttcccccccttagaagttgaaaagagcaaggaaatgacttgttcctccttgttttaagagcttttgtaataaatgcagccttgtggcccctttttagattttaagcatccagaactttggaatagatttttgtttttttaagacccattaagtttggggcattttgttaacccagttgttccttaagcccttgttcttatgtagggggtttcccaaaaggtccccccccccctttagtagaattgggaagttttagcccatccccagggagggaatcaggaataaaggcagatggttttccca

SEQ ID NO: 615111 - DNA, 327 bp, Homo sapiens
  misc_feature (148)..(148): n is a, c, g, or t
  misc_feature (170)..(170): n is a, c, g, or t
  misc_feature (315)..(315): n is a, c, g, or t
aaggatccctgtaggtggtgtgggtagaagaggtcgctcgtgaatgagagggtcgtgtggtacgcgtgtcggtgtgctcgggtcacctgggggtggctctcttaggggatttctggtgcagcaagaaagccattgtttccatttttgnctgagtgatcctcttaaacggngaatcagatcggggccctccttcacttaaaaaccttgtgtcatagagattaaaattcaaagtccactagttttgggctagtctctcctcctgatctctccaaactcatgggcctcctatctactccttcctcatcgtattccggntaaccacaacca

SEQ ID NO: 615112 - DNA, 348 bp, Homo sapiens
taccgggccaaaaatgtggttcaaaattctccccggactttccgtcatgggggtgtgcttgttgattccaggactgggtactgggtacatccccaggttccctaacgggggcaaggaaaaaagggttgctccttttgggtatccctggagtttgatggaaaaagataggggcatttttggagttgatcgtttctatgtgtcaaagggtttggagaaccttgattaaggaagccttttcctgattgatgaaaaaaataactcagttatggccctttacccctgctaaaaggttacagtgtattatgtagcatgcaatgtgttatgtagtgcttaataaaaattaaatga

SEQ ID NO: 615113 - DNA, 181 bp, Homo sapiens
atgtgttgattcaaccaaggaaaggggagtgatagtttacatgctggtagcgtcgttcgatgcatgcacgagcgaacttcaaggatgcacttaagatgagccttaaagttattatcatggtgatgagacagaacccagactgacgggatagcatacatgggctcagtcgaacggactggga

SEQ ID NO: 615114 - DNA, 156 bp, Homo sapiens
gtgcgcgtgtgcacgctgattctgcggtcgctctgacggctcccgtgtaccctgccctagtgatccgttctcatcggtgggattgcccttcttcgtgacgcccctcactggcaagatcatcaaccttgaggtcgagcccagtgacaatatcgggaa

SEQ ID NO: 615115 - DNA, 114 bp, Homo sapiens
gatcgagccggtaccgttctccccgttgcgatggcatcagctcaatttcaggtcctcctacccagcgaaccgcaggcaagttgttctgaagaagtaagtgacttgcttcatcat

SEQ ID NO: 615116 - DNA, 347 bp, Homo sapiens
ctgtatttttttcagtttacagaccaataataaaataattttgcaattaaaactcccagataggctgggtgtggtggctcaagtctataattccagcactttgggaggccgaggcgagtggatcatttgaggccagaagtttgagaccagcctggccaacaaagtgaaaccccatctttactaaaaatacaaaaataggctgggcatggtggcacatgcctgtaatcccagctactcatgagactgaggcaagagaattgcttgaacccgggaggcagaggttgcagtcagctgagatcatgccactgcactccagcctgggtgacagagtgagactttgtctcaga

SEQ ID NO: 615117 - DNA, 120 bp, Homo sapiens
  misc_feature (66)..(66): n is a, c, g, or t
  misc_feature (68)..(68): n is a, c, g, or t
tttgatttgtagatgttcacccagagtcctctgtaccctcctggagaggattttcttactcgtttngncatgaaggggagctagggaatggatggaaaaaaggaaccagtttgttgattg

SEQ ID NO: 615118 - DNA, 549 bp, Homo sapiens
agcggggtctggggctgttaccattgagtgaccagaaaggctctcggtgcaacagcgttcctgcagaattgcttccacgtaaaggggaccttcgggaaatttcgctggataccggctggaattgacaaaccagcgtccctgagccttgtgaggtttccaggcatgtgctgattgcgaggcaacatgtctgcttcggtgaacagacaagccttcagcttcagctactggagatggacaatgcttgttttctatgtttcctaaccacaggagcaagtcaaaaccttgaagatgtacaatgccctgaacgaactataacacgacggtactttggaaagggcacaagggacaggcgcatgccagccaaacaatcgacacttttgtcaattaccactccagattgaagaagcccaagaaggagactttctggttctccagactggattctgtcccgctggttacacacacttcaatggaaaccctccaacttaatccatggtgaacattgaattgcaagttgaacattgcctccacaggtacccacgtatggtc

SEQ ID NO: 615119 - DNA, 117 bp, Homo sapiens
gttatcaaccacaatatcccagtgcccagagggctacttgcataccacttaatcacttcaaagcgcttcttgccgtgccgctgttggtgccgctcggagggaactcggtcagaggtg

SEQ ID NO: 615120 - DNA, 310 bp, Homo sapiens
tttttattttgagacggatcttgttctcttgtacaggctggagtacagtggcatgatctcggctcactgtaacctccacctccggggttcgaacaattctctgcctcactctcccgagtagctgggattacagttgcccgtcaccaggcccggctaacttttttgtattttttagtagagatggggtttcaccatgttgaccaggctggtcttgaactcctgacctcgtgatccacccgccttggcctcccaaagtgctgggattacaggcatgagtcactgcgcctgtaaaaattattttttacaaaaa

SEQ ID NO: 615121 - DNA, 190 bp, Homo sapiens
tgtagaggatcccagtgtagtgtataagcatatcaatattaaaaaagcagcagcagaattggaattcatccaatccaaatgcggcatcttcaaacctccatgatgctgcttacatgtctcgatcccacttaactatcttgggctgtgacaaagtaactgggttcacacggcaggcatactcatctttttc

SEQ ID NO: 615122 - DNA, 387 bp, Homo sapiens
ggaaatctgaaacatgctttgtcattttctctgttattgtttttgtatgttataaaacccccatgtaacagtctcccttatggtcagtgattgatgacctcaattttgatttagattatcacatgtgtttggtttctggaaatataatcttcttgtcaaagaaatatctctcagaatatacatggggcttatttatgttgttttcgtggtcctttttattctttttacttcgctgtgttttctgaactgttgttgcttggcctcctcttttgcttttccctttgtgacctgtttgttttttggaatcacgtcatgatgttcgatcttattcttccatctttagcggtgccatggtcgacactatgctacttggttgagcctggtgcg

SEQ ID NO: 615123 - DNA, 124 bp, Homo sapiens
gttggtcaaggacatgaggatcaaggtccctgggggagatctatttctcttccttcccattagggattcagagataattgattcttccctggggccctctcaagggatgaggttttgagagatt

SEQ ID NO: 615124 - DNA, 432 bp, Homo sapiens
  misc_feature (2)..(2): n is a, c, g, or t
  misc_feature (82)..(82): n is a, c, g, or t
  misc_feature (84)..(84): n is a, c, g, or t
  misc_feature (93)..(93): n is a, c, g, or t
  misc_feature (101)..(102): n is a, c, g, or t
  misc_feature (160)..(160): n is a, c, g, or t
  misc_feature (199)..(199): n is a, c, g, or t
  misc_feature (205)..(205): n is a, c, g, or t
  misc_feature (234)..(234): n is a, c, g, or t
  misc_feature (313)..(313): n is a, c, g, or t
  misc_feature (375)..(375): n is a, c, g, or t
cngaggttgcaatgagttgagatcgtgcaactgccctccagcctgggcggcagagcaagactgtctatgtatatatatatgncncagtttttnagaatttnnagaacagttaaagctgttcttagatatttaagaacagccttaacagaaaatatgaganactcttatgaataaagtttaggaacgttaagtataaatntataantactaatggagtattgtgtagtcattaanagtatgtttagggctgggcctgtggcttacacctgtggtcccagcactttgggaggccgaggcgggtggctcatttgangtcaggagttcaagaccagcctggacaacgtggtgaaccctgtctctactaaaaatacaaanttagccaggtgtggtggctcatgcctgtaatccagctacttggggggctgaggcagg

SEQ ID NO: 615125 - DNA, 144 bp, Homo sapiens
gacctggctgacgaggcttgtgcgttgagagagtggaggaacattgagcccaggaagctaaggttgcagtgacctgtgatcatgccactgcactccagcctgggcgacagagtgagactctgtctccaagccgcggtcaaccca

SEQ ID NO: 615126 - DNA, 364 bp, Homo sapiens
  misc_feature (310)..(310): n is a, c, g, or t
tgatgaggaacgccctagcctggaggcactctgaacagctggctccacgctcccattctaaagggcacgctcctctcggtctgcggaggctcagtgcccctggcataggaacagcagcttggccactgcccacccaggtcactgagcttcagttggaagtggcagcaatgggcttatccagttcaaggtcaatgctggagcttgtgggatgtaggctgctatagcaagactcgcatacgtcgattgggttcaaagagctgctggctggtaactggaaccttctggttacaacaactggagcagaatacgntcccacaattccacgtttgatcaacacggtcagtgtccctgcagtgttgcttcc

SEQ ID NO: 615127 - DNA, 268 bp, Homo sapiens
aaaaaaaatgttctcctctaaaaggaaccccatcccattaagcagatactctccattccttccttcctccagcccccagcaaccaccaatctgctttctgtctctatggatttatctattcttgctattttatataaatcgaattgtatgagaccttttgtgtctggcttctttcacttagtacaagtttttgagatttatttacatagtagcatgtatcaacacttcatttttatggccaaataaaattgtattatgtgtttataaa

SEQ ID NO: 615128 - DNA, 666 bp, Homo sapiens
tggaagggaaaattggttttatttcaataattttaatgtacagaaaactcaacagggtacattaaacccagttaagtgggcaagttcttaagcccttggcctttcacgagtctgtggggatacgagccacagacttaggacccaggacattggccaccccagtgacggcggatctcatcgtatctgtcattggtaatgggccctgatagcttccaccagctaagccaaagcgccttggtctacccgagtatcacctgtgtgaaggcagacagtggtgcaggtctccctggtgggactaaactgtcccagttcttggccttcccccttgataatggcatgtaggggacccccatttaacagacatcagggcaggcaaagaagacaaccagctccgatggggatccacgtctgtggtgcaatcaccaccagttgagcttcctggttcttccaccaaggttgttgacggtgtataactccgtgtctcgaaggcacagggtggtctacttcgtggggacgtccccttgtgccagcagccttcttactcggcccggtgccaacaagtctctggtacttctctaggctaggactctggtctgactttgtggggccagcttaagccagttgagtagctgtatgggcggcccaggcctgggtgacccgggttaa

SEQ ID NO: 615129 - DNA, 400 bp, Homo sapiens
agtgatctagaggatcccggagatatttgtgaagttgtgcaattactttggctctttttctgaaatatctaggctgaaaaattagtatgtttcacccgttattgtattggttatttatatcatctgttctcctggacagggattaggctttatgtgtagtgtattttattacaaaatcccgactgcgggtataatactatattaatacaacctagcttaatttttcaaaagctttctttaatgagagtgggaaatcaagcaccatttctgttttaaacttcaggatatggatttagagaagtgtgagatggtctatttacaacatagtatgtgatacgcacttaagaatgatgttctggataaatctaccgggggcggctaccgcgcacgcattcgtaag

SEQ ID NO: 615130 - DNA, 351 bp, Homo sapiens
gacaccccttccccagcaagatagagctttgagtttcggggttggatatggcgttactctttccatggcttacaggtggctgaaaagtaaatggtacctgtaaaggaaaatcatacaactcagcatccagttggcatataacgaattctgtatttccaatttataatgaatactttcttcagcattttaggtcaggcaggggagcagcaggacattcatgcaactggggtcaacacccattttgcaatcattcagcattgccactatcctgtcattcttgttttcacatttggcattagcacacatttcaaccatcagtcattcttcaagtcttttgtctggggtcaccgc

SEQ ID NO: 615131 - DNA, 272 bp, Homo sapiens
ctcccgatctacatccagattactaaacacacgggtattagtattctattgtgagctgtcttacaagtctatgatacattatttttgacctagttttttccctgtttgaactttttctccgcataaatcatgtaaagtaagagttctcttatgtattattttcggaagaggggtgtggtgactcctttatattcgtactgcactttgtttttccaaggaaatcagtgtcttttacgttgttatgatgaatcccacatggggccggtgatggt

SEQ ID NO: 615132 - DNA, 836 bp, Homo sapiens
cgctgtcgccttagctgggagagcgagccgtggtggctgttagggagagcttatggtcagccgtgaagtactgcctgcctctagtgtcgcgtcctccagtatccgatgggagcgccgtccgcggggaatgtgtctctctgatcatggtgcctcgtgtccagctctggggaagaccgagacgaaatcgagctcaggctgggcgatagcggagagggctctagtttccgccgttccgacttgcccagcgtttcaggcaactttgattctgacgagcaggagctgcggattccaagggcaagggcttgtgtacacattattgtgcgatggaacggacgacgagggagccgtaggcacagcatatgctagttacacgtgtagcaggcatggtcacgacgtccacgacatgcttcagtcgcacaccagccagctcttgggagttgcatggaacggccctgagctgcaacgctggaatcaacccggagagcttacgagcattgatgcctgagagcccagctgtggagcgacagtcttgaacaagagctgcaggtgactctaatgtgcagctaaagctaggaaccactgagctacatctcagggaagactgaaaattacaaagaatatgataaaatcttacttcaggaacaaagctacgtatgttccaggttaatgtataagtggttagaggtaaaagaaaagtataagtgggtacacagtaggtgtgaacattaatgggccacctgagaataatatagacacagagctctgcaataaggtcataaatcacatccaggacaaatagggatatcaatcaccataaaagcataagacaattgaga

SEQ ID NO: 615133 - DNA, 236 bp, Homo sapiens
tcagagagaaatagtggtgggataaaaatgataggatactagtataatgagatcaggttcgtccgtattaatgtgtgtatggtgtatcatttgttttgaggttagttatgattgagtcatagttgtggtggtggttagtcggttgttgatgagatatttggaggtggggatcaatagagggggaaatagaatgatcagtactgcggcgggtaggcctaatttctctcggaccaatg

SEQ ID NO: 615134 - DNA, 165 bp, Homo sapiens
gctcggccccgtgatgatgccctgcactacacgccttcccggtagtaccagaacgtgctcccaactatatcagtgcggtgaggcgaatctgggccgggaacgagcccggtgttttaccatcaagtctccgtcggcagggcatcaatcctcgagctgtcctcgagg

SEQ ID NO: 615135 - DNA, 267 bp, Homo sapiens
ccccggatgccgctagaggccctgatggactcctgaccataatcctagccccgagttatccatcctgagccagggaacagccccaggggtggggggtgccggcatctcccctagctcaccaggcctggcctctgtacagagagacctcttggctatttctgtgtccagttttggaggctgagttctggttcatgcagacaaagccctgtccttcagtcttctagaaacagagacaagaaagtcagacacaccgcggtcaggcactcg

SEQ ID NO: 615136 - DNA, 668 bp, Homo sapiens
  misc_feature (246)..(246): n is a, c, g, or t
tggttctgaaaaagaagattgagggtcttcaacagtgggaaccaagcaacttgagcaagttgattcggttcagtaaagtctggccttgtgtgggctcttctagagggagggccattgacgtcatcggtcctgtgcggttgtctgcatagtaacgcacattgtggtaaggacaatttagggcctacacctaggcatgcatgtcatgcgtatcttgatctatcagtagacgctatggttaattactanccctcgataagctgctctgcatacatctggcaatggcaggtggacctcttcgagctattaagtcattgaccactatcgtcagaccaatggatgtgcgtaacaaagtttcagtcagagaatcagtcagagcataccttggtcacgtacagatagggctcaagcaggcgaggacagtagctgttgcatggcaggagctcgagttacatgcagctcagcgaacgcttggtggcagactacagaccaatgtcaacgcacaggggttctatccattgtgccctccaggacaagtctgagcaaacccagcctgagtggggctgacaccaactcatgggttgcgcaaatacgcgtgtagagctagggcgtcacgcgccctatacatgcacccttccacagcaacagctggcccgggaggtacagctaca

SEQ ID NO: 615137 - DNA, 223 bp, Homo sapiens
ccccgcctccgacagtgtcctcgctttacctttgacctctccggaggttccgctgcctccaagccggacttagggcttcaaaaggcgggggtgccctttggagtcccctaccatgactgaaggggccaaagactggcggtgttttaagactccgggcccccccccgcgctgtcaagcacagcctgtttttggtcagttgcaataaacgtgacattttgggaga

SEQ ID NO: 615138 - DNA, 108 bp, Homo sapiens
  misc_feature (1)..(1): n is a, c, g, or t
ngtttatcgatgccacgactcgaggagcagcagggagaagcgaagcagctctagatggtgtttatgtagggattcctacatgcaggaggcccccgtgaaagagtatga

SEQ ID NO: 615139 - DNA, 128 bp, Homo sapiens
tcgccagggttttcccaggcacgatcgccaggtgtctcccaggcacgatcgcgaggaattcaccaggcaccaatgccgggatcttcccaaccatcatagccaccatcaccctccttaacctctacttc

SEQ ID NO: 615140 - DNA, 411 bp, Homo sapiens
gcaaagttacaactggaatctggaccttcgccacttgagaataaactcctctccgccgtgagattctaaccgcactcttaaatccactcttctaattactgagcacagtctgcatgcatccgttatagcttcatcccatgtagcgaagttttttcttacctatttgatatctgaggatatgagaaaccctcgaaggcattgtccacatacctggcttgccctgcatgatcgttggctctttctttcctactgggcataataaatctgcaggatcgagtggattcctcaggagcaagctgactgttcccagactcctcattagcagaagagaccctaaaacacgaccaagtttgcattgactgcagatttggagctaattcagagaactctggaaactcattttcccacagt

SEQ ID NO: 615141 - DNA, 146 bp, Homo sapiens
tggttgccagtttcccaggacatcgctctccatgctgcccagtgctttatcagtatctattcgtttgctggggctgccatgaccgatctgccacagactgagggtggtttaagtcaacagcaaattcctccgtctcacagttcctt

SEQ ID NO: 615142 - DNA, 145 bp, Homo sapiens
cgactctgactacgcgcgctcgatcgtagactacgcggtctcgatctagactacgcggctcaggtcctaaactaccaaacctgcattaacacatttcggttggaggacgacctacgagagcagaacccaatcctccgagacagta

SEQ ID NO: 615143 - DNA, 288 bp, Homo sapiens
caatgggacgggtatctttggaaaatgcacagcaaatgtaaaggcttgacaatacctttgtgttatcacaaattgacttcttatggttaaaactcagtagttttgaatagattatgatgagccattaatttattttagtagaattggagtctcactacgtagtccaggctggttatcgaattcctgggctcaagtgatcctactgccttggcttcccagagtgctgggattacaggcatgagtcatgtgcccagcctttatttttacgtagtgaagagccttcttggt

SEQ ID NO: 615144 - DNA, 205 bp, Homo sapiens
gtgatgctcttgatctcctgacctcgtgctccacctgccttggcctcccaaagtgctgggattacagccccttcactcactccactccattcactagcctcctcctattgccaagccagccaggcgtgcttctgcctcgcggtctttgcatttgctactcctctcgccctacaccactcttcccccataaacatccggggtccga

SEQ ID NO: 615145 - DNA, 1605 bp, Homo sapiens
  misc_feature (1248)..(1248): n is a, c, g, or t
tcccggtgcaacctgcaaaggggcccatacgggcgttgtccgggatccccgtcgtaactttaaggggaaacttttcacaatggctccggacccctttaagtctccgtgcaaatgtgaaggaggaggagtgttcattaagttctcctttgcagcaggacacccacttataggtgtggccaccaatcttctgtggcattctccgagagagtggaacacgagactcactatctctcttataacagaggaaaagagtgtgagagtggcgctctctatattctctctcattacacatctctctcgaagagagagacacgcgtgggaagaagagtcttctctgtggcgtggcacagcctgtgcgtggggaccacagtgtgtgtgtgcccccaatgtatgaaaacccacccgcgctgcgcgctggatgtgtctccgacgcgttgtgtatatatatctctctctcgccgagagaaaatatcgctgtgggcccacgagagacaggggcctgtgtgtgccgtgtgagagagtgttttgtgcgtcgtgcgtggtcgccccaagtgtgtggcaccgcccacaactctcccacacaggttgtgcgttgttgggccccggcgtttttcacactctcccctagtgcggacacacctccttttttcacacattttcaaccacccgccaagaaattctctcacatagcggcgtcaagctcccctcattcctcgcggagtagaagaacccccccaagcggggtactacttcctcctgatgtgagtagagatttcatcacatgttgggcacccccccccggcaggagagcgatcctggtgatgcaacccaccaccacatcaagctcctcctctttctcacaacgggttgatgaagacgacaaaactcctatacatgatggtggtcgttatcaacccccgcatcaataaccaccattatataacccccctaatcgttggtgcgcgccgccgaggctgctgggttggtacttaccaccccccaacgagaaagatgaattattgtcttcattcgacccctcttctaggtaggaccacgccccacatagaactgttggttgctagtagccacccacaattgtttgtagggcgccaaaatcaactccccgtccaaataggttgggccgaaaccacgcaacaaaccactaagtgatgaggggagaagacgcagtgccatccccccaaaaccctcctccacccaccgaagggtgggagggagacgtgcattacntaactcacccaccgtctggtgcgtctgtaatgctgctggcaagtccaaacctatgatcgacagtatggtggcaccaatcatgccggacagcacgacacaacacagtgttccacactcagatcggccacatcccaacatgattgacacctggtagttttgagtgcaaccaaccccagccacataagattattttcgtccccccgccgccgggtgatgatgtaaataacaaacactccccccccccatcctatattgtgagtgagacaaaaggaggagtcacacaaatgatgtggtccacagcgagtgaaaaaactaccgagcatgagggacaacacctctcactctatctacaccagt

SEQ ID NO: 615146 - DNA, 182 bp, Homo sapiens
gccagagctggagaggtccattcaggccaagttggaacttcctccttgaccctttgggttaatgggttctcctcctttgttttctcctcttcggtgacttctttcttctcctctgggtcttcctctttttcatcctctgtgttgactctcttggctttcctgaagttggaagagttcttgcg

SEQ ID NO: 615147 - DNA, 172 bp, Homo sapiens
caatcatagctcacggcagccttcaaactcctaggctcaagtgatcctcccatatcagcttcctggaaataacaggcacatgccaccacacccaactaatatataaatttttcatagtcttcctgtgttccccagcatggccaacatggtgaagccccctctgtccttaaaa

SEQ ID NO: 615148 - DNA, 619 bp, Homo sapiens
atccgagatctgagtcagtcacttctttgtagaggcgtgatgtacaggtagtagcccgactcatgggtgatgaacaggctggatgggaacggcactgccggtggtggtctggcggatgtagatctagacctcagcctgtaacacagggagtgccacagccggctgccgtagcgcataaccatgtagcgcacggactcctcgagtcttgaaggggtccatgatgacgcgtgggcacgatagttgaggaagatgtggttgcaggtcggtgcgcacgctggtgttattgaacgcgatctccagctcgtccatggcctccaggagcagccgctcaccctcgtgcggctggtcttcagaaggaggcttcctttgtgatcaggtcagagggcctgatgatggcgcggatgagagaagctatggtacgtcacttccacaccttccttcaccttggcagcacccaggtaaaggtgcatcttgtggttggcacagggcacggcggtcagatcgaagttacgcatccggttgagttccagctggaaggccaggacaggttccaagtgacggtaaatgcgactactgcaaactcatctcttgctctgaatgttgaaaacctgggaaattc

SEQ ID NO: 615149 - DNA, 499 bp, Homo sapiens
tctactgacatgttccatatagaccttcttgacgagatcctctcttgataccctgatacattatgacacagcgctcctcatcttcctgcaaagagcggttggcgtggaccaccatctgaagcacgtcatagctttggcctgagagattaggcgagggtcatgcaatcgtagaactgggtcttcattatgaccagcaggtgggctgacaccggagatgccccagaagcgagtccgaaaagtcaccactggctggatagcccctgagctgaagagcttgctccaggaggcgtcgctccatggggctgagcccttcatgcaggtagcccatcccatttagcagcgtatccttgagcgtgctgacacttagcttctccaggtacggaatcagatccttctcggtgcagtgcaagaacctctgccgtaggatgtctgctgcccaggtggtgaggatgtccatggcagagaggcgggtctgcttgcgagacggcccaaagacaat

SEQ ID NO: 615150 - DNA, 1332 bp, Homo sapiens
gcgatgagtaatcttctatgaatgtcactagatcatgcagggctgttaatctcaaggaaccttccagatgcagcgtggtacttatttgtgtgcacttaaacttccgcagtcagtaccggggtagggcattagacagatcaatctctagtatcttgaaatccattaccatagatggtcataaacctaatcatcttcaccttcaatcatagttcgacatcagtgaacaagcataaaacagtatccgagcacatatggttcaggtccagtagatcgcattcgtaactcggtcaagatgagtacttgcatgtctatgagacccttgcagtagaggaacccagtgtatgggtgatgtaggtccgaacgtagtcgcttgggcgattggtgcactattaactctctgttgtttgaactatggaaactaagcgaattctagataactatctactatggatggaccttgccagttcagtccaaaggcgcgctccctggcatgcaatgacgtgccccgctatcacactatttaaaagatccatgatctcaccttaacacggacggtctacagagatgtcctcagttgggactacagtagcccctaaggggaaaaacttggatttacacaccatgctcaacaaagcattccctgtgtccatttccttcgaaggccattgtgcctaatctagcattgaagcttaattcagcgacctgtgaataatcagttctcacacacaacgaccactactcaatcccagggtcttccaattcagtcgctacacacgttgctatggccctcatatcaggcgtacagtcatccatgccaagataccacggtttcgctatacaggacacggtgccttcaaagatagtcccccaaaattaaacccaccgaaagtcacgcgccagggcgcaccgtctgggcacacacgcttcgcgcctgctgggagccacatatgggaccgcgcgcggaacgagttcgatgagcccccagcagggggaactatggccccaaaccacaaggtaacacatagacattggtccactgacaacagcccgcacactacgaacacacaaccctacctggaccaacacaggacaggcgacccaagccgactgtcaaaaccggcggcacacgcaaacacacgacaccgccgacctgacccagtgggacacagaagacccagtaggccccacaacgatgagcataacaacgccacagagcacccaacacgctacgagcacacacacccccgcagcacggaccgacgcacatagcaggcaacgcccgagacaaccgacaggcagcagactataccaacacggagcagccagccagag

SEQ ID NO: 615151 - DNA, 430 bp, Homo sapiens
gtcgacggacacagtggggaaacccagcaaggccactgtgcacaattccccttcccctgaggatagggcaggacccctcgggaatgagggtcttccagggaggagggagtgaccttgctaggttttatggctggctttgggagagaggagttctagtttctatgacctgctgtgagaaaaagaattgtggtttctgggactcactttgcggcagaaaagtaggcaggaaccaggagggaaggacaaagacctggcttctgaggccttccagtctcctctgggtcagagtagtctgcatgccaaggtgccatactttcggggtttaatgagccctgacagcaggtccttgcagatttcacaggcaacttgtgatcccagtaattgggtttcagtcccccaatttcagaggactttagcaaagcctggttga

SEQ ID NO: 615152 - DNA, 262 bp, Homo sapiens
aaggactctgtgggcaagccttccgttactccaattgccttcattaccatgaaagaactctatcactggagagaaaccttatgtgtgcatggaatggtggcaagagctttcagtttgtctcagttccttgcaaggacatatataaggctcatgctaggtgaagaacccgtatccatgtaagcaactgtgggagaagccttcagcatacgccagttatccttcatgaaacacgtagaaaactacatattgcacagtaaaccct

SEQ ID NO: 615153 - DNA, 1613 bp, Homo sapiens
  misc_feature (250)..(250): n is a, c, g, or t
  misc_feature (447)..(447): n is a, c, g, or t
  misc_feature (455)..(455): n is a, c, g, or t
  misc_feature (1097)..(1097): n is a, c, g, or t
agtgtgatccatcattactatttagagaataatacgtattgtcgtaacgtggctcatatccatcactattactgccctaagaagagaggatagtgaactaatcttgattccagcgtggatcccattcttagtgaggtcgtgagctccatgcaattaaatgccctacaaggcgacctcacaacatcctcctcttgtaaagacccatagtgtggtagcccgtcattgcaccatattgagatattggtcgacngctcgtgtgacatggaggccgcgaagagggcgatagccgcattagcgtaccttcgtgccaccactgcgtcccaaatagcgatcgagttatatgccgacgctacaagcctgtatcgatcaacgacttacatcgcctaaaaaaatcgccttagactacgccggaactagaacctcagaagagaccttgaaagtttcggntttgcgcncctaaaccaaactcttagttgaggttctaaccttcatcgcgaacttggaccgaatgggacgttgtacgctaagggatcaaacgatcggagtgagatttgttgttggagaactcgaggacattcacatgcgaactccctaagctaaggccccattcacaattgtggagttctccaagcaaatttccaaagttcccccccttcattaatctttagtatctttcctatgataccctcagagaactcctataccagaaacaaaaaggcttatgttattgaagccgtccggtattgcgcaccacaaacaaagccaattttgtcctacgccgtaaccgcagaaaggaccaccaccatttagatccgagaggccacaccgcgctttcccctttacattgagctttacacccatggagggcctcggaggactgcacccatgagcaccgcaccattctaaacgagaagttccaaatggtggcggacatgggctcgaaagaaaggccccattcatgtaagtaccccaaggtgtgaaaacccgaggcatgaatttcgatctgggagagaacaaagacataatccgttatgctcttgcgttcgtgaactcaaacctccaaaagtaaccttttcgcctaatacaaaacaattggntccctcctttagatacttattaataaatgggcacttctggggccaccgttccccactttaggaacacccttgagaattcgaattacattctgggaaatgaggttcgacttttccgtatcccgggaagaaatccaacccaacttgtttaattccccccaccacaccgttttggtggctttatttccaatttccattcgcccggaatttggaggtggggccaaaccgatggacaccaaaagaaaatggcgctttgaagacgaggcgaggaggcgaccagtaacactttgtccgcgaaatattcatgaaaacacgccccttaaaagatgaagaggcacgccccgttgtccacgcttatcatctagtctgcggcgcactagtattgtcacacctcctgacacacagcaggcccctgattaagggtctcacattaagaagagcattatcgtaaataaacgatcaacactcttcaccatatgtgcacgagagaaagcataattatagactcctctgtgtgcg

SEQ ID NO: 615154 - DNA, 751 bp, Homo sapiens
  misc_feature (534)..(534): n is a, c, g, or t
  misc_feature (669)..(669): n is a, c, g, or t
gccgttattattttaatttagttatgtaatttaattattattttaatttcttttcctatctgttaagaaacactattaattctgtaagatggaataatctgattcttcacaccttacaagaatagtcactgccaaatgaatgtgaattctgtagaaattttaagagacaaagaaaacaaattgttggattgataagctaactaagagctcatttttttttttaaatcaggcctccatacaaataatcctggcttcttctaagccatacattaagtcttgcatttaagaaatatgagacttattttccttttccaaatggaagacataatataatcagaatataatagtataagaaaatgaaatatttcaagataccccaaaaattcagtttcctggtgatgaatgttttattatagcatcttttgtcagtatcaacttctagaaggaggaccaagaaaggcagcctaagccatccttatacctatattctgtaacacacatatgcacaccagcacaaaagcacatttaaagcangacagaaaaaaaaaaaaaaacacagtgtaaagggaaaaaattatcctttgcattttcttttccttttcagggctttcagttcactcgtgcgaatttggacgagcttctttctggggtgtggtaacctcgaaagcnctggtatgggcaaaggtaaataaaccgaaaggcttaaggtttggggttgaaaatgggtttggaagccttttgggtagggaaa

SEQ ID NO: 615155 - DNA, 105 bp, Homo sapiens
aattgctggccggagtgcaatggctacagtccaggatattatggtcagcatattgccgctaataccaaagcaacaaacaggttttttgaatgtcgaaagttactg

SEQ ID NO: 615156 - DNA, 663 bp, Homo sapiens
  misc_feature (534)..(534): n is a, c, g, or t
gccgttattattttaatttagttatgtaatttaattattattttaatttcttttcctatctgttaagaaacactattaattctgtaagatggaataatctgattcttcacaccttacaagaatagtcactgccaaatgaatgtgaattctgtagaaattttaagagacaaagaaaacaaattgttggattgataagctaactaagagctcatttttttttttaaatcaggcctccatacaaataatcctggcttcttctaagccatacattaagtcttgcatttaagaaatatgagacttattttccttttccaaatggaagacataatataatcagaatataatagtataagaaaatgaaatatttcaagataccccaaaaattcagtttcctggtgatgaatgttttattatagcatcttttgtcagtatcaacttctagaaggaggaccaagaaaggcagcctaagccatccttatacctatattctgtaacacacatatgcacaccagcacaaaagcacatttaaagcangacagaaaaaaaaaaaaaaacacagtgtaaaggaaagtgccgaatccggcacgagctttcttcctggggtgtttgttaacgctggaatgccactggattgggtcagaggttaattaaacacaagagcct

SEQ ID NO: 615157 - DNA, 120 bp, Homo sapiens
  misc_feature (5)..(5): n is a, c, g, or t
gagtntatgcgggattgtggaaagaggatgtgaggctccggtggggcaggctgaatggcaggtagtggtaggtagtctgtggctcgcgtggtgaagaatctgggtgaaaaagctcgtcta

SEQ ID NO: 615158 - DNA, 420 bp, Homo sapiens
gccacgaataacagctatggctcagtcactgcaactctgctctggtcagtgatctgtgctcagctccagtagctggactacaggcatgtgcacatgccagtaatttggttactggtaagacaagtttgccatgtggtcaggctcgttgaatcctgactcagatatccactgcttggctcccaaagtgcaggattacaggcgtgagcaccacacccggctggaagactgtttctaaagtcagagaaaggatagactaaatgtgttttctgagaaacgttagtctagggaatctgagaggccagaacctctatcatgagtaaaagaatcatggctcataatctctagttttcatctcatactgttgacttctaatcgagttccttgttttagtaacaaataaaataaatgttttctgctctc

SEQ ID NO: 615159 - DNA, 382 bp, Homo sapiens
  misc_feature (338)..(338): n is a, c, g, or t
ggcacgaggcctcgagccgcccagcagcccgtgggcaggcgcggcggagcgagcggggccggcggcgggcgccgagggacgccgagggacgccgaggcctcgggcgggggctggcccggggttccagatgttggatgtgatccttaaacaaagcaaagatgtctgccgtggttgaaagttgtttctaaaaggtctccagtgggggctgcagactaagcaaaatgaggcggttcctgaggccagggcatgaccctgtgcgggagaggctcaagcgggacctgttccagtttaacaagacggtggagcatggcttcccgcaccagcccagcgccctcggntacagcccgtccctgcgcatcctggccatcggcacccgttctgg

SEQ ID NO: 615160 - DNA, 266 bp, Homo sapiens
  misc_feature (8)..(8): n is a, c, g, or t
  misc_feature (36)..(36): n is a, c, g, or t
  misc_feature (42)..(42): n is a, c, g, or t
  misc_feature (70)..(70): n is a, c, g, or t
  misc_feature (222)..(222): n is a, c, g, or t
tccacctntttgggccgggcctaatcgatacctgantgccangacagacccctgcagctgcttctttttntccaggtctccagtgggggctgcagactaagcaaaatgaggcggttcctgaggccagggcatgaccctgtgcgggagaggctcaagcgggacctgttccagtttaacaagacggtggagcatggcttcccgcaccagcccagcgccctcggntacagcccgtccctgcgcatcctggccatcggcacccgttctgg

SEQ ID NO: 615161 - DNA, 247 bp, Homo sapiens
  misc_feature (203)..(203): n is a, c, g, or t
gagcttttcctacccccattataaggccacaggtggtgacagccttcagccctgaggtctccagtgggggctgcagactaagcaaaatgaggcggttcctgaggccagggcatgaccctgtgcgggagaggctcaagcgggacctgttccagtttaacaagacggtggagcatggcttcccgcaccagcccagcgccctcggntacagcccgtccctgcgcatcctggccatcggcacccgttctgg

SEQ ID NO: 615162 - DNA, 296 bp, Homo sapiens
aatacctggactgtgcgcaacatccacaggagcagatctatatgggcagcgtgcacattctggatctatatacacagacagactgcccacatatccattccgcttagagcaagtgtcttgaagaacgatctaccggaatctaatatagccctctgctttgatatctacgtcatttgcccctttgagaaccacagatttaatgaggttcttagcttgatcgaccatgtatcctacactgtttaaacagatgtaagtcatgttctgggaggattcttttgataacaggcgcaaaaaag

SEQ ID NO: 615163 - DNA, 168 bp, Homo sapiens
gcgtcgacaaaataaaaagtacaagctagtatgtagcctaaagcaggctaggccgggcgtggtggctcacgcctgtaatcccaacactttgggaggccgaggcggatggatcacgaggtcaggagatcgagaccatcctggctaacatggtgaaacctcctctctact

SEQ ID NO: 615164 - DNA, 263 bp, Homo sapiens
  misc_feature (117)..(117): n is a, c, g, or t
  misc_feature (121)..(121): n is a, c, g, or t
agtttccaggccgctgtacaagcaccacaattgggtagttagataacagaattgtttgatagttataataaggtcagatgtctaaaccaaagtgttggcagggcgtccctctgaagnactnaaataaaatttccagtccttctaatttcttgtggtccttaacttgtggcagataactcatcttacatgagttcttcctgtgtgtgtatctgagtctatataagggctagtcatattggttggggccatctgctctgtaggcc

SEQ ID NO: 615165 - DNA, 250 bp, Homo sapiens
gtggtgtgcgcctgtagtctcagctacttgggaggctgaatcgcttgaacccgggaggtggaggttgcagtgagtcgagacttcgccactgccctccagcctgggtgacacagtaagactctgtttcaaaaaacaaaaaggcaatgtactgtatacttgaaaattcgctcacagagattttaaatgttctcaccattacacaatgataattatgtgacatagtgcatatgttagtgagcccgattgagtg

SEQ ID NO: 615166 - DNA, 173 bp, Homo sapiens
tcatgatcacaccactgcactgggcaatagagcaaaaccctgtatcttcgcaaaaaaaaaaaaaggaaaaaaagaaattttccggaaaattttggcaatttttttttcccctaaggggctataaaccttacaaactttttccttttatcacctggtcttttaatttgggaaac

SEQ ID NO: 615167 - DNA, 181 bp, Homo sapiens
tggctgttaccataaaatggctgttacctatatggctgttacctaaactggctgttacctaaactggctgtacctaaatggcaactcgtgatcgccaaatccagcagccatttaggtatcagccatttaggtaacaccatttagtacagccatttagtacagcatttagggatctctagaa

SEQ ID NO: 615168 - DNA, 373 bp, Homo sapiens
gccaagtttacctttgcttattaaaatattaagtattttgtttttgtaacattccttttctgttttttaaaaagttgtttatcgtgctttttgtatagatttttttaaaagactaatttcacatgaaatttgccttggactatatttatacttgagatatctgaattcaattaaggaaaaactttcaaagtctaagggaagtaggatccatagctctgttgagtttaattttaaattaaaaattggcaaattaattttgaccatatttttaatatgttctgagaaaaattcatttgttaagactttgatcttgttgatgtaaaatgttaaaaagggataaattattgctaaggaatgtgcagatatccataaa

SEQ ID NO: 615169 - DNA, 708 bp, Homo sapiens
gagcgggcgctcccgcgggggagcgtagtctcggaggcgggcacgcaggggatagaggggtagactgagcgtggcgagccttagctttctcccgaacgccagcgctgaggacacgatgtcagcggcgtctcccgcatcactgcatttgggccgcacctgcctgggcgtgcgtctgcgtgctgtccagcggacaagaacacgatccagaacccgaacgtgacgactttagacgacccatctccaacgtaagcctcggcgccggtgacgtccctcccgatggtcaccactccggacaccagaagacctgtgaaggtcgaaacagctggcgttgtcctgtattaattgttagcgttgttacatactaccgtgcttcaggatagaatgtagtgatgagagcgtattgtctcacataactcagcgagttagtgattgtcaacgtggggaagcacgagcagacttcatgtatccgttatccacggggcaatccagatgtcgaggagcacgttctacagataaagcgcacagttcagagcctcccacttctacaacttccaaggacacgctacgtacatcaggtacaaatggtaacactgtgactccaaacctcacaacctgtgcgaaagtctaacctttggatgcaggcagggttcattggaggaattggtcctggtattgggtgtgaaggctgcaagttacattgctttataa

SEQ ID NO: 615170 - DNA, 206 bp, Homo sapiens
  misc_feature (4)..(4): n is a, c, g, or t
  misc_feature (28)..(28): n is a, c, g, or t
  misc_feature (108)..(109): n is a, c, g, or t
  misc_feature (128)..(128): n is a, c, g, or t
  misc_feature (144)..(144): n is a, c, g, or t
  misc_feature (171)..(171): n is a, c, g, or t
  misc_feature (174)..(174): n is a, c, g, or t
  misc_feature (178)..(178): n is a, c, g, or t
tganataaatattttatatggttttacnaaaaataagactcatgtatctggtcacctagtttacaaattttgaattatatttattgaaacatgacatactgtgctctnncttatacctcaagtgtatntgtgtgctgtttccantttcatgccctgtaaataactgtatanatntggncaaatactaataaaactttaatgccatt

SEQ ID NO: 615171 - DNA, 304 bp, Homo sapiens
ggccctctctagagtatccccacgttgacacttcagcctcctgagtggctgggaatacgggcatgtgccaccacgcccggctgatttttgtatttttagtagagacggggttgcccaggctagtcttgaactcctgagctcaggtgatctgcccgcctcaacctcctgaagtgcgggggttacaggcatgagccaccacgcctggcctataatgatatcttaaaagattgctttcttttttttttttttttttttttttagggggggtttcccccccccctgggaaaaaaaaaaattttttttt

SEQ ID NO: 615172 - DNA, 328 bp, Homo sapiens
  misc_feature (68)..(68): n is a, c, g, or t
ccaaccatactgattaagtgagacaacatgtgtttgcacatgttcaagttcctacagaagacttcgcnacagaattgagactttaactggtatcaatatttaaagtgcaaaagcaacagagacagtgcactttaatgcagctaagtaacaaaccaaaacagagcacagatggcagaagaatgaggaaggtaaaaactctagaacgttagattgagggtcaggagcagaaagccagaagtggacattagccagttggtagtgcgggacttctaagcacttgtacaccaggaaagttattatgcacaaggacacattttaggacttatca

SEQ ID NO: 615173 - DNA, 1116 bp, Homo sapiens
accggggctcagcggggtgccctcggcccacaaggccctcccggagcccctggtgtccgaggcttccagtggccagaatgggcagcatggtgatgaccccggccttccaggcccccagtggcctcctgatggttgactgtgggctgacctggtggtcctgggaggtgcctgcaggccctcaagggagaccagggtatttgcatgtgttcctgactggtcttccttggggataaatggtagaactgggtcccatgctggcctggtctggacccaaatggagatgtcttggcatgtctgagggtggaggcttggtgccccaaaatgtgcatcccatggggtccccaacaggcagccatgctggtgttcagggggttggtcccctggtgccccgccgtgtcctcttggtgccatgcatgtggctgtccctgggtgttcgctggcgatcgacggggagcgcctgggatgttccgggggaacggagtgccagctgatgcatgcgcgatcagggggagcttgtgtgggggggatgatcagtcgaacgaaatttggcacagttagcctgctgcacctaatggaagccttgtggcaccctgggtccattggtccgagccggtccagctgtgccgccctggggccccccaggacccccaggctccaataggtcaccctggagctcgagggaccccccggataccgcggtcccacgtgggagctgggagacccgggccagaggaaaccagggtgacagaggagacgaaggcgcggcaggagcaggggaggaggggcctgatggagaccagggccccaaggacccaacggcgtgccgggaacacaaggacaggcacgacggggtccgggaaactgtgccatccggaaacctggatccagagccttggggcccgggggacagccgggggaaacggcagaaacgtcacgctgccaaggaaccggtaaggaagggacgcggagacacaaggcccagagcagtaaatacaacggaggacgaagtgacacggcaccctaagcgaggagaggacacagaagaggtgtcgcaagagagacagacaggaaacatgcacacagacgaaggcagcggagtgagagagccagaggtga

SEQ ID NO: 615174 - DNA, 204 bp, Homo sapiens
gccgataagggactcctcacttccttcagatgtagttaatgtcaccctctgagaagcgttcctgagctcccagtccaaaatagcacccttgtcatcactagccttactttttaatcactggtaccagaaattatactttttattatttgtttcgttggaaattgactgtctttttcactagaatgtcaactaggttagaaattt

SEQ ID NO: 615175 - DNA, 674 bp, Homo sapiens
cgagccccccccccccccccccccccccccattcaacaaaaactcccacccccccaccaaaaaagaagcatcccggcagtcacccaaacaagaggggggcgggaacgaacgctgagacatgagtattcgtactccccagctaaccgctagcggagctagcggggcgtcaagcgcctcgaatcgaagcaggcgtatcaaggccttaagtctttcgtaaggactcggatgggaggaaagtagaggtttcgaagggaaaaaagttcgtcctttaacatccaccccccaccatcgcataaaaagtatatctctttctcccccgctctctttattaatggtatttttttatttttaatttaagaggatcacatacggagcgtagggatagagcgattaggaggttcccgcttggtatttcgtttataggtcgagtctagttttaggtttccctaggtactcagatatctttacagttcgctaggtcggggtaaggagactttaggctatatacatcttccggaagagccggatccagggcaagagtggggcctatggcatttacttccgtctccacctttaggatagggaataggagaattacggtattccttacgcagattccggggtacaattccgtttagctttacacaacagggtcgggtctaaatcctccttcc

SEQ ID NO: 615176 - DNA, 222 bp, Homo sapiens
  misc_feature (124)..(124): n is a, c, g, or t
tgaggaccagccggccgacattgtgaaaccctgtctgtaccaaaaatgcaagaattggctgggcgtggtggtgcacacctgtagtctcagttacttgagggggctgaggcggcgagaatcgctntgcacctgtggaggcacgaggttgcatgtgaaccaatgatcgctgccactgcactccgagcctctgtgtgacagcagtgagactcctgtgtcaaacat

SEQ ID NO: 615177 - DNA, 931 bp, Homo sapiens
cccagtttaggttgtcgtgctcccctgctgaaggtgttccgcccggtccccccgtgttgacgaaatggtgtagcacgtcgtggtgcaagtggccccgctgtttccccaaacggtggtgtgcggtccctcttttgtcaaacacttcgtcgacgaatgggcttgtttaaatgcagcgaaggtccatttacaaccgctgcgttatatggcagagaacccttctgtcatcgagccgggggggacaatgcgtgtcacctcgctgttgttggatgccccagccgccaagtttcaccctgcttagtttgtggttcacgtagctacattcgccctcgttcaatgcgcaccagggttcttgatatttgacaaatagaggatcgcaccactgcgcacaaattgttggccccccttacgaaagggcccacttggaagaagtagttagacttcgccccggtactgttgccaaatgcgtccttttcgttactcttatgtgtcaacgccgcactccattgtgtgggtatacatgggatataaacttttacaaggggtattttccgcacacgccgctcctcgcactccgtgttgcagtacgcttctaaacagcgggcaaccacacggctctttgtaaacaatatgtgccgcactgatagttcaccgtcttgctgtttgcttgaccacttttagccgcacagctaagaggattcattgtgagaggatggtcctctgttaccccgccttccggcccccctccctcggttggtgtctctagatttgtcatcggggagaatatgggcattctgtcccagccttatacgggagcattcaacgcatcggggaaagtactaccccacagagtgcaaaaatatcatcgggcggagcaccccccggctctaaagaatacacattataaaacacaccccccggcgggaacaaaaac

SEQ ID NO: 615178 - DNA, 169 bp, Homo sapiens
agtgctacctccacaaacagcctgagaatgtaactaaggaaaacaactccagccgggcacagtggctcactatctgcagattcccagcactttgggaggccaatggtgagtggatcacttgagggtcaggttcgaagaccagcactggctctagcatggctgtaaatcc

SEQ ID NO: 615179 - DNA, 157 bp, Homo sapiens
aagagggagtctaactctgttgccgaggttaaaatccagtggcatggttttggctcaccataactccgcctcctgggtccaagtgattcttgtgcctcagcctcctgagtagctgggattttggggacatcccccccccctaaaaacctgaaaccca

SEQ ID NO: 615180 - DNA, 160 bp, Homo sapiens
acgacccacggaggtgtactatatgtcttattattccggattttgccattaatcaaaaaagtctcagatgacggcaatgatggaacttttgctaaggagggcgagaatgaaggggtgtaggacagtctcagcgtctctttacaccgtggctggccctata

SEQ ID NO: 615181 - DNA, 1849 bp, Homo sapiens
  misc_feature (239)..(239): n is a, c, g, or t
  misc_feature (254)..(254): n is a, c, g, or t
  misc_feature (295)..(295): n is a, c, g, or t
  misc_feature (298)..(298): n is a, c, g, or t
  misc_feature (1418)..(1418): n is a, c, g, or t
  misc_feature (1433)..(1433): n is a, c, g, or t
  misc_feature (1471)..(1472): n is a, c, g, or t
  misc_feature (1509)..(1509): n is a, c, g, or t
  misc_feature (1518)..(1518): n is a, c, g, or t
  misc_feature (1527)..(1527): n is a, c, g, or t
cacgcgtgcgggtgaaaccccgtctctactaaaaatacaacagccaggtgtgatggtgcacgctcgtgatcccggctactcaggaggctgaggcaagaaaatcgcttgaacccggaaggcagaggttgcagtgagctgagattgtgccactgcacgccagcctgggcaagagagtaagactctctctcaaaaaaaaaaaaaaaagaatttaaaatcccaatttattttctaactctttnatgggatgtatttanaacacagtatacctatagtatacctatgtgtttattatgtnggnaaatggtaactgacatttaattattagaagtacttacccctgccttcctccatttttattcatggctacttgagaaagcaaaaggaaaaaataatagttatcagtagtgtcactggaaagaagagaggagggacaaaactgagcagcagaattcgtatagacatttacgtttaaattctaaaagcccaattgagatgttcagggagggtttgttttgccctttggcctcatgaatgggtttcatgaatgggcttcagtggcttataaactctgtaaaattctattctaaattttgtacatttattttgttccggttaattccagaagacatttcaaacatttttcttacaccatataataaaaatacttaactaaattgacagttataaaaataaatcagtgaaatgtaccttatactttaataaaaaatgttttcagaaatagataagtgaaagctgagtgtttctttgataggttcccctgtactataggagtgataattgcagctattgcaatagtagtaattgttaaatggatactaatgaatagcatagcatagtgggtaagagtttatatagcacaggctctagaatcagattaagtaggttcaaataccagttctgccagtaactggttttagaaccttgggcaagttaaagaatgtctcccagcctcagtttccctatttgtaaaatggaaataaatggtagctacctcaaacctcattacgaattcaatgagttaaacttgaaaagacttattacagtagctggcacataaagacttgatagtagtttatatggatgctatctcatattagcatatatggaattaatagtgtatcactatactttttttttctttttttttttggaatagagatcagtctatcacccaggctggagtgcaggggtgacatcatagctcactggtaacttctcccatactctaccaatcctccggcctcagcatccagactagctgtgattggcaggtgtgcaccaccacacccagctacattttttttgggtagagacagggtctcactatgttacccagtctgggtctcgaactcccggcctcaagcaatcctcccatgtgcctcacaaggtggggatcnacgggtataagccantgcacacggcttactatgctatcaattccatatttggnnagggtgtttcccctttcagagctcttaaaagctctgnagaagattnacatgtgtnatagagctaagagaaactcaggcccgttggacacatggcgtgtgtactaaaaattaaactctccaggtcattctaatcaggcataactcctatctcacattctctgaagtggctagaagacgccatcacagctaggaagctccatcatgaattaccttattcccaaaagcaggtctcaaataattgtctcagagcggaggaccaactgtacagctgacatatgggcggatggtagactgattggggaccgacagttccatatatgccgttagcctgtgctaacgtaaatctatgcaagtatgtcccgtgtgccttaaaaacg

SEQ ID NO: 615182 - DNA, 118 bp, Homo sapiens
tcggcgggggggagggaggggggggcgtttcttttatagagaggagggcggtttaaaaaaaggagaaccccttttaaggggggggggggggggtggtaaaaacccccccttctggggg

SEQ ID NO: 615183 - DNA, 107 bp, Homo sapiens
gtttacacccttttaaacatttttatctgacaattcctcaggatttggtaaggcttccaagttgtcagcttctcagctgtaagtgctggggtggtaataaaatgtta

SEQ ID NO: 615184 - DNA, 526 bp, Homo sapiens
tgactggggctgctgggaccccagccccgagagccggagggctcctcagtgggcgcccccagcgttactatgccccgcagacccacccgagcccgggaggatcacaggtcctctctggtcaccgagaggagctgctgcagggtggggggcgggagggtgttcagagctgccctgaccgggaacagggggcagatgtgggccgctcctctagctcttacagaccaagggcttctggggctcctcccacctgatcgggggctttgggagacccgtgggtggtcagaggaccccttcccggggaacacatgccggaacgggggtctgtccctcccaaggcatcacggtgggtagctgacgctcggtttctcttaatgaacgagtaggtcggatatctaaacggaactggtttgtccagactggacgagacagagaaaacgcatatccatatgagaagttagaacattctgcaggttggcttcataattacaaggacatttacaacgagggccttctccggtggcgtggt

SEQ ID NO: 615185 - DNA, 112 bp, Homo sapiens
tgtgatggtgggggcggaccacatggagagaggcaggggaaggtgccatgtggcgcgtgtcaggtccaaggacgggcgctcgggtgcagccacctgccagagaccagggtca

SEQ ID NO: 615186 - DNA, 327 bp, Homo sapiens
  misc_feature (279)..(279): n is a, c, g, or t
tggtgggattacaggtgctagccattgcacctggccgttggtggatatttaaaaacacagtcctaaaacaaactgtggggcacagagaagcactcagattgaaaatgagaaaacctcggatccaacagtggcaaacacgacgagaggcaaggtgtgtgctggccctggtgctcctcggaggatgtgggagggtcaggcatacgtctggaggacggttgtgagcggagcacccatggaaagagggaggaaacgtgggacgacgggcatgctggagactgnagctggggtgggtgctggagagaggtgcattgtgctgtggtccacagt

SEQ ID NO: 615187 - DNA, 188 bp, Homo sapiens
tcctcttgtgctttgggacggcggtagcagaaccggaagtgctgtatcggttgaattctggcttgatgccgaaattgggtctttctaaacatagctgactgggatattccatacagtctcctacatcgaagttcacactttccagagatatcatgctttttggagacgctccttgaagtccttggctc

SEQ ID NO: 615188 - DNA, 840 bp, Homo sapiens
tggactaaaaagccaaggtctttaataaaaggtcccgatgggttatccccattgttatttccatgccagccagggtccagggaacagcctctcggggaggaaccgggtgtggcatgggcgccatggggagccctggtacgacaaatgctggcttacgggtgaatcatgcctgcctcacactccagaggggccaagagcgcacactagcacagattgcctgcaccgagacatcggtctactcgcaggttgagccctgtgttggtgcctagccccatatcgctataaagaacttacacaagaccgaggacgaagcccgcggagagggaacatacacccgcgctaaacaaaaaacccgcgagtgagccgacaaagatctacacgagaacgaacatagaggaaaaattacagagagggaataatcccaccccccatcaacacgagagagagcaacacacataccacaagagacagaaaagacaacgcagcagcatcatacccatagtagaaccagaggggacgaccatggagcaccaacagggtgggcccacacgaaatatggcgcgagcacgcactctcgcaagcggagtaggaccaccacaaaacaatgaggtagagcatacccccacaaagacattagcagggaggaggaacaccacccaaccagcagaggagcacccgacaggaaaaccatgaggtgagaaacccatatagaggaacaaatccacagaaggagaagagaacgaggggctacgcacccgcaaagaaggaataccccactcaggcgcacgataatatgcacccgccctaaggggcacagacggcaaacaaacagacagcggg

SEQ ID NO: 615189 - DNA, 339 bp, Homo sapiens
cagtctggactgagtctatggataggtgataacacagccggtgttggtgtgtctgtgccctatgggaggggcatactgcctgaggacagcaactttcttggaggactgtaatttaagtgatcgttgctatagcttcccagtcacctttgggtccctgatcccttcggcttttccagctgggtgactgctatcctggaatctggcggaagcttgggtctatagtgacagaaggtacagtggacaattctgagtactgcccctttggagatgccattcagcttctggaaggaggcctacttgggatgtcgctgtttctgcagctagggtaccgagcgtcgc

SEQ ID NO: 615190 - DNA, 762 bp, Homo sapiens
gcaccgtaccccgatggggtaacgtgacacaggccccacctctgagtgaagggggctgtctgcccatccaccaagtgtgtgagagggcgcccccgtgtgtggggtccatgctctggcacactgcttggacggccgggattcacttagagctacgtaacgtattctttgctgagctttctttggcttgttctttttgattttaatgcctctttatgactatccagctctgagagaccgggagttggggagttggacccgtcttccactttgggttgggttgggcggggaggctggcgggctcgtctctgcgttaccttaacttatagctaacgaagttgggtactctctctctctcaacttatccaaacacgtgtgcagctacctcgccccacagccaaggtaattctgcgacaaaataatttgcgtagccgtctatggcgggtggggcttctttcacaccatcgctgatcatctgtgcacaagaccctaaccactcctcgctccctctcactttacaaggacggctgccatgagaccttactgaagcgtcgagttaccctagacctacatcttgtcgtccccctctgtcccctgtgcgagcaccgtaggtaacgggaccgctgcgccctcgatcagccgcgggcggtaccctggtggaagtacagattaagtactaatttctctctaccctacactgcatagaacccaactaagccacgcacaaaaaccgacttcctcgacaccagggttctaggagggcca

SEQ ID NO: 615191 - DNA, 115 bp, Homo sapiens
gttaatgccgcgttaggctctcagacttctgtggtctctggaacggactctgagacccacggaagccatagcaactgttcagccaggagacctggctctcacgttgatcgagcta

SEQ ID NO: 615192 - DNA, 936 bp, Homo sapiens
  misc_feature (17)..(17): n is a, c, g, or t
  misc_feature (19)..(19): n is a, c, g, or t
  misc_feature (72)..(72): n is a, c, g, or t
  misc_feature (77)..(77): n is a, c, g, or t
  misc_feature (85)..(85): n is a, c, g, or t
  misc_feature (97)..(97): n is a, c, g, or t
  misc_feature (102)..(102): n is a, c, g, or t
  misc_feature (131)..(131): n is a, c, g, or t
  misc_feature (152)..(152): n is a, c, g, or t
  misc_feature (166)..(167): n is a, c, g, or t
  misc_feature (176)..(176): n is a, c, g, or t
  misc_feature (178)..(178): n is a, c, g, or t
  misc_feature (180)..(180): n is a, c, g, or t
  misc_feature (182)..(182): n is a, c, g, or t
  misc_feature (184)..(184): n is a, c, g, or t
  misc_feature (186)..(186): n is a, c, g, or t
  misc_feature (193)..(193): n is a, c, g, or t
  misc_feature (222)..(222): n is a, c, g, or t
  misc_feature (274)..(274): n is a, c, g, or t
  misc_feature (290)..(290): n is a, c, g, or t
  misc_feature (306)..(306): n is a, c, g, or t
  misc_feature (333)..(333): n is a, c, g, or t
  misc_feature (336)..(336): n is a, c, g, or t
  misc_feature (348)..(348): n is a, c, g, or t
  misc_feature (365)..(365): n is a, c, g, or t
  misc_feature (368)..(368): n is a, c, g, or t
  misc_feature (379)..(379): n is a, c, g, or t
  misc_feature (381)..(381): n is a, c, g, or t
  misc_feature (399)..(399): n is a, c, g, or t
  misc_feature (432)..(432): n is a, c, g, or t
  misc_feature (452)..(452): n is a, c, g, or t
  misc_feature (454)..(454): n is a, c, g, or t
  misc_feature (466)..(466): n is a, c, g, or t
  misc_feature (506)..(506): n is a, c, g, or t
  misc_feature (509)..(509): n is a, c, g, or t
  misc_feature (563)..(563): n is a, c, g, or t
  misc_feature (634)..(634): n is a, c, g, or t
  misc_feature (722)..(722): n is a, c, g, or t
  misc_feature (727)..(727): n is a, c, g, or t
  misc_feature (730)..(730): n is a, c, g, or t
  misc_feature (733)..(733): n is a, c, g, or t
  misc_feature (808)..(808): n is a, c, g, or t
  misc_feature (843)..(843): n is a, c, g, or t
  misc_feature (850)..(850): n is a, c, g, or t
  misc_feature (927)..(927): n is a, c, g, or t
tgtacaaaacctgaaananttttacttttttaaaactttgatctaagtcgccttagacctcatggactcganacaanagtaaaangaattgggaaanaaaanactttaaaagccacgaaaaactttgttanaaatgtacatgttgccaaaanaaaaaaaaaaaaannaaaaaaaananananananaacagcntgatgtccaggttagattatataaatgtncaacaagggcagggtaaaggaaactttaaaaacaccagtcccgaataagccnggggccccgggagacncccccccccccccccngtcccgggccccagggactgcgtcccnccnaacaggacaagngggagtggataaggccnccnccaagccgccncncccagtggacaaaaacanccaggtaatgggtatataaacaaagcccaaaanaaatgtacaaatataaaaancnacaaacattaanaaattacagcatcacaaaacacggaaacacttcacaaggngcnagtaaaataactgtatcccccaatccccccatcatacaaggaaaacaaagagcnggtattaaagttgaagattcatcttcaaaatgtgtctgaaatagatcttttgtgttctatttgcttctgtnaagacagagtgtaaggctgcacagacatcacttgtttttcaggcaataccttagttcttaaaagaaaaaaataataataataaaaggnaaggnganggnaaaagcatcagaacccaactgtccatctgactcagcaaaaaactcgtataaatgttaatgaagaactctataganagaaattcctaaagatacttttactcttataaaanagaagtnatttaaaaagctatttacacgctacattctatgaaaaatatgcttcaggaaatacatctaaaattaaatacaggatncctgagaaa

SEQ ID NO: 615193 - DNA, 255 bp, Homo sapiens
tagagatggactaagcatacccagccaaataatgcagaggacacaggcttccctgtccctaacgatcaggtaaaacttgcttttcattttatccctctctgctgcctctagccatttgtcaagaccctttgggccaggcttgcactggaccggaaggcatgcctcacccattggaaagctaaattcctcaacctaaagccttcttgaatcacttcccttgttgatacagtagggggttcacgagctcgaatacga

SEQ ID NO: 615194 - DNA, 220 bp, Homo sapiens
accccccagtggtcctcccttccctggctcggttacccctcttagtccccggagttagaacctgtggtgtattttataagcaaacacccctgcctggctctcaggttctccacaccgtgccacaagtgtggccctctgatatctcaacggtgtcccctctcaaagtttacactctcggttttaaaaacctcgcgtaaaattcctgcacacagcggggtcc

SEQ ID NO: 615195 - DNA, 434 bp, Homo sapiens
gtggcctaacatcagttgtctaggttgatgtagccagtcagccaattccaaattgcactgagtttacttcattatacttttggatattaaaaactaaatagttttctgcagcatcgtagactagattagaaaccaagacttctgtatcacaatttataaaataggacaaatgtattctcagtgattctgcaatgtttctgcccatttttccctcttcaggaagtagtagaggtaagataccctattcctgctatgcttatgttgggcattattccagaaactgaagattcaaaggtgggtccccactcctagaagcccttcaaggggcagaggttcccagagaggaccataatccagtgtgaaaactgttgtactgtgtgtggatcaagtgtcaagaaaacccacataagagcatggctgattcttgttgagga

SEQ ID NO: 615196 - DNA, 638 bp, Homo sapiens
gttgtggggtatctagaggatcctgacattgtgtctcagtgtgcaggaaatgtgtagtgaaagttaggacttgggcacaggtaatcatggacgtatatatcctttagcataattattattataattattagcatggaagggtttaacagaaatcagcaagagcagattaatattttaaactgattcctctagctgcagtgtgtatgtgtggaaattggattgaatgggtacatgatgggaggcaaagagacctgtttggggccacaactttatggaaaaaaaataataataataaaacctgcaaaccaaaaaacacagtggctgaatcaggagaggtactgtgagagaaggggctgcaatcctgatactgcagagtgaggactgataggtgttgctgagtaactgcacgtgggtggtaagcagaaggaaggggtcaagggatgatggcagcattctggctgggtaattgggtggattgtggtggtcttccataagacgtggacccaggtagagaggcagactctggggtggtaagtggctaaattcaattttgggcatgctgagcttgtggaatctagtggatgcttaagtttggggagtggacaggcaaggggaattgctagaagtgtggggagtaa

SEQ ID NO: 615197 - DNA, 146 bp, Homo sapiens
actgtgctgctacagagtaactgtagagcttctctggtcacccagtggtcatgctggcacgctttcctgtgtaatccagcagatggtgtactagccttgcaccaggcccttggaaccttcccgttccaagaaccacagcaccgcag

SEQ ID NO: 615198 - DNA, 487 bp, Homo sapiens
gcggcccctactactactaaaaaagcggccgctcgacggaagtgaagtttaggtgggatgccgaatcgtcgtgctgacattgagtcacggatgaggaaggtacaagtcctttaagatcaaaactcaaacgggccgttctttctaaggtgtcggtatgtggggagtggtacaaaatggtctgatgctccttcaaaaacattcactttttacaacgtcaaggaattaagcataaaaaagattggttaaaagctttggtttctagtaaaggttagtgtgtgtggtttttttaagaagctgttttgctaaattatttttacttggaatgtttcaaacagatttcaggctgcaaacttgttttataatcgtttgcttctccaagtgaagctcagaaatacctaaaaatagctgtaacgttcgcgttaggaaagatggtgtttattccagtttgcatttttatggtgaaataaaatccttttccaatgaacta

SEQ ID NO: 615199 - DNA, 3294 bp, Homo sapiens
  misc_feature (30)..(30): n is a, c, g, or t
ggagcggggcgacggaatgtggaaatgcgncatagagggcgggcggcgacggcggtggcggcgtcggaggcgcctccgggggacggtggcggctcccggcggtgaggccgcgcctgtccggggatcgtcgagggacggcgggagcttgggccagcggcggcggcggcctgggacgcaggcggagccccgcgcaggcccaaggtcccggaggctatggcagcggctaccatcgtgcacgacacgtctgaggccgtggagctctgccctgcttacggcttgtacctgaagcccatcaccaagatgaccatcagcgtggcactcccgcagctgaagcagccggggaagtccatctccaactgggaggtgatggagaggctgaagggcatggtgcagaaccaccagttctccacgctgcgtatttccaagagcaccatggacttcatccgcttcgagggggaggtggagaacaagagcctggtcaagtcttttctggcctgcctggacggcaagaccatcaagctcagcggcttctccgacatcctgaaggtgcgcgcggccgagttcaagatcgacttccccacccgccacgactgggactccttcttccgcgacgccaaggacatgaacgagaccctgccgggggagcggccggacaccatccacctggaggggctgccctgcaagtggttcgccctgaaggagtcgggctccgagaagcccagcgaggacgtcctggtcaaggtgtttgagaagttcggggagatccggaatgtggacatccccatgctggacccctaccgggaggagatgacgggccgcaacttccacaccttcagtttcggggggcacttgaacttcgaggcctatgtgcagtaccgtgagtacatgggcttcatccaggccatgagcgccctgcgcgggatgaaactcatgtacaagggcgaggacggcaaggccgtggcctgcaacatcaaggtttcttttgattcgaccaaacacctgagtgatgcctcaattaagaagcggcagctggagaggcagaagcttcaggaactggagcagcaaagagaagaacaaaagcgcagagagaaggaagcggaggagaggcagcgagcggaggaaaggaaacaaaaggagctggaagagctggagcgagagaggaaaagagaagagaagcttcgcaagagggagcagaagcagagggaccgtgagctgcgccggaatcagaagaagctggagaagctgcaggcggaggagcagaagcagctgcaggagaagatcaagctggaggagcgcaagctgctgctggcccagaggaacctgcagtccatccggctcatcgccgagctgctcagcagagccaagttgtgataagtccccgggaaggagcatgacaagaggctgagacatgtggcagcccagtccttacctcatggctgtgaagctacgggaacaggagcagaaggaggagaagctgaggctccagcagcaggaggagcggcggcggctgcaggaggccgagctgcggcgcgtggaggaggagaaggagcgcgcgctgggcctgcagcggaaagagcgggagctgcgcgagcggctgctgagcatcctgctgagcaagaagccggacgacagccacacacacgacgagctgggcgtggcacacgccgacctgctgcagcccgtcctggacatcctgcagaccgtgtcgtccggctgtgtgagcgccaccacgctgcaccccctcgggggccagcccccggccggtgcccccaaggagagcgcggcccacccagaggccgacggcgctcccaaaagcgtgaacgggagcgtggccgaggaggccccatgcaaggaggttcagagctcctgtcgtgtggtccccgaggatggctctccagagaagaggtgcccgggcggcgtcctctcctgcattcctgacaacaaccaacagcccaagggcatccctgcctgcgagcagaatgtctccagaaaggacacccggtcagaacaggacaagtgcaaccgggagcccagcaagggccggggccgggccaccggagacgggcttgctgaccggcacaagcgggagaggagccgggccaggcgggccagcagcagggaggacgggaggccacgcaaggagcggcggccccacaagaagcacgcctacaaggatgacagcccccgccggcgcagcacgagcccggaccacacccggtcccggaggtcccacagcaaagacaggcaccggagggagcggagccgggagcggaggggcagcgccagcaggaagcacagccgccaccgccgccgaagcgagcggtcgcgctcccggtccccgagcaggcaccgcagtacctggaacaggtaatgacgggcacggcctccccacggcctgtccgggaaagaccaggacctgctcgagcctcctggccgctccttggccgctctccgtccacccctgcaaagccaagacccttctgcagccacgaatgtccacggagcccgccggcaggaaggaagacaccatgctttagagatccatctttctccactcaccgcagcgtacttggcacttcagtttcaaacacgtagtcctttaaaacttgatccgatagctttaatgcggccggtcctctctcagtcaggaaaattgcacagaccgacagtcgtgaggatggcagagctgctgcattcccccacatggggatttctgtgtctgcttggcgacctccctgcgtgcacggcctaggaggtgcacgggccaccatagtcacactggcactgaaaagaaagcgttgccctggtgattctttcccccccgtttgtaatgttaactgatcaggaagtgcagtttgggtgggatgccgaatcgtcgtgctgacattgagtcacggatgaggaaggtacaagtcctttaagatcaaaactcaaacgggccgttctttctaaggtgtcggtatgtggggagtggtacaaaatggtctgatgctccttcaaaaacattcactttttacaacgtcaaggaattaagcataaaaaagattggttaaaagctttggtttctagtaaaggttagtgtgtgtggtttttttaagaagctgttttgctaaattatttttacttggaatgtttcaaacagatttcaggctgcaaacttgttttataatcgtttgcttctccaagtgaagctcagaaatacctaaaaatagctgtaacgttcgcgttaggaaagatggtgtttattccagtttgcatttttatggtgaaataaaatccttttccaatgaacta

SEQ ID NO: 615200 - DNA, 3221 bp, Homo sapiens
  misc_feature (30)..(30): n is a, c, g, or t
ggagcggggcgacggaatgtggaaatgcgncatagagggcgggcggcgacggcggtggcggcgtcggaggcgcctccgggggacggtggcggctcccggcggtgaggccgcgcctgtccggggatcgtcgagggacggcgggagcttgggccagcggcggcggcggcctgggacgcaggcggagccccgcgcaggcccaaggtcccggaggctatggcagcggctaccatcgtgcacgacacgtctgaggccgtggagctctgccctgcttacggcttgtacctgaagcccatcaccaagatgaccatcagcgtggcactcccgcagctgaagcagccggggaagtccatctccaactgggaggtgatggagaggctgaagggcatggtgcagaaccaccagttctccacgctgcgtatttccaagagcaccatggacttcatccgcttcgagggggaggtggagaacaagagcctggtcaagtcttttctggcctgcctggacggcaagaccatcaagctcagcggcttctccgacatcctgaaggtgcgcgcggccgagttcaagatcgacttccccacccgccacgactgggactccttcttccgcgacgccaaggacatgaacgagaccctgccgggggagcggccggacaccatccacctggaggggctgccctgcaagtggttcgccctgaaggagtcgggctccgagaagcccagcgaggacgtcctggtcaaggtgtttgagaagttcggggagatccggaatgtggacatccccatgctggacccctaccgggaggagatgacgggccgcaacttccacaccttcagtttcggggggcacttgaacttcgaggcctatgtgcagtaccgtgagtacatgggcttcatccaggccatgagcgccctgcgcgggatgaaactcatgtacaagggcgaggacggcaaggccgtggcctgcaacatcaaggtttcttttgattcgaccaaacacctgagtgatgcctcaattaagaagcggcagctggagaggcagaagcttcaggaactggagcagcaaagagaagaacaaaagcgcagagagaaggaagcggaggagaggcagcgagcggaggaaaggaaacaaaaggagctggaagagctggagcgagagaggaaaagagaagagaagcttcgcaagagggagcagaagcagagggaccgtgagctgcgccggaatcagaagaagctggagaagctgcaggcggaggagcagaagcagctgcaggagaagatcaagctggaggagcgcaagctgctgctggcccagaggaacctgcagtccatccggctcatcgccgagctgctcagcagagccactgtgaagctacgggaacaggagcagaaggaggagaagctgaggctccagcagcaggaggagcggcggcggctgcaggaggccgagctgcggcgcgtggaggaggagaaggagcgcgcgctgggcctgcagcggaaagagcgggagctgcgcgagcggctgctgagcatcctgctgagcaagaagccggacgacagccacacacacgacgagctgggcgtggcacacgccgacctgctgcagcccgtcctggacatcctgcagaccgtgtcgtccggctgtgtgagcgccaccacgctgcaccccctcgggggccagcccccggccggtgcccccaaggagagcgcggcccacccagaggccgacggcgctcccaaaagcgtgaacgggagcgtggccgaggaggccccatgcaaggaggttcagagctcctgtcgtgtggtccccgaggatggctctccagagaagaggtgcccgggcggcgtcctctcctgcattcctgacaacaaccaacagcccaagggcatccctgcctgcgagcagaatgtctccagaaaggacacccggtcagaacaggacaagtgcaaccgggagcccagcaagggccggggccgggccaccggagacgggcttgctgaccggcacaagcgggagaggagccgggccaggcgggccagcagcagggaggacgggaggccacgcaaggagcggcggccccacaagaagcacgcctacaaggatgacagcccccgccggcgcagcacgagcccggaccacacccggtcccggaggtcccacagcaaagacaggcaccggagggagcggagccgggagcggaggggcagcgccagcaggaagcacagccgccaccgccgccgaagcgagcggtcgcgctcccggtccccgagcaggcaccgcagtacctggaacaggtaatgacgggcacggcctccccacggcctgtccgggaaagaccaggacctgctcgagcctcctggccgctccttggccgctctccgtccacccctgcaaagccaagacccttctgcagccacgaatgtccacggagcccgccggcaggaaggaagacaccatgctttagagatccatctttctccactcaccgcagcgtacttggcacttcagtttcaaacacgtagtcctttaaaacttgatccgatagctttaatgcggccggtcctctctcagtcaggaaaattgcacagaccgacagtcgtgaggatggcagagctgctgcattcccccacatggggatttctgtgtctgcttggcgacctccctgcgtgcacggcctaggaggtgcacgggccaccatagtcacactggcactgaaaagaaagcgttgccctggtgattctttcccccccgtttgtaatgttaactgatcaggaagtgcagtttgggtgggatgccgaatcgtcgtgctgacattgagtcacggatgaggaaggtacaagtcctttaagatcaaaactcaaacgggccgttctttctaaggtgtcggtatgtggggagtggtacaaaatggtctgatgctccttcaaaaacattcactttttacaacgtcaaggaattaagcataaaaaagattggttaaaagctttggtttctagtaaaggttagtgtgtgtggtttttttaagaagctgttttgctaaattatttttacttggaatgtttcaaacagatttcaggctgcaaacttgttttataatcgtttgcttctccaagtgaagctcagaaatacctaaaaatagctgtaacgttcgcgttaggaaagatggtgtttattccagtttgcatttttatggtgaaataaaatccttttccaatgaacta

SEQ ID NO: 615201 - DNA, 3997 bp, Homo sapiens
  misc_feature (30)..(30): n is a, c, g, or t
  misc_feature (1400)..(1400): n is a, c, g, or t
ggagcggggcgacggaatgtggaaatgcgncatagagggcgggcggcgacggcggtggcggcgtcggaggcgcctccgggggacggtggcggctcccggcggtgaggccgcgcctgtccggggatcgtcgagggacggcgggagcttgggccagcggcggcggcggcctgggacgcaggcggagccccgcgcaggcccaaggtcccggaggctatggcagcggctaccatcgtgcacgacacgtctgaggccgtggagctctgccctgcttacggcttgtacctgaagcccatcaccaagatgaccatcagcgtggcactcccgcagctgaagcagccggggaagtccatctccaactgggaggtgatggagaggctgaagggcatggtgcagaaccaccagttctccacgctgcgtatttccaagagcaccatggacttcatccgcttcgagggggaggtggagaacaagagcctggtcaagtcttttctggcctgcctggacggcaagaccatcaagctcagcggcttctccgacatcctgaaggtgcgcgcggccgagttcaagatcgacttccccacccgccacgactgggactccttcttccgcgacgccaaggacatgaacgagaccctgccgggggagcggccggacaccatccacctggaggggctgccctgcaagtggttcgccctgaaggagtcgggctccgagaagcccagcgaggacgtcctggtcaaggtgtttgagaagttcggggagatccggaatgtggacatccccatgctggacccctaccgggaggagatgacgggccgcaacttccacaccttcagtttcggggggcacttgaacttcgaggcctatgtgcagtaccgtgagtacatgggcttcatccaggccatgagcgccctgcgcgggatgaaactcatgtacaagggcgaggacggcaaggccgtggcctgcaacatcaaggtttcttttgattcgaccaaacacctgagtgatgcctcaattaagaagcggcagctggagaggcagaagcttcaggaactggagcagcaaagagaagaacaaaagcgcagagagaaggaagcggaggagaggcagcgagcggaggaaaggaaacaaaaggagctggaagagctggagcgagagaggaaaagagaagagaagcttcgcaagagggagcagaagcagagggaccgtgagctgcgccggaatcagaagaagctggagaagctgcaggcggaggagcagaagcagctgcaggagaagatcaagctggaggagcgcaagctgctgctggcccagaggaacctgcagtccatccggctcatcgccgagctgctcagcagagccaaggtacccgggggctccctctgcagccgccagccgcncccgggctgccctcagtgccctcccctgaaatgcgggcggcgtcacggccgtttccccgccggctgcagctgtagctacgaaaccagctttaatgccgaggatgacggctccttcccgggagggtgtagcgctcgtctgtcgttcccgatgatttcagagctgtgacggtttccttttgcaaagctggtgcattcaggttccccgagcaggctggcagcctcccgggggccagggcagaggctctctgtttcctttgggtcggggcagtggcagagagtgcaggaggccgctccctctggcccgcgcctctgtgtgtggtcagctggcctggctgtgacctcaccagtggcccagagcagaggggcaaggtgggctggggggagggctgagcgcacagagggggcctgccgtgggcccgggtccctcctccgcagcgtgaacctgacaggtctcaccagcgccggtactgacgaccccctcagcaccaagagcctccctgctcctcctgcaggcgcgactggtaactcccatgagcccggggccagggcccacagacagacagacctccccaggacagacgtccccggcacgctccttgtcctcaggagggctgcgtccccctggagtccaacgcggggcgaccccataacctgttgtctgattacagttgtgataagtccccgggaaggagcatgacaagaggctgagacatgtggcagcccagtccttacctcatggctgtgaagctacgggaacaggagcagaaggaggagaagctgaggctccagcagcaggaggagcggcggcggctgcaggaggccgagctgcggcgcgtggaggaggagaaggagcgcgcgctgggcctgcagcggaaagagcgggagctgcgcgagcggctgctgagcatcctgctgagcaagaagccggacgacagccacacacacgacgagctgggcgtggcacacgccgacctgctgcagcccgtcctggacatcctgcagaccgtgtcgtccggctgtgtgagcgccaccacgctgcaccccctcgggggccagcccccggccggtgcccccaaggagagcgcggcccacccagaggccgacggcgctcccaaaagcgtgaacgggagcgtggccgaggaggccccatgcaaggaggttcagagctcctgtcgtgtggtccccgaggatggctctccagagaagaggtgcccgggcggcgtcctctcctgcattcctgacaacaaccaacagcccaagggcatccctgcctgcgagcagaatgtctccagaaaggacacccggtcagaacaggacaagtgcaaccgggagcccagcaagggccggggccgggccaccggagacgggcttgctgaccggcacaagcgggagaggagccgggccaggcgggccagcagcagggaggacgggaggccacgcaaggagcggcggccccacaagaagcacgcctacaaggatgacagcccccgccggcgcagcacgagcccggaccacacccggtcccggaggtcccacagcaaagacaggcaccggagggagcggagccgggagcggaggggcagcgccagcaggaagcacagccgccaccgccgccgaagcgagcggtcgcgctcccggtccccgagcaggcaccgcagtacctggaacaggtaatgacgggcacggcctccccacggcctgtccgggaaagaccaggacctgctcgagcctcctggccgctccttggccgctctccgtccacccctgcaaagccaagacccttctgcagccacgaatgtccacggagcccgccggcaggaaggaagacaccatgctttagagatccatctttctccactcaccgcagcgtacttggcacttcagtttcaaacacgtagtcctttaaaacttgatccgatagctttaatgcggccggtcctctctcagtcaggaaaattgcacagaccgacagtcgtgaggatggcagagctgctgcattcccccacatggggatttctgtgtctgcttggcgacctccctgcgtgcacggcctaggaggtgcacgggccaccatagtcacactggcactgaaaagaaagcgttgccctggtgattctttcccccccgtttgtaatgttaactgatcaggaagtgcagtttgggtgggatgccgaatcgtcgtgctgacattgagtcacggatgaggaaggtacaagtcctttaagatcaaaactcaaacgggccgttctttctaaggtgtcggtatgtggggagtggtacaaaatggtctgatgctccttcaaaaacattcactttttacaacgtcaaggaattaagcataaaaaagattggttaaaagctttggtttctagtaaaggttagtgtgtgtggtttttttaagaagctgttttgctaaattatttttacttggaatgtttcaaacagatttcaggctgcaaacttgttttataatcgtttgcttctccaagtgaagctcagaaatacctaaaaatagctgtaacgttcgcgttaggaaagatggtgtttattccagtttgcatttttatggtgaaataaaatccttttccaatgaacta

SEQ ID NO: 615202 - DNA, 3443 bp, Homo sapiens
  misc_feature (30)..(30): n is a, c, g, or t
ggagcggggcgacggaatgtggaaatgcgncatagagggcgggcggcgacggcggtggcggcgtcggaggcgcctccgggggacggtggcggctcccggcggtgaggccgcgcctgtccggggatcgtcgagggacggcgggagcttgggccagcggcggcggcggcctgggacgcaggcggagccccgcgcaggcccaaggtcccggaggctatggcagcggctaccatcgtgcacgacacgtctgaggccgtggagctctgccctgcttacggcttgtacctgaagcccatcaccaagatgaccatcagcgtggcactcccgcagctgaagcagccggggaagtccatctccaactgggaggtgatggagaggctgaagggcatggtgcagaaccaccagttctccacgctgcgtatttccaagagcaccatggacttcatccgcttcgagggggaggtggagaacaagagcctggtcaagtcttttctggcctgcctggacggcaagaccatcaagctcagcggcttctccgacatcctgaaggtgcgcgcggccgagttcaagatcgacttccccacccgccacgactgggactccttcttccgcgacgccaaggacatgaacgagaccctgccgggggagcggccggacaccatccacctggaggggctgccctgcaagtggttcgccctgaaggagtcgggctccgagaagcccagcgaggacgtcctggtcaaggtgtttgagaagttcggggagatccggaatgtggacatccccatgctggacccctaccgggaggagatgacgggccgcaacttccacaccttcagtttcggggggcacttgaacttcgaggcctatgtgcagtaccgtgagtacatgggcttcatccaggccatgagcgccctgcgcgggatgaaactcatgtacaagggcgaggacggcaaggccgtggcctgcaacatcaaggtttcttttgattcgaccaaacacctgagtgatgcctcaattaagaagcggcagctggagaggcagaagcttcaggaactggagcagcaaagagaagaacaaaagcgcagagagaaggaagcggaggagaggcagcgagcggaggaaaggaaacaaaaggagctggaagagctggagcgagagaggaaaagagaagagaagcttcgcaagagggagcagaagcagagggaccgtgagctgcgccggaatcagaagaagctggagaagctgcaggcggaggagcagaagcagctgcaggagaagatcaagctggaggagcgcaagctgctgctggcccagaggaacctgcagtccatccggctcatcgccgagctgctcagcagagccactgtgaagctacgggaacaggagcagaaggaggagaagctgaggctccagcagcaggaggagcggcggcggctgcaggaggccgagctgcggcgcgtggaggaggagaaggagcgcgcgctgggcctgcagcggaaagagcgggagctgcgcgagcggctgctgagcatcctgctgagcaagaagccggacgacagccacacacacgacgagctgggcgtggcacacgccgacctgctgcagcccgtcctggacatcctgcagaccgtgtcgtccggctgtgtgagcgccaccacgctgcaccccctcgggggccagcccccggccggtgcccccaaggagagcgcggcccacccagaggccgacggcgctcccaaaagcgtgaacgggagcgtggccgaggaggccccatgcaaggaggttcagagctcctgtcgtgtggtccccgaggatggctctccagagaagaggtgcccgggcggcgtcctctcctgcattcctgacaacaaccaacagcccaagggcatccctgcctgcgagcagaatgtctccagaaaggacacccggtcagaacaggacaagtgcaaccgggagcccagcaagggccggggccgggccaccggagacgggcttgctgaccggcacaagcgggagaggagccgggccaggcgggccagcagcagggaggacgggaggccacgcaaggagcggcggccccacaagaagcacgcctacaaggatgacagcccccgccggcgcagcacgagcccggaccacacccggtcccggaggtcccacagcaaagacaggcaccggagggagcggagccgggagcggaggggcagcgccagcaggaagcacagccgccaccgccgccgaagcgagcggtcgcgctcccggtccccgagcaggcaccgcagtacctggaacaggtaatgacgggcacggcctccccacggcctgtccgggaaagaccaggacctgctcgagcctcctggccgctccttggccgctctccgtccacccctgcaaagccaagacccttctgcagccacgaatgtccacggagcccgccggcaggaaggaagacaccatgctttagagatccatctttctccactcaccgcagcgtacttggcacttcagtttcaaacacgtagtcctttaaaacttgatccgatagctttaatgcggccggtcctctctcagtcaggaaaattgcacagaccgacagtcgtgaggatggcagagctgctgcattcccccacatggggatttctgtgtctgcttggcgacctccctgcgtgcacggcctaggaggtgcacgggccaccatagtcacactggcactgaaaagaaagcgttgccctggtgattctttcccccccgtttgtaatgttaactgatcaggaagtgcagtttgggtgggatgccgaatcgtcgtgctgacattgagtcacggatgaggaaggtacaagtcctttaagatcaaaactcaaacgggccgttctttctaaggtgtcggtatgtggggagtggtacaaaatggtctgatgctccttcaaaaacattcactttttacaacgtcaaggaattaagcataaaaaagattggttaaaagctttggtttctagtaaaggttagtgtgtgtggtttttttaagaagctgttttgctaaattatttttacttggaatgtttcaaacagatttcaggctgcaaacttgttttataatcgtttgcttctccaagtgaagctcagaaatacctaaaaatagctgtaacgttcgcgttaggaaagatggtgtttattccagtttgcatttttatggtgaaataaaatccttttccaatgaactaaaaaaaaaaaaaaaaaaaaaacaaactttgtgggcgcgctgggacccacgaaaaagtttttaaaacccttctgtgtgcgggccgcgcccatttttgtacgtgtacctggcaaacctgtccaaggaaaccgggctgatgtggttggttccccaataaacccgcgcccgccgtggacaccagtggtctggctcggctcaccggggcagatagaaccccgggtgt

SEQ ID NO: 615203 - DNA, 2560 bp, Homo sapiens
  misc_feature (30)..(30): n is a, c, g, or t
ggagcggggcgacggaatgtggaaatgcgncatagagggcgggcggcgacggcggtggcggcgtcggaggcgcctccgggggacggtggcggctcccggcggtgaggccgcgcctgtccggggatcgtcgagggacggcgggagcttgggccagcggcggcggcggcctgggacgcaggcggagccccgcgcaggcccaaggtcccggaggctatggcagcggctaccatcgtgcacgacacgtctgaggccgtggagctctgccctgcttacggcttgtacctgaagcccatcaccaagatgaccatcagcgtggcactcccgcagctgaagcagccggggaagtccatctccaactgggaggtgatggagaggctgaagggcatggtgcagaaccaccagttctccacgctgcgtatttccaagagcaccatggacttcatccgcttcgagggggaggtggagaacaagagcctggtcaagtcttttctggcctgcctggacggcaagaccatcaagctcagcggcttctccgacatcctgaaggtgcgcgcggccgagttcaagatcgacttccccacccgccacgactgggactccttcttccgcgacgccaaggacatgaacgagaccctgccgggggagcggccggacaccatccacctggaggggctgccctgcaagtggttcgccctgaaggagtcgggctccgagaagcccagcgaggacgtcctggtcaaggtgtttgagaagttcggggagatccggaatgtggacatccccatgctggacccctaccgggaggagatgacgggccgcaacttccacaccttcagtttcggggggcacttgaacttcgaggcctatgtgcagtaccgtgagtacatgggcttcatccaggccatgagcgccctgcgcgggatgaaactcatgtacaagggcgaggacggcaaggccgtggcctgcaacatcaaggtttcttttgattcgaccaaacacctgagtgatgcctcaattaagaagcggcagctggagaggcagaagcttcaggaactggagcagcaaagagaagaacaaaagcgcagagagaaggaagcggaggagaggcagcgagcggaggaaaggaaacaaaaggagctggaagagctggagcgagagaggaagagaagaggtgcccgggcggcgtcctctcctgcattcctgacaacaaccaacagcccaagggcatccctgcctgcgagcagaatgtctccagaaaggacacccggtcagaacaggacaagtgcaaccgggagcccagcaagggccggggccgggccaccggagacgggcttgctgaccggcacaagcgggagaggagccgggccaggcgggccagcagcagggaggacgggaggccacgcaaggagcggcggccccacaagaagcacgcctacaaggatgacagcccccgccggcgcagcacgagcccggaccacacccggtcccggaggtcccacagcaaagacaggcaccggagggagcggagccgggagcggaggggcagcgccagcaggaagcacagccgccaccgccgccgaagcgagcggtcgcgctcccggtccccgagcaggcaccgcagtacctggaacaggtaatgacgggcacggcctccccacggcctgtccgggaaagaccaggacctgctcgagcctcctggccgctccttggccgctctccgtccacccctgcaaagccaagacccttctgcagccacgaatgtccacggagcccgccggcaggaaggaagacaccatgctttagagatccatctttctccactcaccgcagcgtacttggcacttcagtttcaaacacgtagtcctttaaaacttgatccgatagctttaatgcggccggtcctctctcagtcaggaaaattgcacagaccgacagtcgtgaggatggcagagctgctgcattcccccacatggggatttctgtgtctgcttggcgacctccctgcgtgcacggcctaggaggtgcacgggccaccatagtcacactggcactgaaaagaaagcgttgccctggtgattctttcccccccgtttgtaatgttaactgatcaggaagtgcagtttgggtgggatgccgaatcgtcgtgctgacattgagtcacggatgaggaaggtacaagtcctttaagatcaaaactcaaacgggccgttctttctaaggtgtcggtatgtggggagtggtacaaaatggtctgatgctccttcaaaaacattcactttttacaacgtcaaggaattaagcataaaaaagattggttaaaagctttggtttctagtaaaggttagtgtgtgtggtttttttaagaagctgttttgctaaattatttttacttggaatgtttcaaacagatttcaggctgcaaacttgttttataatcgtttgcttctccaagtgaagctcagaaatacctaaaaatagctgtaacgttcgcgttaggaaagatggtgtttattccagtttgcatttttatggtgaaataaaatccttttccaatgaacta

SEQ ID NO: 615204 - DNA, 2216 bp, Homo sapiens
aagcttgcggccgcttgtgacctaaccgcagcgcctgtgtgcaacgtggtggggctcccggcagggctcggctctgcccaagaggcccgccctggggctgcgcgagccgctttgccaaggggtttccttctcactcagacgcatgatggccccaggtgtggccgcgggaccgagggatggacgggctggacctggctcgccgtaggagacgccccccacccctgggctggagtccagccaggccgctgatcctgcatccccagaccatggggcctccaaacaccttcccagctcctgtcccacgtgtccggccaggctcaggaaccgggctcagctgcactttcctcttccccgcaggctgtgaagctacgggaacaggagcagaaggaggagaagctgaggctccagcagcaggaggagcggcggcggctgcaggaggccgagctgcggcgcgtggaggaggagaaggagcgcgcgctgggcctgcagcggaaagagcgggagctgcgcgagcggctgctgagcatcctgctgagcaagaagccggacgacagccacacacacgacgagctgggcgtggcacacgccgacctgctgcagcccgtcctggacatcctgcagaccgtgtcgtccggctgtgtgagcgccaccacgctgcaccccctcgggggccagcccccggccggtgcccccaaggagagcgcggcccacccagaggccgacggcgctcccaaaagcgtgaacgggagcgtggccgaggaggccccatgcaaggaggttcagagctcctgtcgtgtggtccccgaggatggctctccagagaagaggtgcccgggcggcgtcctctcctgcattcctgacaacaaccaacagcccaagggcatccctgcctgcgagcagaatgtctccagaaaggacacccggtcagaacaggacaagtgcaaccgggagcccagcaagggccggggccgggccaccggagacgggcttgctgaccggcacaagcgggagaggagccgggccaggcgggccagcagcagggaggacgggaggccacgcaaggagcggcggccccacaagaagcacgcctacaaggatgacagcccccgccggcgcagcacgagcccggaccacacccggtcccggaggtcccacagcaaagacaggcaccggagggagcggagccgggagcggaggggcagcgccagcaggaagcacagccgccaccgccgccgaagcgagcggtcgcgctcccggtccccgagcaggcaccgcagtacctggaacaggtaatgacgggcacggcctccccacggcctgtccgggaaagaccaggacctgctcgagcctcctggccgctccttggccgctctccgtccacccctgcaaagccaagacccttctgcagccacgaatgtccacggagcccgccggcaggaaggaagacaccatgctttagagatccatctttctccactcaccgcagcgtacttggcacttcagtttcaaacacgtagtcctttaaaacttgatccgatagctttaatgcggccggtcctctctcagtcaggaaaattgcacagaccgacagtcgtgaggatggcagagctgctgcattcccccacatggggatttctgtgtctgcttggcgacctccctgcgtgcacggcctaggaggtgcacgggccaccatagtcacactggcactgaaaagaaagcgttgccctggtgattctttcccccccgtttgtaatgttaactgatcaggaagtgcagtttgggtgggatgccgaatcgtcgtgctgacattgagtcacggatgaggaaggtacaagtcctttaagatcaaaactcaaacgggccgttctttctaaggtgtcggtatgtggggagtggtacaaaatggtctgatgctccttcaaaaacattcactttttacaacgtcaaggaattaagcataaaaaagattggttaaaagctttggtttctagtaaaggttagtgtgtgtggtttttttaagaagctgttttgctaaattatttttacttggaatgtttcaaacagatttcaggctgcaaacttgttttataatcgtttgcttctccaagtgaagctcagaaatacctaaaaatagctgtaacgttcgcgttaggaaagatggtgtttattccagtttgcatttttatggtgaaataaaatccttttccaatgaacta

SEQ ID NO: 615205 - DNA, 392 bp, Homo sapiens
caaacaaaaacaagtagataaacattaatataggaaaccaataaactaggactagtatctgcagacgacagaaacagagcattcacgctcctctaggaagtttctgctatcttctggaggtatctgggtgagcaatgaacttcctgcagaaaagtcccggggcccagaccggcacagtaaccatgacacccaacgcctcgatttccggttacacctcatgtgctatcctaagggttctggcaaatgagtgttgaaacagaacaaaacaatccagataccacttagagatttgtgatgagatcttgcaacctgttctttcaatgttttaatcacttttctgcaaattgtcatcatttgttttacaagaagatagtttaaagtatattttatac

SEQ ID NO: 615206 - DNA, 407 bp, Homo sapiens
cctgaggacatgaaactattcagggtggtaccttgatagatagtcaagggctatgtcatgctctttaatattctctttaaccatacactgacttcgaattgaggcaggccctttctggctcttatcctttcctctctctctctctctgtctctctcacacacacacacacacacacacacacacacacacgcacacatgcaactcacagatttctttaagagtgcagggagtggagaattgtaaatgcagcaaatactaaagaatgtgttatttggtattggactgcattatgtcgcagatgttggttactaaatgcaaaaatctagatttacaaaacagatcaatgggtaatgaatttgcagggaaactggagaatgactatgccctttacaataggcattgccat

SEQ ID NO: 615207 - DNA, 3275 bp, Homo sapiens
gtaaagaactccgttgagatggctgttaacaaagtggaaaccggtctctgacacggcagagagacactgctgtttctcttctccgggtccagaaaatgcctgctggcttggcccctcctcattggcgggggaggtggggggtgctggtgctgactgtctgcgtcttatgtttcaggcccaaggtcccggaggctatggcagcggctaccatcgtgcacgacacgtctgaggccgtggagctctgccctgcttacggcttgtacctgaagcccatcaccaagatgaccatcagcgtggcactcccgcagctgaagcagccggggaagtccatctccaactgggaggtgatggagaggctgaagggcatggtgcagaaccaccagttctccacgctgcgtatttccaagagcaccatggacttcatccgcttcgagggggaggtggagaacaagagcctggtcaagtcttttctggcctgcctggacggcaagaccatcaagctcagcggcttctccgacatcctgaaggtgcgcgcggccgagttcaagatcgacttccccacccgccacgactgggactccttcttccgcgacgccaaggacatgaacgagaccctgccgggggagcggccggacaccatccacctggaggggctgccctgcaagtggttcgccctgaaggagtcgggctccgagaagcccagcgaggacgtcctggtcaaggtgtttgagaagttcggggagatccggaatgtggacatccccatgctggacccctaccgggaggagatgacgggccgcaacttccacaccttcagtttcggggggcacttgaacttcgaggcctatgtgcagtaccgtgagtacatgggcttcatccaggccatgagcgccctgcgcgggatgaaactcatgtacaagggcgaggacggcaaggccgtggcctgcaacatcaaggtttcttttgattcgaccaaacacctgagtgatgcctcaattaagaagcggcagctggagaggcagaagcttcaggaactggagcagcaaagagaagaacaaaagcgcagagagaaggaagcggaggagaggcagcgagcggaggaaaggaaacaaaaggagctggaagagctggagcgagagaggaaaagagaagagaagcttcgcaagagggagcagaagcagagggaccgtgagctgcgccggaatcagaagaagctggagaagctgcaggcggaggagcagaagcagctgcaggagaagatcaagctggaggagcgcaagctgctgctggcccagaggaacctgcagtccatccggctcatcgccgagctgctcagcagagccaagttgtgataagtccccgggaaggagcatgacaagaggctgagacatgtggcagcccagtccttacctcatggctgtgaagctacgggaacaggagcagaaggaggagaagctgaggctccagcagcaggaggagcggcggcggctgcaggaggccgagctgcggcgcgtggaggaggagaaggagcgcgcgctgggcctgcagcggaaagagcgggagctgcgcgagcggctgctgagcatcctgctgagcaagaagccggacgacagccacacacacgacgagctgggcgtggcacacgccgacctgctgcagcccgtcctggacatcctgcagaccgtgtcgtccggctgtgtgagcgccaccacgctgcaccccctcgggggccagcccccggccggtgcccccaaggagagcgcggcccacccagaggccgacggcgctcccaaaagcgtgaacgggagcgtggccgaggaggccccatgcaaggaggttcagagctcctgtcgtgtggtccccgaggatggctctccagagaagaggtgcccgggcggcgtcctctcctgcattcctgacaacaaccaacagcccaagggcatccctgcctgcgagcagaatgtctccagaaaggacacccggtcagaacaggacaagtgcaaccgggagcccagcaagggccggggccgggccaccggagacgggcttgctgaccggcacaagcgggagaggagccgggccaggcgggccagcagcagggaggacgggaggccacgcaaggagcggcggccccacaagaagcacgcctacaaggatgacagcccccgccggcgcagcacgagcccggaccacacccggtcccggaggtcccacagcaaagacaggcaccggagggagcggagccgggagcggaggggcagcgccagcaggaagcacagccgccaccgccgccgaagcgagcggtcgcgctcccggtccccgagcaggcaccgcagtacctggaacaggtaatgacgggcacggcctccccacggcctgtccgggaaagaccaggacctgctcgagcctcctggccgctccttggccgctctccgtccacccctgcaaagccaagacccttctgcagccacgaatgtccacggagcccgccggcaggaaggaagacaccatgctttagagatccatctttctccactcaccgcagcgtacttggcacttcagtttcaaacacgtagtcctttaaaacttgatccgatagctttaatgcggccggtcctctctcagtcaggaaaattgcacagaccgacagtcgtgaggatggcagagctgctgcattcccccacatggggatttctgtgtctgcttggcgacctccctgcgtgcacggcctaggaggtgcacgggccaccatagtcacactggcactgaaaagaaagcgttgccctggtgattctttcccccccgtttgtaatgttaactgatcaggaagtgcagtttgggtgggatgccgaatcgtcgtgctgacattgagtcacggatgaggaaggtacaagtcctttaagatcaaaactcaaacgggccgttctttctaaggtgtcggtatgtggggagtggtacaaaatggtctgatgctccttcaaaaacattcactttttacaacgtcaaggaattaagcataaaaaagattggttaaaagctttggtttctagtaaaggttagtgtgtgtggtttttttaagaagctgttttgctaaattatttttacttggaatgtttcaaacagatttcaggctgcaaacttgttttataatcgtttgcttctccaagtgaagctcagaaatacctaaaaatagctgtaacgttcgcgttaggaaagatggtgtttattccagtttgcatttttatggtgaaataaaatccttttccaatgaacta

SEQ ID NO: 615208 - DNA, 2728 bp, Homo sapiens
tgtaacgcgccggaattacgggatctagcaaggaccttatcttcatcctagcttcataatcgtagccttctcaggaagatgccaggtagacttgggctctctactggcacccgtacagacgctagacgtgttagaactaggatgacctctctctataacccgtcttccgtgatcgcccgctggtgtccccgacaggaacgatatttggtgagaaccagctttaatgccgaggatgacggctccttcccgggagggtgtagcgctcgtctgtcgttcccgatgatttcagagctgtgacggtttccttttgcaaagctggtgcattcaggttccccgagcaggctggcagcctcccgggggccagggcagaggctctctgtttcctttgggtcggggcagtggcagagagtgcaggaggccgctccctctggcccgcgcctctgtgtgtggtcagctggcctggctgtgacctcaccagtggcccagagcagaggggcaaggtgggctggggggagggctgagcgcacagagggggcctgccgtgggcccgggtccctcctccgcagcgtgaacctgacaggtctcaccagcgccggtactgacgaccccctcagcaccaagagcctccctgctcctcctgcaggcgcgactggtaactcccatgagcccggggccagggcccacagacagacagacctccccaggacagacgtccccggcacgctccttgtcctcaggagggctgcgtccccctggagtccaacgcggggcgaccccataacctgttgtctgattacagttgtgataagtccccgggaaggagcatgacaagaggctgagacatgtggcagcccagtccttacctcatggctgtgaagctacgggaacaggagcagaaggaggagaagctgaggctccagcagcaggaggagcggcggcggctgcaggaggccgagctgcggcgcgtggaggaggagaaggagcgcgcgctgggcctgcagcggaaagagcgggagctgcgcgagcggctgctgagcatcctgctgagcaagaagccggacgacagccacacacacgacgagctgggcgtggcacacgccgacctgctgcagcccgtcctggacatcctgcagaccgtgtcgtccggctgtgtgagcgccaccacgctgcaccccctcgggggccagcccccggccggtgcccccaaggagagcgcggcccacccagaggccgacggcgctcccaaaagcgtgaacgggagcgtggccgaggaggccccatgcaaggaggttcagagctcctgtcgtgtggtccccgaggatggctctccagagaagaggtgcccgggcggcgtcctctcctgcattcctgacaacaaccaacagcccaagggcatccctgcctgcgagcagaatgtctccagaaaggacacccggtcagaacaggacaagtgcaaccgggagcccagcaagggccggggccgggccaccggagacgggcttgctgaccggcacaagcgggagaggagccgggccaggcgggccagcagcagggaggacgggaggccacgcaaggagcggcggccccacaagaagcacgcctacaaggatgacagcccccgccggcgcagcacgagcccggaccacacccggtcccggaggtcccacagcaaagacaggcaccggagggagcggagccgggagcggaggggcagcgccagcaggaagcacagccgccaccgccgccgaagcgagcggtcgcgctcccggtccccgagcaggcaccgcagtacctggaacaggtaatgacgggcacggcctccccacggcctgtccgggaaagaccaggacctgctcgagcctcctggccgctccttggccgctctccgtccacccctgcaaagccaagacccttctgcagccacgaatgtccacggagcccgccggcaggaaggaagacaccatgctttagagatccatctttctccactcaccgcagcgtacttggcacttcagtttcaaacacgtagtcctttaaaacttgatccgatagctttaatgcggccggtcctctctcagtcaggaaaattgcacagaccgacagtcgtgaggatggcagagctgctgcattcccccacatggggatttctgtgtctgcttggcgacctccctgcgtgcacggcctaggaggtgcacgggccaccatagtcacactggcactgaaaagaaagcgttgccctggtgattctttcccccccgtttgtaatgttaactgatcaggaagtgcagtttgggtgggatgccgaatcgtcgtgctgacattgagtcacggatgaggaaggtacaagtcctttaagatcaaaactcaaacgggccgttctttctaaggtgtcggtatgtggggagtggtacaaaatggtctgatgctccttcaaaaacattcactttttacaacgtcaaggaattaagcataaaaaagattggttaaaagctttggtttctagtaaaggttagtgtgtgtggtttttttaagaagctgttttgctaaattatttttacttggaatgtttcaaacagatttcaggctgcaaacttgttttataatcgtttgcttctccaagtgaagctcagaaatacctaaaaatagctgtaacgttcgcgttaggaaagatggtgtttattccagtttgcatttttatggtgaaataaaatccttttccaatgaacta

SEQ ID NO: 615209 - DNA, 565 bp, Homo sapiens
  misc_feature (341)..(341): n is a, c, g, or t
  misc_feature (349)..(349): n is a, c, g, or t
  misc_feature (483)..(483): n is a, c, g, or t
  misc_feature (506)..(507): n is a, c, g, or t
  misc_feature (521)..(521): n is a, c, g, or t
  misc_feature (526)..(526): n is a, c, g, or t
  misc_feature (535)..(535): n is a, c, g, or t
gttgataaaccttgcccggtgaatatgactaatcacgtctatttcaatcttgacggcgagcagtctgacgtgcgcaatcacaagttgcagattctggcggacgaatatctgccggttgatgaaaggcggcattccgcacgacggcctgaaatctgtcgccggaacgtcttttgatttccgcagcgccaaaatcatcgccagtgagtttcttgccgacgacgatcagcgcaaagtgaaaggttacgatcacgcattcttgttacagccaaaggcgatggcaagaaagtggcggcgcatgtctggtcagcagatgaaaaattgcagctgaaggtctacaccancgctccgntctgcaattctactccggcaacttcctcggcggcacaccgtcgcggggaaccgaaccttacccgactggcaagggctggctctggaaagcgagtttctaccggacagcccgaaccaccctgaaatggccgcaanccggactgcttcctgcgtctaannatcagagtattccncgctnacggaatancagtttattgctgagtaatgttacgcccta

SEQ ID NO: 615210 - DNA, 228 bp, Homo sapiens
aaaggcagtatcaagcttgatatgtgtcttcacagttgatgacactgtcagtgaggcagggacactgaactattagaaaggaagacccatgcaggcacagtggctcacgccatacagtacagcacctttgggaggcaaggggggggatcacttgaggtcaggagttccgagacgagggtgggcaatatggtgaaaccccgtcgtcggggtgggatcgataaacaccgg

SEQ ID NO: 615211 - DNA, 3378 bp, Homo sapiens
  misc_feature (30)..(30): n is a, c, g, or t
ggagcggggcgacggaatgtggaaatgcgncatagagggcgggcggcgacggcggtggcggcgtcggaggcgcctccgggggacggtggcggctcccggcggtgaggccgcgcctgtccggggatcgtcgagggacggcgggagcttgggccagcggcggcggcggcctgggacgcaggcggagccccgcgcaggcccaaggtcccggaggctatggcagcggctaccatcgtgcacgacacgtctgaggccgtggagctctgccctgcttacggcttgtacctgaagcccatcaccaagatgaccatcagcgtggcactcccgcagctgaagcagccggggaagtccatctccaactgggaggtgatggagaggctgaagggcatggtgcagaaccaccagttctccacgctgcgtatttccaagagcaccatggacttcatccgcttcgagggggaggtggagaacaagagcctggtcaagtcttttctggcctgcctggacggcaagaccatcaagctcagcggcttctccgacatcctgaaggtgcgcgcggccgagttcaagatcgacttccccacccgccacgactgggactccttcttccgcgacgccaaggacatgaacgagaccctgccgggggagcggccggacaccatccacctggaggggctgccctgcaagtggttcgccctgaaggagtcgggctccgagaagcccagcgaggacgtcctggtcaaggtgtttgagaagttcggggagatccggaatgtggacatccccatgctggacccctaccgggaggagatgacgggccgcaacttccacaccttcagtttcggggggcacttgaacttcgaggcctatgtgcagtaccgtgagtacatgggcttcatccaggccatgagcgccctgcgcgggatgaaactcatgtacaagggcgaggacggcaaggccgtggcctgcaacatcaaggtttcttttgattcgaccaaacacctgagtgatgcctcaattaagaagcggcagctggagaggcagaagcttcaggaactggagcagcaaagagaagaacaaaagcgcagagagaaggaagcggaggagaggcagcgagcggaggaaaggaaacaaaaggagctggaagagctggagcgagagaggaaaagagaagagaagcttcgcaagagggagcagaagcagagggaccgtgagctgcgccggaatcagaagaagctggagaagctgcaggcggaggagcagaagcagctgcaggagaagatcaagctggaggagcgcaagctgctgctggcccagaggaacctgcagtccatccggctcatcgccgagctgctcagcagagccactgtgaagctacgggaacaggagcagaaggaggagaagctgaggctccagcagcaggaggagcggcggcggctgcaggaggccgagctgcggcgcgtggaggaggagaaggagcgcgcgctgggcctgcagcggaaagagcgggagctgcgcgagcggctgctgagcatcctgctgagcaagaagccggacgacagccacacacacgacgagctgggcgtggcacacgccgacctgctgcagcccgtcctggacatcctgcagaccgtgtcgtccggctgtgtgagcgccaccacgctgcaccccctcgggggccagcccccggccggtgcccccaaggagagcgcggcccacccagaggccgacggcgctcccaaaagcgtgaacgggagcgtggccgaggaggccccatgcaaggaggttcagagctcctgtcgtgtggtccccgaggatggctctccagagaagaggtgcccgggcggcgtcctctcctgcattcctgacaacaaccaacagcccaagggcatccctgcctgcgagcagaatgtctccagaaaggacacccggtcagaacaggacaagtgcaaccgggagcccagcaagggccggggccgggccaccggagacgggcttgctgaccggcacaagcgggagaggagccgggccaggcgggccagcagcagggaggacgggaggccacgcaaggagcggcggccccacaagaagcacgcctacaaggatgacagcccccgccggcgcagcacgagcccggaccacacccggtcccggaggtcccacagcaaagacaggcaccggagggagcggagccgggagcggaggggcagcgccagcaggaagcacagccgccaccgccgccgaagcgagcggtcgcgctcccggtccccgagcaggcaccgcagtacctggaacaggtaatgacgggcacggcctccccacggcctgtccgggaaagaccaggacctgctcgagcctcctggccgctccttggccgctctccgtccacccctgcaaagccaagacccttctgcagccacgaatgtccacggagcccgccggcaggaaggaagacaccatgctttagagatccatctttctccactcaccgcagcgtacttggcacttcagtttcaaacacgtagtcctttaaaacttgatccgatagctttaatgcggccggtcctctctcagtcaggaaaattgcacagaccgacagtcgtgaggatggcagagctgctgcattcccccacatggggatttctgtgtctgcttggcgacctccctgcgtgcacggcctaggaggtgcacgggccaccatagtcacactggcactgaaaagaaagcgttgccctggtgattctttcccccccgtttgtaatgttaactgatcaggaagtgcagtttgggtgggatgccgaatcgtcgtgctgacattgagtcacggatgaggaaggtacaagtcctttaagatcaaaactcaaacgggccgttctttctaaggtgtcggtatgtggggagtggtacaaaatggtctgatgctccttcaaaaacattcactttttacaacgtcaaggaattaagcataattttgctaaattatttttacttggaatgtttcaaacagatttcaggctgcaaacttgttttataatcgtttgcttctccaagtgaagctcagaaatacctaaaaatagctgtaacgttcgcgttaggaaagatggtgtttattccagtttgcatttttatggtgaaataaaatccttttccaatgaactaaaaaaaaaaaaaaaaaaaaaacaaactttgtgggcgcgctgggacccacgaaaaagtttttaaaacccttctgtgtgcgggccgcgcccatttttgtacgtgtacctggcaaacctgtccaaggaaaccgggctgatgtggttggttccccaataaacccgcgcccgccgtggacaccagtggtctggctcggctcaccggggcagatagaaccccgggtgt

SEQ ID NO: 615212 - DNA, 1196 bp, Homo sapiens
  misc_feature (307)..(307): n is a, c, g, or t
  misc_feature (405)..(406): n is a, c, g, or t
  misc_feature (692)..(692): n is a, c, g, or t
  misc_feature (727)..(727): n is a, c, g, or t
  misc_feature (840)..(840): n is a, c, g, or t
  misc_feature (886)..(886): n is a, c, g, or t
  misc_feature (894)..(894): n is a, c, g, or t
  misc_feature (906)..(906): n is a, c, g, or t
  misc_feature (931)..(931): n is a, c, g, or t
  misc_feature (935)..(935): n is a, c, g, or t
  misc_feature (945)..(945): n is a, c, g, or t
  misc_feature (948)..(949): n is a, c, g, or t
  misc_feature (951)..(951): n is a, c, g, or t
  misc_feature (967)..(967): n is a, c, g, or t
  misc_feature (973)..(973): n is a, c, g, or t
aaacggcatcaacagcattcttcgaccccgacggagagatggagatcccatctctataacaaccaacttatactgatattcctcgagaacaacctgatatgtctatattcttatcctaccaggctgtcgtgtaataatcatctctcattatggtgacttacatactccggaggagaagaaccattggatacataggtatggtctgagctaggatatcaataggattctctagggcttgtatcggtgtgagacagcagcccactatatccacgagctatggaatatgacgtacacactgcgtagcatntttcacctccgctaacataatcatcgctatccccaccggcgtcaaagtatttagctgactcgccacactccacggaagcaatatgaaatgatctgctnnagtgctctgagccctaggattcatctttcttttcaccgtaggtggcctgactggcattgtattagcaaactcatcactagacatcgtactacacgacacgtactacgttgtagctcacttccactatgtcctatcaataggagctgtatttgccatcataggaggcttcattcactgatttcccctattctcaggctacaccctagaccaaacctacgccaaaatccatttcactatcatattcatcggcgtaaatctaactttcttcccacaacactttctcggnctatccggaatgccccgacgttactcggactaccncgatgcatacgccacatgaaacatcctatcatctgtaggctcattcatttctctaacagcagtaatattaataattttcatgatttgagaagccttcgctgtcgaagcgaaanagtcctaatagtagaagaaccctccataaacctggagtgactatantggatgcncccccatcctancacacattcgaagaacccgtatacntaanatctagaccnaannanggaaggaatcgaagcncccaangctggtttcaatgccaatgccctatggacctccatgactttgttcatgaacacaagagatctccatcagataacagcaagagtcgtgttggacggccccctttggccctggtcacaagctgcctcacacattggttttctggggggcggggccatactgcgttcctagaatggggctaatgctccgccgagaaagctgcggggtcccaaagatcaggtgtgga

SEQ ID NO: 615213 - DNA, 1700 bp, Homo sapiens
cctaggaggtggaggtttccaatgaactgagattgcacccatgcactcccagcctgtgccaccagagggaacatcccatttccgaggaaaaaaaaaaaaaaagaatatgcacagtctgaatgtataccaggagtgtgagagacacatgcccacttcatgcaactcctaaactcaaagtctaaatcagatatttttattaacaatgacaacttgttgccaactccctgtttctaatgaccaaagacccagggtacctaaaaggactttgcaaccaagcaaagtcactgtcttcaaatctggatacacactttcccctctgtagattcaaaaggtgcttccttcccggctgtctccagcttccttactctcttttctgggatttctttttctcttctttctgctcttcctccactgctgaactggtccctaactgaaacagcccctgacttagcccaagcatgcttcctttagctgctgtgagaatttgtcttcctcaccagccaggtcctcaggcaaagtcctcagccagtgctttagagcaacttcccgcaaatcagaaactcactgtgattccaaaaatgtttctgagccctggacccctgcccccaaaatattttcatctttcccccaaacctcctttaaaggagcatgcataacagtgtgctgaaagacagttgttggttttttgattttagcatattatttcctgtatgaaatatgttttatataatctcctattatttttatcttatgttttgtattgttgataaatcctttttgtccttctaagatgtcctattgtaaaatcacttataaggtatgattactctttatgctattactttatatgccatttggtaataaatagtaaattgttgatgatatgattgactgatgcgcagtccagagcatgtatgaataatctcataaaacagtatcacagacattaagctaaactgtttcgtttttttgaaagaacaactcatactttggaacagttgtcaatattaatttgttgcaaatatttaatttaaataaacatttttgtaccatgaaaaaaaaaaaaaaaaaaaaaaaaaaaaaaaaaaaaagaagaaaaaaaacaaaaaaaaaaaaagacgggggcgcgcgcgcgctagcacagaagtatactaccctacgacgaggcccccccagattatctcacgccaccccccaactttgctgttcgacgaagacggggcgccccataaaacgaggacgtcatgctatatacgacgaagcgctggacgacgaccgaggcgcgccgagcttataaccagcagcggaatgaggcggaacaacaaaagcgtgcgtcctacgcgtgcgagacataccttttgttaggaaaagaagcaacaccctattttcatctgtgctggtgggggggagcgaccacatcaatagtgtgggggcacaaaacttatctccacacagaacgagatatatatatagaagagcttctctcacagggggaatatacttatataacagaccattttgaggaagtggtcattcatacggtgcgtgtgtgcaaccaacaacgcgccgtgcaaataatgtagctattctgccatacacaacgaagaccgtattggggctcatatgctggctagttggtctatgttcgctggaagaaacctatttttttaccaccggcgatcttcttgtaagattaaacg

SEQ ID NO: 615214 - DNA, 274 bp, Homo sapiens
gcacagacaagttcaggtccatggcccagatggtactagctgtctaactagcaaaagctgccccttctgggtacttccctagtaacccgagatcactcaggagccagacaggaaacttatgctattcctgtatactctttctgcccaacacatccaatctctcaaaacggtcaggtctaccttaacatctctagactagagccactcccactgtcatcagctttcacctggattctcgtgacagcctcctactgcttctctatcatgtggccag

SEQ ID NO: 615215 - DNA, 491 bp, Homo sapiens
  misc_feature (17)..(17): n is a, c, g, or t
  misc_feature (24)..(24): n is a, c, g, or t
tcatgtctgtacggccncgcgtanttgatatcgtcgaccaggcgctcgcgcacgcgtcgggagctggccagattgggtgtggggacgcgtctactagcagctttgcctgcctagcaacatgtcgcttggctgccaccactcagcttggggggcccctggtctccccacgcccctggagagaccccagtctagtggctgttgcccacatggtttcctgagatttggggagtgtgactgaggggcgatgtgtattgcactggaatgggtccaatgacacggcacttgttggtgggcaggtgctctgaccagtgaaagctagtgccatcccctgtggtgaccccaaagaccttcctgctgggggcagggggtgagggagtgacagcagagggctaggaggctcgggctcagctgagtacctctctcacaccaacttatggggttaacgaagcccaggggctcactttgagggtgacatttgccacagaaacaga

SEQ ID NO: 615216 - DNA, 635 bp, Homo sapiens
aaaggggccaattttttttgggaaccccaaggggccaaaattttttaacccattttttaaggggcccaaaaattttaaaattaaaactttttttgggccctgggaacctttaaaagggcttggcgggggaacccatttcctgttaacccttttccctaaaagggtttatacccaagggattccaggccctttaaaatttttaaaccctcctttaataaaaaagaaggggttattttttggggggaaaaaccctccccaaaattttgggaaaaaaaaaaaagttgggcccctggcctaaaaaggccccatagtttttccgggccaaatttttccccgggccctttttggaatataccccccgggggacaaaattgcccgggctggaaattttcaaagggccccttaaaaagggtcccctttccctctttaaaaaaagggcggaaaaaaaggttttttttcccaaaggggggggaaaaaaaatgccctttcccggaagaattttttaaaacccccacactttgaggggggttttttttgggcggagaaacccccaaggtttttccaaaaggcccgggaaatttttttttttggcccctaaagaggggtataaagattccaacctttttagagatttt

SEQ ID NO: 615217 - DNA, 1239 bp, Homo sapiens
  misc_feature (350)..(350): n is a, c, g, or t
  misc_feature (448)..(449): n is a, c, g, or t
  misc_feature (735)..(735): n is a, c, g, or t
  misc_feature (770)..(770): n is a, c, g, or t
  misc_feature (883)..(883): n is a, c, g, or t
  misc_feature (929)..(929): n is a, c, g, or t
  misc_feature (937)..(937): n is a, c, g, or t
  misc_feature (949)..(949): n is a, c, g, or t
  misc_feature (974)..(974): n is a, c, g, or t
  misc_feature (978)..(978): n is a, c, g, or t
  misc_feature (988)..(988): n is a, c, g, or t
  misc_feature (991)..(992): n is a, c, g, or t
  misc_feature (994)..(994): n is a, c, g, or t
  misc_feature (1010)..(1010): n is a, c, g, or t
  misc_feature (1016)..(1016): n is a, c, g, or t
cagaccgcaacctcaacatcactcttcattcgacacccgctcggaggaggagtacccctagtactataccagacgaaccatattcgtggactttggtctgcgtcacctccttgaaagcttgttattagtttcctaataatccgtgacacagggtcttgcagtgcacagtaaatctctcgcgatattagtaatcgttacctactccggaaacagaagaaccagtcttaggagtacattgggtatggtctgatgcgtatgatatcgcatttgtgcttcctagggttatatcgtggtgatgcacaatcatatgattatacacgtaatgaatagacgtgagactcacgagcatntttcacctccgctaacataatcatcgctatccccaccggcgtcaaagtatttagctgactcgccacactccacggaagcaatatgaaatgatctgctnnagtgctctgagccctaggattcatctttcttttcaccgtaggtggcctgactggcattgtattagcaaactcatcactagacatcgtactacacgacacgtactacgttgtagctcacttccactatgtcctatcaataggagctgtatttgccatcataggaggcttcattcactgatttcccctattctcaggctacaccctagaccaaacctacgccaaaatccatttcactatcatattcatcggcgtaaatctaactttcttcccacaacactttctcggnctatccggaatgccccgacgttactcggactaccncgatgcatacgccacatgaaacatcctatcatctgtaggctcattcatttctctaacagcagtaatattaataattttcatgatttgagaagccttcgctgtcgaagcgaaanagtcctaatagtagaagaaccctccataaacctggagtgactatantggatgcncccccatcctancacacattcgaagaacccgtatacntaanatctagaccnaannanggaaggaatcgaagcncccaangctggtttcaatgccaatgccctatggacctccatgactttgttcatgaacacaagagatctccatcagataacagcaagagtcgtgttggacggccccctttggccctggtcacaagctgcctcacacattggttttctggggggcggggccatactgcgttcctagaatggggctaatgctccgccgagaaagctgcggggtcccaaagatcaggtgtgga

SEQ ID NO: 615218 - DNA, 1210 bp, Homo sapiens
gcacgaggggctgtttcagttagggaccagttcagcagtggaggaagagcaacttcccgcaaatcagaaactcactgtgattccaaaaatgtttctgagccctggacccctgcccccaaaatattttcatctttcccccaaacctcctttaaaggagcatgcataacagtgtgctgaaagacagttgttggttttttgattttagcatattatttcctgtatgaaatatgttttatataatctcctattatttttatcttatgttttgtattgttgataaatcctttttgtccttctaagatgtcctattgtaaaatcacttataaggtatgattactctttatgctattactttatatgccatttggtaataaatagtaaattgttgatgatatgattgactgatgcgcagtccagagcatgtatgaataatctcataaaacagtatcacagacattaagctaaactgtttcgtttttttgaaagaacaactcatactttggaacagttgtcaatattaatttgttgcaaatatttaatttaaataaacatttttgtaccatgaaaaaaaaaaaaaaaaaaaaaaaaaaaaaaaaaaaaagaagaaaaaaaacaaaaaaaaaaaaagacgggggcgcgcgcgcgctagcacagaagtatactaccctacgacgaggcccccccagattatctcacgccaccccccaactttgctgttcgacgaagacggggcgccccataaaacgaggacgtcatgctatatacgacgaagcgctggacgacgaccgaggcgcgccgagcttataaccagcagcggaatgaggcggaacaacaaaagcgtgcgtcctacgcgtgcgagacataccttttgttaggaaaagaagcaacaccctattttcatctgtgctggtgggggggagcgaccacatcaatagtgtgggggcacaaaacttatctccacacagaacgagatatatatatagaagagcttctctcacagggggaatatacttatataacagaccattttgaggaagtggtcattcatacggtgcgtgtgtgcaaccaacaacgcgccgtgcaaataatgtagctattctgccatacacaacgaagaccgtattggggctcatatgctggctagttggtctatgttcgctggaagaaacctatttttttaccaccggcgatcttcttgtaagattaaacg

SEQ ID NO: 615219 - DNA, 1018 bp, Homo sapiens
  misc_feature (307)..(307): n is a, c, g, or t
  misc_feature (405)..(406): n is a, c, g, or t
  misc_feature (692)..(692): n is a, c, g, or t
  misc_feature (727)..(727): n is a, c, g, or t
  misc_feature (840)..(840): n is a, c, g, or t
  misc_feature (886)..(886): n is a, c, g, or t
  misc_feature (894)..(894): n is a, c, g, or t
  misc_feature (906)..(906): n is a, c, g, or t
  misc_feature (931)..(931): n is a, c, g, or t
  misc_feature (935)..(935): n is a, c, g, or t
aaacggcatcaacagcattcttcgaccccgacggagagatggagatcccatctctataacaaccaacttatactgatattcctcgagaacaacctgatatgtctatattcttatcctaccaggctgtcgtgtaataatcatctctcattatggtgacttacatactccggaggagaagaaccattggatacataggtatggtctgagctaggatatcaataggattctctagggcttgtatcggtgtgagacagcagcccactatatccacgagctatggaatatgacgtacacactgcgtagcatntttcacctccgctaacataatcatcgctatccccaccggcgtcaaagtatttagctgactcgccacactccacggaagcaatatgaaatgatctgctnnagtgctctgagccctaggattcatctttcttttcaccgtaggtggcctgactggcattgtattagcaaactcatcactagacatcgtactacacgacacgtactacgttgtagctcacttccactatgtcctatcaataggagctgtatttgccatcataggaggcttcattcactgatttcccctattctcaggctacaccctagaccaaacctacgccaaaatccatttcactatcatattcatcggcgtaaatctaactttcttcccacaacactttctcggnctatccggaatgccccgacgttactcggactaccncgatgcatacgccacatgaaacatcctatcatctgtaggctcattcatttctctaacagcagtaatattaataattttcatgatttgagaagccttcgctgtcgaagcgaaanagtcctaatagtagaagaaccctccataaacctggagtgactatantggatgcncccccatcctancacacattcgaagaacccgtatacntaanatctagacaataaaacaataaacaaaacaaaaagaaataaaacttttggggtccgtggcctgcaaggaagttttttgacaagt

SEQ ID NO: 615220 - DNA, 238 bp, Homo sapiens
cgcagaagaggaggaggatttcggtgaggaggccgaagaggaggcttaaggcagagcccccatcacctcaggtttctcagttcccttagccgtcttactcaattgcccctttcctctccctcagaatttgtgtttgctccctctatcttgttttttgttttttcttctggggggggtctagaacagtgcctggcacatagtaggcgctcaataaatacttttttttttaaaaaaaaaa

SEQ ID NO: 615221 - DNA, 1525 bp, Homo sapiens
ctatgtggcccaacctcccacgtcccacctccacctccatcgaggcggtggctaggacgacccccaaatcccgatcgtccgccctaggacaccgaagaccgccgcacaggagacgagagacgacagcgcatcctgcacaacaaccgcatgcctgcgagcctggctggggcaggggagccagcccccacagagcccccatactcgcctctgacggctggccaagaacctgaacttatgctggagcacggtggcactggactgcctgctgcctgctgctcatatccatgcattgctgcctctctccgtgactgcacccaaaccatgcgtgcgccttactagccaagcccccacaaagctgcgcaacagataccgtgtgcgtgtccacagcattgtgcccataacataacgaaactgcgcctcggtactcgcctcatctccacctgggccttggtcgccttcccaggcgcccactcccccgcatagcctggctgctaggccccgcgcggccgaaccggaaccggacacagcggcgccccgcacgcacagcactggccagggagtaccagaggcaggctaccaaacaatgcggactgggcctggcccgacccaatccccaacaactcacacctagcacacccagagacgagaactacgacgcgacccaggagaccggcgcactggccggaacgcggcgcgcgcccaccgaaacgcaaacacacatcaccgcgcccgttccccccggtcccgcccaacggcaccccccgaaccatgagatgctagcacacagggtaccagacccgaacaccgagcaaagcccagagaacgaccagaccgaaccctaccggcaagacacttgcgcccatacggaggccaccgtcggacctaggccgacgcgcgactaaacacgggggcccaaacgggccccacggcgccgcaggcgagcgcaaagggccaccccaagatcccgcgcccccaacacgcggcacgcgccacgcacagcgcccagacaacccgacggagaccgcacgacggcccccgaaggcggcccatcacgatatcgcaccacagagagcgacactaccggggaccggcaccattggacgacgatgggggccgcaccggcgcagccctaccagagcgacacaggcagcccaacagcccgaaagcaggccagagatgcaccgaaccaaccccgcaggcgcgacaaaacagagcatggggcacaaactcaggtctcggccggcgcaagatacgaagccaaggaagacacaccaacagcgcgaccgtaacaatatagcggagcacgcagtcgtaaacaggcagagcaacgcagccgcaccacgagacaaccccccctggcgccacagcacaacacccacaagtagcgtaagctcgacacagtatagcgcgtacgcacccacgcgagcacgacgtagggtcaccaccgcagagcacaacggggcagacaagcagcaggcaggacaccaactgccaacgataaagacgagagggcagagcagaccaa

SEQ ID NO: 615222 - DNA, 863 bp, Homo sapiens
  misc_feature (359)..(359): n is a, c, g, or t
  misc_feature (394)..(394): n is a, c, g, or t
  misc_feature (507)..(507): n is a, c, g, or t
  misc_feature (553)..(553): n is a, c, g, or t
  misc_feature (561)..(561): n is a, c, g, or t
  misc_feature (573)..(573): n is a, c, g, or t
  misc_feature (598)..(598): n is a, c, g, or t
  misc_feature (602)..(602): n is a, c, g, or t
  misc_feature (612)..(612): n is a, c, g, or t
  misc_feature (615)..(616): n is a, c, g, or t
  misc_feature (618)..(618): n is a, c, g, or t
  misc_feature (634)..(634): n is a, c, g, or t
  misc_feature (640)..(640): n is a, c, g, or t
tgtagttatcgaagctgagctcggacagcgcaccatcgagacgaatagtgaggatgctcttgtagtcgagctgtgaggcacttcagattctgtgcactgttctgcacgcgttaagaaggctgactggcattgtattagcaaactcatcactagacatcgtactacacgacacgtactacgttgtagctcacttccactatgtcctatcaataggagctgtatttgccatcataggaggcttcattcactgatttcccctattctcaggctacaccctagaccaaacctacgccaaaatccatttcactatcatattcatcggcgtaaatctaactttcttcccacaacactttctcggnctatccggaatgccccgacgttactcggactaccncgatgcatacgccacatgaaacatcctatcatctgtaggctcattcatttctctaacagcagtaatattaataattttcatgatttgagaagccttcgctgtcgaagcgaaanagtcctaatagtagaagaaccctccataaacctggagtgactatantggatgcncccccatcctancacacattcgaagaacccgtatacntaanatctagaccnaannanggaaggaatcgaagcncccaangctggtttcaatgccaatgccctatggacctccatgactttgttcatgaacacaagagatctccatcagataacagcaagagtcgtgttggacggccccctttggccctggtcacaagctgcctcacacattggttttctggggggcggggccatactgcgttcctagaatggggctaatgctccgccgagaaagctgcggggtcccaaagatcaggtgtgga

SEQ ID NO: 615223 - DNA, 543 bp, Homo sapiens
aaaaggggccagtgggccccccccaataaatgggggtgggcccccccttgggcccccccgggttttcccttttatttttccggttttttttttgtgggaatttgtaaggggaaaccattttcccccgggaaccatttttccccttttttcccccaggttgaaatttcccccccctaaaagggaaaaaaagtgggggccccccccggggggggcccctttaaaaaaaaggggtccccccgggggcaggaatttgggccaaaaccctttttccccccccctttgggttttcaggcctttttttttcccccttttttcttttaaaccccccccccccagtggaacccccccccccgggcccccccaaattttttccgggtcccttggccccggggtttaaaaaccattttcccaaagccaaaaccgttttttcccccagggggggggggaaaccaaaaaccttggcccctttttggttggggtaaaaaaatttaaaaggtttttaatttttttaattggggaaaaaaacctgggggaaatccccca

SEQ ID NO: 615224 - DNA, 280 bp, Homo sapiens
tgtagttatcgaagctgagctcggacagcgcaccatcgagacgaatagtgaggatgctcttgtagtcgagctgtgaggcacttcagattctgtgcactgttctgcacgcgttaagaaggctgactggcattgtattagcaaactcatcactagacatcgtactacacgacacgtactacgttggtaggacagcaaatgaaaacaatctttctgttcatatagttattatcaatgtatgggaacgttaaaagagacttgtttgacaatgcccgtctacaag

SEQ ID NO: 615225 - DNA, 332 bp, Homo sapiens
ttaaggtttgtgtgcatatgttttgatgaattttaactttttataataggtttgtgtatattttatggcagtaaatgataaaacagactaatctacatatattttatgtagtcatgacataaacctaactttttcttaactttttgatatttctagtctatgtgtttcatctgcaggttttttcaaattgttgaaatctctgaaaaattttattggaaaaaaaatccatatatgtaagtgggaccccacacatttcaaacctgtgttcagggggtcagcctgtggtaaataattttcccccaaattaaggtggggaaaggggggggttacct

SEQ ID NO: 615226 - DNA, 170 bp, Homo sapiens
  misc_feature (32)..(33): n is a, c, g, or t
  misc_feature (41)..(41): n is a, c, g, or t
  misc_feature (58)..(58): n is a, c, g, or t
  misc_feature (66)..(67): n is a, c, g, or t
  misc_feature (75)..(75): n is a, c, g, or t
  misc_feature (80)..(81): n is a, c, g, or t
  misc_feature (96)..(97): n is a, c, g, or t
cttcagccttgtactgtgtatatatattattnnccccccanagttttgtatgtttttnttactttnnctattgtnataanncgcctgccatttttnntatgtggtttgggggatttttgtttgtttttcctgtttgggggttttgtttgttgttttggttttttttgggc

SEQ ID NO: 615227 - DNA, 249 bp, Homo sapiens
  misc_feature (14)..(14): n is a, c, g, or t
ataggatacacttntagcgagcgtctcgtcttaattcataagtaagcaccagaaattatttatatttggtgctgtttgtcgtgtaaattagatccccttgtcctttgatcaatagtaatgttgagtttatgaaaatgataaaatggaggacacatgagacaaggattttttaaagtagttgagagatattatattgtattgaaatatacaatataatcctatttgacatttatttgtcttgtatttgct

SEQ ID NO: 615228 - DNA, 146 bp, Homo sapiens
gttattatgaaggatgcctccaaaatgggacccatgggtaacgcaccttagtccacacattagctatcatatactggatgtctccaatatcaattgtcttcccagatatcccaagctatgtggacaagcatctcagggctctgacc

SEQ ID NO: 615229 - DNA, 147 bp, Homo sapiens
ccgcaatacctactcgtaaatcataggcagaaggtgctacggatactacacctgcaaaggcacaagggtacatagaccatataggcaattcagagcgggttgcccggttgtcctcagaaggcggcttgtttcccaagcctttccctt

SEQ ID NO: 615230 - DNA, 162 bp, Homo sapiens
cacagtcagtgcttgaggtcactggctactattgttacttgaactagcagagatatgatcatacagatgatagatcttccatcagtctgagccatctcagcactgagcctactcagtctacctagtgtcactgcaagataaagccattaagcaaacttaaat

SEQ ID NO: 615231 - DNA, 391 bp, Homo sapiens
gttcgaggcaggcgacacctgaggtcgggaagtggatcgcctgaggtcaggagttcgagaccagcctggccaacatggcgaaaccccgtcgctactaaaaatacaaaaattagccaggtgtggtggcatgtgcctgtaatcccagctatttgggaggctgaggcaggagaatcgcctaaacccaggaggtggaggttgtagtgagccaagattgcaccgctgtgctccagcctgggcaacagagtgagactcttgtctcggaaaaaacaaaaaaacagggctgggcccgggggctcgggcttttattcccggcatttggggaggctgaggcaattggatcgccagagttggggatttcgagaccagcctggccagattggtgaacccctgt

SEQ ID NO: 615232 - DNA, 159 bp, Homo sapiens
cagtggttcacacctgtaaacccaacactatgcaaagatatcctccaaactatttttcacgagtatctaccctatgtgtacttgggtttacatagtcaacctaaattctataaggaacaaaaaaacgcttaggcttaagaagatgtttctagcccggtg

SEQ ID NO: 615233 - DNA, 482 bp, Homo sapiens
tgggagacgggggtctcaccatgtggcccaggtcatcttgaactcttgagctctagcaatctccagcctcagtcccccaaagggcggggagtacagtggtgagccaccaggccgggcctactcagggcattttagtattctgtcactctttgggcaattaatggtgaactacctacctacggacccacattagggtattatcttacttcacggtatttaatttttgggtactggcacacactttctagcccaggcctctcctatagtaggcaatcctaagggtgattgattgtaaacatgtaactaatagtattttaaaactccaaaggcggacggggagtggagtagttacttttaattggaaagcaggtatttggcatgttattggacaggactatggtgattttatgtccagaagatcatagtgtggggtgggtggtttaaaaacttttatttttggagacagagcgagactcggtctc

SEQ ID NO: 615234 - DNA, 402 bp, Homo sapiens
  misc_feature (4)..(4): n is a, c, g, or t
  misc_feature (86)..(86): n is a, c, g, or t
  misc_feature (108)..(108): n is a, c, g, or t
ttancaggatttaagtctgaaagacacagtgtagaaaccccagaccaggaagtattcccatcccacccatgcctatggagacattncttgactgtgacttctgcaggnagcccactgaagtgtctagactgggttcagtcaaaatcaaatttgcgccgggcacggtggctcatgcctgtaatcccagcactttgggaggccgaggcgggcggatcatgaggtcaggagatcgagaccatcctggctaacacggtgaaacgccgtctctactaaaaatacaaaaaatgagccgggcatggtggcgggcgcctgtcgtcccagctactggggaggctgaggcaggagaatggggtgagcttgcagtgagcagagattgcaccactgcactccagcctgggcgac

SEQ ID NO: 615235 - DNA, 109 bp, Homo sapiens
acaaagccttcccctctgcgcgctgtcgattccagtaggaattctgactgttccttttataaaacagaagagggcgcccgccattaaaaaaataaaatacaggctgggc

SEQ ID NO: 615236 - DNA, 406 bp, Homo sapiens
agaggctgaggcaggattgaggccaggcattccagatcagcctgggcagcatagcaagaccccatctctacaaaaaaaaacccaaaactagatggatgtggtgcacagctacttggaaggttgaagtgggaggatcctttgagcccaggagtttgaggttacagtgagctatgattgcaccactgcatttccagcctaagccacagaatgagaccctgtctctataataaaagtttttaattagccaggtgtggtggtgcgtgcctgtagtcctagctgcttgggaggctcaggcaggaggatggctggaacccaggaggtcgaggctgcagtgagccattattgttccactgcactccagcctgggtgacagagcgagaccctgtctcaacaaacaaaacaaaaa

SEQ ID NO: 615237 - DNA, 119 bp, Homo sapiens
tggtagtcccacacctacacctggtagtcccacacctgcacctgggagtcccacacctagtcccacacctgcacctggcccagcccttagagccaatccttatccctgaggttacggat

SEQ ID NO: 615238 - DNA, 851 bp, Homo sapiens
tagtaagcctgtgttaatcggacgaggcttagatgagagatggtctccccaggaggaagggagtggtctggtggttggcacccactagatgagcatggtcagaaaaatatcaggatgagcaacttctttatctaggaccgtggcgttgggggtgccgtgtgcacatggtctgccagtggcgacggatgctgcagctggtagcgcccacgagcacccgctgtgcgtgtctgtgcctccaccgtgggaagcggctacccgaagaagcctcggattgctgcgtctacaccgtgtcaacggaagggagtggcatagtctgactccttgtggagcgaagcctggggagaggcctgccctcaccgcgctcagcatcagccactcacctcgtactggtcggcagttgcgcaatgaatacgatctggctctgtgtcgctggcactaggatttctacatggtcctcgaaactgatctaccaagcacgacctccgtacagcttggaggcaggccacggatgcaagctggcatgggtgcagaatctggaggctggcggtatccgtgcgagcgggatgtccagctgtagtacagcaggatggcagggcgcccaactagttgggcttaccaagattccattagccagaggaattggttgtcttatccctagtgctcgggccatgacctcaagcgccaatcgcgagcgggaactcggaatacgagggctcctgaggaagaagaccgggacgtgccaactctcagggcccacagatagatcaccgaagctcgcggacctactacaacgaagggagaagggcagcaggacacgctaccagcagccaggaaaggggccccggtaaggc

SEQ ID NO: 615239 - DNA, 876 bp, Homo sapiens
  misc_feature (861)..(861): n is a, c, g, or t
gaggagtttagaaacctcagagctgtcaaaggcccatataccgtaaccgggaatatccaggcgttcttgcacatgcccgaacttgctgtcgataccgtttacactcccccattcatttaagtacggcgtgatgcagctacatttcacgcatttcaggaggattgttgaaaaaacagctgcagagtaatctgggaaaacgtgctaagtacaataatgtagatctaaggaatttagtaaagtttaaatgccatgttgaaattgttgcattatgtctgggtagtatatacccaaatgggtgtatcatctgaagaccaacttgttctagagaatgcctgatggagctctgccatttaggacttgaattcttcaaagtctatgttattaatgaaatttatctaaatggcagcagtctatttgatgtcagctcatagacatgtacaaattgatgaatcgctgttttcttatgaaacaatattgtcacagtgtagttgatacattgctattagttgtccccgtgttcccgttttctcctgtatactgtgtaaaatgttggaaactacttttccagaaggcattatttatgcctccctaataaggtattgttacttatgacagatgaaaaggaaccaggatattgtatgaatttgttcactttcttagtgtgtgaacaagaagtagaaatatcactagtgtggtataggacgttacatgttttttatgatgaaaataattctcaatgccacttgaaaggtaaattagtgtactgagagctgcaatttttcaaccacaaaactgtcacttattcctacaggctatacagaaggtctttatggttttttgtctttgacttaatagcacgcngggaactgcctaacc

SEQ ID NO: 615240 - DNA, 159 bp, Homo sapiens
tagcaggactaccctatacttctgcatatgattactagaatacttgcaggagagccaagctaagaccccgaaccaggcgggctacctaggacagctaaagggcacaccctctatatggcaaatagtggggagattttaggtagaggcgacaaacctccg

SEQ ID NO: 615241 - DNA, 635 bp, Homo sapiens
  misc_feature (261)..(261): n is a, c, g, or t
acctgttaaccctttcgaccccccccttgtgtggggcggcggcccgctagggccactggaggtgtcatggaagcccccctagttggcaagcccacacctggtgcagtccactagcgtggtgatctgcttggacaaaacagttgcacaatacaatctttcgagaagttcagccccctttgtaactgagaacgccccacaatagctcacacctgtgcgggagtatattgctcgccccaccacaagagacatgttttgtcaaanaatcgcacgttcttttgtgcttctgcgcacctgtctgtgtagggaccagaagctccgctgagaatagatagagaaagatggtttgcttcaagacgcccgcgtgtgaatctgcgtgggtgtgacatcactcccctcccctgcgcccagtggcagtttcattctagctatcttttattatccatgcccacccctatttaattgtgtggccgcttttgcacccagattgagcgagttaatccatataattgtcaggtactagtttgttattcagaacacggaggcggggaatatatgttgtggcaatatttttgttgtccccagtaaaacaagaaaacagaggaacagtcccacaaaaaacaatagaacacagaaaa

SEQ ID NO: 615242 - DNA, 146 bp, Homo sapiens
aaagagttgtaaaattttaaagtgtaacaatttgagaaggggttttatatgttgttgataatttagtaaaataggagagaaattttaagtttttctgattgcttttatgtgatttatctgtatactttgttattaatataaataaa

SEQ ID NO: 615243 - DNA, 147 bp, Homo sapiens
tctggtgacctgaaagcagtattgacctgctgatctgatgtatatcgctgcaactggtgcctggactttccctgactggaacctgcgcatcttggggctgaagtgccccgagctgcggtgctgctggagtgaacagtgtctgcgcgc

SEQ ID NO: 615244 - DNA, 270 bp, Homo sapiens
attcagcaccccagcctcctgcagtccacactccacacggcagcccgagggacccttcagaggcctacgcgcctctgctcggaactgtgcggactgcctccctctcagaaggcgcagcccgcacccggcctcactctgcactcagcgccttgcgagcgagcttcaggtccgagagggtcccttgttcccgaaggtctccccgaccccggggccgcctttttggaggttgtgaggacccacgggcctgcacgaagtgagcgctgtgtaaaa

SEQ ID NO: 615245 - DNA, 328 bp, Homo sapiens
gcgtcggataagtgctggagcaggaggttgtgcgcagctgtggcgcgagtaagggggcattctaggcagagggagcagaatgaacaaagcccttcccgaaggagagtccgaactagtctcaggcttcaacatcgaatacgccgccggccctttcgccctattcttcatagccgaatacacaaacattattataataaacaccctcagcactacaatcttcctaggaacaacatatgacgcattctcccctgaactctaaacaacatatatggtcaccaagaccctatttctaacctccctgttcttatgaattcgaacagattacccc

SEQ ID NO: 615246 - DNA, 289 bp, Homo sapiens
gagcctgatccatgcttcggcggccggtggcagctctagatcagctctcgcagtctgagaggcggctaaggaaaggtgccacaccggagacgcgaaggagaggcccttaaaccttttctaagaagaatggaagaaaccatgaagcttgctccgatggaagacacagcggagttctgcctgttcctgataccagatgagttatgggactcacataaactttatgagagtcttcttaagttcatcgagagaatattcactctgtttgctcctatgctggtcccctacatca

SEQ ID NO: 615247 - DNA, 140 bp, Homo sapiens
tttgatgcgtctccttatagatccacactaacaaaagtcaagatagaaggtgagcctgcattcatactgacttaatatgaaggtggtacaataactgaagtgatccactgggagagcgcccttattataaaaatacacca

SEQ ID NO: 615248 - DNA, 573 bp, Homo sapiens
ttgagaatgccggggaagccaatatgtaacctaatatttgcctacctggccaaagcgtaattccggcaactcaccttagccgacgtccagcctattaaacgccctttcgaacaaagggcctctctaagaggtgttcactcccctgggagagcgcgtttgagaaggtcatctttctcaccgtagtcccctgcgtaatacgtcgtgcagctcacctccctccgtcaagtaagtccccctggggaacactctgcataggtctaggaccacccgatgtgtgcagtagctaagaatctgtatgtgctgccctacagtggttctgacacagatctatttcgccgcgcccgaaatatggcgggtaggagaatactgttctccgcccagtaccacaggggggggcagcgcccccgccggctccatggacaaaccatgacagcctgtcgttcactaccgcggtgaatgacccccctctgtttgtgtaaaataccacctcactgccccccattgtccgagttagttatcctattgttgcaccccggcgacgatctttccgggtgttttccccccaacaagaca

SEQ ID NO: 615249 - DNA, 1073 bp, Homo sapiens
  misc_feature (731)..(731): n is a, c, g, or t
cactcctattgttctggcatagctgtcgcgtggtgtaatctatcttgcagagctctgtgattgcgactgactagatctgaacatgtctgtcagagaacatgctatctgttgagcacctctgaacccctaaacctttgaggagatgtccactaggcttgcggattagtcgctcatagaatcgccgctcagcgtatctatataggagtagtctaagacgtgcgtcttgagactatcgcatggaaacctagtggtggctgtacgtgtcttgctatgatcccgtcttatgactttctagccattttgtagtgccaccacaggaggattccttagcgtatatccagtcgatacgtggcgccaagaaataaatttaactaaaatatcagtacatgccaaatcctgaatttgggaagtctgctgctcgcgaatttctcagcgtctcgtgttcatcatatgctatgtgcatcatactatctacctagaccaacattagatgcgcagaatctcgggtaccccattgcattagacatacactattggtattccaagagcctctgaagcagcatcgcaatttgtctgcaggcattgtatggtggtcgttatacagcgctgagtgaatgcgcatactacgtttcagcgaggaccctgatgtatgcaccttgattcgactgtagagggtcatgccgttctctgcgccgagatacaccgtgctgagactagaccatcggcgctgnattagcggccagtctctctgtatgcgaatgaaagaactttgaagacctaagttcaagggcctttccagttttcgactgaccaagaccattgcgggaaagttggtgcccaagacatggctgggaaaaccctgcgcagctgcatacccatcaaggccctgatggtccagaaaagagcaaacgaaatatttctcccacagcagaagtgaaacgctggggctgttttagtgccaagcatgcggtggggcgagacatgagaacaaaacctcttctggcatttgtttccccaattagtaaacgccaagaaattcaaaattcagccgaattgtggtggtttaaatgccg

SEQ ID NO: 615250 - DNA, 517 bp, Homo sapiens
agactgttaagagtgccaatcacgtgtaagcacagccgcgtttacagtaacaaacattcagaccatagcattgagcaacttgtaaagaactattaaaagtgtgcgcggccaggcgtagtggctcatgcctttaatcccagcacttggggaggccgaggtgggcagatcacctgaggtcaggagttcgagaccagtctgaccagcatggtgaaaccccgtctctactaaaaatataaaaattagtggggcgtgatggcaggtgcctgtaatcccagctactccagaggttgaagcaggagaagggctggaactcgagaggcagaggttacagtgagtggagattgcacccatttcactccagcctgagtgatagagcaagactccatctcaaaaaaaaaaaaggtgtgtgcggcaggtgggattgtgggagtaaacctaagggatgggtgtcatagcatcgcatagggccatttatcgaggttgacacttggatttctgggctgaggaggtcaggaag

SEQ ID NO: 615251 - DNA, 236 bp, Homo sapiens
cgtcgactggagggcggcagagaagagcagacaaaaatgtgtgtgtcgaggcaacagacagacacagggacaagcaggatgacagaaagccatgggggctgtcggtggggggagcagagaggcaggtaagaccctgtggggtctgcagtcagagatggagaggaagaaatggggagaggaagagcctggacccgaaagcacaaaaaaaaaaaagtcgtatcgatgtcggtcgacgc

SEQ ID NO: 615252 - DNA, 886 bp, Homo sapiens
ggacgcgtgggtcggcgttcaatgtcatcacatggcggtatctcatggctggcaacgaagtcgtggccactgcaggttcagtgagtccatcccagctcggatgcaggcaaacgttcaggggaagccagtgcgcagttggatgcagagggtattacacacgaatccgtcaagaagtgtcactcaagggacgagatatgggaaaggactgctcagccaaatggtggggggattgacacggcgaggttggactcccaagcatcctggacgaagtaataggaactggcctggtacgcgtgctgacacgaccttgtctactttgggacacacgcttgtggctatcaactggtataacggtaggtacatcgtgacatgcgaccgctagtcggtactccgtagcttcgttactagaggtcttggggaaggtatgacctggacttcaagtctcccgatgaccgccagataggtacatcgtcggcctggacctagcgtggctgaccgtgtacaaagtccttcatcaatggactacgccaggtggtgtcgtatcgaaggatcccgatttgaccgagggatgactgggggacgcttggcatgaagttcacagctcagttgcacggagatccatggtagatggtgaggactgagtctcaacaagatgagcaagggcccggagaggatcgccaaggccggtgaacgaggaagatcctgggaactggtgctagctgagtcagaagatcactcagacttggtgtccggaggaccgaagatctcatacgaggagcgtgcgaagcagggacccagggcctcatggttggcgggcgtaaagggaggtcgtcatggtccggggggacgacggaaaaaagccttcatcggtgaacgggtagagggc

SEQ ID NO: 615253 - DNA, 277 bp, Homo sapiens
  misc_feature (20)..(20): n is a, c, g, or t
ctccacccgacggggtggantggcagtaagctgagatcacgccactgcactccagcctggtgacagagtaagactccatctcaaaaaaaaaaaaagaaaagaaaagaaaaaagaaagaaaattgcaagtattagccaggggtggtgtcgggtacctataatcccagatactcaggaatctgaggcaggagaagggcttgaaactgggaggtggaggtggcagtaagctgagatcacgccactgcaatctccaccccgtggggtggagcgggtaccga

SEQ ID NO: 615254 - DNA, 1278 bp, Homo sapiens
  misc_feature (1173)..(1173): n is a, c, g, or t
  misc_feature (1178)..(1178): n is a, c, g, or t
  misc_feature (1180)..(1180): n is a, c, g, or t
  misc_feature (1230)..(1230): n is a, c, g, or t
  misc_feature (1237)..(1237): n is a, c, g, or t
  misc_feature (1246)..(1246): n is a, c, g, or t
  misc_feature (1275)..(1275): n is a, c, g, or t
tgtacgtctcttttgtgctctgtttttgttagttgcttgtgtcagcctccctgtctgggggtgcttctcacgagtttctgcgcccatctttgttttacaacccactggttgatgttgggctctcttattcttcgtttcatgtactctcctgttgacctgtgaccccatttgacgggtcttggtataaaaataggggcctttatcttgtgaggtttttcctgcgtttgtccagcttttcgccggggattcccccctgttcggggcctacatctgtgggaagcactttgtcatatagggctctccttttttttaaaggggcccaccaaccctagtagctgtaggggtcgtgagaaataacatttggagagtatattgtcgacagtaaaaccggtgttctttcgctgtttatcttggggtgtaaacaagaagtaggcttttaccaccgtttaaaaatggggaacaagtttgtgcgccccctggggttttgctacagtattccctggcggtgaatttcttctgttaatatgtgagaccccacaatagggtgcaatacactggaaaaggctttttaaaaaagcggaagggtgggcccacagtgtttatagctgtcgtgggttaaaaggcccacgggggccctcttcccaaccccgctggttgccacctgagcattttgctctttgtgggaacccctgggggccaagatgtccactgttgaaactcgataataggggggccctcccagagttttgccctttctcgtgtgaaagataggggggcataaattaaataactgggaccttaacctcccaaagggcccgtgtttgaaggcacttgactataatgctttttatgagaagcacattttgggaatccttcagcaccacggaaattttcaaagacctgagtatttttttaaaaataaggaaatgtcccccactgagaacttgataacgtccgtgtgtcccacgaatgctgtcacttagtctataatggttttcccaagagaactgagaatgaaatcccattggaggaagccggtggaataaactatgccacgagcacaaaatttgaggaaatacattaaccacgcattgccccgggaacataccgaggatgccttttctgtgattgggtgggattttttccccttttatgtgggaaatagtagttacntgtgncnagaataattttggaataatttctattaatatccactctgaagctaattgnactaatntgagattgngtttgttcataataaaagtgaagtgaatntga

SEQ ID NO: 615255 - DNA, 203 bp, Homo sapiens
ggagcagcagcctaagggtcatgggtgggcaggaggctagaggagggagctggggagagcaccaggcgggctatcaggccagtgctggaaagtgtggcacaaggggtctctcagctagctgctctgctgctcctgctcatggatgagttatggcgatggggccggtgatagccgcgctatcaaggtcccgtactcatacgaag

SEQ ID NO: 615256 - DNA, 1089 bp, Homo sapiens
gctttatactcgcgcgcgttgcgggtccacaggatggcgcgtgggtggcttctgtgcgacgcttgccggcgcgcgttctgctccgtgcgggggcccggatcgcggtggcgcggacacctcggtggggtgagcgagagctgggggcagaggcgagtgagcgagatgactgggctgacgcgtggcgtgacttcagagagaagaccatggcaggggtagcctggggtgtgatgcctggagcgacggggcgctgaggggatccgacatgtgattgacgattgcaagaaaccacctagtgaacaagcctgaggcctggagttgctgagacggggtgctggtgcatttagctgctggcaagaaagacatggaagaaagtgagcaacgaggctgtctgtggatggtggatttctgagcgtcggggaccggcacgtggatgtcgttcttggggaacgagagatgagaagctggatggatgagtgtgctgggagggacgtcaccggtcgatgtagtgttgggtgtaatttgcgaagaagccggttcgaggatctgtggggcttgctgggtgtaccatggtcgggcctgggatgtatgcgatctcacgtcaatacaacaggacgtgctgccccagctgggacggctggcatggttggcactgaacatgtgacctacccgcatcctgtgctggacaactcaccaggtaactgcctaggactcaagtgagaacccaagctggggcatatcaggccgctttcttggtttgaacagaccgccttgtgaggaacagccatcgggcaccgggggtggggtgactgtggccatagaagtaggggcgttggctaccagacgggggaagggcctgaaggggggatttggtgcaagtgggcccggggaacaggtcagacatgttggttacgaaaccagggtggtgaatcaaccactggagtgtagaatgaattaggaagcagtcggttctaaaggggtgagaaggacttaaactaacgtgttgtaaaaaagggggtttgttctgttgtattagtaattactttttttaagatagtaagaagataatagagagatagagacaagagaaga

SEQ ID NO: 615257 - DNA, 954 bp, Homo sapiens
acagaagatgaccttggagggaaaaaaaatattttttaaaaaaaagattatactgggtggaaggggggagaattcccattaacttaacttgctgaggagggaccgtgcttgggggagtaggggaaggcccagggagttggggcagggggctgcttatttcactcgtggggatttcgccagtggacacgttcttcaacttgggcaagctgctgcccatgtgttttccctgtgccccactttcacccccttgggggctgctcaggggtagggtgggcgtgggtggtaggaggttttttttttacccagggctcttgggaagggacaccaaactggtgtctggctggttacctttccctccggtcttcttccttcggcctttcacaggtccccttccttggcctgggtcctggtccaagccagggtcttaccgacccagcgcccacccgctctttcttcgcgggtgtcccgtggccgccttccagaattggccgtgggtgaactcatattgtgggttccccttttgtggtgtttgcattgttccgtggtttggcaggtgctctataacattgggcagggagttacacatggtagcgccggagaaaaatttctcacagatatcccagataccacaagcggggcatccaacggtggtaaaactttcgcccttatcaccccctgggggggacactttgcacgataaccattgggaaatcaggggagggggggacacacaggcggggctgctcaccgcggttctcttctcaccaacgctgcgcttctgcggtctcagtcgctgggttcacattgtttctccttcccatatcgtgtggccctttttttgtccccccgtatactacttcgtggcgcacgcgcgacatgtggtgtcagtatcaatccgtggtgcctacacaggctgcgctggtgtggtcagcgtgctgcactttcgggcacaat

SEQ ID NO: 615258 - DNA, 136 bp, Homo sapiens
gattcgtgtagtgcttcacgtggcatagtcacggacttgccgtctagggcactagtagtaggtcggcaggtcagctagggagctcgtggtgtacaggtccccggaggcatcctggctaggtggaagtatcaggcgg

SEQ ID NO: 615259 - DNA, 119 bp, Homo sapiens
cagagtcaaacagtgcctgattattttctatcctaatgtttcatttggctgcttttccaagttattctggatggttactggaccccaagattacctagccaactgtcagttttgagggg

SEQ ID NO: 615260 - DNA, 466 bp, Homo sapiens
tgcgccccgaaaaaaaaaacagggggttttttcttttttttaccggcccatggtggtaaatgcaacggggccgaagccttaggacaagcagtagagatgaccccgctcctcgttttatatgcgcgttattttatgggtattgggatccttactaaactaacgatgctattccccccatcatctctcccttggatactggttggctgttctcaaccccgtttcggactctcaccaagcccgggccgccaggcctgtccttcaccgtgaggtccagtagaggcccttcggtcgggcactaccttttgtcctccctatctttcttttcgcctgtcctccatagtctctatcgtgtcacgtataattctgtttggccagcccccgccccaagcatgttcttccccaagtatcttgctgtggagctcccccttttgtggcgtaacattccatcaaacctcgattcttcagg

SEQ ID NO: 615261 - DNA, 120 bp, Homo sapiens
  misc_feature (7)..(7): n is a, c, g, or t
gatcganaccaaccgcctgcaggaggctctgaacctcttcaagagcatctggaacaacagggggtgggtctggttgtcctcccggatgaccatgttgtagctgctgctggccaccacgaa

SEQ ID NO: 615262 - DNA, 122 bp, Homo sapiens
  misc_feature (7)..(7): n is a, c, g, or t
gatcganaccaaccgcctgcaggaggctctgaacctcttcaagagcatctggaacaacagatggctgcgcaccatctctgtgatccttgtttccttcaacaaggcaagattcttgcttcggc

SEQ ID NO: 615263 - DNA, 109 bp, Homo sapiens
tgaggacacggctgtctatacgtgcgaggtcggctagcagctcgtcccactgggtttccgcagaaatatattactactactacatggacgtctggggcaaagggaccac

SEQ ID NO: 615264 - DNA, 262 bp, Homo sapiens
  misc_feature (13)..(13): n is a, c, g, or t
  misc_feature (39)..(39): n is a, c, g, or t
ttcaggtaactangtgctacatgagcatgccatctctcnctgttgttcttaaagaaactgactgtcgaggggatctaaaacataccctacatggactgttgcagactgccttgatccatagttgtgtggtactttaccaccgaattgtcactagtgactttagagaaactccagaagagctgcttggctttcagcaagaggcctagcaaagaccatggcatgaggtctccatgagggacagccgtgtgttaggtctacctgg

SEQ ID NO: 615265 - DNA, 251 bp, Homo sapiens
ctatgttctcgaatcgttagaccacatgaaatgagcttctttgctcagccggtggctgtgggcatggtcagtacttcctcaggccaaaaaaaaaaaaaaaaaacctatggatttagggaaaaacattgagttaacaaaaaacaaagagcaccagggtaaggctaattttggataagcaatttccttattttccttttttcaggaagcggcttcaaccagaagaacccgtgccacgtgctcaggattgtctt

SEQ ID NO: 615266 - DNA, 150 bp, Homo sapiens
  misc_feature (108)..(108): n is a, c, g, or t
catagagacaagcttggagaaagagatgacactatcccacctgaatacagtcatcacctggcatgatattggtcaggccaatccagctggagccacctacatagcaantcagcaggctttcaaagcttcctttcagcatgcaccaagcat

SEQ ID NO: 615267 - DNA, 179 bp, Homo sapiens
ccagtcactcgctaagagttatgacatagttctacctttctgcactcactcctaagagttatgacatagttctaccttccccactcactcctaagagttatgacatagttctacctttctcactcactcctaagagtttgtgacagtagttcgtaccttccacactcactcctaagagg

SEQ ID NO: 615268 - DNA, 1144 bp, Homo sapiens
  misc_feature (1087)..(1087): n is a, c, g, or t
gagctgcggcttcccggcgctcgtggaatctgcgtggagccctttactccactcagcgagcctgagagtgcggaagtctccggctggtggggcatggacgaggagcagtagtgatgatgcgggggtgctggttgcgtgagacaggacagccgggaccagcgaagtcaagacttccacagtttggaagcacgtggtgatcgggcgtgggccaggagaccaatgatcagctgtataaggaaatgttctccgaaagcaagtcacagtgttgaacagcagagtgtaatgaacgggatcatgtcacgggtacacagccaggagtgtgcaggacagcggctaagaacccgtgggcctggagacgagcacaggcaaggcagcccagagatcaggcaacacgtgattctatagcaaagggggactgctggactcagggaaggcatcgacggactggggatcatggggcctgggaaacacatgggggaagcaaacctccttgagtcccacattgacgtacataggtggccaccctcagtaggaacggggacacacactgattgtccacactactacaagaacacacggggaaagtccccctttgtggggaccacaaccgtgggcacgcttccaaatggaggacacttgggacgacgcaagcttcatccctaacgtcgtccaacagtggaagcccgccccgagaagaaacacttaggccaccggaggtgttaacccaaggaagggcaacctagaatagcccaacagagttgggggatgggaggtggaacgtaccaccccgtgggggaatacaccaactatacagcaccccgacaatgaggaggtcgcccccaggaggatgtaacagcccaaaagtaaggaaggagcagtcagcacggatgtcccttattgaaagcccccgtcctgggcgagcaaaccacatatcaccaaatgtgtacatagcccaaacagcacatccctcgggaatgagagcaggacactggcggtatggacggtccacaagggcggggagcaagcgcaacccgccagtgttggggacacgcacagtgcgccgcatcttgaacagcgacccaccgcnttacaggtgtggcacagccaaccacgatgggacgggacgaagaggcgtaaacaacaa

SEQ ID NO: 615269 - DNA, 278 bp, Homo sapiens
  misc_feature (51)..(51): n is a, c, g, or t
  misc_feature (88)..(88): n is a, c, g, or t
  misc_feature (121)..(121): n is a, c, g, or t
  misc_feature (133)..(133): n is a, c, g, or t
  misc_feature (160)..(160): n is a, c, g, or t
  misc_feature (207)..(207): n is a, c, g, or t
atcccttatacactattgggcattgcaaattaggtacaacccattttgggnaacaatatgggaggtttctcaaaaaactaaaactagnattaccatatgttccagcaatcccatttatagntatatacccaanggaattgaaatcagtatatcaaacagntgtccatgctgccatgttcattgcagcattatgtacaatagccaagntgcagaaataacctaagtgcccatcagtgaatgaatggtttttttaagtatgccatatatacacaatggaa

SEQ ID NO: 615270 - DNA, 1834 bp, Homo sapiens
ccagacctggtccctgctgtgctctcccgttggatctctgacatggaggaaatgctgtccttctgggatgtggccattgatttttctccagaagagaaagaatgcctggaccctgctcagtgggatctgtacagggatgtgatgctggagaatttcagccaccttgatttcctgggtcttgctgttgctaaaccatacttggtaacatttctggagcaaaaccaagggtcttcgggtgtgaaaagccaaacatcagccaccattcctccaggaacaacaggcaatgaatttaacaatcacaatgaggccattgatcacagctctctaagtatgcaatgccagagaattcatacaggagaggaaccctactactttgaagactgtggtaaggcccttagttctcaggcaacactttctgtactccagggacattttattggagacaaaccctacaagtgtagagaatgtcataaaacacttagcagtcgctcatcacttttaatacaccagaaatatcatactgatgaaaaaacctacaagtgtgaaaaatgtggcaaagggtttttccgttcctcagatcttcagcatcatcaaaaaattcatactggagagaaaccatacaaatgtgaagagtgtgacaaagcctttcttcatcactcatatcttaggaaacaccaggcagttcatactggagagaaaccctacaagtgtgaagagtgtggaaattcattttactatcctgcaatgctgaagcaacatcaaagaattcattctggagagaaacttgacaagtgtgaagaatgtgggaaagtattttcctctgctttctttcttaaccagcataaaggaattgattccggagagaaaaggtacaagtgtcaagaatgtggcaaatccttttgctatcgttcatatcttagggaacattatagaatgcattctggagaatatccctacaagtgcgaagaatgtggcaaagggttttcccgttcctcaaagcttcaggaacatcaaacaattcatactggagttaaaccttacaagtgtgaagagtgtgggaaatgtttttcctcttttacgtcccttaaaagacatcaaatcatccattctgaagatactccccatgagtgtgtagaatgcggcaaaaggttttctagttcttcccgccttcaggaacatcagaaaattcacactgaagagaaaccatacaaatgtgaggaatgtgacaaagcctttctttatcactcgtttcttaggagacacaaagcagttcatactagagagaaaccctacatgtgtgaaaagtgtaggaaatgtttttcttcctttacatccctgaaaagacatcaaatccattccatagacatttcccatgagtgtgtataatgtggcaaaagattttctagttcttcccacctacaggaacatctagaaattcatactggagaaatcatacaaatatgaagactgtcacaaagcctttctttatcattcatttcttaggagacttgaggcagttcacagagagaaaccatacaagtgtgaagagtatgggaaatgtctgttcttttcttcaacccttaaaagacatcaaataattcattatgaagtcagtctctacaagtgtggggaatgtttaaagctccttgtatgctgtccactcttaagaaacacaaatttgttcattttggagaggaacatacaagtgtgaccaatgtcagaaagccttgtcttttgtaatacttctctatttgagcacaagctaagtcatactggagtgaaattttcctagtttgaagaatataccaaaatattttactctaatttataactg

SEQ ID NO: 615271 - DNA, 195 bp, Homo sapiens
aaacattttatcaaaggcctatctcattctgcttagccctatcttaggattctccacaaaatcaagcttaggaggcctttaggtttaccttttccaggtacttcctcttagcgagaaggacggaggaaacaaggtaaggtgcgtagaattgggctattgattcaacttgtatggaatagaggtgtggaagcgcac

SEQ ID NO: 615272 - DNA, 722 bp, Homo sapiens
  misc_feature (135)..(135): n is a, c, g, or t
  misc_feature (364)..(364): n is a, c, g, or t
  misc_feature (377)..(377): n is a, c, g, or t
  misc_feature (393)..(393): n is a, c, g, or t
  misc_feature (401)..(401): n is a, c, g, or t
  misc_feature (428)..(428): n is a, c, g, or t
  misc_feature (431)..(431): n is a, c, g, or t
  misc_feature (445)..(445): n is a, c, g, or t
  misc_feature (449)..(449): n is a, c, g, or t
  misc_feature (498)..(498): n is a, c, g, or t
  misc_feature (500)..(500): n is a, c, g, or t
  misc_feature (548)..(548): n is a, c, g, or t
  misc_feature (552)..(552): n is a, c, g, or t
  misc_feature (606)..(606): n is a, c, g, or t
  misc_feature (617)..(617): n is a, c, g, or t
  misc_feature (628)..(628): n is a, c, g, or t
  misc_feature (630)..(630): n is a, c, g, or t
  misc_feature (660)..(660): n is a, c, g, or t
  misc_feature (672)..(672): n is a, c, g, or t
  misc_feature (680)..(680): n is a, c, g, or t
  misc_feature (719)..(719): n is a, c, g, or t
tgtgctccaccgtgacctgagcacctctcctgctactatgtgttgccctggtgctgcttgggcatgtgaatggagccacagtaagaaatgaggacaaatggaagccactcaacaaccccagaaacagagatctgnttttcagaaggcttcaggcatattttaagggcagaggtcttgatcttggaacatttccaaatcctttccccacgaatgaaaatcctagacctctctctttcagtcagaacttactgcttctgcatctgcagattatgaagagcaagaaaaactcctttcacaattatctcaaaggctgaaagtttcttctgagctcaggtgtctggctattttaaaactacagatgaangcttctcattagnaaaaattaaccattgncatagctnaactttcatggagtttctttccccctnctnttatttttcagttngtangattttattccacatttccatattacatataaatcgctggaactatgantnctatgcatatttatggagttttttttcctatgaaacccataaatattngatngtacagcaccgcatgtatttggtagggagttccaaaaaacatcacaaactgganaaaaggttatnatctaaattangntggtttcttaagccttggtttttaaaactnggcctttatggntaattatnctcttatcgaccaatttatttttttaaaggacctgctcnctt

SEQ ID NO: 615273 - DNA, 175 bp, Homo sapiens
gcagaacaccaaatggcggatgacgccggtgcagcgggggggcccgggggtccctggtggccctgggatggggaaccgcgggtggcttccgcggaggtttcggcagtgtgcatccggggtccggggtctgactgcgccgtggtacgtggtgccggtgggccgagtgccgcggtag

SEQ ID NO: 615274 - DNA, 1069 bp, Homo sapiens
atttttgtcaacaccagacctgtcctacaagacatgctaaagggagttattcagtctgaaagaaaaggatgttaatgaactataagaaatcatctgaagatgcaaaactcattggtaatagtaagtacacagacaagtacagaatagtataaaaccataatcatggtatgtaaactactcatattttgagtattttgagtagagggactaaaagatgaaccaatcaaaaataagtactacaaccacttttaagacatagacagacagtataataagatctaaatagaaacagcaaaatgtttaaaaatgggaagagttttattggtttacagtgtagagttttattggttttctctttgcttctttgttagtgtgtttatacaaccacagtgttagcttatcagtttaaaataatgggttagaagacgttatttgcaagcctcatgataatctcaaatcaaaaagcctacaacagataacaattgaaatgccagaaattcacaatgtaccaccagggaaaatcacctttatgaacacgaagactagaagaaaggacacaagaaggcaagggaagactacaaaacaatcagaaaaacaaataataaaatgacgggatatcacagagatttcctgtactccagtgttacatcacgttaaaaagctttttacacagcaaggggtgggttcatggattacaaactatgttaagattggataaatgtatttcgatagcaactgagtgaaaaggtcacaatattgtcctttcaataactaaagattattggttggtggaccacgaaagaaagctgagaggaggaaatcacaaaggccagaggtcacactaaacaatatgcctcgtgatacaaatgtatccccaaaataatacaatataaccccacaaatatatacacaaaacaagcgccactaaaaacctcagacaaaatacaacacattatagcaacaaaacaacaacaaacacaaaaaaaaaataaacacaagtaatataacaaacaaatctagtaactccaaaacaactacacaaaaataaaaaacacaccaacacaagaaa

SEQ ID NO: 615275 - DNA, 259 bp, Homo sapiens
ctccatggctggtacacccctcttgtaactgtacatgatcttccccagttccaggttcttcccgtgtgctcctcacacctgctcctcagctcccggttctcctcctgtgtctgcctttaccactgcatccaggtccttctgcctgtactaggagcaggtccactaataggtccggtgcacatggggtgggcccccatggcgtgggaacaccctgggtgtgggccctggcacagggaaatgtccatgtgctcccaatgaa

SEQ ID NO: 615276 - DNA, 624 bp, Homo sapiens
tgacaacgatgaagaagaggttgtcacctttgagctgggcgagatgttgcttatgctttaggctgcaggtggggacgacgaactaacagactctgaagatgagtgggacttgtttcatgatgagctggaagcattttgatgacttggatctatagcaaccttgcgatggcgtgtgaactggtctgctgacctcagacagcagctgtcccctgtggatggtgtggcagagccaggtgtactcctccttaggcaaggcttcttcaattccaaggtgactgtcctaagaaattttaacccagggcctagtctatctcaacccctcacctttccctgaggagtgtgtcagtgatacccatattgaaaaaagttacaaacaataaatcttaaagttagtcactcaagtaacacgaatttaactgtcagacagattagtgtaggtgtgtagcgtcaatctgttttcaaccagattgcatatatggacttttcacacactcattatgaggacccaaggttccaaaagtcaacagcagatggcctgctttggggtccaagaataggagtgatggatgaagggacctaaagctgtgcaatacgcctcttgaccagacatagaatgtaggatca

SEQ ID NO: 615277 - DNA, 225 bp, Homo sapiens
aggagaaggagaggtgtgggaacagctagtcaggggagcagtgagaacacactcaacatttattgatgaagttcgcagtctaataatgagcatggtagtggcacccaaaaacaattacaacagtcacatcaaagatcgctgtcactgatcacagatcaccataacacatatgacaataatgaaaaagtttaaaatattgtgagattacccaaatgtgccataaag

SEQ ID NO: 615278 - DNA, 1324 bp, Homo sapiens
  misc_feature (135)..(135): n is a, c, g, or t
ggtcccgagtcttgtcggagattgagtggttccggaagatctggccagctaagattctactccctggctgtgccaccgaggttccctaccccgtggtctacgatcggctccgcgcatcgttcgcggcgttagcgnacgtaagaagagccatcccgcgaccgggaggaccgttccgagcctcgcgaagagctaggcgctggtcgcagcagtatcccctcgaagattcttgatctctgaacgttgtgaaggtcctccgaaggactgttcttgtgtgtgaatctgtttagagagggttacgacggaggcttggaaggcatgcgctgaaaggccgcagggccttacattgaggggctacgtgtacgggcgcgttgagcgaacgattgggaatgccgattggggagggcaagacgtgtactcccaaagcacttagaattcctttgcactccgcctacttattttgccgcccaagtcgctacgatttgggggggttggcaccggacagcgggtgtctagggggcgagatcgagttgaaagcgggccccgggggaaccaaccgccgtttataggttcgaaatacgcgcgatgaattcctacggggccccttggcgtgggacgtcccacagggacaagtgcgtctggagacgcccgtataaattcgttttcgacttaccgcttagcgcctctccgccatggaaccaaggggggcccgcgcacagccgtggaagcaccgacacgggaacgcataggaatcgcggaaccccgggagtggcccagacttgcgaagagggcagcccggcgagaaaaccgttggccgccaccaacagctttggccagcggggagaggcataagcacaacccaggccgtcccaagggcccatttcgcaaggataattccgttccttgtggtcccccatgggtgtgaaacccggaacttgaatctggcggcacaaaccctgccctgagcacttcccccaaggtccccgcttgagacacgacaaagccgacttgttaattccccgggggcggttacatacgccgagatgagccgacgactaccagccacgttgtcccaagacgttatttacacccaaagaaggccgatatcggagctaccctttgtcacacctaaccgcttaaattcaattaacctgtgagggccccccggtgataaacggtgcacgtcaaaacacttccctgcgccagaggcaccagacgaaacacttcggccgcagaagacacacatatgccgactgagggcaacatgaggagcaataggccgacaccttcccacgtgcgcaaaccgaggttctaacccccagcagca

SEQ ID NO: 615279 - DNA, 487 bp, Homo sapiens
  misc_feature (19)..(19): n is a, c, g, or t
  misc_feature (25)..(25): n is a, c, g, or t
  misc_feature (31)..(34): n is a, c, g, or t
  misc_feature (50)..(50): n is a, c, g, or t
  misc_feature (224)..(224): n is a, c, g, or t
  misc_feature (231)..(231): n is a, c, g, or t
  misc_feature (240)..(240): n is a, c, g, or t
  misc_feature (252)..(252): n is a, c, g, or t
  misc_feature (289)..(289): n is a, c, g, or t
  misc_feature (326)..(326): n is a, c, g, or t
  misc_feature (363)..(363): n is a, c, g, or t
  misc_feature (400)..(400): n is a, c, g, or t
atcaggatatcttacgccnactctnacctannnntacctagccctaaccntaaaactaacctagctcataaacttacgtagtctaacctaacatatttaacttacctaaccctagatatatttacttgtgggactataaaatgtcccagtttcttttcttttactcttcttgtgcggacacacaaacaaacgcacacggctcactggagtgtgtaagggctgtncagaganaacccttcnctggagtgtgtnagggctgttcagagagaacccttcactggagtgtgtnagggctgttcagagagaacccttcactggagtgtgtnagggctgttcagagagaacccttcactggagtgtgtnagggctgttcagagagaacgcttcactggagtgtgtnagggctgattagagagaacctttcactggagtgtgttagggctgttcagagggaacccttcaatggcgtgtgttagggctgttcaga

SEQ ID NO: 615280 - DNA, 196 bp, Homo sapiens
taaattttcaccagtattatcttctatttgcaaactgaaaaatgttgtaagctttcatattaaattacctacattagtgaacattatatctctttagtaagaaaggccatattttgctcctgcttctgtcaaaatattatttgtttgaaggggaaattatggtagtgtgacctttcacttatttccgtatctcccc

SEQ ID NO: 615281 - DNA, 150 bp, Homo sapiens
  misc_feature (110)..(110): n is a, c, g, or t
actcatcatcttcctccaatggtgtttaaaccaaagcaatggagaccaatgctctgataccacttgtaggaccttgagaagaggtgtctagagggggggggggtgattanacactaagtatcaaagttgcagcttttaacttctttaagt

SEQ ID NO: 615282 - DNA, 1079 bp, Homo sapiens
  misc_feature (397)..(397): n is a, c, g, or t
  misc_feature (406)..(406): n is a, c, g, or t
  misc_feature (408)..(408): n is a, c, g, or t
  misc_feature (423)..(423): n is a, c, g, or t
  misc_feature (429)..(429): n is a, c, g, or t
  misc_feature (432)..(432): n is a, c, g, or t
  misc_feature (446)..(446): n is a, c, g, or t
  misc_feature (454)..(454): n is a, c, g, or t
  misc_feature (468)..(468): n is a, c, g, or t
  misc_feature (474)..(475): n is a, c, g, or t
  misc_feature (488)..(488): n is a, c, g, or t
  misc_feature (492)..(492): n is a, c, g, or t
  misc_feature (498)..(498): n is a, c, g, or t
  misc_feature (507)..(507): n is a, c, g, or t
  misc_feature (514)..(515): n is a, c, g, or t
  misc_feature (520)..(520): n is a, c, g, or t
  misc_feature (522)..(522): n is a, c, g, or t
  misc_feature (526)..(526): n is a, c, g, or t
  misc_feature (536)..(536): n is a, c, g, or t
  misc_feature (550)..(550): n is a, c, g, or t
  misc_feature (555)..(555): n is a, c, g, or t
  misc_feature (558)..(558): n is a, c, g, or t
  misc_feature (562)..(562): n is a, c, g, or t
  misc_feature (570)..(570): n is a, c, g, or t
  misc_feature (579)..(579): n is a, c, g, or t
  misc_feature (581)..(581): n is a, c, g, or t
  misc_feature (583)..(583): n is a, c, g, or t
  misc_feature (589)..(590): n is a, c, g, or t
  misc_feature (592)..(592): n is a, c, g, or t
  misc_feature (595)..(595): n is a, c, g, or t
  misc_feature (597)..(597): n is a, c, g, or t
  misc_feature (622)..(624): n is a, c, g, or t
  misc_feature (627)..(627): n is a, c, g, or t
  misc_feature (629)..(629): n is a, c, g, or t
  misc_feature (632)..(632): n is a, c, g, or t
  misc_feature (635)..(635): n is a, c, g, or t
gcgtttccttatgcttttgtcatgtcgtgtttctttggtcgcttctcagggcagttttcttgagctgggtgctctcctgtgtgctcgggatgcctggcgcagctttggctagcgctatggtttagtacctcggatccgggtgttttcccgacccgtttttgggccgcatatggggggcctcggccgccccctgggacccccttaaggggtcgactggcttgtttgtcacgaggcctggttgccccgggtccaatggccccgtctggtccaattgagggcacttgcgagaattctggcccggccggcaaggggttggcttaagcgttggggtcccgatccagatccttggcaggttagcgcccatgtttgggcgccctcctcaagcagggccccctgnagccgttcnanccagggcctccaganggcccnccntgggggtctcaacntcccaggntctggccatatctncctccnncctttcaggggcnagancctggntcccagggncagctcnngcagnanttangggaccgcanctggggaggccgcngggtnctngggnccctgggngtccccctngngngactcnncnccngntcgtcgtcgtccctcgggccctcgnnntangnaantcntggctgcccccctatgtcggtcccgttatcccgtgttatctgttcccctttaataggttttttttttttttttttttttcctcgtaggagtcagcaaagaaagacaatttctctgccccttgggatggaggggcagaattgggctaggggtcgcctggagcccacccccctttgctcagtctccttctgtcctcttctcgcggctctgtggtggagggggcgcggctccggctgcagggggtggggccgagagggccgaaggggccgggtggcctgggttaccctcctgctcaggcgcctgggtccactgggctgtctggaccccaagctaggggactggggaggagaaagacagcttctgggggtttagggtggggtcgaggatcaagggggtctccactgggctctatcggcgcttgtcggggaggggaaggggtgggttgg

SEQ ID NO: 615283 - DNA, 231 bp, Homo sapiens
gggacccttatcctccaagcccatttcatcaccaactcctggcaattctatctgtttaagtctttcaaatgtatctaactattcttcagaatcactgccctagccttataaaagaagccaggattagttctcacctaaatttctgcaacagcatcctagctagtctcccagcctctagtcttgcctcctattgatctatgcagccagagagatctttgctacatcactcca

SEQ ID NO: 615284 - DNA, 425 bp, Homo sapiens
  misc_feature (10)..(10): n is a, c, g, or t
  misc_feature (179)..(179): n is a, c, g, or t
  misc_feature (275)..(275): n is a, c, g, or t
  misc_feature (288)..(288): n is a, c, g, or t
ccaattgagnctttgaaggagggcaaatcaaagtcgtttctggggagcctcggtttcccctgtctttccaaactggggtaaataataatagctgtgagcctcaagatgagatgtgcaatcccagctacctggccccagatgccagctctgacttctttcttggccctgcaccaaggcantgccactgccaagggaatgagtcccctctccatatgacaggtcccatcaggcctccaccttcctgtgtgtcttatttctcagcatctgcccccacnagtgcttttgcanacgttggtccctctgtccagatcacctgccctccaagaggcccgtccctacggcttccccgcagcagtcagagccaggggtgggtctctggccacctctggaagaagccctggcccaccgatcatgtttgtaatgat

SEQ ID NO: 615285 - DNA, 259 bp, Homo sapiens
gcctctatgtagcttcaggacagggactggtcacaggaaagaccaaggcagcattaaagggtcgggacttttagccccctactcccccctccaggaaccaaaaagggtggaaaggttgtttacccccaatggccaatgatgtaatcaatcctgcctacagaatgaagcctccataaaaaccccaaaggacagggtttggagagcttttgcatagctgaacccccggagcttcctaaagggtggcccccccggagagggc

SEQ ID NO: 615286 - DNA, 165 bp, Homo sapiens
gttatgggtcccacctgtctaccggctcattggtcgacaggctggccccaccgtttgggggtcttgtcgggggctggttactgttgcctcgcctctgatgacgagggctttgtcgaggtaagcatggctatagtgccgccgccttgcagactctcactgtagcct

SEQ ID NO: 615287 - DNA, 585 bp, Homo sapiens
tccccagtccataccactatggcaggcatgaaggtgggtggattgcctgagctcaggaggttcgagaccatgcctgggcaatacggtgaaaccccatctctattaaaatgcaaaaaattagctgggtgtggcagcggacgcctgtagtctcagctactggggaggctgaggcaggagaatcgactgaacccgggagggcagaggttgcagtgagccaagatggtgccaccgcactccagtctgggcgacagagcaagactccatctcaaaacaacaacaaaaacaaaatagttgtgggccaggtgtaatggctcacgcctgtaatcccagcactttgggagggtgtaagtttaagaccagcctaggcaacacgagaccccgtctctacaaaaaaatattaaaaaaaaattagtcaggcatgacagtgcacatttgtggtcccagctactcaggagcttgaggtgggctgattgcgtgggcctaggaggtcaaagctacagagagccatgatcacactactgtactccagcctgtgtgacagagcgagaccctgtctctcaaaggcaggacaacacttagctgaat

SEQ ID NO: 615288 - DNA, 516 bp, Homo sapiens
ccttcttcaagaaatccttcttggaaccctgacacatttaacacagcgcccctcatcgtcctgcatagagcggttagcgtggcccaccatctgaagcacgtcatagctgttgcctgcacagataggcatggatcttgcctttgtagtactgggtattcatgatgattggcaggtgggcagacacgttcatgccccagatagagagtccgagaagtcaccagcagctgaatagcccctgagctgaagagctgctccaccaggcgtcgctccatggggctgagcccctcatgcaggtagcccaccccatttagcagcgtttccttgagcgtgctgtcacttagcttctccaggtacggaatcagatccttctcggtgcagtgcaagaacctctgccgttggatgtctgctgcacaggtggtgaggatgtcaatggcagtgaggcgggtctgcttgcgagacggcacaaagacaatgacaggcttcttgggcgagtgcttggtgatagcatggtacaca

SEQ ID NO: 615289 - DNA, 920 bp, Homo sapiens
tggttataaacggagcctgtttgtgacacgcctagtgtgtccttgggtacgcccactcaccgctgtgtggtgcgccctcctagtgtagacccgcgggggcgagatcaacacctctccggggttttttacatttggaccgccggggggcgggggtgatccaacttgtcgtcagcccgggggacagcgtttttggcacccatggccgctctttgttgggggcgcccccaattaggacacacaaggtgttgggcacagcagcagaaacagggcggtggtgtccaccgtcccgcggtttttcccccgggggggattgtttttggttgcccccccgcggcttcgcgcggtgttagtcgcacggagatggatacacactttttctcttgccccaccgggtgttttttcatcccgcccaaggggcgacgccactctcgtctgggttgactccgcgccagacagaagtgttgtgatgacaccaccgacgcgggcggctgtggcgccccctttcttgtatgtatcatgtgtatctctggcctgcggtacggtctcctccttgccgagggcgccgttatatccctgccgcgataaaattttgttctagcccaacaagggtttacactcgtttgttcccccacacaacgttgtaacacatattacgcggaatagtatcatcacccccccttgttgatacaccctccttttaaagccgtggcctactccgggaaactcacttttttcccacggatgttttctaaatacataacagcaccattttctcccccgaatcaccacccttcatccaccacaccaaactccccttttccttaacccaaccccccctttcatttttttggggtttttaaccccttggccccctccccccccccaaatttaaaaaaacccccccatgcccctttttttta

SEQ ID NO: 615290 - DNA, 125 bp, Homo sapiens
atatttccttgcatgatatattgtccatagaaaaatcaaaacactactgaaaactcttctccgtggatttacgtcaagatcagtcgtctggtctggcgcggtgactcacacctgtaatctgagca

SEQ ID NO: 615291 - DNA, 758 bp, Homo sapiens
  misc_feature (13)..(13): n is a, c, g, or t
  misc_feature (61)..(61): n is a, c, g, or t
  misc_feature (65)..(65): n is a, c, g, or t
  misc_feature (69)..(69): n is a, c, g, or t
  misc_feature (72)..(73): n is a, c, g, or t
  misc_feature (80)..(80): n is a, c, g, or t
  misc_feature (82)..(82): n is a, c, g, or t
  misc_feature (94)..(95): n is a, c, g, or t
  misc_feature (103)..(103): n is a, c, g, or t
  misc_feature (109)..(109): n is a, c, g, or t
  misc_feature (113)..(113): n is a, c, g, or t
  misc_feature (125)..(125): n is a, c, g, or t
  misc_feature (136)..(136): n is a, c, g, or t
  misc_feature (141)..(143): n is a, c, g, or t
  misc_feature (157)..(158): n is a, c, g, or t
  misc_feature (160)..(160): n is a, c, g, or t
  misc_feature (172)..(172): n is a, c, g, or t
  misc_feature (184)..(184): n is a, c, g, or t
  misc_feature (196)..(196): n is a, c, g, or t
  misc_feature (205)..(206): n is a, c, g, or t
  misc_feature (213)..(213): n is a, c, g, or t
  misc_feature (229)..(229): n is a, c, g, or t
  misc_feature (241)..(241): n is a, c, g, or t
  misc_feature (250)..(250): n is a, c, g, or t
  misc_feature (255)..(255): n is a, c, g, or t
  misc_feature (257)..(257): n is a, c, g, or t
  misc_feature (261)..(261): n is a, c, g, or t
  misc_feature (273)..(273): n is a, c, g, or t
  misc_feature (283)..(283): n is a, c, g, or t
  misc_feature (286)..(286): n is a, c, g, or t
  misc_feature (299)..(299): n is a, c, g, or t
  misc_feature (305)..(305): n is a, c, g, or t
  misc_feature (319)..(319): n is a, c, g, or t
  misc_feature (536)..(536): n is a, c, g, or t
  misc_feature (577)..(577): n is a, c, g, or t
  misc_feature (597)..(597): n is a, c, g, or t
  misc_feature (602)..(602): n is a, c, g, or t
  misc_feature (604)..(604): n is a, c, g, or t
  misc_feature (609)..(610): n is a, c, g, or t
  misc_feature (652)..(652): n is a, c, g, or t
  misc_feature (667)..(667): n is a, c, g, or t
  misc_feature (685)..(685): n is a, c, g, or t
  misc_feature (756)..(756): n is a, c, g, or t
gacaacagaagtncactaaggatgaacgaatgaactgagaagaattaaaaaaacgaaaacnaacncaancannacgaaancnccttgaacgaannaagaaganaaaagnaaanaaaggaaaaaanaaaaaaggaanaaaannnagaaaaaagaatcnnanaaaaaaataaanaaaaaaaaaaanaacgaaaaaaantaaaggaannaataganaaggaaaaaggaagtnaaaagatcgganaagagaatnaaaananaaangaaggaagagangaagaagaanaangaggaagacatantaaggnagaggggagggatntcgcacacggccgtcttcacgttgttggggattcactccacgaagtagctgctgttcttgttctgcacgttgagcatctcctcgtccacctccttcatggacatgcggccccggaagatggcagccaccgtcaggtagcggccgtggcgcgggtcgcaggcggccatcatgttcttggagtcgaacatctgctgggtgagctcgggcaccgtgagcncccggtactgctggctgccccggctggtcaggggcgcgaancggggcatgaagaagtgcangaaangnaaggnnacatgttcaccgccagcttgcgcaggtctgcgttcagctggnccgggaagcgcaggnaggtggtgaccccgctcntggtggccgacaccaggtggtttgatgtccccgtagttgggggtggtcagcttcagggtgcggaacagatntc

SEQ ID NO: 615292 - DNA, 223 bp, Homo sapiens
  misc_feature (178)..(178): n is a, c, g, or t
tttttttcataatgcaggcataaagggtggagtgaagccaggtcataagtttcatgtttgcttttgttttgttttgtttttaatgtatgtaccaaatgttccagttttagggatccgggatgggagccccccctttaaaaagggtggtccctcctttaatcctctacccaccaatgtnctttttttctttttttttaaaaaaaataaaataaatttgtgccta

SEQ ID NO: 615293 - DNA, 227 bp, Homo sapiens
aggttgttgacaccgaacctcaaccatcgtgacgaaatcaatggaaagaggaagaccgccaaaaaacagaaaatgatccaacgtgcgcaagagttgcgggggagagctgaggactaccacaaatgcgacatcctcccttctgcaagaaaggctatttgcaactgaaccagaagggcgggagcgaagcatcggcattcttaagaatagccttactggccctaccttac

SEQ ID NO: 615294 - DNA, 102 bp, Homo sapiens
taaattcgcggtcgtgtctacctttgggaggccaggggaggaggattgctagagcctgggggttcaagaccagcctgggcaaagtggttaggacccattctc

SEQ ID NO: 615295 - DNA, 1344 bp, Homo sapiens
  misc_feature (467)..(467): n is a, c, g, or t
taaaaggaaaacccggaaatgatgtcggggttgagggataggaggaaaaggggggataggtgtatgaacatgaggggtgttttctcggtggtgaagtgagggttaaagtgtgtgtaaacgtggtgggggggtgaggtgagccccattgggtgttgggtggataaaatagtgttaagagggagataatagggcgtggtgacatagctagtgttggagctccgtggtaagtataggaaagagtgtgacatattgtgtgacctcgaggaaaacagcgtgtggtgtatactatagaccaacagagagagagtgtctcctccacagatatgagagtgtataaaatagtagtggcggcggtataacgggcgaaggtttataggcgaaggtcttggtctagagaagaggtctatccacagacagagcgtatatataaagtgtgagcgatgtcaaaaagttttgtggaatgtccntatagaaagaagaagggtattttatcgaatgcgcgcgcacttgtggagaatgtgcgcgttgtactcggtgacagtctttggcaatgtcttggcgtaaacgggccagagcacaatacagtggtcaccatggagaggggggatttgtaaaacacgcgcccctgtgagcggcgcgcaaaaaaactatcgcgagagaatattcagaccctgggcgaccctcagtgtagagaaaacgctctcacagaggggggagtgtatagcgggactaagacgacatatggggggcgtgggtggacaactacacccacaacgcggcggcccacaccctcgacgcgccgccctgtcggacctactctgcagaaacgaaacatgctacactttcggccgacaacgtcgaagccgcgcagaacattatacaacacgcggggctccctgcgggctaccgcggctccctccgcatacacggcgcacacacccccctctcggagacacgcccaccggcctccccaaaccaccacctcctcaaaatacgccggccctcccaacctagcggcgggcgatctcaacggggtctcaccccaagcgggggcaaacagcgggggagaaacacagcgcaccacacagagcgagtgcggatacagaggggcgacacaacagagacgcggagacttcaacgcaccaacacaccggcaccccacgttgtatacgaaacgggcaacaatacaactacaaacactcaccccaagataagccgccccggcagccccatcagaccgtatcgacaacacacgacaacgtactacccagcggtccgggagcacacgcgcacacacacacatgtatgaggacccccccgccaacgcaacaaccacggaacccg

SEQ ID NO: 615296 - DNA, 121 bp, Homo sapiens
tgatgcacgcatctaagagagaggttactcacactatagaggcataagtggtatcagttttcatttttctaacttgtttaaactgtgttttataccagtgtttgcgcgtaagggccagcat

SEQ ID NO: 615297 - DNA, 236 bp, Homo sapiens
tcgcaggtgatctagaggatcccggtgttccctttgtctactaaaaatacaaaaagagccgggtgtggtggtgggcgcctgtagtcccagctactcaggaggctgaggcaggagaattgtttgaaccctgggaggcggaggttgcagtggaccgagattgtgccagtgcactccagcctggccaacagaacaagactccgtcttaaaaaaaagaaaaggagagacaaagggaaaca

SEQ ID NO: 615298 - DNA, 145 bp, Homo sapiens
aaagagtcatatggctgactactggataagagtagactagctgcaagtctaaagaaagggttgtatggctgagagtctggagaaaggggcatctgaccgagggctgaagaaaggttagtctgactgagttctggctcatgtcata

SEQ ID NO: 615299 - DNA, 753 bp, Homo sapiens
gtggtgttacaacagatgatgcttcgcaagaactcgtggaactcatctatcaacaggccacatctatcccaagatttctcttatatgggagctcgcctgtgtatgttacctgtcccatgcatcgtgactaattagccccacagcagtggcaacttccgccaatagctacttcaaagatgtcggagtgaatatgacagttcaaggatcaagctgcaagaaggggatgaagttactcgaaaacgatttcattgcatttgtactctttctgggagaacttgatcttaacctggagatcaagggaacaaatggacgggttacaagagcagatattcttcaggtttggtctacgagaatggctgaatgccctgttttctaatcctatggatgacaattctaatatgtgcagtaccaagttgttacagttgacaggatcagtttggaagatgcttggaaggacacccaggaacagatggatatggacagaaattattcagagagattgaaaaggttgtcctagatgtcaagagtgagtagagatgtcaaacagagtgctcttgaagctggtagaatctccggtgcaagtaagatggggggagagtcccatgggaatttcgaacctataagagaaggaaaccagaaaatgatcttaactatttttgattgaccaacttttataacatttgagggtgtgccttcatggagttgatcagattaccagacgaaataaccagaatactgaagagagggtttccg

SEQ ID NO: 615300 - DNA, 753 bp, Homo sapiens
accctgcgtttaaggagttcagtcccacagaggccactgggttccagtggtggctgttcagaaagcagaacatactaagcgtgaggtatcttctttggtgttgttggttggttttcccaggcaacaattttacgggatgctttattgaaaggttgaagtttctctaaagtaaatggttgtaactccatgggtcccctggttggtaaaccattttccagtgggcgatattattcccccctttggaccttctcttggttgcaatttccctttggggtttccttttggaggaactaaaaataggcggttgaggggaaatgaaattgctggactatttgtggctcctgagttgagtgattttggtgaaagaaagcacatccaaagcatagtttacctgcccacgagttctggaaaggtggccttgtggcagtattgacgttcctctgatcttaaggtcacagttgactcaatactgtgttggtccgtagcatggagcagattgaaatgcaaaaacccacacctctggaagataccttcacggccgctgctggagcttctgttgctgtgaatacttctctcagtgtgagaggttagccgtgatgaaagcagcgttacttctgaccgggcctgagtaagagaatgcgtgatgccaataacttttatgttgtcgatcttgttcaaatcaggtactggtcaggggaacctctgggtctcccgggggttaaccttgttttatcccatgttacgaaacgagcc

SEQ ID NO: 615301 - DNA, 143 bp, Homo sapiens
  misc_feature (110)..(110): n is a, c, g, or t
attgtgagttatatggtgatgctgcgctggcggaagaatttattggtggcgatcgcacggacaatgaaaatggccgtctgagtcggctggaactggcacacggcggcacntgtttcttgaaaagattgaatatctggcggtgg

SEQ ID NO: 615302 - DNA, 930 bp, Homo sapiens
  misc_feature (432)..(432): n is a, c, g, or t
tgatccagccaccttggctcccaaagtgctgagatgagccagcggatccagccagaactatttaatagttgaatgaaatagagagtcagaagaatgcaagagaggagagatgacagtgtaatagagatttcagcagtccaaacaaaataaatttttaaaaacctacaggtatattttaagaaaataaatttcaacacaagtttaggttaccagtcaaaaaggctgagaccaagtagtccatcaagatatagcccttgggcgtggaagtacttaacttgaagatctgagatgagttagatcctatgggtatcagaagaactgggtgaaagatgtggttctgggtcaagaaatagggaaattaagaatgtagtatagatgtggacacatatttactcagaaagaaaaaaagatcctgatctaacggctcctttnggtagagatagggctggaggaagtgtaacagaaatacattaggtaaatacttataggtctactgacattctttggaaagaagagctagcatacccaaatttcaaactaatttggtgagagcaacatgcctctttttcttttaattcaagcaaaaatggtaactgggtaagtagaaactgtatcacttcaggcatagctatgtatggtgctcaccttactatgtgtcaccgatcccacatttttaccaactgaaggtgtggaaccctacttggccagtctatccaggtgctttttccactatcatggtggccctttctgctctctgctcacatgtgggcatacggcggattctcacacttcatactaccgggcacgctctgccggcaccagcactggctgcggccaaaaggcccccaaaggagatatgtaacggtgtgttgggccagggcgtcaaagaggcgcgcggaccactatcgccgacactcttgtgctccggga

SEQ ID NO: 615303 - DNA, 1145 bp, Homo sapiens
caagaccccaggtagacaggcagagacactgaggtaaggggaggagaggctgtggcaggagatgacagggttagaggccacacagtgactactgcattgttgctggtgacaaatgcccagagtttgtgtgtcagaggccaagtgcagaggacaaactgctctatccagtggggcagtgagagcatcggggagggaaaaggcgtgctttcggaagtgtgctggagaggcggctggctcccagaaatggctgtaaggatcgggaggctggaactcgcttctctcctcatcaagcacttgctgaactgagtgggtggtgaatgtgggcaactgggaatgttgaactcttacccatcccctggagccccacctccagtgcacgtgaacttccaggccaaacctagacgtctgtctcccctacttagaccctgttcctaacttgatggccatagagggcaaaggcccaagattgaggtttctttggagcccacagacacaaaacaagtacagatacagattagggaggaagttctagagtgttccctggaataataaataaatgggtgggtgggttacactgccttccttgccaccttctctcctcctcacttctgcttcaaaagcaggacccaaatccactcctccaatacaccaggctctccatcctgcacagtgctttcggtataagtgcgtcctttgggcccaaggggctatgatggttcgctgggcacacggagaacatggttggcatcgaaggccgtggctgggccacaccattgttacacacccgtgggatgtgacgtaacaagggggacaaaagaggaggagcaaagggcgcaccaggtaaagggagagccgcggaaacacgtcacggtgaaaagcacgcagaagcacaacagaacgagacgacacccgaaagcaacaccaccacaggggagaacaacaaaaaagaaagtacagccacgaacggagggacaaccaaaaaaaaaacagagcgaacaagaacggagagaaaacagaaaccaacaactacaacaacgatcgacgaacagaaacacgagcgacacaagcaaagacgaaagagagaaggagggagagaacagtcaatacagtaatgcagccccacctcttcgctcctctgtacgaag

SEQ ID NO: 615304 - DNA, 915 bp, Homo sapiens
  misc_feature (13)..(13): n is a, c, g, or t
  misc_feature (82)..(82): n is a, c, g, or t
  misc_feature (148)..(148): n is a, c, g, or t
  misc_feature (160)..(160): n is a, c, g, or t
  misc_feature (164)..(164): n is a, c, g, or t
  misc_feature (177)..(177): n is a, c, g, or t
  misc_feature (191)..(191): n is a, c, g, or t
  misc_feature (195)..(195): n is a, c, g, or t
  misc_feature (199)..(199): n is a, c, g, or t
  misc_feature (222)..(222): n is a, c, g, or t
  misc_feature (385)..(385): n is a, c, g, or t
  misc_feature (437)..(437): n is a, c, g, or t
  misc_feature (486)..(486): n is a, c, g, or t
  misc_feature (491)..(491): n is a, c, g, or t
  misc_feature (526)..(526): n is a, c, g, or t
  misc_feature (588)..(589): n is a, c, g, or t
  misc_feature (601)..(601): n is a, c, g, or t
  misc_feature (613)..(613): n is a, c, g, or t
  misc_feature (649)..(649): n is a, c, g, or t
  misc_feature (659)..(659): n is a, c, g, or t
  misc_feature (704)..(704): n is a, c, g, or t
  misc_feature (737)..(737): n is a, c, g, or t
  misc_feature (740)..(740): n is a, c, g, or t
  misc_feature (764)..(764): n is a, c, g, or t
tcgggcgcgggangcttccagccgaggagttcaaggccaaggtggaggctgtggtggagaagctgggggtccccttccaggngctggtggcaacgcacgcaggcttgtaccggaagccggtaacgggcttgtgggaccttctgcaggngcaggccaacgncggnacgcccttatctntcgggaacagcatntttntggnagacgcagccgaacgcccggccnactgggccccggggcggaagaagaaagacttctcctgcgccgttcgcctgtttgccctcaaccttggcctgcccttcgccacgcctgaggagttctatctcaagtggccagcagccggcttcgagctcccagcctttgatccgagtactttctcccgctcagngcctctctgcctccccgagtccagggccctcctgagcgccagcccggaggtngttgtcgcagtgggattccctggggccgggaagtccacctttctcaaanagccnctcgtgtcggccggatatgtccacgtgaacaggancacgctaggctcctggcagcggtgtgtgaccacgtgtgaaacagccctgaagcaagggaaanngggtcaccatcnacaacacaaacnccagacgccgcgagccgcgctaggtacgtccagtgngcccgagccncgggcgtcccctgccgctgcttcctcttcaccgccactctggagnaggcgcgccacaacaaccggtttcgagagatancgnactcctctcatatccccgtgtcanacatggtcatgtatggctacaggaagcagttcgaggccccaacgctggctgaaggcttctctgccatcctggagatccgttccggctatgggtggagccgaggctggggcggctgaactgccagttctccgaggctgagcctcgcccagct

SEQ ID NO: 615305 - DNA, 343 bp, Homo sapiens
ggttctactgaggctgggttatggtgggtgattagaggcctgccctgaccttaaaagtggtgggtcctaaacttcagtaagcaggttgaggagcatgtttaagaaatggcagactagaatgtgagggggcagccatcagatgggattccgagatattgtgacggcctcttacccgaaggactggtgggctagcttctcaagtgagagaggctgatggcctcacagcttgatccagagtcacagatagttgtgactcggcctgtaggaaattagagttcctcttactggtgtgccgccatctgaggcctaaagtctaattatgtcgcaaccgtggagaagccag

SEQ ID NO: 615306 - DNA, 242 bp, Homo sapiens
  misc_feature (182)..(182): n is a, c, g, or t
atggccgagagccgagcgtgacgtcatcggcgcgcgcgctctcgctctctctcgcgcgcgctgggtgctcgcgctccctcccttattctctctcgttttatctgtattcctggcactggcgaaaagctcgttgtctgcgatttttgccaggtactttttttttttttcctggaaacagagtntaagctcttgtggcccgggctgggatgtgaggggtgaaatctcggttcactggcaccctc

SEQ ID NO: 615307 - DNA, 736 bp, Homo sapiens
  misc_feature (185)..(185): n is a, c, g, or t
  misc_feature (456)..(456): n is a, c, g, or t
  misc_feature (525)..(525): n is a, c, g, or t
  misc_feature (561)..(561): n is a, c, g, or t
  misc_feature (597)..(597): n is a, c, g, or t
  misc_feature (617)..(617): n is a, c, g, or t
  misc_feature (631)..(631): n is a, c, g, or t
  misc_feature (637)..(637): n is a, c, g, or t
  misc_feature (689)..(689): n is a, c, g, or t
cggcccgcgggcggggacgtgggagcgctgaagtcaggctcccactctcggccgacacccctcatggccaaccgttacaccatggatctgactgccatctacgagagcctcctgtcgctgagccctgacgtgcccgtgccatccgaccatggagggactgagtccagcccaggctggggctcctngggaccctggagcctgagcccctccgactccagcccgtctggggtcacctcccgcctgcctggccgctccaccagcctagtggagggccgcagctgtggctgggtgcccccaccccctggcttcgcaccgctggctccccgcctgggccctgagctgtcaccctcacccacttcgcccactgcaacctccaccaccccctcgcgctacaagactgagctatgtcggaccttctcagagagtgggcgctgccgctacggggccaagtgccantttgcccatggcctgggcgagctgcgccaggccaatcgccaccccaaatacaagacggaactctgtcanaagttctacactccagggccgctgcacctacggctntcgctgccacttcatccacaaccactagcgaagacnctggcaggccccagggccancctcctgtgcttcnccagancatcagcttctccggtctgccctctggccgccggacctcaccaccaccaccnggcctggccggcccttccctgtcctccagctccttctcgccctccag

SEQ ID NO: 615308 - DNA, 424 bp, Homo sapiens
  misc_feature (185)..(185): n is a, c, g, or t
cggcccgcgggcggggacgtgggagcgctgaagtcaggctcccactctcggccgacacccctcatggccaaccgttacaccatggatctgactgccatctacgagagcctcctgtcgctgagccctgacgtgcccgtgccatccgaccatggagggactgagtccagcccaggctggggctcctngggaccctggagcctgagcccctccgactccagcccgtctggggtcacctcccgcctgcctggccgctccaccagcctagtggagggccgcagctgtggctgggtgcccccaccccctggcttcgcaccgctggctccccgcctgggccctgagctgtcacgccttgaggtcattttcagccacacttggttacccttcttatctcaacccacactttggggcctttacaagggaactt

SEQ ID NO: 615309 - DNA, 955 bp, Homo sapiens
caccatgtcttccctcccctgtatgcccacccgccatgtacctgtctccctacccgacatgccccttgaacttgcctgttgccgctgctgttgtccccactgtctgtgtgactctgcgccccttcccgtagcctgcccgaccgctggttccgtgacgttcgctcagcgacattactcaattccgtcaagggctctttcccgtggcaccatctgcgcgagctctcgttccgctgttagtgaccctgaagctgctagtgctgggcgccgtcccgcccttcacgtcatggatgtccccacttctgtgaggtgtccagccgcctgattgccggagtcccagggtgctcgtgaagcttgtacataggaagcctaggagacaatacaactagtcatgggaatacgattaccaagggttggaagaccaacaacataggacatgaggcattcagcatgacactagggtacagagccaccatcacttggtatgggacataacagactgaactaggggataagagacacaaaagaaccaatgggtcatgggagaagcaaattatagcatagtaccagtagaagtcagtgaagagaatcaaccccgtaggtagaaaacgataacaaagaaaacaaatagcattagatagcacacataaagaacacacagaagaattagggataagataacaacccacacattaggttaacccaccaggagagatagatcaggacaccaacgaaaaattgacccaaagaccaaataagggatacatacaaataccatacagaattcattccattacacagatcataagaaattagcattgatagagagaacacatggacgacggaaaaaagaggacatacaacaagaaagagcgcagcgaagaaagccgcgagaaaattaggaacataaccagaagataacaaaaaagataacaaaaacaatccaaaacgacatccg

SEQ ID NO: 615310 - DNA, 438 bp, Homo sapiens
  misc_feature (326)..(326): n is a, c, g, or t
  misc_feature (386)..(386): n is a, c, g, or t
  misc_feature (411)..(411): n is a, c, g, or t
  misc_feature (426)..(426): n is a, c, g, or t
gaccacaggcaggtgccaccatgacttgctaatttaaaaaaaaatctgtagtgataggatctcactgtgttgcccaggctagccttaaactcctgggctcaaaggacccacccacctcagcctcccaaaatgctgcaattacaggtgtgaactaccacacctggtcagattttaaattccaaatgtaatgaatagggattaggatcgaggctctgtgattctaatttccatttaagaatgggggaggagggaagaaagccagaaacgaagctctgtccactcctataagagagtgctagaaaaattctacttcatttactcagganaattcatgaaagggggcttgttaacctgtttcaattattttgatagggggggaaaatttngcttattgagactttgggaaaactnccagggcctacatcnggagtgtaggat

SEQ ID NO: 615311 - DNA, 164 bp, Homo sapiens
atatttaagctgcagagatgcccatccctgccttcccacggttgtccagtaagggggagggatcattcgcattgttacaatatctcctgtacttgtcagtctggcaaacacactccccccaaaacttcaaccttccacctgccagtagcttccccttcttccca

SEQ ID NO: 615312 - DNA, 814 bp, Homo sapiens
ggtccccacggcgggcagcagcggcggggcggggtgaacgcggagggggcggagggagcccgcgcggcggctagcagctacagcgaaatgggggagacgtggttgacaccctggggtttgatcaccaagccgaagaacctgaaatgacgcctaggggacccccccaagaatttttccttcgagaatccggtggtgaagcaaacgccggaaaacacggggtgggggggttccggcgccggggggcccgggtttacaacccaattttaccgaaacatcagggggttccacagaacaatattcttccataattttccaaggctggaagagaagtctagtgtgtttaagacaggaacgattacgcggtggacttttgtgaatgtgggttgagaaggtggaatttacgacagagagagaggcaaggtccggtagtttccccacgggttccggtgggaaaaaggcgtgttgggcgtcaggagtccctttataagagcagaatgatgggcattatttgtggatcgacactttttattggacgggaagagggaaaacccagggtggtcgaacgcaagttttataaaaccagggggtcgggtggtcaaattcctgtgggcacaggaaacggaagggtgggtctgacagagttgttttttacaaaggatggactttacttagataagaagggttatactccattcgtaaaaattacgatttcgctgaatttgtgccaacgaagggggcaaaaagggtggactattatggatgtgatacgcccagtgaaagaacttctaactttaagtgttgtgacagaaactgt

SEQ ID NO: 615313 - DNA, 157 bp, Homo sapiens
cagaaagaaaagtcaaccaaatcagagggaaaacatgaaggtttctatagagaacttgttgatgagaaagctctgaagcacataacggaaattggcttcagaatggatgcatcgaggcaagcctttatggagaatggcatcatcttagatgcagcac

SEQ ID NO: 615314 - DNA, 987 bp, Homo sapiens
cgggaggctgaggtaggagaatggcttgaacccaggaggcggagcttgcagtgagccgagattgcaccactgcactccagcctgggcgacagagcaagactccgtctcaaaaaaaaaaacaaaaagtgtaagtggcattaaaagagaaactgggctctagctccataatattttaaatagggctttcccgtggctgctggaaaacttaggccagtaagcatctcttggcttaaaagtcctacaagacaatttgacaataatctcatggtccatgccaaaattctaagtactggtttttcttagcaaggtgtaacataatcaggaaacaagtgggtacaagttaaaacattcttgggatgatattcaaagccttattagcacgtgcaccgtgaataataggtcattttggcctcactcattttggccaaacgtacgccatttctaaggtaaagggaagttcttcaaagatagggctcatacgccttgtattccggtttaaagattggtaacgctcaatggggcaggggatactatatgggcacacttagtgcttctccatattagccaaccaccaagagctataatcctggggtgcattaattacacagtgtttctataacttgtggcttacccaattaacccgtgttcgctataactggcccacacttcggcaagtgggaacatatagtggtgacacataccattatgtgcaccacctgtcgaccgtaatcacagtgcacactcatatcactacgagaaccacggctaccctgcacgaacacacaccacacaataagcaacactacaaaacaaacaacaaacaaaccaaacacacacactaaacagacgattgggccgcccgccacctagcgacagtatcctcacaacacgggggcccacactgtcttgtccgcccttaccccgtcgtctcttgtgattcacacaggggttgcccattaagaatggacgtgttgtattaagactgcg

SEQ ID NO: 615315 - DNA, 186 bp, Homo sapiens
gacatagtttcactccagcctgggtgacaggagtgaatctctgtctcaaaaaaagaaagaaagaaagaaagaaagaaagaaattacatgggcaattggcctgggcttggcctctgttaatgagttgcttgggcataagaatatggtttagcttcatccttcccttaattcttgtaattacagtgtt

SEQ ID NO: 615316 - DNA, 863 bp, Homo sapiens
gaggacgtctccggagcactccgcatgcaacagtgatctaggagttaaactttggcgatgtgcccgtgatgttggaccacacaggtacttagaggtcgaaatccaccccttgaaaaatgaggaacagaaacatcggaggaaaatcgtgggaacatccagtcagagacaaatgaggataagcgctgaagaagcgcgcttccacagtcccggcatctcccggctgccgagcggtggcgtgttgcttctattacattgttatctactgactaatagtggtgtatcgtcctctcattcgatcatgccgtgttccagaccggtcggtgtaacagtgaatgtggaaggaatagacgtacagtgacgatgtgtatctaatgagcataatctggactgtggatgatataaacggggatcaggatcgcaaagatgtcattgttgcattaaatatgaatacaagaagaggaagcaaacaaattgttaggccgaatcctgtggtggacggataggctataaaacatcatacctgtgacacagtatatggaagaagtgctgatgtcgaggggcacaaaaggggtagtgaaagtctcatggggaggaagacacttgatggtaccataagaacggtggacattcgatggtaggtcgatgactatgggacccaacatgcaccaaagaaggggcagatgaagagtaaagcgttatgtagaccttgcaatgacttaggatgggtgaagaacgaacaaggaaatataggagttgcaggaacaacagatagagtacagagagaggagaaaaagtgtgatggaattcgaaaagatagaaaggcgtatacaggcagggaaattgaggatacatacagttgaaga

SEQ ID NO: 615317 - DNA, 955 bp, Homo sapiens
  misc_feature (72)..(73): n is a, c, g, or t
  misc_feature (99)..(99): n is a, c, g, or t
  misc_feature (121)..(121): n is a, c, g, or t
  misc_feature (134)..(134): n is a, c, g, or t
  misc_feature (139)..(139): n is a, c, g, or t
  misc_feature (141)..(141): n is a, c, g, or t
  misc_feature (155)..(155): n is a, c, g, or t
  misc_feature (165)..(166): n is a, c, g, or t
  misc_feature (168)..(168): n is a, c, g, or t
  misc_feature (174)..(174): n is a, c, g, or t
  misc_feature (195)..(195): n is a, c, g, or t
  misc_feature (204)..(205): n is a, c, g, or t
  misc_feature (211)..(211): n is a, c, g, or t
  misc_feature (254)..(254): n is a, c, g, or t
  misc_feature (256)..(256): n is a, c, g, or t
  misc_feature (276)..(276): n is a, c, g, or t
  misc_feature (305)..(305): n is a, c, g, or t
  misc_feature (739)..(739): n is a, c, g, or t
  misc_feature (745)..(745): n is a, c, g, or t
  misc_feature (831)..(831): n is a, c, g, or t
  misc_feature (943)..(943): n is a, c, g, or t
ttatttttatacatagggatgtgaaaaacgtgaaatgggtaaaaaaagtcagctgcacaaaaacacttcagnnaattctaacacagagggagcataganatggggggggtgggggttaggntgggggagacaanccttncntgctaagggctcgnggtccaagcnnanaaccanagggtgctctgggtggtgtcnaggaacatnnagtgcnggctccggggaggagggaacgagaagaagaaagggagagtcananaggaggctgcagatgagcangagtttattggactctggcctcgcgctgntgcttgatgaagttgatgagcccattggtagaagcgtcgtgagaggtcacttgagcactgccatcaagctcaggctctattttcttagccagctgctttcccagctccactccccactggtcaaagctgttgatgtgccagatgataccctgaacgagatcttgtgactcatacatggcgaccaaggctccaagcatgaatggtgtgagcttggtgaacacaatagagttggttgggcgatttccttcaaagaccttatgtggcagcagcctctcaaggtcctctggactcttgcccgcagcctggagctcctttcgggcctcctccgtcgattttcccctcatcagggcctctgtctgggccaagaagttggccaggaggatcttgtgatgcagacccttccgtatggggtgctgggtctggaccgggatgangaagtnacagggtatcatcttggtgccttggtggatgagctggtaaaaagcatgctggccattggtccctggctccccccacacaatggggnctgtctggtggtccacacggggttccagatttggtgatgtatttcccattggactccatgtcgccctgctggaagtacgcagcaaagcggtgcaggtactggtcatagggcncatggcgtgtgt

SEQ ID NO: 615318 - DNA, 526 bp, Homo sapiens
gacaaacaaggggagggggtcccgtgatgggatcaggcagatgcccgcctggccgctcccccttaggggacttgggctcctcttaacattgacaggccggtataaacccccgggtcggatcgagctatgcctgatgctgccttaagccttatgaggtcgccacggaaccgtaggtgagggcccacttgaactccgtagctttcgccgtggagctacaaactggaggacaagcgcaagcccttgtcctcccccattcattcaccattcacacagagtttataacagtttttcttttttctttcccagagattctccaagaaacctgaacaaggaaagattagagatagaaaaagagagagagagagaccagtcttgccaaaaccaggacttatttccccagcatccttggatgtggactgacttcagggatggcccctgtcaggggcactttccttcctaacagagaaacataagcctctaacctaaaaccatggctctaccctttagcatcctaaaaaatgggcaa

SEQ ID NO: 615319 - DNA, 144 bp, Homo sapiens
tatgtgaagctgtttcctaatagttggacagacagactgcacgtatttcagaatacaacatcatgtctggtccgacatctgtggccctggcacaagaaggttcatgtcatcttcaactacaagggcaagaaagtgctagggcgg

SEQ ID NO: 615320 - DNA, 262 bp, Homo sapiens
agttatgatggaggggcggagtcgctcatactctgtgctttagatccacatctgctggaaggtggacagcgaggcaagtgatggagccgtcgatccacacggagtacttgcgctcaggaggagcagtgatcttgatcttcattgtgctgggttgccagggcagttgatctccttctgcatcctgtcagcaatgccagggtacatggtggtgccgcctgacagcactgtgttggcgtacaggtctttgcggatgtccacgtca

SEQ ID NO: 615321 - DNA, 639 bp, Homo sapiens
  misc_feature (265)..(265): n is a, c, g, or t
gcgctctaccgcccgggttgtaatgcaatggtgtgatcacggctcaccgcagcctcgacctcccgggctgaagcgatcttcccgcctcagcctcctgagtaactgggaccacaggcgcgccctgctggttttttttttttttttttgggtaaaaatgggggtctcgcttgtgttgggccagggctgggtctcgaatttccttggcctcaacgattcgtccttggtctcggcctcccaaaggtgccgggattgacagggcattgangccaccgcgctgtggcccctttctttgagaatgtgggccctcctttgcgtttccgcgtttcaatgtcgccccggtgcatacttttttggggagagcccacaagggcttgatagcgtgttgggatgagacctccttctttttcgcccccttttcttcttttaacccatcaaattttaaagcgctttgcacactggtgcaagacgcccccggccatgtggaagaagacacgcgccggctggcgtagattactcgagaaggcagacgaaagacggggacgggtggtgttgctgggggctcccacaccccaagggtgcgtgttgtacggggccttttcaggcaggttccacatctcctgtgggtggttggttgcaccc

SEQ ID NO: 615322 - DNA, 572 bp, Homo sapiens
gtcatgccttgttcgtagtgctcagataggagacggctgttctgacggctcctgcttccccattcctgtgtagggaagacagacttagccactggtatctgtgggacttcttggaactctgaatgccagaccttgcccagtgctagaggcgacaagtgtgtgaagttgaatgaggcttctcccaccctgctcagctgcagtggacccgagcgggcagagagagcagagtgcagcaggggccaggctgtgctcgcaggcggggcaggtgccctggatgagcatggcgcccctgggatgcctctgtgccagtgaacgggcattgtgcactggcaagtgtgccggtggaccaagtggcctcagctccagtgtgttgaccgagggtcccaaggcactcacgtgtgtggggatgttagcaacacaacggcgtggaagccccgtgattgccaggttgctcaaccaaaggcgtgtagcaagaacccaggcaaccgacacaggtcaggggaccccacacagggcacagagccccacacagcccacacagggcaggaagcccgacacagggcacagagcca

SEQ ID NO: 615323 - DNA, 319 bp, Homo sapiens
gctgccttgaaaatctgaactccttaatgccatttccttcagcaaaacaggcatctcttagagtgtcaagacaagacccagagtcttggttcctgtgtttgctccctgagtgaaaaatcatgcttcaaattgattcatagatctggcaaataccactgatactagcagctgtttgctaatattctgaatagagcttgccacagagagttcacggatttaagacatacttgaaaaaaatttgaaatgatttcattacatgaagaaaaaaataggtattgcagcatcctgttaccaagaaataaagatagaaaaataaaaa

SEQ ID NO: 615324 - DNA, 240 bp, Homo sapiens
gtcttaacgtgtcttaagatctctgtcgcaacaagccgtagttccgttttcgggtggaaacgaaaaatacctttcgtaatgaaataaatttctctgtcttgttaatgcgtaaaattagatggaaacagaattaaatgtcgtccataacatacttaaaattggagaattgtttgagggtttagacccactacggaactgtcactactcttgctaaagtggtgtagactcacgtctctctgc

SEQ ID NO: 615325 - DNA, 281 bp, Homo sapiens
gaggagcggatggagctggagaacatccggcggcggaagagggagctgctggtggagattagcgccttcgggaggagctcagtgaagccatgagcaggtggagggcctggaggcaatcaggcagtagaccttcaacgacccgaagatggcatggcagaagagttcacatgccccaagagggtatcagttcttggtggagataactcttcagacacaccgagagtccccttcctctcaaggccgagtctcacagacacctcggctctactcgggagaggagt

SEQ ID NO: 615326 - DNA, 235 bp, Homo sapiens
cacgactcaccttatccatactagtatatcgaaccatcagcctactattcaaccaatagccctggcgtacgctaaccgctaacattactgcaggcacctactcatgcacctaattggagcgccaccctaggcaatatcaaccattaaccttccttacaatattcactttcacaaattctaattttactgactatcctagaaatcgctgtcgccttaatccaagcctacggtttca

SEQ ID NO: 615327 - DNA, 1071 bp, Homo sapiens
  misc_feature (148)..(148): n is a, c, g, or t
  misc_feature (248)..(248): n is a, c, g, or t
  misc_feature (431)..(431): n is a, c, g, or t
  misc_feature (929)..(929): n is a, c, g, or t
gctcacgttttagcactcgagccccaggacttcatccatgtgacatggcatccgattcccaagacgaccgagactgtcaagatcatcactgactgtgattgggaacactcctgagtgatggagcagacgagctgctttctaccaatcnagcacctgggcccagagcaagcagtcatgctaggcactatcatttgctcaaggctgcagtcgagccgtacaggctaggtaacctggtaacatagatgtcntggtgaaattcgcctgtaccttaactgcttcatggtaatcttttcttccacagccctggatgccctggtgggcagactcgtcccttctgtggttcctttgccttgggtgcctgcagaactccagtgggtctgggcgttgcagcgcagtgtcgtagctggctcgtcctcgtcttactcttctcncagacttttagattcttatcaatcatgtcagtgtatcagcgattccttgattgcgtttgggtccccaccaaaagccgcttattagctatggttggctgttggtgcctctttaatttgggcgttacacgctaggatgaccttcccctactgtttcctcgcgcctgccagggctaaggactctcaaagctaagtggacttgtctcgtgtacgccgcctagtagcctctcggggcattctggtaaacccgaaccaatattgcgcaggaaaacgcaagaactgtgcttcgctttgggcgtgttcacgccagttgttggtcatcaatggctttcacgccaccttgtgggtggccgaaacgggggtccaagggacgcctttggggctttccttggcgggttgcagcgcttttggggggcttatcgtggacactgcagaccgaacgcagataggcaaaggagctacaaaggaaatctccctgattctccttaaggacgcatattnttcttaaaaaaagcccgaaggaaggtaatgctctgaaagcccccacttttccgccttacacaaaaagtgtgccgctcaagcgtccgcttttgcgacgttggtctcttggatgggtttgtatgtacacccatttctccacatg

SEQ ID NO: 615328 - DNA, 1337 bp, Homo sapiens
  misc_feature (3)..(4): n is a, c, g, or t
  misc_feature (19)..(19): n is a, c, g, or t
  misc_feature (43)..(43): n is a, c, g, or t
  misc_feature (51)..(51): n is a, c, g, or t
  misc_feature (67)..(67): n is a, c, g, or t
  misc_feature (100)..(100): n is a, c, g, or t
  misc_feature (117)..(117): n is a, c, g, or t
  misc_feature (177)..(177): n is a, c, g, or t
  misc_feature (211)..(211): n is a, c, g, or t
  misc_feature (213)..(213): n is a, c, g, or t
  misc_feature (225)..(225): n is a, c, g, or t
  misc_feature (318)..(318): n is a, c, g, or t
  misc_feature (361)..(362): n is a, c, g, or t
  misc_feature (364)..(364): n is a, c, g, or t
  misc_feature (398)..(398): n is a, c, g, or t
  misc_feature (410)..(410): n is a, c, g, or t
  misc_feature (484)..(485): n is a, c, g, or t
  misc_feature (498)..(498): n is a, c, g, or t
  misc_feature (523)..(523): n is a, c, g, or t
  misc_feature (541)..(541): n is a, c, g, or t
  misc_feature (620)..(620): n is a, c, g, or t
  misc_feature (693)..(693): n is a, c, g, or t
  misc_feature (699)..(699): n is a, c, g, or t
  misc_feature (712)..(712): n is a, c, g, or t
  misc_feature (853)..(853): n is a, c, g, or t
  misc_feature (873)..(873): n is a, c, g, or t
  misc_feature (900)..(900): n is a, c, g, or t
  misc_feature (921)..(921): n is a, c, g, or t
  misc_feature (1079)..(1079): n is a, c, g, or t
  misc_feature (1264)..(1264): n is a, c, g, or t
agnngccgggccctttctncgggcgacacctctgggttcaggncagccgcnccctctctcgccgctncgcaggcaccacactatatacaaattctcagtngcacattccagataggncacctagatataacgtcttaatcactaaccctctacttcaccccgcagagacgctccggncgcgcccgccacgacacaccacagtcgacagacncnacccgcgtcatnccatatcacatgattgcagcgtgtgtatgatctagagtagaagagctagtggaaatcgtagctttcctgctcgtatctctgctcggcgctccnctctatatgtgcggcgctgtgcgtcatctccgactgcaccatnncncacgcgacgcactacgtgaggcggagcgcgatancacagatacgantgtatcatcacgacccttaccccgtctgagtcgtacacaccagacaacaccacgcgacagagatacgactcgannctcttcctctccntgcttcttcctctcgcaacgtccgngcccgatggtattatgtncacgagcatatgagtattacgccactatctacactacatgctccttcactatctacatttggtattctagatatatacncataatgagaggtaggacaaagtacaacccaaacacatttcacacaatctcttcttctatcatacatccctcnagaagncagtgaactgcancatgttgacgacacatagatgtccccatatgagtcctcaacatctcgtcatactgtcgcgtcggctccctcggctatggtcgtgtaagtataggatgagtgcagaggaagacggcgagggagaagacagagaaagcggacncatacagacagacacaagangaagctacgaaacacactcagcagtangatctctcagtatcgttgacngctctgctccacatctcctctcgtatcagtctagcgacacacgctctccgctccgtaccgcacctcacgccgctactctcatttcctgactcattctcttcctcgcacatcttcacttctactccttccactcgcacgctgtagcagcgcgaccgcgntaactacctatagtcgctctgttcgtctctatagctacgcgtctctctcaataatccttaatgtcagtcagctgtcgagtatctagtgtgttttgtcttactctctactcggcttgtcgtgcgtcgtcctcgtgatgcgcgttatagatgaccgtacgaacacgatcagagtagtaccgttacancacaacgacacacgatgacacaacatcaccgtgtttacgcgcgcgctgacgcatcataagaatacacgattat

SEQ ID NO: 615329 - DNA, 470 bp, Homo sapiens
tcaacatgctatattatcatgacaggtttaaaggtctttgcagaactacgaaagcctatgtcaagtgtcaaggataaagtgagtcaggtgtacatgaatccagaggcctggaacacaatggtactcaaaaacatagctgcctcggggaaattctccagtgaccgagaagcaatgttaaagaatatgcccaaaacatctggaacgtggaaccttcagatctaaagatgtctctatccaatgatatctaacaaagtcatatggaaattgagactcgtatggaagtgtctctagaaaacataagctgcttactgaacttgaacattgttacaacattcactggtttaagtatgttagctaatagtcgtataagtaggttgagtgtctctgggaatggggagggaacattcctatgtgatagagcttataaataaagggtccattctccaaggaaatcattgactaacaaagcg

SEQ ID NO: 615330 - DNA, 371 bp, Homo sapiens
  misc_feature (49)..(49): n is a, c, g, or t
  misc_feature (316)..(316): n is a, c, g, or t
  misc_feature (342)..(342): n is a, c, g, or t
ccctttaaaacacctgtacctcaaagaatgcttttccgaattgtgcccnagtctccttcaagattgtccccctttttaaaatttgaaaattagcccagatgtggtgccttacaccctgtaatccccagcattttgggaggctgaggtaggcagatcgcttgaactgaggagttaagagaccagcttgggcaacatggtgaaacctcgtctctacaaaaaatacagaaattagccaagtgtggtggtccacccctgtagtcccagctgctcaggaggctgaggcgggaggatcgcttgcacctgggaggtcaggacntgcagtgagccaatgtcctcaccacntgtaatccagcctgagttacagagtgaga

SEQ ID NO: 615331 - DNA, 363 bp, Homo sapiens
  misc_feature (4)..(4): n is a, c, g, or t
attntggaatttttttcaatatatttgaaaacagatggagctttgcaaattccctttgaagtcacaaacctacccagagtttacctcaagaagagaccagaaaatcctgaatagccctaataaaatcccataaaagtcacagtgaaaaatttttctgcaaagaaacccccggttgcctgggtgtggtggctcatgccctgtaatcccagcaactcccagaggctgaggcaggagtattgcttcagcccacgagcttgaggttgcagtgagctatgattgcgccactgtactccagtctaggtgacagaggacaatcctgtctctaaaataaagaataataaacaaacaaacgaaaaaccaaca

SEQ ID NO: 615332 - DNA, 104 bp, Homo sapiens
gtggtggcctgcggtgtacacctcatgtgaccgacaccacaccccaagaaccaggcatacagtggatgatatccataaatatgaaacctggtgctgtgccctac

SEQ ID NO: 615333 - DNA, 216 bp, Homo sapiens
  misc_feature (178)..(178): n is a, c, g, or t
  misc_feature (180)..(180): n is a, c, g, or t
  misc_feature (182)..(182): n is a, c, g, or t
gacaggcggacagggccggggtcacgtgggcccggcgaagtgtccctcggtccctccgcccgccacgtagcactgcccgccccctccccggcctgctaccccttggttccgccgccacgtcaggccgggcgcaacgcgacggggtcggcggcgcggaataggcaaggccaggtcgacncngnctacggagctgccgcactcaccttcttgcggtcc

SEQ ID NO: 615334 - DNA, 308 bp, Homo sapiens
cacgaggctcactgcaacctccacctcccgggctgaagtgattctcctgccttagccacctgagtagctgggattacaggtgtccaccaccatgaccggctaatttctgtatttttagtagagatggggtttcaccatgttggccaggctggtttcgaactcctgacctccagtgatctgcccaccttggcctcccaaagtgctgggattacaggcgtgagccaccatgcccaggtttcaagtttccttttcatttctaaaacctgcctcagaatttcctccccaatggtccactccaacatttgata

SEQ ID NO: 615335 - DNA, 279 bp, Homo sapiens
gaggctctctgtgggtccctagtggggaaaatgactcctccccacctacagtcttggtcagcagccccactgagctgtgttcatgtcgacttccagctccaaccttatctcctgggtcctgccagagttgacctctctgttgcgggcattcttgttctggaaaaggcagcgcggtgactcgcgcgtccggaagaccaggtccagggtctcagtggctggaactaatttcccactccattccccttcactccgttacagctcctttttggaatgagggga

SEQ ID NO: 615336 - DNA, 1390 bp, Homo sapiens
ttggggggaaactacttgggaccggttttccagcccgccctctcggttgcacgccatgggtgtatactcgggggggctctctttgtcgctgcccgcggcggtttccggccacccttttttttgcccccggcgtctcccggagttttttcgcctgtgttgtcgtaagttgtcccgccgcctctttcgggtgttatacccggggggtgtgcagcgccacccaaggttcactagtgctccacttctctgttgtgggtactcccccggctcctcgggtgttcccccccccccccatgggtgccttttaagggaggatataaaaaaggagacattttggtgggaaaaaaaggcgcccctagaaaattggggaatagaaatacccccccccctctggcttataccccggggaatattcctttggagtgaatattgatggggcaaataaattgggggacacacacagagggcgccctgcgcccaaaatgtagaggtttatgaccccccattgtatacagagagggaaaatgaaaaaggtttgggggaggcgactacaaaagtgagaggagggtgaaatagaataaagaaaaggggttgatattgcggtgaagaggacaagaacagcgatatcgggagagagatgtatacagaaatttgtgagggagaactctcgaggttccacactctatccgggcgccaacacgcgggcccacacctgagaagaatagagatgagaggagattcaccgagatggtctgagtgcccccgcagagacgcccacgagaaggccccgcgcccgagaggagagagactctatacacccacgccccacaaaaagagagaataagtgtttaaatctctataaaattaaaatagagtgtccgccctccggagacctcatatgtgtcacaccgctctccacacttgtcccgctgtctctcacgagagttctataaaacgctggggtgcaccctctttcgagagtatagagagagaggtcccgccccgcgcccacccgcgtgggccacagtggccacacccccacagatgaacaccgccgcgcttctccacccacacccacacccccacacccactgaggagaatttgcacacaccagcgggagaggagaaaaaagagaccccacaaacttcccaaggccctcgcttttttttcttaaaaagtaactttaaaaaaggaaaatttgttttgtaattttttaatttaccacttttaaaatttttgtacacacataattgttaagggtcacacccactttttaaatgattctcggaatgacccaaccagccttcggagcgttttctgtcctacttctgactttacttgtggtgtgacccagttcccttataatctccaaggagaaaaaaaaccccttgt

SEQ ID NO: 615337 - DNA, 706 bp, Homo sapiens
gagacaaatactttgtatttttaatacagaaaagtatgcctcggctcccaaagtgctggaattacagacatgagccactgtgcctggcctgctcactttctgatgctgctttttggtgttggttggttatttgttggtcttgagacggagtctcgctctgtcaccaggctggagtgcagtggcgcaaatctcggctcatgtgcaacctccgcctcccaggttcaagcgattctcctgcctcagcctgcggagtagctgggactataggtgcgtgccaaccacgtccagccactgatgctgtttgccactgatgctgtttgaaatgatatttggtctcataaaaactaggccaggcatggtggctcattcctgtaatcccagcacttgtgggaggccaaggtgggtggatcacctgaggtcaggagtgggagatgagcctggacaacatggaaaaaccccacctctactaagaaattacaaaaacagaaaaaatgcaacaaaaatttatagtagtggcgccagggggtttataacactctcgaggcagagaaatttggttatgggcaaaaagagagattcgggtgtgacaaggggtgggcccataacttaagaggggggattaaacctgtacagaggtgggtgttctaccggaatgtttttgaagtttgcgtattttacataggtgggataatttcaattggttccc

SEQ ID NO: 615338 - DNA, 619 bp, Homo sapiens
  misc_feature (23)..(23): n is a, c, g, or t
  misc_feature (99)..(99): n is a, c, g, or t
  misc_feature (101)..(101): n is a, c, g, or t
  misc_feature (122)..(122): n is a, c, g, or t
  misc_feature (140)..(140): n is a, c, g, or t
  misc_feature (146)..(146): n is a, c, g, or t
  misc_feature (156)..(156): n is a, c, g, or t
  misc_feature (171)..(171): n is a, c, g, or t
  misc_feature (173)..(174): n is a, c, g, or t
  misc_feature (226)..(226): n is a, c, g, or t
  misc_feature (255)..(256): n is a, c, g, or t
  misc_feature (318)..(318): n is a, c, g, or t
  misc_feature (349)..(349): n is a, c, g, or t
  misc_feature (383)..(383): n is a, c, g, or t
  misc_feature (389)..(390): n is a, c, g, or t
  misc_feature (393)..(393): n is a, c, g, or t
  misc_feature (395)..(395): n is a, c, g, or t
  misc_feature (397)..(398): n is a, c, g, or t
  misc_feature (400)..(400): n is a, c, g, or t
  misc_feature (411)..(411): n is a, c, g, or t
  misc_feature (417)..(417): n is a, c, g, or t
  misc_feature (425)..(425): n is a, c, g, or t
  misc_feature (436)..(436): n is a, c, g, or t
  misc_feature (441)..(441): n is a, c, g, or t
  misc_feature (448)..(448): n is a, c, g, or t
  misc_feature (495)..(495): n is a, c, g, or t
  misc_feature (501)..(501): n is a, c, g, or t
  misc_feature (506)..(506): n is a, c, g, or t
  misc_feature (522)..(522): n is a, c, g, or t
  misc_feature (584)..(584): n is a, c, g, or t
cgcgggccagtgccccgcggcgncgggccgagtgcgtttggggggggttgtggggcgcggctgcctttttctggggggggggcggccagcgtgtgcccngnggctcgctgggcctgtgtggncgcgcggcggtggcgggnggggtntctgcctgtngcttcctttcgctcngnnctgtctcctcgtccccctggggttcgccccgtttccccgggtggcttggggnggcgtttgtgcttggtttttgttgtggtnngtgctgttctgtgtttttgcgattcggacgggtgaggggccttgttgtttagcggtgggggngccaggggctctgtctccattctctcatcanacacaagttatgcatctaccaaaaaaaaaaaaanaaaaannctntncnncnaaaaaactgtnctctgnggaggcanaggtgttaaanataangaacctncagctcagattcaacaggcacctgccaagtccacactcaggactgtnaaagcntcaanaacatgaggtccaganacattcactgtggaaggctctgcccacgcgaacaaagctgttagctctagcaaaagggacantgccttcttcctccctcacttctcacctggtaagc

SEQ ID NO: 615339 - DNA, 169 bp, Homo sapiens
tgccggaccagctgattgcttttggtgattagtcaaagagaacaaatcccatatctcgatccgactcctccgactcttccttggtttcaaccttagctggggctgcagcatgcagcatggagcatgctgtggtggcagcagccacagggtgcagcagccacaaatggca

SEQ ID NO: 615340 - DNA, 118 bp, Homo sapiens
cagaggaccctatcgcggtcggcggcgatcttttttgctggaactttagcagcagcagcagcagcagcagcagcagcagcagcagcagcagcagcagcaacaacagcagcaacaacag

SEQ ID NO: 615341 - DNA, 912 bp, Homo sapiens
  misc_feature (757)..(757): n is a, c, g, or t
gtcaccatgagcctctggcagcccctggtcctggtgctcctggtgctgggctgctgcttatgctgcaccccagacagtcgccagtactcacccttgtgtctcttccctgggatgacctgagaacgcaatctcaccgagcgaggcagtctggtcatgaggaatacctgtagccgctatggttacacttcgggtgagcatggagatgacgtggtagacgtctgataaattctctagggcgctctgcgacttgtctgactgtctacccagaagacagactgatccctgcccacgagatcctggttgagctggaatatgcgcactacagctgaatggccatgacgaaaccccacggtgcggggtcccagacctgagtgcatgattccaaacctttgagggcgatctcaagtggtaccaacacaacatcacctattggatccaaaactactcggaagacttgccgcgggcggtgattgacgacgcctttgcccgcgccttctgcactgtggagcgcggtagacgccgactcaccttcactcgcgtgtacagccgggacgcagacatcgtcgatccagttatggtgtctgcggagcactggagacgggtatcccttcgacgggaaggacgggctcctggacacactgcctttcctcctggccccggcattcagggagacgcccatttcagacgatgacgagttagtggtccctggtgcaagggcgtcgtggtccaactcggttggaaacgcagatggcgcggnctgccacttccccttcatcttcgagggccgctcctactctgcctgcagcacctgacggtcgcgtccgacggcttgccctggtgcagtaccacggccaactacgacaccgacgaacggttcggcttctgccccagcgagaaatctacaccgggagg

SEQ ID NO: 615342 - DNA, 769 bp, Homo sapiens
  misc_feature (97)..(97): n is a, c, g, or t
  misc_feature (137)..(137): n is a, c, g, or t
  misc_feature (622)..(623): n is a, c, g, or t
ggcatcacgtatccctcaaagagagaaacctggacacatgtaccaaaacgaagattatcctgtcagaagcgggcttgcgaagcagaaatccatccgnttctgtgggcttaggcgattaactggatcccatcgtcaangttatctctggagaaacgaagtcacactcagagccctgttgacactgagcagcgttgaccgtcaaactgcacgtgacgttcctgttacatgcgaggagtcaggccgtctgtcgcgtccttgcgtgaacagcactggtcagccgctgacggactggctctactcagacattgtaggcgtcagagaactggagttagtctgatccgtctagttgctcttagttcgggacgtacatattgatcgcgaagtatatggacaatccaaaggattgtgtcgtccgtgacacagttgtcagcgttctaacaaggtagtccgtcaagtgcgtgactgctgcagtctgtcagcatgtgactggtgagcatctgtattacgctggctatacaagtatctgtctttttgagtggaagacaggctcctagttctcaagcaagcacctgaggagttgccgattttccatcggaccacagtcaagcaagatccatatccnnaacaggtcaacaaagacgttccttgcacggtctgtggatactaagctaacgtcttggctctcatgaggacaggaaaatgcaacttcaacacatcatggctcaagctgtgattagaactttcctgagaatctctgccatttgagata

SEQ ID NO: 615343 - DNA, 425 bp, Homo sapiens
  misc_feature (1)..(1): n is a, c, g, or t
nccccggcccgctatccggttcaatcctcccacttcagcctcccaaggagctatgtctataggtgcgtaccaccgcgcccaattaatttttgtatttttgtgtgtgtgttacacgaagggttgcccaggctggtctcaaactcatgggctcaagtgattctcctgcctcagcctcccgagtagctgggattacaggcgcctgccaccacacctggctaattttttatatttttagtagagacggggtttcactatgttggccgggctggtcttgaactcctgaccttgtgatccaccagcttcggcctcccaaaatgctgggattgcaggtgtgagccacctcgaccagactcaaaaatgttttaaaaaatccggaaaaatctgcaactggacattttgatagattaattgaaccggatagcttg

SEQ ID NO: 615344 - DNA, 255 bp, Homo sapiens
  misc_feature (100)..(100): n is a, c, g, or t
tggaccgtgtgtgtgtggttggcgtggtactgcaccatggcagcgtcggagcgacgtcgtcgtcgtggtccaactcggttggaaacgcagatggcgcggnctgccacttccccttcatcttcgagggccgctcctactctgcctgcagcacctgacggtcgcgtccgacggcttgccctggtgcagtaccacggccaactacgacaccgacgaacggttcggcttctgccccagcgagaaatctacaccgggagg

SEQ ID NO: 615345 - DNA, 375 bp, Homo sapiens
gagggtatactgatccgggtctcagacaagggtgttccagtacgtcagcgatctagatgaatggactcgctggctctcatgaacatgcaacgtcgagcagcccggttcaacctggcggaacccagcaagaacacagcaagtcctaggaatttgctcagtgtgaattagaaaaccgttgtgtggtagcgtgaagtgaaattctagtttctctccggaagcccaggagagacccagcagtaaaagaaaagcagacatcacaaaagcaaagctgatgctggggtgggagcccgtggtcccgctggaggaaagtttagacagagccattgactacttccgtaaagaactcgagtaccaggccaatgattcagtttccgt

SEQ ID NO: 615346 - DNA, 743 bp, Homo sapiens
gctggaggcggcggcggtggccagcgcggctggcgcctggccgtattctccgggctgcggaggggttgccattaggggactcctgagtgtcctatctccagtgctgcgtgtgacttgcactttccctgtgatgtgtgaatgctgctgtgaatgtgctggacctggcctgccatgtccagcgttcagggcacgtgatgtgactgtggatgtgaccatatatgacgattgggggacgtgagccttgggcatgctggccagttttgcgatctgttgccggacagtgcctggccatgaaaggtggcactgtgtgctaatgtgcatgtactgcaggcccaacgttcatcaactgatagctgcctgcctgtactatccatgcctggctagtgggtgttgatgcctgcgtgagtgatgatctgatggctgggtgaggtgttgaaccatacctcgcgtgtgatggatcctggccagcctccaaagcatcaatcacaccccttggctactcgactactcttctctagaccgacactaatgaccgagacctcgttgggttaccatacaatgccttcggtgcaggcctctgggtccttcctcgtgccagtgttggatgcctcctttctgcacttacccttagtggctgagactgacatcctgatcgtctgctttgacctgtgatgcgacctgacgtggcccactctcaggtttccttgccaactgcagactaccctgcggactggcggttcaac

SEQ ID NO: 615347 - DNA, 427 bp, Homo sapiens
acaggcttgtgtggcacaaacaggtgccattagttaggtacaaccagatgtttttgatggtgcttgagatgaaccatgagcctctacaaagacaggctggtcacttctgatgaaaactccaccctctagccaaggatgatgctactcccatgcaggtccccaatgtgggggacactggaaatagcaaccagggttcaccttctgctcaaccaaactttaatcagacaaaagcagacagcagcagctgaggagacactaggatttttgcatctatgcagtaacaggtattgtggaattatatggaaagcaatctatttgtccataatccaatacagagcaaattaaaatactgccaataaacccactaaaacaaacattatgtaagatgaaaacagggagaatttcaaagaaacaatgtcacataaaa

SEQ ID NO: 615348 - DNA, 1620 bp, Homo sapiens
agcggattctcaagcttgaaaacccacctgcaatcatttgggcgggggggggggggcttcttataagcgcccaggtaaacttggtctgaaggcagaattgcccttttctctggaatcttctgctaaggtctacggaaggtgtgaataaggtgatcacgtgcattttgggttggcgaggaactccctttagagccaactcccgtgatctctccggggggaaggaggcctctgtgggaagaaaaccgagttattcaagaagaaaatcttggttagttgtgcactgtgtgtggaagaaagatatccgaacccgaaaaagctgtggagccaaaaaaccccaagtcttctccagaacgacaattcgtggtttgtgaaaaacttctccgaagagaaaaactctatacgctctcttggaagagacattatcaccaacatgtggagacactgtggcgacaaacaccgcttctttctccaaatataaagacaccggtggtgtctgcagtgacatagacatgtgggtgtctcctgtgagaagaccccggcagagggtctccaagggccgtgtaacacagagagtctcacacagacaaacccgaggccacagagcgtgaaacagaacactctttgagcgagaactcttcgtgtgtctcccccctttgtgaacaaccccgtgtgtgtgtgggaaacgctgtgataatccaaaaacccttcgagagggggaaacaaacgcaaagtgtgtatcacccccggttggtgttaaacctccgagggtggggcctctccaacctaacaatttctgtggctgtggagacagaaatataactctccatgttgcgataacaccacttttaacaacaatatacaggggaaggaactcaggttacccatatttaaagacacttaattccttttcaaaggcagtttcactctatggtgggacagaaactatttaaccatattcagggggcaaaacacaactgttgggggcacatagaagacaactttccacgggagaaaatagagacacaggcccagaaataaaatttgggtaggcttataccaccaacgagttggggggggagaaaccaccaaaaatttcgcccgttggggtatcccaggcatgtgtatatgatgaaaaagcgccccagaaagataagctaattttttgtgcgaagaaaagcgaggtggtatgtataacacagttagtcgagtatttatatcgagggagaagaacaaacaaaagaaggcacgcactcctgttgtaatagtttacccccaagcagaatcaacaaacggtgagttacttattaacacagcagactttaaaatagtactctttttgaaaagcaacacatgggggtgttgagtgggaacaccaaaaaaacattcgatcgatatagagagcagcaggaagaaaaagaactaagcagaaaccataacaagtatatagaaagatacagaagagacaagacggtaaagacaatagtagtgttgtgcacacagcagacataataaaggaggaggagggatattagtatgcacagactaggtgtgtactactcaaaactacaagaggcatgaagtatgaataacaaagaagcatatgtgattgatgtagaacgg

SEQ ID NO: 615349 - DNA, 209 bp, Homo sapiens
gaactacatcctttcccactttttcgggtttacgacgacaccaagttggtccgttctagtaggccactttcttggtcagggacccggggttcctacggcccctttgtcctggaagaggaaaggacctcgaccaaatcgacctataccctcccccaaaccgacggacacgggtcctcgtactgacggaactccgacgacaggaaagtgtc

SEQ ID NO: 615350 - DNA, 379 bp, Homo sapiens
ctgaactcattacagctcatagcaatgatggtcttaacccactgagcaaggccaggcatcgaacctgcatcctcatggttgctagtcagatttgtttctgctgtacatgatgggaactccagactgagttttatttaagaggtgttgatataacagaaaagaagtcaaaggagaagtgaggtgcgcccattgatccagagagttttggagttacctagatccttgatgtgacccaggccagtgctttgagaatatgttccacagatcatgggtgtctgaatcacttgtgacaggtgttatatatagggagggctgggctccaccatcacctgctaaaccagactcaacaagacaggaattcttgacctaatgttgcacc

SEQ ID NO: 615351 - DNA, 685 bp, Homo sapiens
  misc_feature (292)..(292): n is a, c, g, or t
  misc_feature (339)..(339): n is a, c, g, or t
ggtttgtgagatggccttcctttgacggttttggaatttttttccggccgccgaaaagattctaaagtgaagcaaaattaccctcttgggcctgtttttcggcccctcttttaagtgagcctttagtccaggggggggctccataatacaaccaccgtggccatcaccatacctgtggggaccccaacctaaaagaagcttaaagcctttttgtgggccccaatcccaacaggaaattaagcggcccggcgggaaaaatttggggttgtttgtgggctcccgaaaatctctntgctggtgtcaaaatcagtttggaagggccttttttagtgcgcaagnccgagcgttccaagcaggggaaaaaccccttcccacccagggcctttaagaactgggggttttgctttcaacccaaatggcccattccaagtggggaaagcaaggtgagctttaaccttggggcttgggcttttgcccctccaaaccaaccggtggtttccctggaaagggcccttgttgttttccccattgcattcaccaccaccgaaaatcccaggtggtccttgtgcctggcccggttaatgtgcttttgcgggcaagggccttcgtggttttgtacattgcggtaccaagaggcctacacccatccttgcaaaataagggtgcccaataaccacttgtaaac

SEQ ID NO: 615352 - DNA, 121 bp, Homo sapiens
ccagaccgtaggactgggagagataggagaagtaggagcgctgtgattagggcggatcagacgaagaggggcgtatggtattgggttatggcagtggtcctacgtgtgactgacactctgt

SEQ ID NO: 615353 - DNA, 295 bp, Homo sapiens
ggggagccccgcgcggaggtggtgccccactcgtccccccgggagcggtaataggctacaagaccgcgtcgctcacctgtacctcgaccgcccatcgcgcgtattggtgccgacgcttccacgacttccgcagctccgcagtcgcccgggcccggcagccccgcccctggccgaacacccctaaacccggggacatcctcctaccgcgtccgcgtcctgagccgccggcagcgccacgcccacgccagcggcgcagcgaggcagcctggagtgaccgcgaccaaggagcggtcgc

SEQ ID NO: 615354 - DNA, 356 bp, Homo sapiens
gtcgatcagaggatcccccggtacgggagtggcgtcatcttggcgatgacaggccctttcggcccatgtacttcttggccaggcatgttgtacacgggctctagctgcttgcagttcccgcaccatggcgcgtagaactcgatgaggacgtccttcttggggtcaatcacaatggagtcaaaggtctttcccaccacgaccttgacgggtcccttgttgttcttgggcactggctgggatttgatgactggcttcagttttccttttttgaaagcagtgacaaactcgcggagggtgtcagagtcaaactcctctggctccatggcgaacttcttcccactcccgtaccaggggta

SEQ ID NO: 615355 - DNA, 657 bp, Homo sapiens
tagatgctagtacataaaaccacctgaaattcttaaaatcagcgcgccggcccgtaaaaacaaggctcgagagaggctggtatgagcggcccgagatggcgccgctgcactgggtcacagaggctggctagttgacccctcgacaatcgaaacaagtcacgcacaagctgggtaaaaacaagcccggacagcacaacggtaacgactctgacgattgccctcgcacggacggcgccgcacttatacaccagcgtatctgcaccttggagggctactagcgccgacagcttgtacgggcgcgggcttcgctggcagctagatgaaaaatctgctaacaatgcacacggtgcgtataacggcagctacgcccatcatgcgcgccgagataagaggagcatccaatgagcagcaccgcacaaactgctgaaggcgaaaacattctcaatcgttgatgacgatccgggggctgagcagcctgatggagcgtattacaactccaagggctatcgtgcccgcgccggtgccgaacaccgaacagatggatcgtctgaaagggcgtgaagtttcaacctggtcgtaccgaactgatgttgcccggcgaagacggcacactgactgcagcgcctgcgcgtgcgaacatcagatcccgacatcatg

SEQ ID NO: 615356 - DNA, 386 bp, Homo sapiens
tatcttggatttacatgtgccacccattgcatagtgaccttacccagatgcgttatcaaaaaaaacattgattcgtttatttatagagccaggtgctaagctatgttgctatgctggatatgaactcgggctcaagtcctacctcagcctcctaagtaagctgtgactacaggcgtgtgctactgagcccagcccagatgctttaataagtacagtcctatctgagtctttcatgaatttatttagtaaaatagaatttagattgtttgtcttacatccacgtttttattctttcatacatggcacctatagaagacctaaggttagtataagtaacatgaaaccattctcctccgcataagcctgcgtcagatgaaaacactgcc

SEQ ID NO: 615357 - DNA, 210 bp, Homo sapiens
  misc_feature (1)..(1): n is a, c, g, or t
ntccatgcatacccgacggagcagctaaaacttaaaaacctgacagtaccaacgctatccagtgaactctcacccattgcttggtgtgtgaatacaaaagtgctaaagcctgctttagaagacagtttcacagactctcacagaactaaatataaatatattcttggggcctggactgttggttgtgtacaacggccttgttcattccca

SEQ ID NO: 615358 - DNA, 1142 bp, Homo sapiens
ccttgtacttgtcttgaattccctttgatattgttgacccactgctgtctgaaaaaaaaaaaaaaaaaaaaaaaaaaaaaaaaaaaaaaaaaaaaaaaaaaaaaaaaaaaaaaaaaaaaaaaaaaaaaaaaaattttttttttttttttttattttatttattttgtgtttaaaataacacttcacacacacaccaccatctcattcattatatatataaaacatagtactactcatctatatatttagttttcacttatattattattattccttctgttttatttcttttttcattctatctcatttattttttctcaacatagtcttttccaattctctgttttctatccctttcttctctccttttcgccccttctctatcttttctttttcttttttgtccacccactttattgtttaacatcatctatccactctcttctctatctccatactcacttccctttcctcctctctcttctacaatcaactctttttcttctctctttcttttgcttttgatgttgtgcgtccatccaactcctctccttcacttttccatttcgtcgaatacgaatattctttcgcttactctttctctcttaaatctcatcgtcttcacccttttcatttcattcttatgtttacttctttctctaaaaagcggttggtctcactccacctctcttcatctcatcactatcgtactatatgattataaccctcactttagatgttactatccttatattcgtctatgtttaaccttactttttttattttaattttttgtatcacgacttagtaccaattatattttgtactttcatgagtttgtatatctcataatattacttaactcacactcctagattattccagactgtcatcttgagttacttgattcattcttctgtcgtaattcaactaaccttcatcaaactcacctttttcataccttatccatcgtccctcctaactcacactatccccaacagtgttaactaatgtattttaccatttacatcttccatctttttaaatgcttacagtcctctttctatctccgatatctcctagctatcgactatcatgccataccttcatcctcctccccaacacttaccacacgctatacc

SEQ ID NO: 615359 - DNA, 165 bp, Homo sapiens
tcctgtgccatatgcaaagcctgccatttgttacttggactgcccccatgcagcagtctgtgttccaagacacactagtgtccccatttgcacactaagagttcctagccagcatcaagacctgatgtggtataagagtagcaggagtagaggaaccgagcgggt

SEQ ID NO: 615360 - DNA, 158 bp, Homo sapiens
  misc_feature (80)..(80): n is a, c, g, or t
tcagggcaaatcttttgcgccaagatctgatgagacgacaggaagaattacgacgcatggaagaacttcacaatcaaganatgcagaaacgtaaagaaatgcaattgaggcaagaggaggaacgacgtagaagagaggaagagatgatgattcgtcac

SEQ ID NO: 615361 - DNA, 512 bp, Homo sapiens
ctgcacattgtgaagaagggagtccgatggacgacatgctggatgctgatcaaacaaaccctacaacatgcaaccttgtgtgacaaaagcattctccatctccctaatgatggttgcttaaacattcatgccaagaaccagaacctcggactgtctctatgcccgtagcacgagagtgtgcgactccattcatcctgcggtcacgctggagcgactcgcgcaagtaacggagccctgaccacccacgttgcttacgcttccagtcaccagacaggaaccaacagaaacccgctctctacctacgcaacctgcaatgtccacttcatctctttccaaaacacacgtcctcccatctattatcaccaaacagcacctcagtctctcccatccccgttcccgctgaaaattccgacgcaaaccttgggtcacaacccttccccttcccccaactacggcccattgcatcaccaacaccacggttcctctgctccctcatctcctccctccttccc

SEQ ID NO: 615362 - DNA, 677 bp, Homo sapiens
agcagcgcccaaggtggagctgatgccagaatgcggtgtgcagagtctgtggacacgcgctgcgtgtacattctggactgttgtgtccgacgtgttcatctggtcggcgcaagtcccgcgctggtgcggcgctgcgcctcaagctgggtcaggagctgtgcgggatgctgcaccgggcacgccatgccacggtcagccgcagcctcgagggcaccgaggcgcaggtgttcaaggccaagttcaagaattgggacgatgtgtttgacggtggactacacacgcaatgcggaggccgtgctgcagaagcccgggtctctccgggaaggtgaaacgcgacgccgagaagaaagaccagatgaaggctgacctcactgcggcttttcctgccgggaagccgccatgtcgcttggccgagggcgggagcagttgatggaggagtggaaccgaagacctagacggcatggacgggtttcgtgctgggagtggcaagaagtttgcgcggggtgccggaaagaggagtttggccacttctacacgcgaggagttgtaggtcttcctctgcagggtactgggttgctgtggagtacgaggaggaggaaaagaaggacggaccacggaggagaatggtcgagtgcaaaagatggcgagggaagcaaccggttgaggcaatagggaaa

SEQ ID NO: 615363 - DNA, 151 bp, Homo sapiens
caagcagttaatacatgactcacggtgaagtgctatgctaagcccaatgagggtgctatcgtggaggttgcacttggaagggtactacaagtgacaatgctctttgacacagcgggtacctccgtctttgagaattggcgaggggagagaa

SEQ ID NO: 615364 - DNA, 471 bp, Homo sapiens
gccggtccccaattcggttttgcagagccgacgtcaccggaaagaatgaccaaaggaggtcggcgcagtacggaatcaagcagcgttgcggcacctgggtgatggcgctggcccacaattccaggccagctgggtggactagcaggccgagaatcttcgacaagcgagccttctgatcgtccacgccaatcagccgatccaatcgggtgcgggcgtcgatgtccggatagatgcgacgttgatcaaacaactcgtcaagggttggctttgagtgcattagtagctcctgacactgaggcggtcgagtgccttgccacccgcagagtagctgcggtcagacaccaggcttccgctgataccaggctcggctgccccggtacgctgaaatggaagcgacttttcaaatgactcccgctgaggagccgacagcgtgaaccaggcagaggaatacgtcaggtagttgtagaagct

SEQ ID NO: 615365 - DNA, 390 bp, Homo sapiens
ttcttttatctctctctttttaaaacagacaggtctccctctgtcacccaggctggagtgcatggcaccatcatagttcactgcagccttgaactcccgggctcaagcaatcctatttcagcctcgcaggtagctgggaccacaggccctcaccaccacgcctggccagttttaaaattgtttgtagaacgacgtctcactatgttgcccaggttggtgttgaactcctgggcttatcagcaggccttggcctcccaaagtgctgggattacaggcatgagccaccgaggtcggcctattccttactctagattaggggtgtccaatcttttggcttccctgggccacactggaagaattgccttgggccacacataaaatacactaaac

SEQ ID NO: 615366 - DNA, 235 bp, Homo sapiens
tacagtgatcttaacggctgttacctacaggttcaaacaggtaatgattagccaacgccagtgaagcgccggttgaagattcgatccttgccgacaagatctgcatccactgcggttttaaggttgtcgtagataacccgctgcggtacgccgccaaagaacgccaagggcgcgggttatgcgcatctgagcacccatctcctgggtcccctcgcgggatagggcccaccacaaa

SEQ ID NO: 615367 - DNA, 218 bp, Homo sapiens
attatttataaattttagtgagcaccaccaaagttaggattcaattgagtttgaattcaaattcattcaaaagttgcacaaatttatttcttttttcctgaacattcctttacttcagattgacaattcattctatttagagcgctattttaagaaaccttgatgaatcgcccttgactaaaggaaacaaagtagaattttatacagatggaaaaaga

SEQ ID NO: 615368 - DNA, 469 bp, Homo sapiens
aaagttagtctttgagaagataacaaaatcaacaaaacgttagtgaaactcagaaaaaacagaaaaaaagagactcaaatttgaaaaaatcataaacggaagtagtgatatgtcacaatggacaccatagaaatataaaggatcattagagagtactatgaacaacaatatgccaataaatttgaaaatttaaaggaaatgaataaattcctggacacatacaacctataaagattgaacccagaaggaaaagaaaacacaaatagaccaattacaagtctatgagagagaatcagtagtaaaaggtctttcaacaacaaaaaaatccaaaaccagacggctttactgctgaattctaccaaacctttaaagaagaattaataccaattctttccaaactatcccagaaaataaaagaggagggaattcttcctaattcattctacaaggccagcagaaccctgatacc

SEQ ID NO: 615369 - DNA, 161 bp, Homo sapiens
  misc_feature (21)..(21): n is a, c, g, or t
tggcactagactgtagagtantacaactgcatccaaagaaaattccctgaagcttgcagcctgtggcacaccatgtccctcagatgtagagctgatgggaggccatgctgtccatgaacggccgcaccaggttgtcctgtggagaagtaaaagatgagccc

SEQ ID NO: 615370 - DNA, 770 bp, Homo sapiens
gagccagaacacagcgtgttgtgaaaactaccccttaagagccaaaaggggaacaggaaaagcactcatatcaacattgtcgtcaattggacagcatagatgcgagcaagtccatccaggtactggccactctgagtctatagagagtgcggtggcatcgagcaaaatgaacccatttgcacatgacattgtgaagcataggcgagggctgactgagtactgcggtagataggggtcgtcccattcatggatatggcctgtggctctgtaggagtaaccctagaacaagtctgcagccgtgtagagctggttgaggtattcgaccattgtgaataatctcccgtatgtctcgaggaaaagtatgtagacgtaacccacgtctaaagttgaccatcattgggttgagcattaattctaatgttgtaatgtctcacccgacgcgaacgatcgaggaagaagctctatatgcaaataaagcacttggaatttacaacggggtacagtctcagggcgtgcatctgggtgctggtccctgacttgttttgctcgctggatgttgggtgagagttttggagaggcatgggcttattttgcgcaagagaaactcggggcatgcacctccgagcacactattgcccctatcctgtgcattagcacctcatgggggttgttgaaagagcaaacttaacattctgctcgcgcgcttgaacccaacaaataggagttcccaccttgaacccagccctaacagtccagaaacgagattcttg

SEQ ID NO: 615371 - DNA, 373 bp, Homo sapiens
tgtgttttatagtttcacatattttcattatggtgattattgttgtcatttccacatgtaagaccccctgtagcatttcttgcaaggccagactagtggtgatggattcccttagttttgctagtctgtgaaatattttatttgtcctttatttctgaaggttagctttgctgggcgtattcttgggctaataatttttttcttctagtactttgactatattatcctgtcctctcctggactataggatttctgctgagaaattcactgttagtctaatggggattcccttatatgacttgatgcttttatcttgctgcttttagaattctttctttgtctttgacttttgacaatttaactggaatagtgc

SEQ ID NO: 615372 - DNA, 949 bp, Homo sapiens
  misc_feature (363)..(363): n is a, c, g, or t
gctggcctggccaatgcctggacctgcttcggcaccgcccgcccgatccctccacccgtgtggcctggcaatggctgggcgcagtttctgctcttgtggtgtggtggggctgctgcttgtgtcttgcgctgtcctggggtcctatgtgatgacctgctgccaatccctgactctcctgtgtgcacatcccatgtggcaactgcagcccacccctggctctggagccactggaagcccctgtgctggctgaccacctgctcaatggatcaactgctgagctggaccctggtgcctgggtcgctgcctctgtgtgtgtgcgcttgtacacctgctggcctgtctgcgtgctttttgttgcttgtnaccaatgttggttttgcatgggtgaaacatgattgaacacttgctgtcgttctccagctgatggatgtgcaatgcaatgcatgcagccacttgcatgtcatgatgcaacatgctgtgcccagttgacacaacatgctggcccatgacagagcagcacctgaacaacctgatggcccagctggaccccctttttgagctgtgtgactactctggctggagcccagcagtgagcttctgaacatgaagctatggaccatccacgaagctgctgcaagatagcaagccggacaagggatatgggaggcttcagaaccagaggccatgcagacctcttcctgaggactttctggttacacggaggcaccaggaggacattgggtgacagtcagtgcctgcgaaggagcccaaaattggagcacagatgacctttcacctagctaattcctggcagtggggcgggaacaacggcaacgtgcgccagctctggcgcagggcgccgttacagagccttggctggggcatagggtgcatcaaggtgataggtcgctaaaaaacacgctgtgcttcctgacaccaacacacatgt

SEQ ID NO: 615373 - DNA, 403 bp, Homo sapiens
aggcaggccaggcttaggaactgctgagcaatgagaagactgtgcagttagtgtaagctaggaacatgccttattcccttaagcccatatggaggggatggcaagcctagtgcctacttaccaacctcctctgaaaggacagggcaaggctgctgccactgccacctctgcgggcgaatgagcgtggctcccaggcagaggaaggacaaggaacttggacaagatgctctttaagttgccttccagttgtggtggcttctgtggttttcttatctttgttaacttacctctgagtcacctacttccagaaataatcttggcaagtttcccgtaacagcatacatacctcaagacaaaaacccattagcaaaatatcaagaaaaaaaatcagtaaattaaaaaa

SEQ ID NO: 615374 - DNA, 670 bp, Homo sapiens
  misc_feature (459)..(459): n is a, c, g, or t
ccaatgccgcagacgtgattttggcacgggctgcgagaattagcggatcaccgcaagcgagccggaccgcttgcacaaggacatgaggatcacgttactgatcgataactagatctggtccgagtctatcaatagattcacgtgcagtggtaactttctagtcaactccgtaaagcttgcacgagtgatgataatgccactgcatgttctgacacgctactatgagcgaaccaggtccctggcatcacgttgctatcagatacaacaattttcgcgtgaaagtgggtaacattggcaaattgcaggtggacgtctacatgtagctagaaattaaactgcgcacgctgtatcatagtcagggtcgcatatgtaactacagtctacagaatgtagatgctgacgcgatgccttgtagcatgcagagctactacggttactaggtgctacgaatccaccagnccatgcagagaagcggaactgggtcaccgaatttgaccaatgtcctacaaacccgtcacccacggagcagggattgaccgatcactgattacagctcttatactggaactatgaaagggccactttggttctacttgtcaaggccaacatttccgtcccccggctcctctcaagactcccggtttcccccaacccttctcacgttccccgc

SEQ ID NO: 615375 - DNA, 717 bp, Homo sapiens
  misc_feature (631)..(631): n is a, c, g, or t
  misc_feature (633)..(633): n is a, c, g, or t
atcagccggtaccttcagcgacgccaacacatgtggatgaggtgaaaatcagaattgccaacatgcatgttcccatctgaagtcatcaagacaacactctgccttctttttttttgagacagggtctcactcagttgcccagggtggagtgcagtggcacaatctccgctcactgcaacctccgctcactgcaacctctgcctcccgggctcaagcaatccccccacctcagcctcccgagtagctgggactacaggcccctgccagcacactcagctaattgttgtattttcagtagagacggagcttcaccatggtggccaggctggtctcggaacttctgatgtcaggtgatccaattgcctcagtctcccaaagtgctgggattataggcatgagccaccgaacctggcccttggcccacttttcaatggggtttctcttgtaaaatttgcttaagttccttgtagatgctggatattagacctttgttagatgcatagttcgcaaaaattttctcccattctgtaggtggtctgctcactcggttgatagtttcttttgctgtgcaaaagctcttaaagttaatgggatatcacttgtcaatggtgggtctgggtatgattgcttntngggtctttgtcatgaaatctttgcccatcctgtctcaggatggattgctaagtgtctccaggtttatagttggggtggggggac

SEQ ID NO: 615376 - DNA, 920 bp, Homo sapiens
ccaaatcatgttatggtgtgattcatgtgagaagtagagctgtggtcattggacccttaggctaaggataatccggtgtctttataatcaggtaagatcggctaacgaatgtatattacatcgagctctagagttatcgatctcctctcacatctcacatgctacgttactttcatataagattggacgcgaaccgtactggatacatgatcacgaaatagtcatatagcagcattctaacttgtagattggaaatgcgcttctaagtcactcttcagtttacagggctattctgaaaaaaataggtgtattcatagtcgaagaatgaatatctcagtccagtgagtcgagtagtctctagtaattgttaccctaggccaatttatctatacctgtttaatgcactgagttttccccgaacaccctatgctagagagtcacgctgtgaccgatggaggttgtcgttgtcgtagttgtagtagtgtttctagtgggtgttgaggtctcgcgattgcgcgtagcttggctaggtgtgcacataagtgccatattgataaagtacctctagactcctagcaatctattcattctcaccaagtctcaagctcagagaaaggtaagaaaaaatgctcctaatttccttgtatccccactactctgaatctcgtggtcataaacgcagtgctacccacatgtgatcggatggttatcaatctctttgggtgccataaaacagcgtactccctgagattaatcctaccccaatactaagtttcggcctttttccttaacatactgtgtaaatttcaaaaagtcctcaattaagtgcaattattcaatagtaatacgtcagcagtaccttaataagtcctggggtaaaagaatggcccccccaggaattactttctaagatgatgggc

SEQ ID NO: 615377 - DNA, 938 bp, Homo sapiens
gcatgctcgctgccaagccatgtgtcttccatcggtctggaagggggatgatgctgtgtctcgcatggtgccagcgtgtacaactgttcggccatgagcactagatgacctgagtgcatattacttcgtgtctagtatgcatcttcattggtatggcgggatcggtggtacgtgctgctctattgatgcgccagccatttcggttaggcattgaagggagcgagtatgtcttgattccctcgagcgcagtggaagtagagcttttgacatcaccgcaggtgcacgtcatcttctggataactcaacaatgatctcgagttgcaatgaacccaagcagcattgtggaatggagagtgtatctctgtttgctatcctcttgagtcttggtggaacttgacattcgtctgtgtgtcgttattcaggtaataggaatggatggtgcttggagtgccatatgtgtgcttttgcgtgctctcaccaacagcaatatgacggtgctaaaagagccaacccaggacgagagccaccaatcttcctcttatttcatctgtcaattctattatattgcactttgttattcatctgggtcaaaacttgtgtatttagtagttaaccatgattccccaacagtcttacttttccagcaaacgcctgtaaaaggactgcccttctttcacatggattgtccaggtcgctaaaaatcaagtaaaaacaaccttggcgtatgtccgttacccttcggcaagcgtccacttttcaagggaattgaggaaatggtatagcaacccttcttgggggtaagttttccggcactcgagtgacccgggccctcacgtatgaactgggaataaactctataatggttgggggaaataataactttgcaatcccctattgaaattattcgcttgttttgctttacacttaagaccggccac

SEQ ID NO: 615378 - DNA, 1326 bp, Homo sapiens
  misc_feature (839)..(839): n is a, c, g, or t
tccctgccggcgagggccaagcgctgtggaactatataacgcagtgctgcactgttttcacattgctgctcctaaagtagacaactgtgtggtcccgcacatgtatcgttggtactgatgagtgctgtcatctacggaatggtgacaatgggctacggagctgatcgtcacgccatcgtagtctcagcgctcatatgatcaacgtccaacaggtaggtcctcgccagccagaagaccggggaggggataaatatgggcctcctcgaacaaattgtaggtgatacacacatgcaacacacattatacacaactaagggcttcgcaatcatattaattgcttacaagctctatctggggactatagaaccgtatattggcattgtgcaagagacatatagggtatgaccaggcggcacagcagagaccacccgttggcccgagactagagacctggcgattgagcgtccttcccctacctttcgtagcccagcacgcatttgcctcaacgtattgcatgaagatcgttgcgtggaatactctcgacgctcaaaggagatattgaatactaactctgttgtgtgtggcaagcttatagcgaaagattaacaccttgaaacggattgccacttacacttacgttcgcaaaaaaaatgacaacacagggacaccctatagacacacagacaagggacacacacaagaaaaccgggcactttggggcgtggtgccgctgcattacatccattgtttgaaacctgccccgttcagtcagttcgcctttgggcgcaatcaagggaacccgttgaaaccttcgggcaatgttgtgaatgttgccacgncgaggggaggacgcgaaaccaaagaagggacggagggcaaaacctgtgacaaaactgttaaagcccctggtgggcctccaacttgttgcctaagagaggagccacccgtggctggtggatttcccttacccaaccgagaacgcaagggcaggggggggaaccctaagtttcctgagggaaaccacgcacccactgcgacattgtttctgggcggcgacacggcggacttacacacggaacggtgtgacggatgtaggccccaacttttcctttccaacattacaacacccaattttaaaccacagtgccaaagagactttcagaaggaaattgggtcccccccatggatagaaagaagacgctcttgacacaaaggaagcggcgacacggcgacagagggggactgcgtggacacatcttttggcaacatttgttgtggcaataaagaggccagctgggggtggccccttaggagcgcgaaagaccc

SEQ ID NO: 615379 - DNA, 347 bp, Homo sapiens
atagaatcaaaaacgtgacctgacacactactatggcatcatatataaagtggtagcatagacttgtcatcagactacgtatacctaatcccaacaaagttgtactcagtagtacaaaggctaagacaacgttgtcgtcttcatttacacatagctcacgcaaggaaacactgatagatctaatggtgagtgcaaaatccttcaacaaataataagcatctccttcattcatcctgttatcctggactaatcctatcaaggaaccatgtaagtagacatccagtgcataggcattaagcgacattttccttcctcggttatcaaatttctgtgacaacagcactgga

SEQ ID NO: 615380 - DNA, 698 bp, Homo sapiens
  misc_feature (407)..(407): n is a, c, g, or t
ggagtcactcctctcaaatcctgctgctgctttatcaactaagagtatgtaatgttctaaatcctttgttgtcatgtgaacaaagttcagagtgcctccaccaggagtaggttccatcttaacacatcattttctttgcttatccataagaaatacctcatcattggttacagtttattatgagattgtagcaattcagtcatgtcttcagactccactgctaattctagttctcttgccgtttctaccacatctgcacttacttcttccactgcaatgctgaacccctcaaactcacccatgaggcgtggagtcagcttctcccaaactcctgttaatgttgatattttgacctcctctcatgaatcccgaatgttcttgatggcatctagaatgatgaatgcttntcagaaggtttttgattgactttttcaagaccatcagaggagtcatcatccgtggcagctatagacttacaaaatgcatttcttaaatagtaagacgtgaaagtcaaatttactccttgattcataggctgcagaatggatgctgtggcatgaaaccaacattcatctccatgaggactcttgggtacccggtgcatgatgtattttataaatatgaaactggagagaaaatccagcatgataattgaaatttgcaaccatgtgaccagaattcctagtaaatgtgggtcc

SEQ ID NO: 615381 - DNA, 863 bp, Homo sapiens
agggcttgaggaacccgcgccgatgacagtgcgtgttgttaccgtagggaccaccagctttgacgacctcatgcgtgtgtgtcggggcccgaagtctgcaacaaaattcggagagccttggatacaaccgacgttatcctgcgaagatttggtcagagggaacggtggtagctgaacccgttcaggtactgagtctgttgtactctggatgtgccacaggtacaaggattccttgatacgaaggcgattcagaaagcagatcttgtaattagtcacgcaggtgcaggaagctgttgtgagactctggacaaaaggaaagccactcgtagtggttataaagcgacaacgttgagtgaaacaaatcatcatgctgtgaagcgtggcagaagcaggctagcactcacacacgaggtgtcatctcttctattgttgccgtgcagcacgcttgcctgtggctgttcacacgtccaatggacgtttatcaacacctgagatgttgtccttcctgggcaggcctgcacgaaatgctgctgcattgtggattaagtggtggattgcaacatatatactgctaaactcctcaaacgactttaactgtgaagaccccaaattacgagctgatgtaggatgtacttcagatttaaattcatatatatgtttacgtaggaatatacttaggaatgtcttacatactatggatgctgtgaagtttatgttggtggccatggaggggtccaatcgcaatgggttatggatacaagaatgaatcaacatagatgttggggatcaggttaacaaaaatatggagtgaaaaatgtgaaaggaaaaagataaagggggtggaacaagagggtgaaagttta

SEQ ID NO: 615382 - DNA, 372 bp, Homo sapiens
atgatacgagttgagctggtaccacatgaggcttctactgaagaacacgaagcttagatgtctgatctcagtgcctagggtagcagcatccacggctaagcgagaacaagcacagtcctgtccggcaacaagtggcccccacggatgatgagactgggaaggagctggtcttggctctctacgactatcaggagaagagtccccgagaggtcaccatgaagaagggagatatccttaccttactcaacagcaccaacaaggattggtggaaagtggaagtgaacgatcgtcagggttttgtgccggctgcgtacgtgaagaaattggaccccgcccagtcagcctcccgggagaatctcctggaggagcaag

SEQ ID NO: 615383 - DNA, 1317 bp, Homo sapiens
ctcttaatgaactgatcatgttgtcagttgtagctcttatgtgtttatttttatatgttctatatttatttgtttttgagtacttttatgttttcttgtttctttgaatttgtcagtagtgtcagagctttttcttgatgttaagtagaattagcactgattatactattaaatcatttagtatggtttagtgtatttgtgtatatatggagtatattgttatttattgtcagtgttttttatttttctgtttctagttgtgttctgtgtcatgttattcgaggttatgatttgtatggttttgggtatattgacgtgattattatattatatattgtgttgatgtttgatctttcatatgtgttaattattatggatctaattatttgattatattttgttgatattacctgtattatgatgatgctagattattattgtgtgtcttctgtttgtgtaatatattcttatcgtcttgagttgctctttattcaagtgttatgactcaggcattcttggtctttccaatgtgttgaaaatattttttgttatttttgttgtctatgtaaaatacagtctgactatctgatggatttgtctttgtgttgttttgttgtagcatgtagtgattatcgttggtttgtatatttgtcatgtttctgtgataatggtttcttttttgtttttgtgtttctcttctcctgtctgtcattccattgtgctctgtcgtcctgcctctggctgtccgtctggttttctgttatctgctgtagctacttcccttagttttatatgtgtcttcttgtcctctcatggccctcgagacagtttatatattggatatgctgtcttgaggcccccaagttttttgtaacttaagcagtatacagcatattagtcagggattctctcatctatactgatgtagtaaatctgaggctccttatagtcacttgcttactatcctttgtatagctgtttctaatatgtgctattttgtggatattttgtagtagtttatagagcataaatcttactatgtactggtggtgagagaccacacattttatgagagtttggaattattgttagacatgcccgaaaacttatccttgggcctataattatgaaaactcatgatcgagatatatgtgtatacatactatgtatctggtttgtcaggcttacataggtaggctgctgaaattaaatctagactattcttttgatgccacctacacgtgttccgcttctctcttttaaagtatttataaagaatatagattgtacgagttttgtacatcttaggtttgattt

SEQ ID NO: 615384 - DNA, 378 bp, Homo sapiens
  misc_feature (293)..(293): n is a, c, g, or t
atggaagttgacatctggcctctgaaaaaagtgtccccaggggctaggcatggtggctcacacctgtaatcccagcactttgagaggccgaggcgggtgtatcacctgaggtcgggagttcgagactagcctgaccaacatggagaaaccctgtctctactaaaaatacaaaattagctgggtgtgctggtgcatgcctgtaatctcagctacttgggaggctgagacaggagaatcccttgaacctgggaggtggaggttgcagtgagtcgagatcatgccattgccctgcncctgggcaacaagagtgaaactccgtcttaaaaaatataagaaataaaaaaataaaaacctgtccccagactggatgagcaggga

SEQ ID NO: 615385 - DNA, 413 bp, Homo sapiens
gcagacgggggccagcacagtgagcatccacccagtcctggtaggctcaagctgcccttaccatccccatcccccacgcatggaccaactacctccgttcagcaagaacccaagcccatgatccaaagccttggctgtcccgaaattcacttacttctcctgttcagcctgctgccgccaccccagcgccagaggagttctgagccagccaagcttcaggtgccttgtctgtagcctccaagccacgtcacgaacgattggaccagatcctttgttgcaccaaagtgtcctggagcaagccttctgtggtggcgggggggtcttcgacattatcagtaacctctcctctaccaggggcggcattgaaaatttcagctgtgcccagcaactaggatagaaagaaaacaggggca

SEQ ID NO: 615386 - DNA, 269 bp, Homo sapiens
  misc_feature (170)..(170): n is a, c, g, or t
  misc_feature (225)..(225): n is a, c, g, or t
  misc_feature (233)..(233): n is a, c, g, or t
  misc_feature (252)..(252): n is a, c, g, or t
atcctccccccatacctctcccggtcaagcacctcacatttccaggtggaatctgatcgcacactgcacctcaacatctgtcccgacggtctagtcgcctcttcgtcgggatttccaggaccctgctccgaatgatcgtgttacccggcgtccccatgtgaccccgcaancaaccacagactggccaactaggcgcgggcaccacggccaacgggtacatacacntgatgacnaaagcctatcttccgctanacgtcttcaacaaatgt

SEQ ID NO: 615387 - DNA, 576 bp, Homo sapiens
  misc_feature (18)..(18): n is a, c, g, or t
  misc_feature (25)..(25): n is a, c, g, or t
  misc_feature (215)..(215): n is a, c, g, or t
  misc_feature (248)..(248): n is a, c, g, or t
  misc_feature (277)..(277): n is a, c, g, or t
  misc_feature (344)..(344): n is a, c, g, or t
  misc_feature (362)..(362): n is a, c, g, or t
  misc_feature (375)..(375): n is a, c, g, or t
  misc_feature (407)..(407): n is a, c, g, or t
  misc_feature (410)..(410): n is a, c, g, or t
  misc_feature (420)..(420): n is a, c, g, or t
  misc_feature (453)..(453): n is a, c, g, or t
  misc_feature (485)..(485): n is a, c, g, or t
agcggcgccctttttttnggcgggngggggggcaggttgcgaggagaggagacagagtttggttctgtcacccaggctagaatgcagtggcgcaatctcagctcactgaaatctccacctcacaggctcaagcaatcccacctcagcctcccaagtagctaggactacaggcgcctgccaccatgcctggctaatttttttttttggtatttttnagtagagatggggttcaccgtgttagccagganggtctcgatatcctgacctcgtgatctgnccgcctcggcctcccaagaggtcactttggactgcaacatgcaatttccgggagagatgaattagcngctcacaccgagatgatnagcgtcacagggngtctgaagcagatggaagcagacactccccangcnggaggcggcngtgaaattattccagcagtacagtcggttggtnccacaattaaggttacgcagtggggatttcangctcatcttcaggttggtttacatttctctcaacggcaagtggtgccatgtatggtgtgtgtgtgtctgcgtgtgtgtgtgtgtgtgagtg

SEQ ID NO: 615388 - DNA, 189 bp, Homo sapiens
  misc_feature (63)..(63): n is a, c, g, or t
agtgcaggcagcataaatggtttggctacttcttatctttttggctatttcagagctcttatntgaatcagacagaacggaaatatgtcagttttgttggtattttaaaaatgtatcccaaaacactcagaaaagtattcacctaaagccacatgatccaatctttctattatttcactagaacatacc

SEQ ID NO: 615389 - DNA, 139 bp, Homo sapiens
cagagtgctgctcttggcgcccacaggccttgatcaacaccatcacagtactggagcccacggacggacgctgagcaggctggggaaaggcgacgaggcaatctggttccttaaatgcccaactgttcgcactgagcag

SEQ ID NO: 615390 - DNA, 285 bp, Homo sapiens
ctgtcaggaggtgaaggaaaggagtcaggactgtgcgccaaagaggctagaagcgcttctcttggtctttctcttagtccggttcccgcttgccgggacgtggactcgctggtgatggtgacgacgctagtggggagggtctgcgcgcggctggatgctggcgtgctcggggtgctggcagacacctcgtgttatcagaggagatggcggaagagatagcctggatccatgtgttaatttcctcatatctcttctggctgtagggtggctcagtcgaacggactg

SEQ ID NO: 615391 - DNA, 318 bp, Homo sapiens
  misc_feature (269)..(269): n is a, c, g, or t
ttcctagaggatcccccgttcatgtaccggggtaaatggtgggggctcttggctgtgcatatcccttggagaatctggcacccagatgagcttgaataccttaccactattctcggtgtgtctcgcctaagaagtgtgacgcgtgtggtttgccccgatcttaagtgagctcatcaaccatttccaagtaagccaaatgactcgcttcgcgttactgttcttcctgttcggtgccatgtccgactcgcagatgcgtgagagagccaagngctattctggtgccagtctggacgcatacacagcgttgaggaagggtga

SEQ ID NO: 615392 - DNA, 117 bp, Homo sapiens
ttgagacggacgacactggatactgttgttgaggagaacacccagtgtggtcggtggtggcaagattcgtgctacagaccctgatgaaggcctaaatgcccagatcatgtatcagat

SEQ ID NO: 615393 - DNA, 320 bp, Homo sapiens
gagagaatgtgttgaaggcaagaaggagggcggggacccggggaagggtggcagcaaccaagaaggccaaacgtggttttctccaacgttttttccatgtttgaccaggcccagttacaggagttaaaggaggccttcagctgtatcgaccagattcgtgattgcatcatctgcaaggaagacctaaggaggacctactccaagctgggtgcgtcaaccaacctccaaccctgcgaactggggtccctactctgagctgcttggccgggtgggaagttgcttgggggacaaggaccctgctcccctgctgaccctccgtc

SEQ ID NO: 615394 - DNA, 606 bp, Homo sapiens
agcggcgcctgagcctcggaagggtgatgtggcgtgcaggcatcgacgacctcgctatgtctgccattttcaatttttcaccagtctattgactgttatcttgttgcttatatgtacctgtgcttatattcgatccttggcaaccaggctcctggacagagaattctactggatagtggcgcgtatatttcggaagtgtgccagcaattcggtagaacggaagagtccttatgttgcagtatgctgtatagtaactgggcttcagcatcctcttcatatcagtagctggggaaactgccagcaagtgtagttgccatcagatttgattgtgaacaaggactgactgcagaaaactcaatggcaacggatgtataagctctttatatctccgaatcattgacatgagataacatttccatgatgctgtgctactatttcaaatgtgcatgggaccaatgtactgtatagacaattaagatgtaaccatttactagtctgtgacattcaagctcagtactgtcactacacatattacactgctgctaatgttatcctgtagtatcagatacaaaacttggaggtgagcgtactctctaagggcaccta

SEQ ID NO: 615395 - DNA, 1508 bp, Homo sapiens
  misc_feature (513)..(513): n is a, c, g, or t
  misc_feature (636)..(636): n is a, c, g, or t
  misc_feature (715)..(715): n is a, c, g, or t
ctatatgagacccgtcatgtatcttggtgatgttcgcatcattcgtcctcagaacgcacttgttagtagtgtgggtctatactatgttgtactaacacacgacgcgtccctacatatgttgtaaagtcaccacaccacagcctctggtggttttctgctcccaccccaggtttaaaaagcctctcacggggaccgcaaataggtgcactgtcggacacgggggagaaatctcactttggggatagcgccaaaagacgcttctagcggagtggagagccccctgcgaaataggtgcagctgtctgcacaattgatgggaagacctgcccactttaagggggccttgcccccatacccaagaaaaagttgttttggaaggaaaatttctttcttaaacggtaattaaaattggtgtcccccacaaggggaaccccgttttttttctggcccctcggttctcagaagaccccaaccaatgtcgaagaattctgttccttttgccttggcgtggaantgtgtgccagaagacacccctcgttaataaagtgtcctcttaaaatacgactaagggagttctttctttgaaccacaaaattggagggtggctaaaaaaggcgcggggaaatgttttccgccngtaacacgggtggcgccccttttggggttataataaaaatttaatggcgcacaagatgtccttcgttaatccgagaagnggtttccacaagagcatttaaatctttaataagagacgagatttggagaaacgttatataaacccccgagaaatatatgcttgtggagaatttggggagatacacccccgtcacacacagtttttcacagcgagagaaatgtttgacacacattttgggagacaaaaaattggttttgcacattaaaaaggggagacaccggggtatatatacacatctacatgtggccacaaatttcacatggggtggacacacagagaatgtgagataatcccccaccctcgggaggccacgcctatatttatgagggagaccacagagatttgtgtttcttggagaaaccctcttctgccacatacttgggagaccacaccgtagaaattgagaaaaaatatactcggtggacacacactttataaatataatgtggggctaggttttcttaccacaatgagaaatgtttctctctaggagttttaaaaataaggcacggtactcttatactaatcgttaactgtaaccctcgcacgtggttgagtattttataaaatagaggtttttctgcacgtatagcttttaagttctaagagaaagcaccacgagtggaggcacataactttcctcttctttgaaagaggaattccccaaaagttgagtgttcattcttaaaatggcacatattgtgttaattcttaaaacactgggcacaactttggaagaaattttaacagaagcctcaatgatgatcactttgaattgcttgtgatttccaaaaataaagccagtgaagcca

SEQ ID NO: 615396 - DNA, 371 bp, Homo sapiens
tgcggtcgtctctgagattcccgccggtgacgctgccgctcagccttctcacagtactgcgattatataggccttagccactgagcctggccctgatgcgtttttctcaaaggtcctcagtgtgatccttatcatttgtcattctcctgctcctggagctcacggatcttctctacggagagccccatgcactctctgtttgtgtagagcatcagttttttcatactaatgcgaggatcgatggtatcaagagaaagatgtatccgcagggagatctttcccagtgctgctaccatttctcctcactcacatgagacccaaatatcaaaataatggtcaataccctctacaagcccttttggtttggaaga

SEQ ID NO: 615397 - DNA, 114 bp, Homo sapiens
tgatgttgattaatgaatgattgattcgtgctctgaagaaatgttgtctgtaacgctagagttagtaacagacaggacaactgtctctgttagatagatggatatcttcaatca

SEQ ID NO: 615398 - DNA, 919 bp, Homo sapiens
acattttcattttggtcaataagttcaaactaccaccttgaggcaaagtaattcgaacacggtgtcctttgtataaggaagatataaaataataaggatcacctttctttttagtgccaaaaagatattattgacaagtcacatgtcagaaccgccggtctggaaggtataaagcaggatcatgtgaagaaagatgaaaaatacgatcatgaggtcatcttagatatgtatgttgatttgtaagcaaaaacgagtattaaagtgtaaagtagttggttgtgacaaattgtaatactttaatagcatggtattaatcgtctatgtatggtcttggggggaattcaagatgggtcaaatattggtgatggaacaataaataaagaacctctagcagatggaataaacagtgaatttgaaatagccaaatacacgaggatatgcattgtaacatggaaggagtgtacccagtcactccatgcagctgatgttaatgaaacttctccctcctcctatctgtttccagggtctttgtacaagtggatgaactgtggacatttccgaagatgcagataccaaatactgttgaggaagctgttgaggatcattactggtggggccccagagctagctgtagaaaggaacggcgcgggggaaagtaaagcaggtatcaaccaaggcggtcagagggccaacggaggattcagaatgacgcatgcaggagagggagcggtgttcccccagtcatgacattaaccgagccggcagacgaaccggatcgggaggggtttaaacggccccacagaaatctggcagagcgagagccaggggcggtaaaaaaaagaagcggggagcgggagcgaaacaagatctggggcgccccacaatgtcggtggagaaccacccggggttacccaggcac

SEQ ID NO: 615399 - DNA, 349 bp, Homo sapiens
catccactgcatggtcccggcatacgggccctggtcccaggcaggccgtggtgaaaacaggagcccgcccacagcactctgaaatgctccactcacaccttataggccctaggcctggcccaggccttgtcccctgtaaacctgctgttggctgaagctctgctgaccaggctgcagcctctgctctgtggctccattcacggcctgttttcatctacaaaggccctgaggttcccattcaacccccattgccctacggtcctggtagcaaaaagctttttccagagcgtgcgttgttctttcaaaaggatagctatcacttctcaccatgcgtggactgccagtgggt

SEQ ID NO: 615400 - DNA, 402 bp, Homo sapiens
tatcttccaggatgctcatagccctacctgatgattaagattcctacaggacagagcagaagagctctcgtgaagaattacgaagtatggagatgactttttctctcttctataggataaaaatcctattcgttattcaaattcccatcttgtcactcctcactctctgtgagttaatcctcttcaatctatgctacagttgctcccagaatatcagatgctggactcattttcatcccttattgacagtcctagctgtgtcctgtttacatccaagttccgcatatgaacatggctctcctactgtatttccttgttagataatccattcctgaaccaattaattcagaatgcaactctctagagatcaagctaactaaaagtcatacttccatgttatct

SEQ ID NO: 615401 - DNA, 954 bp, Homo sapiens
agtataccactgcctgactgaacgcgtggctcccgccgtctcgcgccgagcagctccccctctgtggtaagaagccaactgggttgctcgtctcagcgaagtgcctgcgccccgccacacacgtgtttggtgggacgcgcccccgtgtctgacccaacatgggtgccccacacccgggttataacaatgccacaaaaagacctgggggtcgcgacacaacacgacgaacaatccgtgtgggggaaaaaaacacgggagggaggcccctaggatccacggcgaagacaaacatgttggggagacctccctgtgacccaagcgcgccagcattcgccgccgtttgctgggacccaccccaagggggacccccaccccccgtgtagggggccaaatagacgtcaccaggccccccgccaacagccaaccaacaggttgtcaaggcccgggtgtttgatctcaagacctcgtagatctgtccctcggtcgggaataaacaaaagaaaaacataggggaccgtgttctagagcggacaagtctcacccagtagtcgttcgcccccaccccagacaagagagagattactaaagggacatcaaagcgccacacacctagggggggagtaaacagtgtgagttggaaacatctaatacgctctccatccacggtttctacttccgtattcttagataataccttcgggagcactcggttctgggcccgccgcccacggagcaatcgcatcttcgttggtccccctcgtgcgaacatgtccaccacgaacagaatcagtatgccccctagcaagcatgttagtggcatacgctgaaagcatattcacacaaaagcccgcatgttctacgatttagattgtgtagttccaaaaaaaaagagggcacaacatttgtccccgaagccaaaccgtcgatttttctacaaccccgccccaccaaaac

SEQ ID NO: 615402 - DNA, 714 bp, Homo sapiens
gagcccgagaacggggctggaggtccaggtccgggttggtgggggtggagcagcacttcatcgccgcgggggtgctgggactccgggcgcagtgccgccggcatcatggacttcctgtgggacaagcgcacgggcctggccgcctagaaagatgcctcatcctcgaaggtaccattcctctagagacgaggcagccggggcgagttactgtgaattcactatcggagccgagaacaagcgaacgaagaagccgtgtcctgtgtcaagtagtagtgaccggacacgacgggctgccggcgagtaggacagctaccatgtccgtgacggagggtgcagccggacatttagccgttcgtcttcgcagcacagcaggacggaaagccaagagtgtagaggacgacactgatgggccaactcatctaccatgtctggggacttggctacaagagcgatatgaatatcgtcagcaccttaggcaaaggggaccttcggccgagttggtacaactgtgttgaccatcgcaaggctgtggggcatcgaggttagcccttgaagtatcatttacgcaatgtgggagaacgtataagcgcaaggcaagcttggactttggacgaatcacatagtgctagggaccaaaaatccaacgaagtaatggaccctggcacagaaccctcgtggtggtaccagaatgctgtgactggttccgactcacct

SEQ ID NO: 615403 - DNA, 744 bp, Homo sapiens
  misc_feature (529)..(529): n is a, c, g, or t
  misc_feature (744)..(744): n is a, c, g, or t
ttttaagacatgaccaatttattcagaagaattcatattgcgtttggcaaagtatatccggggcacgagatgttcgggataataatgtcggattggaaagcaggtcactttatctactagcaaatgcctggggtaatatctgaaggagaggcaaaactttgaaaaagaattaagtatgtgggggggagataatcataaatattggcgaaggtaacaaaaaaaaaaaccgagcttatacaagccgaagggacaaaatatgcgttaagtgctaataatcgcttatattcaatttagctcaacacacattaagtgaacttaattgggtggcaaagagactgggctatgtagcggggggtagaggtggaaatacaataaacaccaagatgtaatccctctcaagaattggtataagtctagtaagagcacatacagagatggtgctatgccggtaaaaactggtctgaaaccatggggagagaagagtttaccttccttaccagagggtgaagtcgggagcccatttaaattngggagtatgggtagacgagaaggtcataagcacgctaaggaaacttggtgtcataagcatgtagaccgggaacagataagtggtcaagtatcctacatggtttaaatgctgaaagggaaaacgagttgtcaaaggtattttattttatcccatgttagcgagtatagggagatgagaacataactgagttgaagaggagaaataagtgaaacctn

SEQ ID NO: 615404 - DNA, 305 bp, Homo sapiens
  misc_feature (186)..(186): n is a, c, g, or t
attttaaatggccgttgattttgccaaattccattctatgccattagaacgctgtccacactaagttccgttaatgggggtaaactcccatcatttgatcttaagtatggtaaaatagctgtctagaaataaatgaaccagagtcctggaaaatccagtggagatgcctagcaatgggggtcccanagacttcagcgtaagtgcttatccttgatgcgccatcctcctaccttcctctaattgtttcttaatgcacattgttgttcagaaaattacacttgggatttttatattttgtgatttga

SEQ ID NO: 615405 - DNA, 233 bp, Homo sapiens
tggatgcgctacaggctcatttgcaaatcaggtatactcgttatagtggcctaatgggtcaaaagtacagagtactgttattatagtttaataagaataatgtgcggcgcatagtcccaggctactcaggaggctgaggcgggaggatcactggagcccacgagtttgagacaagcctgggtaacatggcaaaactccgggtctacaaaaaatacaaaaattagccaggcatg

SEQ ID NO: 615406 - DNA, 334 bp, Homo sapiens
cggccgaaccaccgttgccgcacttttgcattttgccttcgttgagcaaggcactgaccatcacctgactggcttgctcgatgtgcggtgcaagtacgtccatcgcctgttgcttggtgtcgatgctggcctggaaaagctggcgaattcgggattgcatgtccatctgtgtgaccttaagtagcgcggctgtttggcacaggtaatgtgcagcccgcaatgcaaagagcaaaagtgagtggtgagggtgcccggcgaatcagctgtcgaaggcatttttaagccaggtcagatcagctgtgcctgacggggtgctttcacagggtaccgagct

SEQ ID NO: 615407 - DNA, 328 bp, Homo sapiens
cgtatcacaaacatacgaatctcttaagggcggtggaccccaacgcttcctgatgaacatgcgctttgcccagaagcacaacaaaaagggcctaaagaagatgcacgccaacaatgcccaggtccatgagtgcacctgccgaggctatcaaggccctcgtatagcccaaggaggttaagccctcgatcccgcagggtgtcagccgtcaagctcgatcgacttgcctaccttgcccaccccaagcttgggaagcgtgctcgtgcccgtattgcctaggggctcaggctgtgccggccataggcctatgcccaggccaaggccaaggctc

SEQ ID NO: 615408 - DNA, 415 bp, Homo sapiens
  misc_feature (8)..(8): n is a, c, g, or t
  misc_feature (15)..(15): n is a, c, g, or t
  misc_feature (78)..(78): n is a, c, g, or t
  misc_feature (96)..(96): n is a, c, g, or t
  misc_feature (117)..(117): n is a, c, g, or t
  misc_feature (197)..(197): n is a, c, g, or t
  misc_feature (216)..(216): n is a, c, g, or t
  misc_feature (240)..(240): n is a, c, g, or t
  misc_feature (242)..(242): n is a, c, g, or t
  misc_feature (334)..(334): n is a, c, g, or t
aaacaagntaaaacntgccgatttcctgcaggctgtgtaagcatgtttaccctgttggcttgcctttgtgtgtcctgntaaatgaatgtcatatgnaaatgcctaaaataaatcganagtgtcctcagaactgaataactgccagtgacttgatgcccctaaaacagtgtaggatttaagaatagatgatttttaanccggaaattgtgattgtgncccatgagtggaggaactttcagntnctaaagtctgataaagtgtgtagcccgaagagtacttttttttttgtaaccactgtcttgatgggcaaaataattatggtaaaaaacaagtnctcgtgtttattattccttaagaactctgtgttatatttaccatggaacgtcctaataaaggcaaaatgtggttgtttgca

SEQ ID NO: 615409 - DNA, 675 bp, Homo sapiens
ggtgtaaggcctgcttgatcgtgatgaataagctttttggtatgctggtggatttgatttgcctgtattttgttgaggacttttgcattgatgttcataaaggatattggccttaaatttttcattttgtctctgccaagtttttgtatcaggacgatgctggcctcatagaatgagttggggatgttagctagttattatgcagacttgtttctgtagttgctttatggtgtcactggtctgtgtacttcagtgtgtttctgtagtggctggtaacattgtttcctttccatatttagtgcttctttcaggagctcttccaaggcaggtcgtgtggtaatcaattttcctcagcatttgcttgtctgacacgagaatcttcttaggctgggtgccatggctcatgcctgtaatcccagcacttcgggaggctgaggtgggaggatcacttgaggtctggcgttcacgatcaggctggccaacatgatgattgctccccgtccctactgaccctccccccccttccgctgggcatggtggtgggtgcctgtcgttcccagctactcgggaggctgaggccggacaatcacttgacgcctgggaggcgcggttgcagtgggtccggatggtgcccctgagcctcgatcctgggccgtcgagtcgagactctatcta

SEQ ID NO: 615410 - DNA, 471 bp, Homo sapiens
  misc_feature (245)..(245): n is a, c, g, or t
tgatctagaggatctctgccaataacctccaaggcccagtggacgtgagttacacatctggtacgggcatagaccctgaggatatctacaaaactgcccttgcaaaatacaaggcaaagtacccaagattttctaaagccgacattatcgaattggcagagatggagttaaacaaacaactgaaagacgttgatatatttacccacgtggaaaaacagagtggcaaaaaagtaaatgttaactgnggcactattaaaaaacctctttgggaggagatcgaagtcgattaccggcccaagcgcttcggctcgtccaagaaacgaacaagtgcggcccctgccgaaattcaaagcccctcgaaagaactcaacgccctgggtgagtacaaggatttcaaggatctacccgagcctgaaaaaattaaaaacagtattgcctttaccccctctgaagacgggaggttattggcat

SEQ ID NO: 615411 - DNA, 200 bp, Homo sapiens
  misc_feature (115)..(115): n is a, c, g, or t
tgatacgatcgagctggtacccttatgccgtggggggtaagggaggttagcgaggctgtagaaaagtcatcaaaagcatagtgggagtagagttgaagtcctttggaaacggagnaggattatgatgcgactgtgagtgcgttcgtagttgggttgctaggcagaatagtaatgaggatgtaagtccggggcgattatga

SEQ ID NO: 615412 - DNA, 296 bp, Homo sapiens
cagcccttgggccccaggggggggcctgtggaatagggggggttcatgccccccttttttccccaaaggggggggactcaggttagtttgggggggggggctcctgccctttcccccaggcccggggggggttttttcctcccccccttggccctcccaactggggggggcctttttaaaaaggggattcccccggcccttgcccccttccccagaacaaaacatgttgttcatgggcaattttttttttggggccgaaaacccccaatgagggggattaaagctgttttccccca

SEQ ID NO: 615413 - DNA, 484 bp, Homo sapiens
ttttcctgaactttcggtgttctcatttttaaatcattgctaatataaccaaagaaaaatggtatttccatgcgtatattcattgcagcactattcacaatagcaaagtcatggaattaacctaaatgcccatcaataatagactggataaagaaaaggtggtacatatgcagccataaaaaggaatgagatcatgtcctttgccagtacatggatggagttgaaaccattatcctcagcaaactatcaggaacagaaaaccaaacactgcatgttctcacttataagtgggaactgattgatgagaacacacagacacgtgagggggaacaacacacactgggtacctgttgggggttggcaggagggagagcatcaggaagaatagctaatggatactgggcttaatacctaggtgatggggatctgtgcagcaaaccaaaatggcacatgtctacctatgcaacaaacctgcatatcctgc

SEQ ID NO: 615414 - DNA, 416 bp, Homo sapiens
ggcgtgaagccgcccccttacattttgcgaagtgcattatagtccttgtttttctctccctcgtggggcaacgcacccttcccctggcagtaggggtggggtaggtgactctcgctagatccctccaaagcagaccggtggcgatgtcagccgatgtcacgagctcgttagctgcgttcggggaaggttggggcgtcagggagctctcggatcacagcagcccccgccctctcctaggcctggcccgcagagcccccagagtggaccccccagcgactggggtcttctccccactcctccctccttctgctctgatgcgcagcgcgggcgctgcggggcctgtttgggacgaacagagctctcccttggtaagccttatcttgttaatacatggaatacctggctatattcaaaca

SEQ ID NO: 615415 - DNA, 86 bp, Homo sapiens
  misc_feature (3)..(3): n is a, c, g, or t
  misc_feature (48)..(48): n is a, c, g, or t
tgnggtatctagaggatcccgaaggagacacaggtgattgctctcagntttagtgctgaaataataaacagtgacaggtcaacagt

SEQ ID NO: 615416 - DNA, 344 bp, Homo sapiens
ttgatctagccatcccttagtacgccaaagtgctgggactacaggtgtacactgtatgagcccagcctcattgtgtttgtactaaccccctttccctggcctcttccagcttgtcttcttctcttctagtagtttcttcgtgaagaggccatgtgctatattccatgagatatttcacactcaaagaagacttcttttatactcttctgataatttgtctgggaatcattgtcttgatttataagggagtatgtaataaatacagtaaaagagaaacacacaacgtattttgagatatcagagaagggagaaaccaattctattaatatttgggcgtacgggga

SEQ ID NO: 615417 - DNA, 227 bp, Homo sapiens
tagttagttctagttccagttatgtagagactagggcatatcagactacttaccagctcagaactagaaaagaccgtcaaaacattttataacaatgctacttataagaatcggaaaatcagccaggtgtggttggctcacaccattaatacccagcactttgggaggctaaggcaggcggatacacgagggtcaggatgatcgagaccatcctggataacacggtg

SEQ ID NO: 615418 - DNA, 474 bp, Homo sapiens
  misc_feature (7)..(7): n is a, c, g, or t
gcgctancagtaggctagtagaggccggggttatcggcgaggcgcagtctgagaccaggttgtccgtcgtgctccgctgcctctgacttctacagctatcgccagtcgtcggccacgtcgtccttcggaggcctgggcgggcgtgctccgtgctgtttgggccgggggtcgcctttcgcgcgcccagcattcacgggggctccgggtgcgcggcgtatcctgtgtcctccgcccgctttgtgtcctcgttcctcctcgggtgcctacggcggcgagctacgtgcggcgtccgtgaccgcgtccgacgggctgctggcgggcaaggagaagctatcgcatgcagatggctcaaagcgaccgcctggcctcctacctggacaaggtgcgctgccctgtagcgcggtcaacggtgtagctagaggtgaagatccgtcggactgtgtatcacgagatgcaggggtctggtgccctccc

SEQ ID NO: 615419 - DNA, 199 bp, Homo sapiens
  misc_feature (117)..(117): n is a, c, g, or t
tgaatcgacggttctcttccaaaacactactcaaaaaatacaagtaaagagaatagttttttctttttcttttctcttttttggggacagagtctcattcctgtcacccaggctggnagtgcagtggcacccatctccaactcactgcaaccctcccccctccccagatcccaaagcaatttctccctggccctcagcc

SEQ ID NO: 615420 - DNA, 100 bp, Homo sapiens
catctcaggaacattgtaggaaggtttgttaagcatctcttaggtgtcgatgaatagcgaggtgccgatgaatatcgctattcatcggcacctcgcctat

SEQ ID NO: 615421 - DNA, 704 bp, Homo sapiens
ccggggacgaggacacatgcctgttttcgtcggagtcagacatgcgaaggcatttctcagaggcgagatgatgagcttgctacaggccatgaagaaatagtaaatccagaccgatacgatcaagaccctggccgagaaagatctagagccgctggacttgatggtaaggtattacgtaaactgtgcactgatgatgactatgacagagcagaatcagaatctagtgagccagaatcatcacactaaagtgcaagttggtagcgaggtatatctgagaccggagagccaggactacaatggcttaggtaaaccggaggttacactgatacgaaagatgaatcatagagcgatatagtaagaacacggtcagatagaatagggcctgtatcacgacataagctaaagtctcagagcgatgactctcgaggctacatagctacgaggtgacatgcaggaactagtgactacgagctacagaatgctctgcacaagatcgcctttgagaatcacccatgcaaacctccacccatcgtacactctaacgcgcggacagacatgccaagccaacttgcttaccaacaggccccaagaggaacctctacccaagacttccgccctatcaaccaagcgactctacagcttctccaacccactgactccctgccaccatttcacctccacggctctattacctcacaccgccc

SEQ ID NO: 615422 - DNA, 131 bp, Homo sapiens
acaggagtcgtttaggaaagtgtaaatttctgctctattctactccagtgatatcccctttactgagagagctggaaattagggacaagagcctccacctggtcggacatacttgagggtaggaaggatct

SEQ ID NO: 615423 - DNA, 946 bp, Homo sapiens
gtggaaacctccttgctactatagcgtcttatgtatggtttaaaggaaatttatcaggtgagagagatgagcaacgttgtcttttctctcaaagctgtaatgtgggtttgttttactgtttatttgtttgttgttgtatccttttctccttgttatttgcccttcagaatgcacttgggaaaggctggttccttagcctcctggttgtgtcttttttttttttttttaaacacagaatcactcgtggcaatggtcttgcagcttgccactgggtgtgcaaggcctttaccagcccttagcctcttagcacttctctaagttgccaaaaacaggtgtcatggggtggtgtccctttctggatacttagtcaggggaggattttcacaaaaaagaaatttacaatggtggtccatagtctttcagagtagctcactttagtccggtacctttatggggcggatatccggggtccagggtcaatggtcttctcttggcggatttatgttcaccagggtactcctaaagcatatgcctcacctggttcacacaacgaaccaaactggtcttgcgtgaaagctactggaaggggcctgtgggaactgagaaagtttcactacgtaacagatgagtttttttaaacaacagaagatatatcaaaaaacacaaactgttgttgcgccagtctgggcctgcgaaagaagttgtcaacaccaatgtgtttggggggggggccccaacgttgagtgcgagatgaaacatggggccaaagagggttccccagaagaaacatgcggggcacgcaacaagggggttggtgtcttcccccccaataaaaaaagcccgccgggggggcaacacggagtcgtttcgtaaacacatcacgcggagaactgcggaggagacacaaggggctccacagggggggatcacgggaacggccgatact

SEQ ID NO: 615424 - DNA, 495 bp, Homo sapiens
ctaagctatcgcactatatcgtcggtcgtatagcatataggtccaattatcatagggacatagatagcattgatggactcggtaatatcttacagcgatacctgatcagtacttcgcacgagattctcggtactatacatataggtccaatatcaaagggaatgatgcgggtaccgagctactagtacatgatcttgggccttgctgtttgcaactggagaaaaaagtcagagctggagacctaactgtgataatgattggaatatcaaccacacttaaggtcatgagagaagatagaggtcaccacgagaatgagtgtctactgaaaagagatcaagaaacttgagaccttacagatgatcatgttttgctttgtccatcaatacaagcaaaaaggctaacattaactcagggaaggcattttcatgggaaaccacagctcagcagtgcaggccatatagcttaggggccaaattctggcttaattcccatgag

SEQ ID NO: 615425 - DNA, 2069 bp, Homo sapiens
ggccagttggcggcgcgcactccaggtggcggccggctgcggtgaggggaccgcagggggcgagcagtcccggtggcccgtgtgggtctgctgtgcctggtgggcgcggtgtggaggcgcgtcttgggcctgctgctcactgtgacggcgcggggagggtttgtgtagggggctgctgaggccggggtgggctgcgggccacggagagcgcgagggttgacatggtccgggacccaacccattcgcggggcccagcacctttcggacctgcgcggaaaaacctttaccccatccggggcgcatgtggtggcctggccccccaggccgggactccaacttctcgcaggcggcccggttacgcgcgggtgaaccggcagtattgatatccatccatccggtgaagggcccgtgcggcccaggaagggacataagaaaaatccctggcggctattccagaagggggaagccaggcgcccctgtggggcgcccccaaacgcggtatacctcggaggggtgaatagagaggtggctttgcacccacgagaagtgtccccacgggaggcggaatccggggggacacccaaagggccgtttgacggtgcaccctgggagcattagtataactgtcgaacgtacgtgtgggagctaaaaatttatatccgggtaaccagcgcggcattatgtctacacggagtataacttgcgaggttcggggactacaaaaagcaactgtgccacgacacaacggagagcaatgtgtgcacggcattgttgttgcggaccccgcagtgattgaagggcctgacgacaacaggatgggaaacccgtttcaaacaaccgccaaccgacgacattgtgaagtcgaggcccaaaatatgtgccgcacttcaagatgaggcgggtcatacgcggggaagacacaatacgtgtcacgtcaaagcgccgcagcagtgggtcactgctccatgtttacgctggtccgcaacctcgagtgcacgatatctcttcctcactatccttctccttcccctccatcgtactatcatcttccacccggggcaagacgaacaagccgaagacagaccaaggtcgctagatcagctaagccgaaacaagcggcataggcgttagcatcagtagagtcaggcgagagcaaagcagcactacagcagacagaaccgacgcaacacacagcacagcaaacacagcaccaacgcgacgaccacaatgagctagtagactgcagccatcaagactacaccgaacatacgcacaacgacacgagacaagacaggagagaggacgagcaagcaagagaaggaagaggagagcagacgaagacgaccagagaaagagacgcaactcgagagggaaagacgagagagagaaggcagacggcacgagaagagagaggaagagcgcacaggagagggaaagcagcaggggcgagcgagaggagagaaggacgagacgagaagacgagagacagcagaagcgaagggaggagaaagagagacgaaaacagaaggcgaagacggagaggaggagcgggcgcggacaggagaacgagagaggccagaacgagagaaggagacgagaactggaaggaggtatgacacgagagagagagaagtaggaagaggtcggaagtagagacaggaagagaagatggtgaaagaagcgaaagacgtagaggagacgaggagaagagagtaggagagagaggaaggatgggaagaggagaggaagagatgggagaaagaaggagcggaggaggagaggaagaggacagaagagagaaccgagaagagcgaagagcgagagagacagacgagacgacggagaaaacacagaggacgagagagcacggagaccgggagaaagaagcagagaagagaggcggagaaagcgaagaggaagacgagagagatagaagaaaaagagagagagagagagagaaggaaaggagaaagggaagaagcgagaagagaagaactgacgaagaagaacgaagcggagagggatacaagggagaagacaagcacgggcagagcgaggggaggcggagg

SEQ ID NO: 615426 - DNA, 345 bp, Homo sapiens
cacgaggatgacattccaccattgtgatttgttcctgccccaccctaactgatcaattgaccttgtgacaatacaccttccccacccttgagaaggtgctttgtaatattctccccacccaccccacgcccgcacccccgcacccttaagaaggtattttgtaatattctctccgccattgagaatgtgctttgtaagatccaccccctgcccacaaaaaattgctcctaactccaccgcctatcccaaacctacaagaactaatgataatcccaccaccctttgctgactctttttggactcagcccacctgcacccaggtgattaaaaagctttattgttcac

SEQ ID NO: 615427 - DNA, 371 bp, Homo sapiens
  misc_feature (65)..(65): n is a, c, g, or t
taaatttaaaatcccctcaaaattttttgagcatattttaataataacatattaggaatattaantccttaacaatatattaagaatttgtataaaactcagtctttttttactgtagaataaaatgtcatcagtgcaaatgtaatacaattatctctgtgacaagttaagcaaagttgcatcataattctgcccaaattgtgtgacctggctattgtagtaggaagagggctgttctacgcaggaaagcgcgtatgtgcagttatttaggtgattaattttttttctgttggcattataagcactcatacatttcattagcattgagtcatttaatgtcagctatttcttgctgcctaaggagaaaaata

SEQ ID NO: 615428 - DNA, 318 bp, Homo sapiens
gtgggttgaccgtggcttgggcttgctcgtattttgttgaggatttttgcatctatttcgttagggatattggtctgtagttttcttttcttgttatgtccttccctggttttggtattagggtaataaccggcttcatcagaataggtttagggaggattccctctattctctactactgtcgaataagtgtacagtaggatataggtaccaataacttccttgaatagtacttgatagaattcagcagtaaaatataatactaggtcctggacttttttattggcaattttttagttcccatatcaatctggctgc

SEQ ID NO: 615429 - DNA, 137 bp, Homo sapiens
attcgcggccgcgtcgactttttttgatattttggacaggatctgagtctgtcacccaatgaagtgcaatggtgccatataagtttactgcaagctccaccttctgggcttaggtgattttactgactgaggctacc

SEQ ID NO: 615430 - DNA, 526 bp, Homo sapiens
  misc_feature (8)..(8): n is a, c, g, or t
  misc_feature (25)..(25): n is a, c, g, or t
  misc_feature (42)..(42): n is a, c, g, or t
  misc_feature (58)..(58): n is a, c, g, or t
  misc_feature (85)..(85): n is a, c, g, or t
aatggaanttgtaaaaaggataagnaggaagtccaaaataantctgttcttcccctgnaaagacctgaaccttcctaaccccaanatcccgtgaaaaagctccctttccttcctaagctgccccccaggccccaagcccccaggtaatcttgactcccttccctttcctctcccatttttcaagcctactttcccacacccctcccaacattccccattctgaactaaggctatcagcatctctcggctgggcgcagtggctcatgcctgtaatctcggcattttgggaggctgaggaggaaagatcacttgaagccaagagatcaaggccagcccgggcaacaaagtgagacctcatctctacaaaaaattaaaaagttagctgggcatggtgtcgtgcccatgtagtcccagctactcaggaggctgaggcaggaggatcactgagcctggaaggtcaaggctacagtgagcccgtgattgtccaccgccctccagcctggccagcagagtgaaaccctgtctc

SEQ ID NO: 615431 - DNA, 555 bp, Homo sapiens
caccagttgttttgcaaactcaccctgcggcacatcaacaagtgcccagaacacgtgtttaggcccacccagggccggcgggaccagccagctttgtgttaatattaaaaatgtcaaaagcaaggggtggagtacgtgcctgccttcctggtgccccggaggaggaggagggaggaccaaatggacggttacgggccttgcccccgggaaaccttttgggagcccccatccagtgattaggggggagctgcaagttatgacagcatgacaaacctgttcccccctgagctttttcccaaaaaggaccttggaagcccggaggatggggatggcccttatttctttttgacaaacaaaaaggattagaaggcaaagccccccaaaaaaaaggcccctgattaaagcaggaaaaaaacgcccgtgtacccagggctggtccaaaagggcgggaaaaaacagttgggctcgtttaaaaaaaagttccaaagtcatccccgccaaccccagaggttcaggtcctgttaacagcccggttaattaaagcccattccgtga

SEQ ID NO: 615432 - DNA, 1294 bp, Homo sapiens
ggccctgacatggcacgggatgagtcacctgccctgtgcagctgcctggcagtggctgggacaaggatcttgacagaccagacaccagagggccatcattcaaagggcctactccactcttggcactccagagcaaggcagggtgcccggattccccaacacctccaggcagtgaccctaggggcatgccccagacacggtcatcctgagacagacacaacatgggaggaacaccagatacgatacagagcagcgagttccttgtgacccatatatgcaccaaggatcgtgcagtcagtaccatgcacagcatgcgcaccgcggggcccatgcgatatctataccgcggtgacacatgacacagaatatcactatgacacaaagactgatccacacgatgaacattggacattcaccatgaccagtgagaactcatgaatacgccatccgaatgagagggccgtatcatataacccaacaaccaacgcaaagaagcacaccgcaaaatagagagagagaattggcgagagacacaatggggacatggatgagaggcaaaaatgagaaggggaaacagttatgtaccacaattgtagccacagaaaacgttctatgcgacagacggcaacgacgcgacacttatcacagatattccatgacacaccacgtatgtgggtgccaagtgggcaccaattgtacacgggagtgagaaggcacacccacaagcaggcaccacatatgtgtccacaatttacaacagtaggagaatagtacccacttaacgtcatgaccactatccaatcgagacgacaccctatgtaggacagagaacaccacccagcagcacacagagcgacccatatgactacggaaaccatttacaatcatgaggtgcacattaatcactccagcaaaccaccaccacattggagcgccatatgagcgcacatatttaacacaaaacaatgcgagttacgaagcgaaagtttgggtccaacattggggacacccagatttacagaacaggagaaacacccagacaaacacaagagtgcgggcaccccaaaagtgaggaatgatgagacaaacggctcacacccaccattataatacccacgcgacaccatatatgggagcaacaccaacatcatacgactcgcaagtcttgggggcatcacgacacaaaaaattaactcccacgcacaatacaacttgagtgaacaaggacaactcaattcaccacgagtggagtacacaccacagcacccacaacgacttatagggggcagacaat
